United States Patent Application Publication US 2026/0240980 A1 - sequence listing, part 5

SEQ ID NO: 29281 - protein, 466 aa, synthetic construct; identical to SEQ ID NO: 29261
  REGION 1..466: note = neuraminidase__InfluenzaB__AGX17910

SEQ ID NO: 29282 - protein, 466 aa, synthetic construct; identical to SEQ ID NO: 29261
  REGION 1..466: note = neuraminidase__InfluenzaB__AGX17921

SEQ ID NO: 29283 - protein, 466 aa, synthetic construct; identical to SEQ ID NO: 28888
  REGION 1..466: note = neuraminidase__InfluenzaB__AGX17932

SEQ ID NO: 29284 - protein, 466 aa, synthetic construct
  REGION 1..466: note = neuraminidase__InfluenzaB__AGX17943
MLPSTIQTLTLFLTSGGVLLSLYVSASLSYLLYSDILLKFPPTEITAPTMPLDCANASNVQAVNRSATKGVTLLLPEPEWTYPRLSCPGSTFQKALLISPHRFGETKGNSAPLIIREPFIACGPKECKHFALTHYAAQPGGYYNGTRGDRNKLRHLISVRLGKIPTVENSIFHMAAWSGSACHDGKEWTYIGVDGPDNNALLKIKYGEAYTDTYHSYANNILRTQESACNCIGGNCYLMITDGSASGVSECRFLKIREGRIIKEIFPTGRVKHTEECTCGFASNKTIECACRDNSYTAKRPFVKLNVETDTAEIRLMCTETYLDTPRPDDGSITGPCESNGDKGSGGIKGGFVHQRMASKIGRWYSRTMSKTKRMGMGLYVKYDGDPWADSDALAFSGVMVSMEEPGWYSFGFEIKDKKCDVPCIGIEMVHDGGKETWHSAATAIYCLMGSGQLLWDTVTGVNMAL

SEQ ID NO: 29285 - protein, 466 aa, synthetic construct; identical to SEQ ID NO: 29254
  REGION 1..466: note = neuraminidase__InfluenzaB__AGX17954

SEQ ID NO: 29286 - protein, 466 aa, synthetic construct
  REGION 1..466: note = neuraminidase__InfluenzaB__AGX17976
MLPSTIQTLTLFLTSGGVLLSLYVSASLSYLLYSDILLKFSPTEITAPTMPLDCANASNVHAVNRSATKGVTPLLPEPEWTYPRLSCPGSTFQKALLISPHRFGETKGNSAPLIIREPFIACGPNECKHFALTHYAAQPGGYYNGTRGDRNKLRHLISVKLGKIPTVENSIFHMAAWSGSACHDGKEWTYIGVDGPDNNALLKIKYGEAYTDTYHSYANNILRTQESACNCIGGNCYLMITDGSASGVSECRFLKIREGRIIKEIFPTGRVKHTEECTCGFASNKTIECACRDNSYTAKRPFVKLNVETDTAEIRLMCTDTYLDTPRPDDGSITGPCESNGDKGSGGIKGGFVHQRMASKIGRWYSRTMSKTERMGMGLYVKYDGDPWADSDALAFSGVMVSMKEPGWYSFGFEIKDKKCDVPCIGIEMVHDGGKETWHSAATAIYCLMGSGQLLWDTVTGVDMAL

SEQ ID NO: 29287 - protein, 466 aa, synthetic construct
  REGION 1..466: note = neuraminidase__InfluenzaB__AGX17987
MLPSTIQTLTLFLTSGGVLLSLYVSVSLSYLLYSDILLKFPPTEITAPTMPLDCANASNVQAVNRSATKGVTLLLPEPEWTYPRLSCPGSTFQKALLISPHRFGETKGNSAPLIIREPFIACGPKECKHFALTHYAAQPGGYYNGTRGDRNKLRHLISVKLGKIPTVENSIFHMAAWSGSACHDGKEWTYIGVDGPDNNALLKIKYGEAYTDTYHSYANNILRTQESACNCIGGNCYLMITDGSASGVSECRFLKIREGRIIKEIFPTGRVKHTEECTCGFASNKTIECACRDNSYTAKRPFVKLNVETDTAEIRLMCTETYLDTPRPDDGSITGPCESNGDKGSGGIKGGFVHQRMASKIGRWYSRTMSKTKRMGMGLYVKYDGDPWADSDALAFSGVMVSMEEPGWYSFGFEIKDKKCDVPCIGIEMVHDGGKETWHSAATAIYCLMGSGQLLWDTVTGVNMAL

SEQ ID NO: 29288 - protein, 466 aa, synthetic construct; identical to SEQ ID NO: 29261
  REGION 1..466: note = neuraminidase__InfluenzaB__AGX17998

SEQ ID NO: 29289 - protein, 466 aa, synthetic construct; identical to SEQ ID NO: 29254
  REGION 1..466: note = neuraminidase__InfluenzaB__AGX18009

SEQ ID NO: 29290 - protein, 466 aa, synthetic construct; identical to SEQ ID NO: 29287
  REGION 1..466: note = neuraminidase__InfluenzaB__AGX18020

SEQ ID NO: 29291 - protein, 466 aa, synthetic construct; identical to SEQ ID NO: 29254
  REGION 1..466: note = neuraminidase__InfluenzaB__AGX18031

SEQ ID NO: 29292 - protein, 466 aa, synthetic construct
  REGION 1..466: note = neuraminidase__InfluenzaB__AGX18042
MLPSTIQTLTLFLTSGGVLLSLYVSASLSYLLYSDILLKFSPTEITAPTMPLNCANASNVQAVNRSATKGVTLLLPEPEWTYPRLSCPGSTFQKALLISPHRFGETKGNSAPLIIREPFIACGPNECKHFALTHYAAQPGGYYNGTRGDRNKLRHLISVKLGKIPTVENSIFHMAAWSGSACHDGKEWTYIGVDGPDNNALLKIKYGEAYTDTYHSYANNILRTQESACNCIGGNCYLMITDGSASGVSECRFLKIREGRIIKEIFPTGRVKHTEECTCGFASNKTIECACRDNSYTAKRPFVKLNVEIDTAEIRLMCTDTYLDTPRPDDGSITGPCESNGDKGSGGIKGGFVHQRMASKIGRWYSRTMSKTERMGMGLYVKYDGDPWADSDALAFSGVMVSMKEPGWYSFGFEIKDKKCDVPCIGIEMVHDGGKETWHSAATAIYCLMGSGQLLWDTVTGVDMAL

SEQ ID NO: 29293 - protein, 466 aa, synthetic construct; identical to SEQ ID NO: 29261
  REGION 1..466: note = neuraminidase__InfluenzaB__AGX18053

SEQ ID NO: 29294 - protein, 466 aa, synthetic construct; identical to SEQ ID NO: 29261
  REGION 1..466: note = neuraminidase__InfluenzaB__AGX18064

SEQ ID NO: 29295 - protein, 466 aa, synthetic construct
  REGION 1..466: note = neuraminidase__InfluenzaB__AGX18075
MLPSTIQTLTLFLTSGGVLLSLYVSASLSYLLYSDILLKFPPTEITAPTMPLDCANASNVQAVNRSATKGVTLLLPEPEWTYPRLSCPGSTFQKALLISPHRFGETKGNSAPLIIREPFIACGPKECKHFALTHYAAQPGGYYNGTRGDRNKLRHLISVKLGKIPTVENSIFHMAAWSGSSCHDGKEWTYIGVDGPDNNALLKIKYGEAYTDTYHSYANNILRTQESACNCIGGNCYLMITDGSASGVSECRFLKIREGRIIKEIFPTGRVKHTEECTCGFASNKTIECACRDNSYTAKRPFVKLNVETDTAEIRLMCTETYLDTPRPDDGSITGPCESNGDKGSGGIKGGFVHQRMASKIGRWYSRTMSKTKRMGMGLYVKYDGDPWADSDALAFSGVMVSMEEPGWYSFGFEIKDKKCDVPCIGIEMVHDGGKETWHSAATAIYCLMGSGQLLWDTVTGVNMAL

SEQ ID NO: 29296 - protein, 466 aa, synthetic construct; identical to SEQ ID NO: 28888
  REGION 1..466: note = neuraminidase__InfluenzaB__AGX18086

SEQ ID NO: 29297 - protein, 466 aa, synthetic construct; identical to SEQ ID NO: 28888
  REGION 1..466: note = neuraminidase__InfluenzaB__AGX18097

SEQ ID NO: 29298 - protein, 466 aa, synthetic construct; identical to SEQ ID NO: 28841
  REGION 1..466: note = neuraminidase__InfluenzaB__AGX18108

SEQ ID NO: 29299 - protein, 466 aa, synthetic construct
  REGION 1..466: note = neuraminidase__InfluenzaB__AGX18119
MLPSTIQTLTLFLTSGGVLLSLYVSASLSYLLYSDILLKFSPTEITAPTMPLDCANTSNVQAVNRSATKGVTLLLPEPEWTYPRLSCPGSTFQKALLISPHRFGETKGNSAPLIIREPFIACGPNECKHFALTHYAAQPGGYYNGTRGDRNKLRHLISVKLGKIPTVENSIFHMAAWSGSACHDGKEWTYIGVDGPDNNALLKIKYGEAYTDTYHSYANNILRTQESACNCIGGNCYLMITDGSASGVSECRFLKIREGRIIKEIFPTGRVKHTEECTCGFASNKTIECACRDNSYTAKRPFVKLNMETDTAEIKLMCTDTYLDTPRPDDGSITGPCESNGDKGSGGIKGGFVHQRMASKIGRWYSRTMSKTERMGMGLYVKYDGDPWADSDALAFSGVMVSMKEPGWYSFGFEIKDKKCDVPCIGIEMVHDGGKETWHSAATAIYCLMGSGQLLWDTVTGVDMAL

SEQ ID NO: 29300 - protein, 466 aa, synthetic construct
  REGION 1..466: note = neuraminidase__InfluenzaB__AGX18130
MLPSTIQTLTLFLTSGGVLLSLYVSASLSYLLYSDILLKFSPTEITAPTMPLDCANASNVQAVNRSATKGVTLLLPEPEWTYPRLSCPGSTFQKALLISPHRFGETKGNSAPLIIREPFIACGPNECKHFALTHYAAQPGGYYNGTRGDRNKLRHLISVKLGKIPTVENSIFHMAAWSGSACHDGKEWTYIGVDGPDNNALLKIKYGEAYTDTYHSYANNILRTQESACNCIGGNCYLMITDGSASGVSECRFLKIREGRIIKEIFPTGRVKHTEECTCGFASNKTIECACRDNSYTAKRPFVKLNVEIDTAEIRLMCTDTYLDTPRPDDGSITGPCESNGDKGSGGIKGGFVHQRMASKIGRWYSRTMSRTERMGMGLYVKYDGDPWADSDALAFSGVMVSMKEPGWYSFGFEIKDKKCDVPCIGIEMVHDGGKETWHSAATAIYCLMGSGQLLWDTVTGVDMAL

SEQ ID NO: 29301 - protein, 466 aa, synthetic construct
  REGION 1..466: note = neuraminidase__InfluenzaB__AGX18141
MLPSTIQTLTLFLTSGGVLLSLYVSASLSYLLYSDILLKFPSTEITAPTMPLDCANASNVQAVNRSATKGMTLLLPEPEWTYPRLSCPGSTFQKALLISPHRFGETKGNSAPLIIREPFIACGPKECKHFALTHYAAQPGGYYNGTRGDRNKLRHLISVKLGKIPTVENSIFHMAAWSGSACHDGKEWTYIGVDGPDNNALLKIKYGEAYTDTYHSYANNILRTQESACNCIGGNCYLMITDGSASGVSECRFLKIREGRIIKEIFPTGRIKHTEECTCGFASNKTIECACRDNSYTAKRPFVKLNVETDTAEIRLMCTETYLDTPRPDDGSITGPCESNGDKGSGGIKGGFVHQRMASKIGRWYSRTMSKTERMGMGLYVKYDGDPWAESDALAFSGVMVSMEEPGWYSFGFEIKDKKCDVPCIGIEMVHDGGKETWHSAATAIYCLMGSGQLLWDTVTGVNMAL

SEQ ID NO: 29302 - protein, 466 aa, synthetic construct; identical to SEQ ID NO: 28888
  REGION 1..466: note = neuraminidase__InfluenzaB__AGX18152

SEQ ID NO: 29303 - protein, 466 aa, synthetic construct
  REGION 1..466: note = neuraminidase__InfluenzaB__AGX18163
MLPSTIQTLTLFLTSGGVLLSLYVSASLSYLLYSDILLKFPSTEITAPTMPLDCANASNVQAVNRSATKGVTLLLPEPEWTYPRLSCPGSTFQKALLISPHRFGETKGNSAPLIIREPFIACGPKECKHFALTHYAAQPGGYYNGKRGDRNKLRHLISVKLGKIPTVENSIFHMAAWSGSACHDGKEWTYIGVDGPDNNALLKIKYGEAYTDTYHSYANNILRTQESACNCIGGNCYLMITDGSASGVSECRFLKIREGRIIKEIFPTGRIKHTEECTCGFASNKTIECACRDNSYTAKRPFVKLNVETDTAEIRLMCTETYLDTPRPDDGSITGPCESNGDKGSGGIKGGFVHQRMASKIGRWYSRTMSKTERMGMGLYVKYDGDPWADSDALAFSGVMVSMEEPGWYSFGFEIKDKKCDVPCIGIEMVHDGGKETWHSAATAIYCLMGSGQLLWDTVTGVNMAL

SEQ ID NO: 29304 - protein, 466 aa, synthetic construct; identical to SEQ ID NO: 29254
  REGION 1..466: note = neuraminidase__InfluenzaB__AGX18174

SEQ ID NO: 29305 - protein, 466 aa, synthetic construct; identical to SEQ ID NO: 28888
  REGION 1..466: note = neuraminidase__InfluenzaB__AGX18185

SEQ ID NO: 29306 - protein, 466 aa, synthetic construct; identical to SEQ ID NO: 28841
  REGION 1..466: note = neuraminidase__InfluenzaB__AGX18196

SEQ ID NO: 29307 - protein, 466 aa, synthetic construct
  REGION 1..466: note = neuraminidase__InfluenzaB__AGX18207
MLPSTIQTLTLFLTSGGVLLSLYVSASLSYLLYSDILLKFPPTEITAPTMPLDCANASNVQAVNRSATKGVTLLLPEPEWTYPRLSCPGSTFQKALLISPHRFGETKGNSAPLIIREPFIACGPKECKHFALTHYAAQPGGYYNGTRGDRNKLRHLISVKLGKIPTVETSIFHMAAWSGSACHDGKEWTYIGVDGPDNNALLKIKYGEAYTDTYHSYANNILRTQESACNCIGGNCYLMITDGSASGVSECRFLKIREGRIIKEIFPTGRVKHTEECTCGFASNKTIECACRDNSYTAKRPFVKLNVETDTAEIRLMCTETYLDTPRPDDGSITGPCESNGDKGSGGIKGGFVHQRMASKIGRWYSRTMSKTKRMGMGLYVKYDGDPWADSDALAFSGVMVSMEEPGWYSFGFEIKDKKCDVPCIGIEMVHDGGKETWHSAATAIYCLMGSGQLLWDTVTGVNMAL

SEQ ID NO: 29308 - protein, 466 aa, synthetic construct
  REGION 1..466: note = neuraminidase__InfluenzaB__AGX18218
MLPSTIQTLTLFLTSGGVLLSLYVSASLSYLLYSDILLKLSPTEITAPTMPLDCANTSNVQAVNRSATKGVTLLLPEPEWTYPRLSCPGSTFQKALLISPHRFGETKGNSAPLIIREPFIACGPNECKHFALTHYAAQPGGYYNRTRGDRNKLRHLISVKLGKIPTVENSIFHMAAWSGSACHDGKEWTYIGVDGPDNNALLKIKYGEAYTDTYHSYANNILRTQESACNCIGGNCYLMITDGSASGVSECRFLKIREGRIIKEIFPTGRVKHTEECTCGFASNKTIECACRDNSYTAKRPFVKLNMETDTAEIRLMCTDTYLDTPRPDDGSITGPCESNGDKGSGGIKGGFVHQRMASKIGRWYSRTMSKTERMGMGLYVKYDGDPWADSDALAFSGVMVSMKEPGWYSFGFEIKDKKCDVPCIGIEMVHDGGKETWHSAATAIYCLMGSGQLLWDTVTGVDMAL

SEQ ID NO: 29309 - protein, 466 aa, synthetic construct; identical to SEQ ID NO: 29261
  REGION 1..466: note = neuraminidase__InfluenzaB__AGX18229

SEQ ID NO: 29310 - protein, 466 aa, synthetic construct
  REGION 1..466: note = neuraminidase__InfluenzaB__AGX18240
MLPSTIQTLTLFLTSGGVLLSLYVSASLSYLLYSDILLKFSPTEITAPTMPLDCANASNVQTVNRSATKGVTLLLPEPEWTYPRLSCPGSTFQKALLISPHRFGETKGNSAPLIIREPFIACGPNECKHFALTHYAAQPGGYYNGTRGDRNKLRHLISVKLGKIPTVENSIFHMAAWSGSACHDGKEWTYIGVDGPDNNALLKIKYGEAYTDTYHSYANNILRTQESACNCIGGNCYLMITDGSASGVSECRFLKIREGRIIKEIFPTGRVKHTEECTCGFASNKTIECACRDNSYTAKRPFVKLNVEIDTAEIRLMCTDTYLDTPRPDDGSITGPCESNGDKGSGGIKGGFVHQRMASKIGRWYSRTMSKTERMGMGLYVKYDGDPWADSDALAFSGVMVSMKEPGWYSFGFEIKDKKCDVPCIGIEMVHDGGKETWHSAATAIYCLMGSGQLLWDTVTGVDMAL

SEQ ID NO: 29311 - protein, 466 aa, synthetic construct; identical to SEQ ID NO: 29254
  REGION 1..466: note = neuraminidase__InfluenzaB__AGX18251

SEQ ID NO: 29312 - protein, 466 aa, synthetic construct
  REGION 1..466: note = neuraminidase__InfluenzaB__AGX18262
MLPSTIQTLTLFLTSGGVLLSLYVSASLSYLLYSNILLKFSPTEITAPTMPLDCANASNVQAVNRSATKGVTLLLPEPEWTYPRLSCPGSTFQKALLISPHRFGETKGNSAPLIIREPFIACGPNECKHFALTHYAAQPGGYYNGTRGDRNKLRHLISVKLGKIPTVENSIFHMAAWSGSACHDGKEWTYIGVDGPDNNALLKIKYGEAYTDTYHSYANNILRTQESACNCIGGNCYLMITDGSASGVSECRFLKIREGRIIKEIFPTGRVKHTEECTCGFASNKTIECACRDNSYTAKRPFVKLNVETDTAEIRLMCTDTYLDTPRPDDGSITGPCESNGDKGSGGIKGGFVHQRMASKVGRWYSRTMSKTERMGMGLYVKYDGDPWADSDALAFSGVMVSMKEPGWYSFGFEIKDKKCDVPCIGIEMVHDGGKETWHSAATAIYCLMGSGQLLWDTVTGVDMAL

SEQ ID NO: 29313 - protein, 466 aa, synthetic construct; identical to SEQ ID NO: 29261
  REGION 1..466: note = neuraminidase__InfluenzaB__AGX18273

SEQ ID NO: 29314 - protein, 466 aa, synthetic construct; identical to SEQ ID NO: 29286
  REGION 1..466: note = neuraminidase__InfluenzaB__AGX18284

SEQ ID NO: 29315 - protein, 466 aa, synthetic construct; identical to SEQ ID NO: 29261
  REGION 1..466: note = neuraminidase__InfluenzaB__AGX18295

SEQ ID NO: 29316 - protein, 466 aa, synthetic construct; identical to SEQ ID NO: 28888
  REGION 1..466: note = neuraminidase__InfluenzaB__AGX18306

SEQ ID NO: 29317 - protein, 466 aa, synthetic construct
  REGION 1..466: note = neuraminidase__InfluenzaB__AGX18317
MLPSTIQTLTLFLTSGGVLLSLYVSASLSYLLYSDILLKFPSTEITAPTMPLDCANASNVQAVNRSATKGVTLLLPEPEWTYPRLSCPGSTFQKALLISPHRFGETKGNSAPLIIREPFIACGPKECKHFALTHYAAQPGGYYNETRGDRNKLRHLISVKLGKIPTVENSIFHMAAWSGSACHDGKEWTYIGVDGPDNNALLKIKYGEAYTDTYHSYANNILRTQESACNCIGGNCYLMITDGSASGVSECRFLKIREGRIIKEIFPTGRIKHTEECTCGFASNKTIECACRDNSYTAKRPFVKLNVETDTAEIRLMCTETYLDTPRPDDGSITGPCESNGDKGSGGIKGGFVHQRMASKIGRWYSRTMSKTKRMGMGLYVKYDGDPWADSDALAFSGVMVSMEEPGWYSFGFEIKDKKCDVPCIGIEMVHDGGKETWHSAATAIYCLMGSGQLLWDTVTGVNMAL

SEQ ID NO: 29318 - protein, 466 aa, synthetic construct; identical to SEQ ID NO: 29261
  REGION 1..466: note = neuraminidase__InfluenzaB__AGX18328

SEQ ID NO: 29319 - protein, 466 aa, synthetic construct
  REGION 1..466: note = neuraminidase__InfluenzaB__AGX18339
MLPSTIQTLTLFLTSGGVLLSLYVSASLSYLLYSDILLKFSPTEITAPTMPLDCANASNVQAVNRSATKGVTLLLPEPEWTYPRLSCPGSTFQKALLISPHRFGETKGNSAPLIIREPFIACGPNECKHFALTHYAAQPGGYYNGTRGDRNKLRHLISVKLGKIPTVENSIFHMAAWSGSACHDGKEWTYIGVDGPDNNALLKIKYGEAYTDTYHSYANNILRTQESACNCIGGNCYLMITDGSASGVSECRFLKIREGRIIKEIFPTGRVKHTEECTCGFASNKTIECACRDNSYTAKRPFVKLNVETDTAEIRLMCTDTYLDTPRPDDGSITGPCESNGDKGSGGIKGGFVHQRMASKVGRWYSRTMSKTERMGMGLYVKYDGDPWADSDALAFGGVMVSMKEPGWYSFGFEIKDKKCDVPCIGIEMVHDGGKETWHSAATAIYCLMGSGQLLWDTVTGVDMAL

SEQ ID NO: 29320 - protein, 466 aa, synthetic construct
  REGION 1..466: note = neuraminidase__InfluenzaB__AGX18350
MLPSTIQTLTLFLTSGGVLLSLYVSASLSYLLYSDILLKFSPTEITAPTMPLDCANASNVQAMNRSATKGVTLLLPEPEWTYPRLSCPGSTFQKALLISPHRFGETKGNSAPLIIREPFIACGPNECKHFALTHYAAQPGGYYNGTRGDRNKLRHLISVKLGKIPTVENSIFHMAAWSGSACHDGKEWTYIGVDGPDNNALLKIKYGEAYTDTYHSYANNILRTQESACNCIGGNCYLMITDGSASGVSECRFLKIREGRIIKEIFPTGRVKHTEECTCGFASNKTIECACRDNSYTAKRPFVKLNVEIDTAEIRLMCTDTYLDTPRPDDGSITGPCESNGDKGSGGIKGGFVHQRMASKIGRWYSRTMSKTERMGMGLYVKYDGDPWADSDALAFSGVMVSMKEPGWYSFGFEIKDKKCDVPCIGIEMVHDGGKETWHSAATAIYCLMGSGQLLWDTVTGVDMAL

SEQ ID NO: 29321 - protein, 466 aa, synthetic construct; identical to SEQ ID NO: 29286
  REGION 1..466: note = neuraminidase__InfluenzaB__AGX18361

SEQ ID NO: 29322 - protein, 466 aa, synthetic construct
  REGION 1..466: note = neuraminidase__InfluenzaB__AGX18383
MLPSTIQTLTLFLTSGGVLLSLYVSASLSYLLYSDILLKFSPTEITAPTMPLDCANTSNVQAVNRSATKGVTLLLPEPEWTYPRLSCPGSTFQKALLISPHRFGETKGNSAPLIIREPFIACGPNECKHFALTHYAAQPGGYYNGTRGDRNKLRHLISVKLGKIPTVENSIFHMAAWSGSACHDGKEWTYIGVDGPDNNALLKIKYGEAYTDTYHSYANNILRTQESACNCIGGNCYLMITDGSASGVSECRFLKIREGRIIKEIFPTGRVKHTEECTCGFASNKTIECACRDNSYTAKRPFVKLNMETDTAEIRLMCTDTYLDTPRPDDGSITGPCESNGDKGSGGIKGGFVHQRMASKIGRWYSRTMSKTERMGMGLYVKYDGDPWADSDALVFSGVMVSMKEPGWYSFGFEIKDKKCDVPCIGIEMVHGGGKETWHSAATAIYCLMGSGQLLWDTVTGVDMAL

SEQ ID NO: 29323 - protein, 466 aa, synthetic construct; identical to SEQ ID NO: 28888
  REGION 1..466: note = neuraminidase__InfluenzaB__AGX18394

SEQ ID NO: 29324 - protein, 466 aa, synthetic construct
  REGION 1..466: note = neuraminidase__InfluenzaB__AGX18405
MLPSTIQTLTLFLTSGGVLLSLYVSASLSYLLYSDILLKFSPTEITAPTMPLDCANASNVHAVNRSATKGVTPLLPEPEWTYPRLSCPGSTFQKALLISPHRFGETKGNSAPLIIREPFIACGPNECKHFALTHYAAQPGGYYNGTRGDRNKLRHLISVKLGKIPTVENSIFHMAAWSGSACHDGKEWTYIGVDGPDNNALLKIKYGEAYTDTYHSYANNILRTQESACNCIGGNCYLMITDGSASGVSECRFLKIREGRIIKEIFPTGRVKHTEECTCGFASNKTIECVCRDNSYTAKRPFVKLNVETDTAEIRLMCTDTYLDTPRPDDGSITGPCESNGDKGSGGIKGGFVHQRMASKIGRWYSRTMSKTERMGMGLYVKYDGDPWADSDALAFSGVMVSMKEPGWYSFGFEIKDKKCDVPCIGIEMVHDGGKETWHSAATAIYCLMGSGQLLWDTVTGVDMAL

SEQ ID NO: 29325 - protein, 466 aa, synthetic construct
  REGION 1..466: note = neuraminidase__InfluenzaB__AGX18416
MLPSTIQTLTLFLTSGGVLLSLYVSASLSYLLYSDILLKFSPTEITAPTMPLDCANASNVQAVNRSATKGVTLLLPEPEWTYPRLSCPGSTFQKALLISPHRFGETKGNSAPLIIREPFIACGPNECKHFALTHYAAQPGGYYNGTRGDRNKLRHLISVKLGKIPTVENSIFHMAAWSGSACHDGKEWTYIGVDGPDNNALLKIKYGEAYTDTYHSYANNILRTQESACNCIGGNCYLMITDGSASGVSECRFLKIREGRIIKEIFPTGRVKHTEECTCGFASNKTIECACRDNSYTAKRPFVKLNVEIDTAEIRLMCTDTYLDTPRPDDGSITGSCESNGDKGSGGIKGGFVHQRMASKIGRWYSRTMSKTERMGMGLYVKYDGDPWADSDALAFSGVMVSMKEPGWYSFGFEIKDKKCDVPCIGIEMVHDGGKETWHSAATAIYCLMGSGQLLWDTVTGVDMAL

SEQ ID NO: 29326 - protein, 466 aa, synthetic construct
  REGION 1..466: note = neuraminidase__InfluenzaB__AGX18428
MLPSTIQTLTLFLTSGGVLLSLYVSASLSYLLYSDILLKFSTTEITAPTMPLDCANASNVQAVNRSATKGVTLLLPEPEWTYPRLSCPGSTFQKALLISPHRFGETKGNSAPLIIREPFIACGPKECKHFALTHYAAQPGGYYNGTREDRNKLRHLISVKLGKIPTVENSIFHMAAWSGSACHDGKEWTYIGVDGPDSNALLKIKYGEAYTDTYHSYANNILRTQESACNCIGGNCYLMITDGSASGISECRFLKIREGRIIKEIFPTGRVKHTEECTCGFASNKTIECACRDNSYTAKRPFVKLNVETDTAEIRLMCTETYLDTPRPDDGSITGPCESNGNKGSGGIKGGFVHQRMASKIGRWYSRTMSKTKRMGMGLYVKYDGDPWIDSDALALSGVMVSMEEPGWYSFGFEIKDKKCDVPCIGIEMVHDGGKETWHSAATAIYCLMGSGQLLWDTVTGVDMAL

SEQ ID NO: 29327 - protein, 466 aa, synthetic construct
  REGION 1..466: note = neuraminidase__InfluenzaB__AGX18439
MLPSTIQTLTLFLTSGGVLLSLYVSASLSYLLYSDILLKFSPTEITAPTMPLDCANASNVQAVNRSATKGVTLLLPEPEWTYPRLSCPGSTFQKALLISPHRFGETKGNSAPLIIREPFIACGPNECKHFALTHYAAQPGGYYNGTRGDRNKLRHLISVKLGKIPTVENSIFHMAAWSGSACHDGKEWTYIGVDGPDNNALLKIKYGEAYTDTYHSYANNILRTQESACNCIGGNCYLMITDGSASGVSECRFLKIREGRIIKEIFPTGRVKHTEECTCGFASNKTIECACRDNSYTAKRPFVKLNVEIDTAEIRLMCTDTYLDTPRPDDGSITGPCESNGDKGSGGIKGGFVHQRMASKIGRWYSRTMSKTERMGMGLYVKYDGDPWADSDALAFSGLMVSMKEPGWYSFGFEIKDKKCDVPCIGIEMVHDGGKETWHSAATAIYCLMGSGQLLWDTVTGVDMAL

SEQ ID NO: 29328 - protein, 466 aa, synthetic construct
  REGION 1..466: note = neuraminidase__InfluenzaB__AGX18450
MLPSTIQTLTLFLTSGGVLLSLYVSASLSYLLYSDILLKFSPTEITASTMPLDCANASNVQAVNRSATKGVTLLLPEPEWTYPRLSCPGSTFQKALLISPHRFGETKGNSAPLIIREPFIACGPNECKHFALTHYAAQPGGYYNGTRGDRNKLRHLISVKLGKIPTVENSIFHMAAWSGSACHDGKEWTYIGVDGPDNNALLKIKYGEAYTDTYHSYANNILRTQESACNCIGGNCYLMITDGSASGVSECRFLKIREGRIIKEIFPTGRVKHTEECTCGFASNKTIECACRDNSYTAKRPFVKLNVEIDTAEIRLMCTDTYLDTPRPDDGSITGPCESNGDKGSGGIKGGFVHQRMASKIGRWYSRTMSKTERMGMGLYVKYDGDPWADSDALAFSGVMVSMKEPGWYSFGFEIKDKKCDVPCIGIEMVHDGGKETWHSAATAIYCLMGSGQLLWDTVTGVDMAL

SEQ ID NO: 29329 - protein, 466 aa, synthetic construct; identical to SEQ ID NO: 28888
  REGION 1..466: note = neuraminidase__InfluenzaB__AGX18461

SEQ ID NO: 29330 - protein, 466 aa, synthetic construct
  REGION 1..466: note = neuraminidase__InfluenzaB__AGX18472
MLPSTIQTLTLFLTSGGVLLSLYVSASLSYLLYSDILLKFSPTEITAPTMPLDCANASNVHAVNHSATKGVTPLLPEPEWTYPRLSCPGSTFQKALLISPHRFGETKGNSAPLIIREPFIACGPNECKHFALTHYAAQPGGYYNGTRGDRNKLRHLISVKLGKIPTVENSIFHMAAWSGSACHDGKEWTYIGVDGPDNNALLKIKYGEAYTDTYHSYANNILRTQESACNCIGGNCYLMITDGSASGVSECRFLKIREGRIIKEIFPTGRVKHTEECTCGFASNKTIECACRDNSYTAKRPFVKLNVETDTAEIRLMCTDTYLDTPRPDDGSITGPCESNGDKGSGGIKGGFVHQRMASKIGRWYSRTMSKTERMGMGLYVKYDGDPWADSDALAFSGVMVSMKEPGWYSFGFEIKDKKCDVPCIGIEMVHDGGKETWHSAATAIYCLMGSGQLLWDTVTGVDMAL

SEQ ID NO: 29331 - protein, 466 aa, synthetic construct; identical to SEQ ID NO: 28888
  REGION 1..466: note = neuraminidase__InfluenzaB__AGX18483

SEQ ID NO: 29332 - protein, 466 aa, synthetic construct; identical to SEQ ID NO: 28635
  REGION 1..466: note = neuraminidase__InfluenzaB__AGX18494

SEQ ID NO: 29333 - protein, 466 aa, synthetic construct
  REGION 1..466: note = neuraminidase__InfluenzaB__AGX18505
MLPSTIQTLTLFLTSGGVLLSLYVSASLSYLLYSDILLKFSPTEITAPTMPLDCANASNVQAVNRSATKGVTLLLPEPEWTYPRLSCPGSTFQKALLISPHRFGETKGNSAPLIIREPFIACGPNECKHFALTHYAAQPGGYYNGTRGDRNKLRHLISVKLGKIPTVENSIFHMAAWSGSACHDGKEWTYIGVDGPDNNALLKIKYGEAYTDTYHSYANKILRTQESACNCIGGNCYLMITDGSASGVSECRFLKIREGRIIKEIFPTGRVKHTEECTCGFASNKTIECACRDNSYTAKRPFVKLNVETDTAEIRLMCTDTYLDTPRPDDGSITGPCESNGDKGSGGIKGGFVHQRMASKIGRWYSRTISKTERMGMGLYVKYDGDPWADSDALAFSGVMVSMKEPGWYSFGFEIKDKKCDVPCIGIEMVHDGGKETWHSAATAIYCLMGSGQLLWDTVTGVDMAL

SEQ ID NO: 29334 - protein, 466 aa, synthetic construct
  REGION 1..466: note = neuraminidase__InfluenzaB__AGX18516
MLPSTIQTLTLFLTSGGVLLSLYVSASLSYLLYSDILLKFSPTEITAPTMPLDCANASNVQAVNRSATKGVTLLLPEPEWTYPRLSCPGSTFQKALLISPHRFGETKGNSAPLIIREPFIACGPNECKHFALTHYAAQPGGYYNGTRGDRNKLRHLISVKLGKIPTVENSIFHMAAWSGSACHDGKEWTYIGVDGPDNNALLKIKYGEAYTDTYHSYANKILRTQESACNCIGGNCYLMITDGSASGVSECRFLKIREGRIIKEIFPTGRVKHTEECTCGFASNKTIECACRDNSYTAKRPFVKLNVETDTAEIRLMCTDTYLDTPRPDDGSITGPCESNGDKGSGGIKGGFVHQRMASKIGRWYSRTISKTERMGMGLYVKYDGDPWADSDALAFSGVMVSMKEPGWYSFGFEIKDKKCDVPCIGIEMVHGGGKETWHSAATAIYCLMGSGQLLWDTVTGVDMAL

SEQ ID NO: 29335 - protein, 466 aa, synthetic construct; identical to SEQ ID NO: 28635
  REGION 1..466: note = neuraminidase__InfluenzaB__AGX18527

SEQ ID NO: 29336 - protein, 466 aa, synthetic construct; identical to SEQ ID NO: 28635
  REGION 1..466: note = neuraminidase__InfluenzaB__AGX18538

SEQ ID NO: 29337 - protein, 466 aa, synthetic construct; identical to SEQ ID NO: 28635
  REGION 1..466: note = neuraminidase__InfluenzaB__AGX18549

SEQ ID NO: 29338 - protein, 466 aa, synthetic construct; identical to SEQ ID NO: 28635
  REGION 1..466: note = neuraminidase__InfluenzaB__AGX18560

SEQ ID NO: 29339 - protein, 466 aa, synthetic construct; identical to SEQ ID NO: 28635
  REGION 1..466: note = neuraminidase__InfluenzaB__AGX18571

SEQ ID NO: 29340 - protein, 466 aa, synthetic construct
  REGION 1..466: note = neuraminidase__InfluenzaB__AGX18582
MLPSTIQTLTLFLTSGGVLLSLYVLASLSYLLYSDILLKFSPTEITAPTMPLDCANASNVHAVNRSATKGVTLLLPEPEWAYPRLSCPGSTFQKALLISPHRFGETKGNSAPLIIREPFIACGPNECKHFALTHYAAQPGGYYNGTRGDRNKLRHLISVKLGKIPTVENSIFHMAAWSGSACHDGKEWTYIGVDGPDNNALLKIKYGEAYTDTYHSYANNILRTQESACNCIGGNCYLMITDGSASGVSECRFLKIREGRIIKEIFPTGRVKHTEECTCGFASNKTIECACRDNSYTAKRPFVKLNVETDTAEIRLMCTDTYLDTPRPDDGSITGPCESNGDKGSGGIKGGFVHQRMASKIGRWYSRTMSKTERMGMGLYVKYDGDPWADSDALAFSGVMVSMKEPGWYSFGFEIKDKKCDVPCIGIEMVHDGGKETWHSAATAIYCLMGSGQLLWDTVTGVDMAL

SEQ ID NO: 29341 - protein, 466 aa, synthetic construct; identical to SEQ ID NO: 28635
  REGION 1..466: note = neuraminidase__InfluenzaB__AGX18593

SEQ ID NO: 29342 - protein, 466 aa, synthetic construct; identical to SEQ ID NO: 28635
  REGION 1..466: note = neuraminidase__InfluenzaB__AGX18604

SEQ ID NO: 29343 - protein, 466 aa, synthetic construct
  REGION 1..466: note = neuraminidase__InfluenzaB__AGX18615
MLPSTIQTLTLFLTSGGVLLSLYVSASLSYLLYSDILLKFSPTEITAPTMPLDCANASNVQAVNRSATKGVTLLLPEPEWTYPRLSCPGSTFQKALLISPHRFGETKGNSAPLIIREPFIACGPNECKHFALTHYAAQPGGYYNGTRGDRNKLRHLISVKLGKIPTVENSIFHMAAWSGSACHDGKEWTYIGVDGPDNNALLKIKYGEAYTDTYHSYANKILRTQESACNCIGGNCYLMITDGSASGVSECRFLKIREGRIIKEIFPTGRVKHTEECTCGFASNKTIECACRDNSYTAKRPFVKLNVETDTAEIRLMCTDTYLDTPRPDDGSITGPCESNGNKGSGGIKGGFVHQRMASKIGRWYSRTMSKTERMGMGLYVKYDGDPWADSDALAFSGVMVSMKEPGWYSFGFEIKDKKCDVPCIGIEMVHDGGKETWHSAATAIYCLMGSGQLLWDTVTGVDMAL

SEQ ID NO: 29344 - protein, 466 aa, synthetic construct
  REGION 1..466: note = neuraminidase__InfluenzaB__AGX18626
MLPSTIQTLTLFLTSGGVLLSLYVSASLSYLLYSDILLKFSPTEITAPTMPLDCANASNVQAVNRSATKGVTLLLPEPEWTYPRLSCPGSTFQKALLISPHRFGETKGNSAPLILREPFIACGPNECKHFALTHYAAQPGGYYNGTRGDRNKLRHLISVKLGKIPTVENSIFHMAAWSGSACHDGKEWTYIGVDGPDNNALLKIKYGEAYTDTYHSYANKILRTQESACNCIGGNCYLMITDGSASGVSECRFLKIREGRIIKEIFPTGRVKHTEECTCGFASNKTIECACRDNSYTAKRPFVKLNVETDTAEIRLMCTDTYLDTPRPDDGSITGPCESNGDKGSGGIKGGFVHQRMASKIGRWYSRTMSKTERMGMGLYVKYDGDPWADSDALAFSGVMVSMKEPGWYSFGFEIKDKKCDVPCIGIEMVHDGGKETWHSAATAIYCLMGSGQLLWDTVTGVDMAL

SEQ ID NO: 29345 - protein, 466 aa, synthetic construct; identical to SEQ ID NO: 28635
  REGION 1..466: note = neuraminidase__InfluenzaB__AGX18637

SEQ ID NO: 29346 - protein, 466 aa, synthetic construct; identical to SEQ ID NO: 28635
  REGION 1..466: note = neuraminidase__InfluenzaB__AGX18648

SEQ ID NO: 29347 - protein, 466 aa, synthetic construct; identical to SEQ ID NO: 28635
  REGION 1..466: note = neuraminidase__InfluenzaB__AGX18659

SEQ ID NO: 29348 - protein, 466 aa, synthetic construct; identical to SEQ ID NO: 28635
  REGION 1..466: note = neuraminidase__InfluenzaB__AGX18670

SEQ ID NO: 29349 - protein, 466 aa, synthetic construct
  REGION 1..466: note = neuraminidase__InfluenzaB__AGX18681
MLPSTIQTLTLFLTSGGVLLSLYVSASLSYLLYSDILLKFSPTEITAPTMPLDCANASNVQAVNRSATKGVTLLLPEPEWTYPRLSCPGSTFQKALLISPHRFGETKGNSAPLIVREPFIACGPNECKHFALTHYAAQPGGYYNGTRGDRNKLRHLISVKLGKIPTVENSIFHMAAWSGSACHDGKEWTYIGVDGPDNNALLKIKYGEAYTDTYHSYANKILRTQESACNCIGGNCYLMITDGSASGVSECRFLKIREGRIIKEIFPTGRVKHTEECTCGFASNKTIECACRDNSYTAKRPFVKLNVETDTAEIRLMCTDTYLDTPRPDDGSITGPCESNGDKGSGGIKGGFVHQRMASKIGRWYSRTMSKTERMGMGLYVKYDGDPWADSDALAFSGVMVSMKEPGWYSFGFEIKDKKCDVPCIGIEMVHDGGKETWHSAATAIYCLMGSGQLLWDTVTGVDMAL

SEQ ID NO: 29350 - protein, 466 aa, synthetic construct; identical to SEQ ID NO: 28635
  REGION 1..466: note = neuraminidase__InfluenzaB__AGX18692

SEQ ID NO: 29351 - protein, 466 aa, synthetic construct
  REGION 1..466: note = neuraminidase__InfluenzaB__AGX18703
MLPSTIQTLTLFLTSGGVLLSLYVSASLSYLLYSDILLKFPSTEITAPTMPLDCANASNVQAVNLSATKGVTLLLPEPEWTYPRLSCPGSTFQKALLISPHRFGETKGNSAPLIIREPFIACGPKECKHFALTHYAAQPGGYYNGTRGDRNKLRHLISVKLGKIPTVENSIFHMAAWSGSACHDGKEWTYIGVDGPDNNALLKIKYGEAYTDTYHSYANNILRTQESACNCIGGNCYLMITDGSASGVSECRFLKIREGRIIKEIFPTGRIKHTEECTCGFASNKTIECACRDNSYTAKRPFVKLNVETDTAEIRLMCTETYLDTPRPDDGSITGPCESNGDKGSGGIKGGFVHQRMASKIGRWYSRTMSKTERMGMGLYVKYDGDPWADSDALAFSGVMVSMEEPGWYSFGFEIKDKKCDVPCIGIEMVHDGGKETWHSAATAIYCLMGSGQLLWDTVTGVNMAL

SEQ ID NO: 29352 - protein, 466 aa, synthetic construct; identical to SEQ ID NO: 28635
  REGION 1..466: note = neuraminidase__InfluenzaB__AGX18714

SEQ ID NO: 29353 - protein, 466 aa, synthetic construct; identical to SEQ ID NO: 28635
  REGION 1..466: note = neuraminidase__InfluenzaB__AGX18725

SEQ ID NO: 29354 - protein, 466 aa, synthetic construct
  REGION 1..466: note = neuraminidase__InfluenzaB__AGX18736
MLPSTIQTLTLFLTSGGVLLSLYVSASLSYLLYSDILLKFSPTEITAPTMPLDCANASNVQAVNRSATKGVTLLLPEPEWTYPRLSCPGSTFQKALLISPHRFGETKGNSAPLIIREPFIACGPNECKHFALTHYAAQPGGYYNGTGGDRNKLRHLISVKLGKIPTVENSIFHMAAWSGSACHDGKEWTYIGVDGPDNNALLKIKYGEAYTDTYHSYANKILRTQESACNCIGGNCYLMITDGSASGVSECRFLKIREGRIIKEIFPTGRVKHTEECTCGFASNKTIECACRDNSYTAKRPFVKLNVETDTAEIRLMCTDTYLDTPRPDDGSITGPCESNGDKGSGGIKGGFVHQRMASKIGRWYSRTMSKTERMGMGLYVKYDGDPWADSDALAFSGVMVSMKEPGWYSFGFEIKDKKCDVPCIGIEMVHDGGKETWHSAATAIYCLMGSGQLLWDTVTGVDMAL

SEQ ID NO: 29355 - protein, 466 aa, synthetic construct; identical to SEQ ID NO: 28635
  REGION 1..466: note = neuraminidase__InfluenzaB__AGX18758

SEQ ID NO: 29356 - protein, 466 aa, synthetic construct; identical to SEQ ID NO: 28635
  REGION 1..466: note = neuraminidase__InfluenzaB__AGX18769

SEQ ID NO: 29357 - protein, 466 aa, synthetic construct; identical to SEQ ID NO: 29094
  REGION 1..466: note = neuraminidase__InfluenzaB__AGX18780

SEQ ID NO: 29358 - protein, 466 aa, synthetic construct; identical to SEQ ID NO: 28635
  REGION 1..466: note = neuraminidase__InfluenzaB__AGX18791

SEQ ID NO: 29359 - protein, 466 aa, synthetic construct; identical to SEQ ID NO: 28635
  REGION 1..466: note = neuraminidase__InfluenzaB__AGX18802

SEQ ID NO: 29360 - protein, 466 aa, synthetic construct
  REGION 1..466: note = neuraminidase__InfluenzaB__AGX18813
MLPSTIQTLTLFLTSGGVLLSLYVSASLSYLLYSDILLKFPSTEITAPTMPLDCANASNVQAVNRSATKGVTLLLPEPEWTYPRLSCPGSTFQKALLISPHRFGETKGNSAPLIIREPFIACGPKECKHFALTHYAAQPGGYYNGTRGDRNKLRHLISVKLGKIPTVENSIFHMAAWSGSACHDGKEWTYIGVDGPDNNALLKIKYGEAYTDTYHSYANNILRTQESACNCIGGNCYLMITDGSASGVSECRFLKIREGRIIKEIFPTGRIKHTEECTCGFASNKTIECACRDNSYTAKRPFVKLNVETDTAEIRLMCTETYLDTPRPDDGSITGPCESNGDKGSGGIKGGFVHQRMASKIGRWYSRTMSKTERMGMGLYVKYDGDPWADSDALVFSGVMVSMEEPGWYSFGFEIKDKKCDVPCIGIEMVHDGGKETWHSAATAIYCLMGSGQLLWDTVTGVNMAL

SEQ ID NO: 29361 - protein, 466 aa, synthetic construct; identical to SEQ ID NO: 29094
  REGION 1..466: note = neuraminidase__InfluenzaB__AGX18824

SEQ ID NO: 29362 - protein, 466 aa, synthetic construct
  REGION 1..466: note = neuraminidase__InfluenzaB__AGX18846
MLPSTIQTLTLFLTSGGVLLSLYVSASLSYLLYSDILLKFSPTEITAPTMPLDCANASNVQAVNRSATKGVTLLLSEPEWTYPRLSCPGSTFQKALLISPHRFGETKGNSAPLIIREPFIACGPNECKHFALTHYAAQPGGYYNGTRGDRNKLRHLISVKLGKIPTVENSIFHMAAWSGSACHDGKEWTYIGVDGPDNNALLKIKYGEAYTDTYHSYANKILRTQESACNCIGGNCYLMITDGSASGVSECRFLKIREGRIIKEIFPTGRVKHTEECTCGFASNKTIECACRDNSYTAKRPFVKLNVETDTAEIRLMCTDTYLDTPRPDDGSITGPCESNGDKGSGGIKGGFVHQRMASKIGRWYSRTMSKTERMGMGLYVKYDGDPWADSDALAFSGVMVSMKEPGWYSFGFEIKDKKCDVPCIGIEMVHDGGKETWHSAATAIYCLMGSGQLLWDTVTGVDMAL

SEQ ID NO: 29363 - protein, 466 aa, synthetic construct; identical to SEQ ID NO: 28635
  REGION 1..466: note = neuraminidase__InfluenzaB__AGX18857

SEQ ID NO: 29364 - protein, 466 aa, synthetic construct; identical to SEQ ID NO: 29362
  REGION 1..466: note = neuraminidase__InfluenzaB__AGX18868

SEQ ID NO: 29365 - protein, 466 aa, synthetic construct; identical to SEQ ID NO: 29362
  REGION 1..466: note = neuraminidase__InfluenzaB__AGX18879

SEQ ID NO: 29366 - protein, 466 aa, synthetic construct
  REGION 1..466: note = neuraminidase__InfluenzaB__AGX18890
MLPSTIQTLTLFLTSGGVLLSLYVSASLSYLLYSDILLKFPSTEITAPTMPLDCANASNVQAVNRSATKGVTLLLPEPEWTYPRLSCPGSTFQKALLISPHRFGETKGNSAPLIIREPFIACGPKECKHFALTHYAAQPGGYYNGTRGDRNKLRHLISVKLGKIPTVENSIFHMAAWSGSACHDGKEWTYIGVDGPDNNALLKIKYGEAYTDTYHSYANNILRTQESACNCIGGNCYLMITDGSASGVSECRFLKIREGRIIKEIFPTGRIKHTEECTCGFASNKTIECACRDNSYTAKRPFVKLNVETDTAEIRLMCTETYLDTPRPDDGSITGPCESNGDKGSGGIKGGFVHQRMASKIGRWYSRTMSKTERMGMGLYVKYDGDPWADSDALAFSGVMVSMEEPGWYSFGFEIKDKKCDVPCIGIEMVHDGGKETWHSAATTIYCLMGSGQLLWDTVTGVNMAL

SEQ ID NO: 29367 - protein, 466 aa, synthetic construct; identical to SEQ ID NO: 28635
  REGION 1..466: note = neuraminidase__InfluenzaB__AGX18912

SEQ ID NO: 29368 - protein, 466 aa, synthetic construct
  REGION 1..466: note = neuraminidase__InfluenzaB__AGX18923
MLPSTIQTLTLFLTSGGVLLSLYVSASLSYLLYSDILLKFSPTEITAPTMPLDCANASNVQAVNRSATKGVTLLLPEPEWTYPRLSCPGSTFQKALLISPHRFGETKGNSAPLIIREPFIACGPNECKHFALTHYAAQPGGYYNRTRGDRNKLRHLISVKLGKIPTVENSIFHMAAWSGSACHDGKEWIYIGVDGPDNNALLKIKYGEAYTDTYHSYANKILRTQESACNCIGGNCYLMITDGSASGVSECRFLKIREGRIIKEIFPTGRVKHTEECTCGFASNKTIECACRDNSYTAKRPFVKLNVETDTAEIRLMCTDTYLDTPRPDDGSITGPCESNGDKGSGGIKGGFVHQRMASKIGRWYSRTMSKTERMGMGLYVKYDGDPWADSDALAFSGVMVSMKEPGWYSFGFEIKDKKCDVPCIGIEMVHDGGKETWHSAATAIYCLMGSGQLLWDTVTGVDMAL

SEQ ID NO: 29369 - protein, 466 aa, synthetic construct; identical to SEQ ID NO: 28635
  REGION 1..466: note = neuraminidase__InfluenzaB__AGX18934

SEQ ID NO: 29370 - protein, 466 aa, synthetic construct
  REGION 1..466: note = neuraminidase__InfluenzaB__AGX18956
MLPSTIQTLTLFLTSGGVLLSLYVSASLSYLLYSDILLKFSPTEITAPTMPLDCANASNVQAVNRSATKGVTLLLPEPEWTYPRLSCPGSTFQKALLISPHRFGETKGNSAPLIIREPFIACGPNECKHFALTHYAAQPGGYYNGTRGDRNKLRHLISVKLGKIPTVENSIFHVAAWSGSACHDGKEWTYIGVDGPDNNALLKIKYGEAYTDTYHSYANKILRTQESACNCIGGNCYLMITDGSASGVSECRFLKIREGRIIKEIFPTGRVKHTEECTCGFASNKTIECACRDNSYTAKRPFVKLNVETDTAEIRLMCTDTYLDTPRPDDGSITGPCESNGDKGSGGIKGGFVHQRMASKIGRWYSRTMSKTERMGMGLYVKYDGDPWADSDALAFSGVMVSMKEPGWYSFGFEIKDKKCDVPCIGIEMVHDGGKETWHSAATAIYCLMGSGQLLWDTVTGVDMAL

SEQ ID NO: 29371 - protein, 466 aa, synthetic construct
  REGION 1..466: note = neuraminidase__InfluenzaB__AGX18967
MLPSTIQTLTLFLTSGGVLLSLYVSASLSYLLYSDILLKFSPTEITAPTMPLDCANASNVQAVNRSATKGVTPLLPEPEWTYPRLSCPGSTFQKALLISPHRFGETKGNSAPLIIREPFIACGPNECKHFALTHYAAQPGGYYNGTRGDRNKLRHLISVKLGKIPTVENSIFHMAAWSGSACHDGKEWTYIGVDGPDNNALLKIKYGEAYTDTYHSYANKILRTQESACNCIGGNCYLMITDGSASGVSECRFLKIREGRIIKEIFPTGRVKHTEECTCGFASNKTIECACRDNSYTAKRPFVKLNVETDTAEIRLMCTDTYLDTPRPDDGSITGPCESNGDKGSGGIKGGFVHQRMASKIGRWYSRTMSKTERMGMGLYVKYDGDPWADSDALAFSGVMVSMKEPGWYSFGFEIKDKKCDVPCIGIEMVHDGGKETWHSAATAIYCLMGSGQLLWDTVTGVDMAL

SEQ ID NO: 29372 - protein, 466 aa, synthetic construct; identical to SEQ ID NO: 29094
  REGION 1..466: note = neuraminidase__InfluenzaB__AGX18978

SEQ ID NO: 29373 - protein, 466 aa, synthetic construct
  REGION 1..466: note = neuraminidase__InfluenzaB__AGX18989
MLPSTIQTLTLFLTSGGVLLSLYVSASLSYLLYSDILLKFSPTEITAPTMPLDYANASNVQAVNRSATKGVTLLLPEPEWTYPRLSCPGSTFQKALLISPHRFGETKGNSAPLIIREPFIACGPNECKHFALTHYAAQPGGYYNGTRGDRNKLRHLISVKLGKIPTVENSIFHMAAWSGSACHDGKEWTYIGVDGPDNNALLKIKYGEAYTDTYHSYANKILRTQESACNCIGGNCYLMITDGSASGVSECRFLKIREGRITKEIFPTGRVKHTEECTCGFASNKTIECACRDNSYTAKRPFVKLNVETDTAEIRLMCTDTYLDTPRPDDGSITGPCESNGDKGSGGIKGGFVHQRMASKIGRWYSRTMSKTERMGMGLYVKYDGDPWADSDALAFSGVMVSMKEPGWYSFGFEIKDKKCDVPCIGIEMVHDGGKETWHSAATAIYCLMGSGQLLWDTVTGVDMAL

SEQ ID NO: 29374 - protein, 466 aa, synthetic construct
  REGION 1..466: note = neuraminidase__InfluenzaB__AGX19000
MLPSTIQTLTLFLTSGGVLLSLYVSASLSYLLYSDILLKFSPTEITAPTMPLDCANASNVHAVNRSATKGVTLLLPEPEWTYPRLSCPGSTFQKALLISPHRFGETKGNSAPLIIREPFIACGPNECKHFALTYYAAQPGGYYNGTRGDRNKLRHLISVKLGKIPTVENSIFHMAAWSGSACHDGKEWTYIGVDGPDNNALLKIKYGEAYTDTYHSYANNILRTQESACNCIGGNCYLMITDGSASGVSECRFLKIREGRIIKEIFPTGRVKHTEECTCGFASNKTIECACRDNSYTAKRPFVKLNVETDTAEIRLMCTDTYLDTPRPDDGSITGPCESNGDKGSGGIKGGFVHQRMASKIGRWYSRTMSKTERMGMGLYVKYDGDPWADSDALAFSGVMVSMKEPGWYSFGFEIKDKKCDVPCIGIEMVHDGGKETWHSAATAIYCLMGSGQLLWDTVTGVDMAL

SEQ ID NO: 29375 - protein, 466 aa, synthetic construct; identical to SEQ ID NO: 28635
  REGION 1..466: note = neuraminidase__InfluenzaB__AGX19011

SEQ ID NO: 29376 - protein, 466 aa, synthetic construct; identical to SEQ ID NO: 28635
  REGION 1..466: note = neuraminidase__InfluenzaB__AGX19022

SEQ ID NO: 29377 - protein, 466 aa, synthetic construct
  REGION 1..466: note = neuraminidase__InfluenzaB__AGX19033
MLPSTIQTLTLFLTSGGVLLSLYVSASLSYLLYSDILLKFPSTEITAPTMPLNCANASNVQAVNRSATKGVTLLLPEPEWTYPRLSCPGSTFQKALLISPHRFGETKGNSAPLIIREPFIACGPKECKHFALTHYAAQPGGYYNGTRGDRNKLRHLISVKLGKIPTVENSIFHMAAWSGSACHDGKEWTYIGVDGPDNNALLKIKYGEAYTDTYHSYANNILRTQESACNCIGGNCYLMITDGSASGVSECRFLKIREGRIIKEIFPTGRIKHTEECTCGFASNKTIECACRDNSYTAKRPFVKLNVETDTAEIRLMCTETYLDTPRPDDGSITGPCESNGDKGSEGIKGGFVHQRMASKIGRWYSRTMSKTERMGMGLYVKYDGDPWADSDALAFSGVMVSMEEPGWYSFGFEIKDKKCDVPCIGIEMVHDGGKETWHSAATAIYCLMGSGQLLWDTVTGVNMAL

SEQ ID NO: 29378 - protein, 466 aa, synthetic construct; identical to SEQ ID NO: 28635
  REGION 1..466: note = neuraminidase__InfluenzaB__AGX19044

SEQ ID NO: 29379 - protein, 466 aa, synthetic construct; identical to SEQ ID NO: 28635
  REGION 1..466: note = neuraminidase__InfluenzaB__AGX19055

SEQ ID NO: 29380 - protein, 466 aa, synthetic construct
  REGION 1..466: note = neuraminidase__InfluenzaB__AGX19066
MLPSTIQTLTLFLTSGGVLLSLYVSASLSYLLYSDILLKFSPTEITAPTMPLDCANASNVQAVNRSATKGVTLLLPEPEWTYPRLSCPGSTFQKALLISPHRFGETKGNSAPLIIREPFIACGPNECKHFALTHYAAQPGGYYNGTRGDRNKLRHLISVKLGKIPTVENSIFHMAAWSGSACHDGKEWIYIGVDGPDNNALLKIKYGEAYTDTYHSYANKILRTQESACNCIGGNCYLMITDGSASGVSECRFLKIREGRIIKEIFPTGRVKHTEECTCGFASNKTIECACRDNSYTAKRPFVKLNVETDTAEIRLMCTDTYLDTPRPDDGSITGPCESNGDKGSGGIKGGFVHQRMASKIGRWYSRTMSKTERMGMGLYVKYDGDPWADSDALAFSGVMVSMKEPGWYSFGFEIKDKKCDVPCIGIEMVHDGGKETWHSAATAIYCLMGSGQLLWDTVTGVDMAL

SEQ ID NO: 29381 - protein, 466 aa, synthetic construct
  REGION 1..466: note = neuraminidase__InfluenzaB__AGX19077
MLPSTIQTLTLFLTSGGVLLSLYVSASLSYLLYSDILLKFTPTEITAPTMPLDCANASNVQAVNRSATKGVTPLLPEPEWTYPRLSCPGSTFQKALLISPHRFGETKGNSAPLIIREPFIACGPNECKHFALTHYAAQPGGYYNGTRGDRNKLRHLISVKLGKIPTVENSIFHMAAWSGSACHDGKEWTYIGVDGPDNNALLKIKYGEAYTDTYHSYANKILRTQESACNCIGGNCYLMITDGSASGVSECRFLKIREGRIIKEIFPTGRVKHTEECTCGFASNKTIECACRDNSYTAKRPFVKLNVETDTAEIRLMCTDTYLDTPRPDDGSITGPCESNGDKGSGGIKGGFVHQRMASKIGRWYSRTMSKTERMGMGLYVKYDGDPWADSDALAFSGVMVSMKEPGWYSFGFEIKDKKCDVPCIGIEMVHDGGKETWHSAATAIYCLMGSGQLLWDTVTGVDMAL

SEQ ID NO: 29382 - protein, 466 aa, synthetic construct
  REGION 1..466: note = neuraminidase__InfluenzaB__AGX19088
MLPSTIQTLTLFLTSGGVLLSLYVSASLSYLLYSDILLKFSPTEITAPTMPLDCANASNVQAVNRSATKGVTLLLPEPEWTYPRLSCPGSTFQKALLISPHRFGETKGNSAPLIIREPFIACGPNECKHFALTHYAAQPGGYYNGTRGDRNKLRHLISVKLGKIPTVENSIFHMAAWSGSACHDGKEWTYIGVDGPDNNALLKIKYGEAYTDTYHSYANKILRTQESACNCIGGNCYLMITDGSASGVSECRFLKIREGRIVKEIFPTGRVKHTEECTCGFASNKTIECACRDNSYTAKRPFVKLNVETDTAEIRLMCTDTYLDTPRPDDGSITGPCESNGDKGSGGIKGGFVHQRMASKIGRWYSRTMSKTERMGMGLYVKYDGDPWADSDALAFSGVMVSMKEPGWYSFGFEIKDKKCDVPCIGIEMVHDGGKETWHSAATAIYCLMGSGQLLWDTVTGVDMAL

SEQ ID NO: 29383 - protein, 466 aa, synthetic construct; identical to SEQ ID NO: 28635
  REGION 1..466: note = neuraminidase__InfluenzaB__AGX19099

SEQ ID NO: 29384 - protein, 466 aa, synthetic construct
  REGION 1..466: note = neuraminidase__InfluenzaB__AGX19110
MLPSTIQTLTLFLTSGGVLLSLYVSASLSYLLYSDILLKFPSTEITAPTMPLDCANASNVQAVNRSATKGVTLLLPEPEWTYPRLSCPGSTFQKALLISPHRFGETKGNSAPLIIREPFIACGPKECKHFALTHYAAQPGGYYNGTRGDRNKLRHLISVKLGKIPTVENSIFHMAAWSGSACHDGKEWTYIGVDGPDNNALLKIKYGEAYTDTYHSYANNILRTQESACNCIGGNCYLMITDGSASGVSECRFLKIREGRIIKEIFPTGRIKHTEECTCGFASNKTIECACRDNSYTAKRPFIKLNVETDTAEIRLMCTETYLDTPRPDDGSITGPCESNGDKGSGGIKGGFVHQRMASKIGRWYSRTMSKTERMGMGLYVKYDGDPWADSDALVFSGVMVSMEEPGWYSFGFEIKDKKCDVPCIGIEMVHDGGKETWHSAATAIYCLMGSGQLLWDTVTGVNMAL

SEQ ID NO: 29385 - protein, 466 aa, synthetic construct
  REGION 1..466: note = neuraminidase__InfluenzaB__AGX19121
MLPSTTQTLTLFLTSGGVLLSLYVSASLSYLLYSDILLKFSPTEITAPTMPLDCANASNVQAVNRSATKGVTLLLPEPEWTYPRLSCPGSTFQKALLISPHRFGETKGNSAPLIIREPFIACGPNECKHFALTHYAAQPGGYYNGTRGDRNKLRHLISVKLGKIPTVENSIFHMAAWSGSACHDGKEWTYIGVDGPDNNALLKIKYGEAYTDTYHSYANKILRTQESACNCIGGNCYLMITDGSASGVSECRFLKIREGRIIKEIFPTGRVKHTEECTCGFASNKTIECACRDNSYTAKRPFVKLNVETDTAEIRLMCTDTYLDTPRPDDGSITGPCESNGDKGSGGIKGGFVHQRMASKIGRWYSRTMSKTERMGMGLYVKYDGDPWADSDALAFRGVMVSMKEPGWYSFGFEIKDKKCDVPCIGIEMVHDGGKETWHSAATAIYCLMGSGQLLWDTVTGVDMAL

SEQ ID NO: 29386 - protein, 466 aa, synthetic construct; identical to SEQ ID NO: 29269
  REGION 1..466: note = neuraminidase__InfluenzaB__AGX19132

SEQ ID NO: 29387 - protein, 466 aa, synthetic construct; identical to SEQ ID NO: 29373
  REGION 1..466: note = neuraminidase__InfluenzaB__AGX19143

SEQ ID NO: 29388 - protein, 466 aa, synthetic construct
  REGION 1..466: note = neuraminidase__InfluenzaB__AGX19154
MLPSTIQTLTLFLTSGGVLLSLYVSASLSYLLYSNILLKFSPTEITAPTMPLDCANASNVHAVNRSATKGVTLLLPEPEWTYPRLSCPGSTFQKALLISPHRFGETKGNSAPLIIREPFIACGPNECKHFALTHYAAQPGGYYNGTRGDRNKLRHLISVKLGKIPTVENSIFHMAAWSGSACHDGKEWTYIGVDGPDNNALLKIKYGEAYTDTYHSYANNILRTQESACNCIGGNCYLMITDGSASGVSECRFLKIREGRIIKEIFPTGRVKHTEECTCGFASNKTIECACRDNSYTAKRPFVKLNVETDTAEIRLMCTDTYLDTPRPDDGSITGPCESNGDKGSGGIKGGFVHQRMASKIGRWYSRTMSKTERMGMGLYVKYDGDPWADSDALAFSGVMVSMKEPGWYSFGFEIKDKKCDVPCIGIEMVHDGGKETWHSAATAIYCLMGSGQLLWDTVTGVDMAL

SEQ ID NO: 29389 - protein, 466 aa, synthetic construct; identical to SEQ ID NO: 28635
  REGION 1..466: note = neuraminidase__InfluenzaB__AGX19165

SEQ ID NO: 29390 - protein, 466 aa, synthetic construct
  REGION 1..466: note = neuraminidase__InfluenzaB__AGX19176
MLPSTIQTLTLFLTSGGVLLSLYVSASLSYLLYSDILLKFSPTEITAPTMPLDCANASNVHAVNRSATKGVTLLLPEPEWTYPRLSCPGSTFQKALLISPHRFGETKGNSAPLIIREPFIACGPNECKHFALTHYAAQPGGYYNRTRGDRNKLRHLISVKLGKIPTVENSIFHMAAWSGSACHDGKEWTYIGVDGPDNNALLKIKYGEAYTDTYHSYANNILRTQESACNCIGGNCYLMITDGSASGVSECRFLKIREGRIIKEIFPTGRVKHTEECTCGFASNKTIECACRDNSYTAKRPFVKLNVETDTAEIRLMCTDTYLDTPRPDDGSITGPCESNGDKGSGGIKGGFVHQRMASKIGRWYSRTMSKTERMGMGLYVKYDGDPWADSDALAFSGVMVSMKEPGWYSFGFEIKDKKCDVPCIGIEMVHDGGKETWHSAATAIYCLMGSGQLLWDTVTGVDMAL

SEQ ID NO: 29391 - protein, 466 aa, synthetic construct
  REGION 1..466: note = neuraminidase__InfluenzaB__AGX19187
MLPSTIQTLTLFLTSGGVLLSLYVSASLSYLLYSDILLKFSPTEITAPTMPLDCANASNVQAVNRSATKGVTLLLPEPEWTYPRLSCSGSTFQKALLISPHRFGETKGNSAPLIIREPFIACGPNECKHFALTHYAAQPGGYYNGTRGDRNKLRHLISVKLGKIPTVENSIFHMAAWSGSACHDGKEWTYIGVDGPDNNALLKIKYGEAYTDTYHSYANKILRTQESACNCIGGNCYLMITDGSASGVSECRFLKIREGRIIKEIFPTGRVKHTEECTCGFASNKTIECACRDNSYTAKRPFVKLNVETDTAEIRLMCTDTYLDTPRPDDGSITGPCESNGDKGSGGIKGGFVHQRMASKIGRWYSRTMSKTERMGMGLYVKYDGDPWADSDALAFSGVMVSMKEPGWYSFGFEIKDKKCDVPCIGIEMVHDGGKETWHSAATAIYCLMGSGQLLWDTVTGVDMAL

SEQ ID NO: 29392 - protein, 466 aa, synthetic construct
  REGION 1..466: note = neuraminidase__InfluenzaB__AGX19198
MLPSTIQTLTLFLTSGGVLLSLYVSASLSYLLYSDILLKFSPTEITAPTMPLDYANASNVQAVNRSATKGVTLLLPEPEWTYPRLSCPGSTFQKALLISPHRFGETKGNSAPLIIREPFIACGPNECKHFALTHYAAQPGGYYNGTRGDRNKLRHLISVKLGKIPTVENSIFHMAAWSGSACHDGKEWTYIGVDGPDNNALLKIKYGEAYTDTYHSYANKILRTQESACNCIGGNCYLMITDGSASGVSECRFLKIREGRIIKEIFPTGRVKHTEECTCGFASNKTIECACRDNSYTAKRPFVKLNVETDTAEIRLMCTDTYLDTPRPDDGSITGPCESNGDKGSGGIKGGFVHQRMASKIGRWYSRTMSKTERMGMGLYVKYDGDPWADSDALAFSGVMVSMKEPGWYSFGFEIKDKKCDVPCIGIEMVHDGGKETWHSAATAIYCLMGSGQLLWDTVTGVDMAL

SEQ ID NO: 29393 - protein, 466 aa, synthetic construct; identical to SEQ ID NO: 29373
  REGION 1..466: note = neuraminidase__InfluenzaB__AGX19209

SEQ ID NO: 29394 - protein, 466 aa, synthetic construct
  REGION 1..466: note = neuraminidase__InfluenzaB__AGX19220
MLPSTIQTLTLFLTSGGVLLSLYVSASLSYLLYSDILLKFSPTEITAPTMSLDCANASNVQAVNRSATKGVTLLLPEPEWTYPRLSCPGSTFQKALLISPHRFGETKGNSAPLIIREPFIACGPNECKHFALTHYAAQPGGYYNGTRGDRNKLRHLISVKLGKIPTVENSIFHMAAWSGSACHDGKEWTYIGVDGPDNNALLKIKYGEAYTDTYHSYANKILRTQESACNCIGGNCYLMITDGSASGVSECRFLKIREGRIIKEIFPTGRVKHTEECTCGFASNKTIECACRDNSYTAKRPFVKLNVETDTAEIRLMCTDTYLDTPRPDDGSITGPCESNGDRGSGGIKGGFVHQRMASKIGRWYSRTMSKTERMGMGLYVKYDGDPWADSDALAFSGVMVSMKEPGWYSFGFEIKDKKCDVPCIGIEMVHDGGKETWHSAATAIYCLMGSGQLLWDTVTGVDMAL

SEQ ID NO: 29395 - protein, 466 aa, synthetic construct; identical to SEQ ID NO: 28841
  REGION 1..466: note = neuraminidase__InfluenzaB__AGX19231

SEQ ID NO: 29396 - protein, 466 aa, synthetic construct
  REGION 1..466: note = neuraminidase__InfluenzaB__AGX19253
MLPSTIQTLTLFLTSGGVLLSLYVSASLSYLLYSDILLKFSPTEITAPTMPLDCANASNVQAVNHSATKGVTLLLPEPEWTYPRLSCPGSTFQKALLISPHRFGETKGNSAPLIIREPFIACGPNECKHFALTHYAAQPGGYYNGTRGDRNKLRHLISVKLGKIPTVENSIFHMAAWSGSACHDGKEWTYIGVDGPDNNALLKIKYGEAYTDTYHSYANKILRTQESACNCIGGNCYLMITDGSASGVSECRFLKIREGRIIKEIFPTGRVKHTEECTCGFASNKTIECACRDNSYTAKRPFVKLNVETDTAEIRLMCTDTYLDTPRPDDGSITGPCESNGDKGSGGIKGGFVHQRMASKIGRWYSRTMSKTERMGMGLYVKYDGDPWADSDSLAFSGVMVSMKEPGWYSFGFEIKDKKCDVPCIGIEMVHDGGKETWHSAATAIYCLMGSGQLLWDTVTGVDMAL

SEQ ID NO: 29397 - protein, 466 aa, synthetic construct; identical to SEQ ID NO: 29371
  REGION 1..466: note = neuraminidase__InfluenzaB__AGX19264

SEQ ID NO: 29398 - protein, 466 aa, synthetic construct; identical to SEQ ID NO: 28635
  REGION 1..466: note = neuraminidase__InfluenzaB__AGX19275

SEQ ID NO: 29399 - protein, 466 aa, synthetic construct
  REGION 1..466: note = neuraminidase__InfluenzaB__AGX19286
MIPSTIQTLTLFLTSGGVLLSLYVSASLSYLLYSDILLKFSPTEIIAPTMPLDCANASNVHAVNRSATKGVTLLLPEPEWTYPRLSCPGSTFQKALLISPHRFGETKGNSAPLIIREPFIACGPNECKHFALTHYAAQPGGYYNGTRGDRNKLRHLISVKLGKIPTVENSIFHMAAWSGSACHDGKEWTYIGVDGPDNNALLKIKYGEAYTDTYHSYANNILRTQESACNCIGGNCYLMITDGSASGVSECRFLKIREGRIIKEIFPTGRVKHTEECTCGFASNKTIECACRDNSYTAKRPFVKLNVETDTAEIRLMCTDTYLDTPRPDDGSITGPCESNGDKGSGGIKGGFVHQRMASKIGRWYSRTMSKTERMGMGLYVKYDGDPWADSDALAFSGVMVSMKEPGWYSFGFEIKDKKCDVPCIGIEMVHDGGKETWHSAATAIYCLMGSGQLLWDTVTGVDMAL

SEQ ID NO: 29400 - protein, 466 aa, synthetic construct
  REGION 1..466: note = neuraminidase__InfluenzaB__AGX19297
MLPSTIQTLTLFLTSGGVLLSLYVSASLSYLLYSDILLKFSPTEIIAPTMPLDCANASNVHAVNRSATKGVTLLLPEPEWTYPRLSCPGSTFQKALLISPHRFGETKGNSAPLIIREPFIACGPNECKHFALTHYAAQPGGYYNGTRGDRNKLRHLISVKLGKIPTVENSIFHMAAWSGSACHDGKEWTYIGVDGPDNNALLKIKYGEAYTDTYHSYANNILRTQESACNCIGGNCYLMITDGSASGVSECRFLKIREGRIIKEIFPTGRVKHTEECTCGFASNKTIECACRDNSYTAKRPFVKLNVETDTAEIRLMCTDTYLDTPRPDDGSITGPCESNGDKGSGGIKGGFVHQRMASKIGRWYSRTMSKTERMGMGLYVKYDGDPWADSDALAFSGVMVSMKEPGWYSFGFEIKDKKCDVPCIGIEMVHDGGKETWHSAATAIYCLMGSGQLLWDTVTGVDMAL

SEQ ID NO: 29401 - protein, 466 aa, synthetic construct; identical to SEQ ID NO: 29400
  REGION 1..466: note = neuraminidase__InfluenzaB__AGX19308

SEQ ID NO: 29402 - protein, 466 aa, synthetic construct; identical to SEQ ID NO: 29400
  REGION 1..466: note = neuraminidase__InfluenzaB__AGX19319

SEQ ID NO: 29403 - protein, 466 aa, synthetic construct
  REGION 1..466: note = neuraminidase__InfluenzaB__AGX19330
MLPSTIQTLTLFLTSGGVLLSLYVSASLSYLLYSDILLKFSPTEIIAPTMPLDCANASNVHAVNRSATKGVTLLLPEPEWTYPRLSCPGSTFQKALLISPHRFGETKGNSAPLIIREPFIACGPNECKHFALTHYAAQPGGYYNGTRGNRNKLRHLISVKLGKIPTVENSIFHMAAWSGSACHDGKEWTYIGVDGPDNNALLKIKYGEAYTDTYHSYANNILRTQESACNCIGGNCYLMITDGSASGVSECRFLKIREGRIIKEIFPTGRVKHTEECTCGFASNKTIECACRDNSYTAKRPFVKLNVETDTAEIRLMCTDTYLDTPRPDDGSITGPCESNGDKGSGGIKGGFVHQRMASKIGRWYSRTMSKTERMGMGLYVKYDGDPWADSDALAFSGVMVSMKEPGWYSFGFEIKDKKCDVPCIGIEMVHDGGKETWHSAATAIYCLMGSGQLLWDTVTGVDMAL

SEQ ID NO: 29404 - protein, 466 aa, synthetic construct; identical to SEQ ID NO: 29400
  REGION 1..466: note = neuraminidase__InfluenzaB__AGX19341

SEQ ID NO: 29405 - protein, 466 aa, synthetic construct; identical to SEQ ID NO: 29400
  REGION 1..466: note = neuraminidase__InfluenzaB__AGX19352

SEQ ID NO: 29406 - protein, 466 aa, synthetic construct
  REGION 1..466: note = neuraminidase__InfluenzaB__AGX19363
MLPSTIQTLTLFLTSGGVLLSLYVSASLSYLLYSDILLKFSPTEIIAPTMPLDCANASNVHAVNRSATKGVTLLLPEPEWTYPRLSCPGSTFQKALLISPHRFGETKGNSAPLIIREPFIACGPNECKHFALTYYAAQPGGYYNGTRGDRNKLRHLISVKLGKIPTVENSIFHMAAWSGSACHDGKEWTYIGVDGPDNNALLKIKYGEAYTDTYHSYANNILRTQESACNCIGGNCYLMITDGSASGVSECRFLKIREGRIIKEIFPTGRVKHTEECTCGFASNKTIECACRDNSYTAKRPFVKLNVETDTAEIRLMCTDTYLDTPRPDDGSITGPCESNGDKGSGGIKGGFVHQRMASKIGRWYSRTMSKTERMGMGLYVKYDGDPWADSDALAFSGVMVSMKEPGWYSFGFEIKDKKCDVPCIGIEMVHDGGKETWHSAATAIYCLMGSGQLLWDTVTGVDMAL

SEQ ID NO: 29407 - protein, 466 aa, synthetic construct
  REGION 1..466: note = neuraminidase__InfluenzaB__AGX19374
MLPSTIQTLTLFLTSGGVLLSLYVSASLSYLLYSDILLKFSQTEITAPIMPLDCANASNVQAVNRSAAKGVTLLLSEPEWTYPRLSCPGSTFQKALLISPHRFGETKGNSAPLIIREPFIACGPTECKHFALTHYAAQPGGYYNGTREDRNKLRHLISVKLGKIPTVENSIFHMAAWSGSACHDGKEWTYIGVDGPDSNALLKIKYGEAYTDTYHSYAKNILRTQESACNCIGGDCYLMITDGPASGVSECRFLKIREGRIIKEIFPTGRVKHTEECTCGFASNKTIECACRDNSYTAKRPFVKLNVETDTAEIRLMCTETYLDTPRPNDGSITGPCESDGDKGSGGIKGGFVHQRMASKIGRWYSRTMSKTKRMGMGLYVKYDGDPWTDSEALALSGVMVSMEEPGWYSFGFEIKDKKCDVPCIGIEMVHDGGKTTWHSAATAIYCLMGSGQLLWDTVTGVDMAL

SEQ ID NO: 29408 - protein, 466 aa, synthetic construct; identical to SEQ ID NO: 29400
  REGION 1..466: note = neuraminidase__InfluenzaB__AGX19385

SEQ ID NO: 29409 - protein, 466 aa, synthetic construct
  REGION 1..466: note = neuraminidase__InfluenzaB__AGX19396
MLPSTIQTLTLFLTSGGVLLSLYVSASLSYLLYSDILLKFSPTEIIAPTMPLDCANASNVHAVNRSATKGVTLLLPEPEWTYPRLSCPGSTFQKALLISPHRFGETKGNSAPLIIREPFIACGPNECKHFALTHYAAQPGGYYNGPRGDRNKLRHLISVKLGKIPTVENSIFHMAAWSGSACHDGKEWTYIGVDGPDNNALLKIKYGEAYTDTYHSYANNILRTQESACNCIGGNCYLMITDGSASGVSECRFLKIREGRIIKEIFPTGRVKHTEECTCGFASNKTIECACRDNSYTAKRPFVKLNVETDTAEIRLMCTDTYLDTPRPDDGSITGPCESNGDKGSGGIKGGFVHQRMASKIGRWYSRTMSKTERMGMGLYVKYDGDPWADSDALAFSGVMVSMKEPGWYSFGFEIKDKKCDVPCIGIEMVHDGGKETWHSAATAIYCLMGSGQLLWDTVTGVDMAL

SEQ ID NO: 29410 - protein, 466 aa, synthetic construct; identical to SEQ ID NO: 29400
  REGION 1..466: note = neuraminidase__InfluenzaB__AGX19407

SEQ ID NO: 29411 - protein, 466 aa, synthetic construct; identical to SEQ ID NO: 28961
  REGION 1..466: note = neuraminidase__InfluenzaB__AGX19418

SEQ ID NO: 29412 - protein, 466 aa, synthetic construct
  REGION 1..466: note = neuraminidase__InfluenzaB__AGX19429
MLPSTIQTLTLFLTSGGVLLSLYVSASLSYLLYSDILLKFSQTEITAPIMPLDCANASNVQAVNRSAAKGVTLLLPEPEWTYPRLSCPGSTFQKALLISPHRFGETKGNSAPLIIREPFIACGPTECKHFALTHYAAQPGGYYNGTREDRNKLRHLISVKLGKIPTVENSIFHMAAWSGSACHDGKEWTYIGVDGPDSNALLKIKYGEAYTDTYHSYAKNILRTQESACNCIGGDCYLMITDGPASGISECRFLKIREGRIIKEIFPTGRVKHTEECTCGFASNKTIECACRDNSYTAKRPFVKLNVETDTAEIRLMCTETYLDTPRPNDGSITGPCESDGDKGSGGIKGGFVHQRMASKIGRWYSRTMSKTRRMGMGLYVKYDGDPWTDSEALALSGVMVSMEEPGWYSFGFEIKDKKCDVPCIGIEMVHDGGKTTWHSAATAIYCLMGSGQLLWDTVTGVDMAL

SEQ ID NO: 29413 - protein, 466 aa, synthetic construct
  REGION 1..466: note = neuraminidase__InfluenzaB__AGX19451
MLPSTIQTLTLFLTSGGVLLSLYVSASLSYLLYSDILLKFSPTEITAPTMPLDCANASNVHAVNHSATKGVTLLLPEPEWTYPRLSCPGSTFQKALLISPHRFGETKGNSAPLIIREPFIACGPNECKHFALTHYAAQPGGYYNGTRGDRNKLRHLISVKLGKIPTVENSIFHMAAWSGSACHDGKEWTYIGVDGPDNNALLKIKYGEAYTDTYHSYANNILRTQESACNCIGGNCYLMVTDGSASGVSECRFLKIREGRIIKEIFPTGRVKHTEECTCGFASNKTIECACRDNSYTAKRPFVKLNVETDTAEIRLMCTDTYLDTPRPDDGSITGPCESNGDKGSGGIKGGFVHQRMASKIGRWYSRTMSKTERMGMGLYVKYDGDPWADSDALAFSGVMVSMKEPGWYSFGFEIKDKKCDVPCIGIEMVHDGGKETWHSAATAIYCLMGSGQLLWDTVTGVDMAL

SEQ ID NO: 29414 - protein, 466 aa, synthetic construct; identical to SEQ ID NO: 29412
  REGION 1..466: note = neuraminidase__InfluenzaB__AGX19462

SEQ ID NO: 29415 - protein, 466 aa, synthetic construct; identical to SEQ ID NO: 29412
  REGION 1..466: note = neuraminidase__InfluenzaB__AGX19473

SEQ ID NO: 29416 - protein, 466 aa, synthetic construct; identical to SEQ ID NO: 28961
  REGION 1..466: note = neuraminidase__InfluenzaB__AGX19484

SEQ ID NO: 29417 - protein, 466 aa, synthetic construct; identical to SEQ ID NO: 29413
  REGION 1..466: note = neuraminidase__InfluenzaB__AGX19495

SEQ ID NO: 29418 - protein, 466 aa, synthetic construct; identical to SEQ ID NO: 28961
  REGION 1..466: note = neuraminidase__InfluenzaB__AGX19506

SEQ ID NO: 29419 - protein, 466 aa, synthetic construct; identical to SEQ ID NO: 28961
  REGION 1..466: note = neuraminidase__InfluenzaB__AGX19517

SEQ ID NO: 29420 - protein, 466 aa, synthetic construct; identical to SEQ ID NO: 28961
  REGION 1..466: note = neuraminidase__InfluenzaB__AGX19528

SEQ ID NO: 29421 - protein, 466 aa, synthetic construct; identical to SEQ ID NO: 29413
  REGION 1..466: note = neuraminidase__InfluenzaB__AGX19539

SEQ ID NO: 29422 - protein, 466 aa, synthetic construct
  REGION 1..466: note = neuraminidase__InfluenzaB__AGX19550
MLPSTIQTLTLFLTSGGVLLSLYVSASLSYLLYSDILLKFSPTEITAPTMPLDCANASNVHAVNHSATKGVTLLLPEPEWTYPRLSCPGSTFQKALLISPHRFGETKGNSAPLIIREPFIACGPNECKHFALTHYAAQPGGYYNGTRGDRNKLRHLISVKLGKIPTVENSIFHMAAWSGSACHDGKEWTYIGVDGPDNNALLKIKYGEAYTDTYHSYANNILRTQESACNCIGGNCYLMVTDGSASGVSECRFLKIREGRIIKEIFPTGRVKHTEECTCGFASNKTIECACRDNSYTAKRPFVKLNVETDTAEIRLMCTDTYLDTPRPDDGSITGPCESNGDKGSGGIKGGFVHQRMASKIGRWYSRTMSKTERMGMGLYVKYDGDPWADSDALAFSGVMVSMNEPGWYSFGFEIKDKKCDVPCIGIEMVHDGGKETWHSAATAIYCLMGSGQLLWDTVTGVDMAL

SEQ ID NO: 29423 - protein, 466 aa, synthetic construct
  REGION 1..466: note = neuraminidase__InfluenzaB__AGX19561
MLPSTIQTLTLFLTSGGVLLSLYVSASLSYLLYSDILLKFSPTEITAPTMPLDCANASNVHAVNHSATKGVTLLLPEPEWTYPRLSCPGSTFQKALLISPHRFGETKGNSAPLIIREPFIACGPNECKHFALTHYAAQPRGYYNGTRGDRNKLRHLISVKLGKIPTVENSIFHMAAWSGSACHDGKEWTYIGVDGPDNNALLKIKYGEAYTDTYHSYANNILRTQESACNCIGGNCYLMVTDGSASGVSECRFLKIREGRIIKEIFPTGRVKHTEECTCGFASNKTIECACRDNSYTAKRPFVKLNVETDTAEIRLMCTDTYLDTPRPDDGSITGPCESNGDKGSGGIKGGFVHQRMASKIGRWYSRTMSKTERMGMGLYVKYDGDPWADSDALAFSGVMVSMKEPGWYSFGFEIKDKKCDVPCIGIEMVHDGGKETWHSAATAIYCLMGSGQLLWDTVTGVDMAL

SEQ ID NO: 29424 - protein, 466 aa, synthetic construct
  REGION 1..466: note = neuraminidase__InfluenzaB__AGX19572
MLPSTIQTLTLFLTSGGVLLSLYVSASLSYLLYSDILLKFSPTEITAPTMPLDCANASNVQAVNRSATKGVTLLLPEPEWTYPRLSCPGSTFQKALLISPHRFGETKGNSAPLIIREPFIACGPNECKHFALTHYAAQPGGYYNGTRGDRNKLRHLISVKLGKIPTVENSIFHMAAWSGSACHDGKEWTYIGVDGPDNNALLKVKYGEAYTDTYHSYANKILRTQESACNCIGGNCYLMITDGSASGVSECRFLKIREGRIIKEIFPTGRVKHTEECTCGFASNKTIECACRDNSYTAKRPFVKLNVETDTAEIRLMCTDTYLDTPRPNDGSITGPCESNGDKGSGGIKGGFVHQRMESKIGRWYSRTMSKTERMGMGLYVKYDGDPWADSDALAFSGVMVSMKEPGWYSFGFEIKDKKCDVPCIGIEMVHDGGKETWHSAATAIYCLMGSGQLLWDTVTGVNMAL

SEQ ID NO: 29425 - protein, 466 aa, synthetic construct; identical to SEQ ID NO: 28961
  REGION 1..466: note = neuraminidase__InfluenzaB__AGX19583

SEQ ID NO: 29426 - protein, 466 aa, synthetic construct; identical to SEQ ID NO: 28961
  REGION 1..466: note = neuraminidase__InfluenzaB__AGX19594

SEQ ID NO: 29427 - protein, 466 aa, synthetic construct; identical to SEQ ID NO: 28961
  REGION 1..466: note = neuraminidase__InfluenzaB__AGX19605

SEQ ID NO: 29428 - protein, 466 aa, synthetic construct; identical to SEQ ID NO: 28961
  REGION 1..466: note = neuraminidase__InfluenzaB__AGX19616

SEQ ID NO: 29429 - protein, 466 aa, synthetic construct; identical to SEQ ID NO: 29413
  REGION 1..466: note = neuraminidase__InfluenzaB__AGX19627

SEQ ID NO: 29430 - protein, 466 aa, synthetic construct; identical to SEQ ID NO: 28961
  REGION 1..466: note = neuraminidase__InfluenzaB__AGX19638

SEQ ID NO: 29431 - protein, 466 aa, synthetic construct; identical to SEQ ID NO: 29413
  REGION 1..466: note = neuraminidase__InfluenzaB__AGX19649

SEQ ID NO: 29432 - protein, 466 aa, synthetic construct; identical to SEQ ID NO: 29413
  REGION 1..466: note = neuraminidase__InfluenzaB__AGX19660

SEQ ID NO: 29433 - protein, 466 aa, synthetic construct; identical to SEQ ID NO: 28961
  REGION 1..466: note = neuraminidase__InfluenzaB__AGX19671

SEQ ID NO: 29434 - protein, 466 aa, synthetic construct; identical to SEQ ID NO: 28961
  REGION 1..466: note = neuraminidase__InfluenzaB__AGX19682

SEQ ID NO: 29435 - protein, 466 aa, synthetic construct; identical to SEQ ID NO: 29413
  REGION 1..466: note = neuraminidase__InfluenzaB__AGX19704

SEQ ID NO: 29436 - protein, 466 aa, synthetic construct
  REGION 1..466: note = neuraminidase__InfluenzaB__AGX19715
MLPSTIQTLTLFLTSGGVLLSLYVSASLSYLLYSDILLKFSPTEITAPTMPLDCANASNVHAVNRSTTKGVTLLLPEPEWTYPRLSCPGSTFQKALLISPHRFGETKGNSAPLIIREPFIACGPNECKHFALTHYAAQPGGYYNGTRGDRNKLRHLISVKLGKIPTVENSIFHMAAWSGSACHDGKEWTYIGVDGPDNNALLKIKYGEAYTDTYHSYANNILRTQESACNCIGGNCYLMITDGSASGVSECRFLKIREGRIIKEIFPTGRVKHTEECTCGFASNKTIECACRDNSYTAKRPFVKLNVETDTAEIRLMCTDTYLDTPRPDDGSITGPCESNGDKGSGGIKGGFVHQRMASKIGRWYSRTMSKTERMGMGLYVKYDGDPWADSDALAFSGVMVSMKEPGWYSFGFEIKDKKCDVPCIGIEMVHDGGKETWHSAATAIYCLMGSGQLLWDTVTGVDMAL

SEQ ID NO: 29437 - protein, 466 aa, synthetic construct; identical to SEQ ID NO: 28961
  REGION 1..466: note = neuraminidase__InfluenzaB__AGX19726

SEQ ID NO: 29438 - protein, 466 aa, synthetic construct; identical to SEQ ID NO: 28961
  REGION 1..466: note = neuraminidase__InfluenzaB__AGX19737

SEQ ID NO: 29439 - protein, 466 aa, synthetic construct; identical to SEQ ID NO: 28961
  REGION 1..466: note = neuraminidase__InfluenzaB__AGX19748

SEQ ID NO: 29440 - protein, 466 aa, synthetic construct; identical to SEQ ID NO: 29413
  REGION 1..466: note = neuraminidase__InfluenzaB__AGX19759

SEQ ID NO: 29441 - protein, 466 aa, synthetic construct; identical to SEQ ID NO: 28961
  REGION 1..466: note = neuraminidase__InfluenzaB__AGX19770

SEQ ID NO: 29442 - protein, 466 aa, synthetic construct; identical to SEQ ID NO: 28961
  REGION 1..466: note = neuraminidase__InfluenzaB__AGX19781

SEQ ID NO: 29443 - protein, 466 aa, synthetic construct; identical to SEQ ID NO: 28961
  REGION 1..466: note = neuraminidase__InfluenzaB__AGX19792

SEQ ID NO: 29444 - protein, 466 aa, synthetic construct; identical to SEQ ID NO: 28961
  REGION 1..466: note = neuraminidase__InfluenzaB__AGX19803

SEQ ID NO: 29445 - protein, 466 aa, synthetic construct; identical to SEQ ID NO: 28961
  REGION 1..466: note = neuraminidase__InfluenzaB__AGX19814

SEQ ID NO: 29446 - protein, 466 aa, synthetic construct
  REGION 1..466: note = neuraminidase__InfluenzaB__AGX19825
MLPSTIQTLTLFLTSGGVLLSLYVSASLSYLLYSDILLKFSPTEITAPTMPLDCANASNVHAVNHSATKGVTLLLPEPEWTYPRLSCPGSTFQKALLISPHRFGETKGNSAPLIIREPFIACGPNECKHFALTHYAAQPGGYYNGTRGDRNKLRHLISVKLGKIPTVENSIFHMAAWSGSACHDGKEWTYIGVDGPDNNALLKIKYGEAYTDTYHSYANNILRTQESACNCIGGNCYLMVTDGSASGVSECRFLKIREGRIIKEIFPTGRVKHTEECTCGFANNKTIECACRDNSYTAKRPFVKLNVETDTAEIRLMCTDTYLDTPRPDDGSITGPCESNGDKGSGGIKGGFVHQRMASKIGRWYSRTMSKTERMGMGLYVKYDGDPWADSDALAFSGVMVSMKEPGWYSFGFEIKDKKCDVPCIGIEMVHDGGKETWHSAATAIYCLMGSGQLLWDTVTGVDMAL

SEQ ID NO: 29447 - protein, 466 aa, synthetic construct; identical to SEQ ID NO: 28961
  REGION 1..466: note = neuraminidase__InfluenzaB__AGX19836

SEQ ID NO: 29448 - protein, 466 aa, synthetic construct; identical to SEQ ID NO: 28961
  REGION 1..466: note = neuraminidase__InfluenzaB__AGX19847

SEQ ID NO: 29449 - protein, 466 aa, synthetic construct; identical to SEQ ID NO: 28961
  REGION 1..466: note = neuraminidase__InfluenzaB__AGX19858

SEQ ID NO: 29450 - protein, 466 aa, synthetic construct; identical to SEQ ID NO: 28961
  REGION 1..466: note = neuraminidase__InfluenzaB__AGX19869

SEQ ID NO: 29451 - protein, 466 aa, synthetic construct; identical to SEQ ID NO: 28961
  REGION 1..466: note = neuraminidase__InfluenzaB__AGX19880

SEQ ID NO: 29452 - protein, 466 aa, synthetic construct; identical to SEQ ID NO: 28961
  REGION 1..466: note = neuraminidase__InfluenzaB__AGX19891

SEQ ID NO: 29453 - protein, 466 aa, synthetic construct; identical to SEQ ID NO: 28961
  REGION 1..466: note = neuraminidase__InfluenzaB__AGX19902

SEQ ID NO: 29454 - protein, 466 aa, synthetic construct
  REGION 1..466: note = neuraminidase__InfluenzaB__AGX19913
MLPSTIQTLTLFLTSGGVLLSLYVSASLSYLLYSDILLKFSPTEITAPTMPLDCANASNVHAMNHSATKGVTLLLPEPEWTYPRLSCPGSTFQKALLISPHRFGETKGNSAPLIIREPFIACGPNECKHFALTHYAAQPGGYYNGTRGDRNKLRHLISVKLGKIPTVENSIFHMAAWSGSACHDGKEWTYIGVDGPDNNALLKIKYGEAYTDTYHSYANNILRTQESACNCIGGNCYLMVTDGSASGVSECRFLKIREGRIIKEIFPTGRVKHTEECTCGFASNKTIECACRDNSYTAKRPFVKLNVETDTAEIRLMCTDTYLDTPRPDDGSITGPCESNGDKGSGGIKGGFVHQRMASKIGRWYSRTMSKTERMGMGLYVKYDGDPWADSDALAFSGVMVSMKEPGWYSFGFEIKDKKCDVPCIGIEMVHDGGKETWHSAATAIYCLMGSGQLLWDTVTGVDMAL

SEQ ID NO: 29455 - protein, 466 aa, synthetic construct; identical to SEQ ID NO: 28961
  REGION 1..466: note = neuraminidase__InfluenzaB__AGX19924

SEQ ID NO: 29456 - protein, 466 aa, synthetic construct; identical to SEQ ID NO: 28961
  REGION 1..466: note = neuraminidase__InfluenzaB__AGX19935

SEQ ID NO: 29457 - protein, 466 aa, synthetic construct; identical to SEQ ID NO: 28961
  REGION 1..466: note = neuraminidase__InfluenzaB__AGX19946

SEQ ID NO: 29458 - protein, 466 aa, synthetic construct; identical to SEQ ID NO: 28961
  REGION 1..466: note = neuraminidase__InfluenzaB__AGX19957

SEQ ID NO: 29459 - protein, 466 aa, synthetic construct
  REGION 1..466: note = neuraminidase__InfluenzaB__AGX19968
MLPSTIQTLTLFLTSGGVLLSLYVSASLSYLLYSDILLKFSPTEITAPTMPLDCANASNVQAVNRSATKGVTLLLPEPEWTYPRLSCPGSTFQKALLISPHRFGETKGNSAPLIIREPFIACGPNECKHFALTHYAAQPGGYYNGTRGDRNKLRHLISVKLGKIPTVENSIFHMAAWSGSACHDGKEWTYIGVDGPDNDALLKVKYGEAYTDTYHSYANKILRTQESACNCIGGNCYLMITDGSASGVSECRFLKIREGRIIKEIFPTGRVKHTEECTCGFASNKTIECACRDNSYTAKRPFVKLNVETDTAEIRLMCTDTYLDTPRPNDGSITGPCESNGDKGSGGIKGGFVHQRMESKIGRWYSRTMSKTERMGMGLYVKYDGDPWADSDALAFSGVMVSMKEPGWYSFGFEIKDKKCDVPCIGIEMVHDGGKETWHSAATAIYCLMGSGQLLWDTVTGVNMAL

SEQ ID NO: 29460 - protein, 466 aa, synthetic construct; identical to SEQ ID NO: 29413
  REGION 1..466: note = neuraminidase__InfluenzaB__AGX19979

SEQ ID NO: 29461 - protein, 466 aa, synthetic construct; identical to SEQ ID NO: 29413
  REGION 1..466: note = neuraminidase__InfluenzaB__AGX19990

SEQ ID NO: 29462 - protein, 466 aa, synthetic construct; identical to SEQ ID NO: 28961
  REGION 1..466: note = neuraminidase__InfluenzaB__AGX20001

SEQ ID NO: 29463 - protein, 466 aa, synthetic construct; identical to SEQ ID NO: 28961
  REGION 1..466: note = neuraminidase__InfluenzaB__AGX20012

SEQ ID NO: 29464 - protein, 466 aa, synthetic construct; identical to SEQ ID NO: 28961
  REGION 1..466: note = neuraminidase__InfluenzaB__AGX20023

SEQ ID NO: 29465 - protein, 466 aa, synthetic construct; identical to SEQ ID NO: 28961
  REGION 1..466: note = neuraminidase__InfluenzaB__AGX20034

SEQ ID NO: 29466 - protein, 466 aa, synthetic construct; identical to SEQ ID NO: 28961
  REGION 1..466: note = neuraminidase__InfluenzaB__AGX20045

SEQ ID NO: 29467 - protein, 466 aa, synthetic construct
  REGION 1..466: note = neuraminidase__InfluenzaB__AGX20056
MLPSTIQTLTLFLTSGGVLLSLYVSASLSYLLYSDILLKFSPTEITAPTMPLDCANASNVQAVNRSATKGVTLLLPEPEWTYPRLSCPGSTFQKALLISPHRFGETKGNSAPLMIREPFIACGPNECKHFALTHYAAQPGGYYNGTRGDRNKLRHLISVKLGKIPTVENSIFHMAAWSGSACHDGKEWTYIGVDGPDNNALLKVKYGEAYTDTYHSYANKILRTQESACNCIGGNCYLMVTDGSASGVSECRFLKIREGRIIKEIFPTGRVKHTEECTCGFASNKTIECACRDNSYTAKRPFVKLNVETDTAEIRLMCTDTYLDTPRPNDGSITGPCESNGDKGSGGIKGGFVHQRMESKIGRWYSRTMSKTERMGMGLYVKYDGDPWADSDALAFSGVMVSMKEPGWYSFGFEIKDKKCDVPCIGIEMVHDGGKETWHSAATAIYCLMGSGQLLWDTVTGVDMAL

SEQ ID NO: 29468 - protein, 466 aa, synthetic construct
  REGION 1..466: note = neuraminidase__InfluenzaB__AGX20067
MLPSTIQTLTLFLTSGGVLLSLYVSASLSYLLYSDILLKFSPTEITAPTMPLDCANASNVQAVNRSATKGVTLLLPEPEWTYPRLSCPGSTFQKALLISPHRFGETKGNSAPLIIREPFIACGPNECKHFALTHYAAQPGGYYNGTRGDRNKLRHLISVKLGKIPTVENSIFHMAAWSGSACHDGKEWTYIGVDGPDNNALLKVKYGEAYTDTYHSYANKILRTQESACNCIGGNCYLMVTDGSASGVSECRFLKIREGRIIKEIFPTGRVKHTEECTCGFASNKTIECACRDNSYTAKRPFVKLNVETDTAEIRLMCTDTYLDTPRPNDGSITGPCESNGDKGSGGIKGGFVHQRMESKIGRWYSRTMSKTERMGMGLYVKYDGDPWADSDALAFSGVMVSMKEPGWYSFGFEIKDKKCDVPCIGIEMVHDGGKETWHSAATAIYCLMGSGQLLWDTVTGVDMAL

SEQ ID NO: 29469 - protein, 466 aa, synthetic construct; identical to SEQ ID NO: 28961
  REGION 1..466: note = neuraminidase__InfluenzaB__AGX20078

SEQ ID NO: 29470 - protein, 466 aa, synthetic construct; identical to SEQ ID NO: 28961
  REGION 1..466: note = neuraminidase__InfluenzaB__AGX20089

SEQ ID NO: 29471 - protein, 466 aa, synthetic construct
  REGION 1..466: note = neuraminidase__InfluenzaB__AGX20100
MLPSTIQTLTLFLTSGGVLLSLYVSASLSYLLYSDILLKFPSTEITAPTMPLDCANASNVQAVNRSATKGVTLLLPEPEWTYPRLSCPGSTFQKALLISPHRFGETKGNSAPLIIREPFIACGPKECKHFALTHYAAQPGGYYNGTRGDRNKLRHLISVKLGKIPTVENSIFHMAAWSGSACHDGKEWTYIGVDGPDNNAVLKIKYGEAYTDTYHSYANNILRTQESACNCIGGNCYLMITDGSASGVSECRFLKIREGRIIKEIFPTGRIQHTEECTCGFASNKTIECACRDNSYTAKRPFVKLNVETDTAEIRLMCTKTYLDTPRPDDGSITGPCESNGGKGSGGIKGGFVHQRMASKIGRWYSRTMSKTERKGMGLYVKYDGDPWADSDALAFSGVMVSMEEPGWYSFGFEIKDKKCDVPCIGIEMVHDGGKETWHSAATAIYCLMGSGQLLWDTVTGVNMAL

SEQ ID NO: 29472 - protein, 466 aa, synthetic construct
  REGION 1..466: note = neuraminidase__InfluenzaB__AGX20111
MLPSTIQTLTLFLTSGGVLLSLYVSASLSYLLYSDILLKFSPTEITAPTMPLDCANASNVQAVNRSATKGVTLLLPEPEWTYPRLSCPGSTFQKALLISPHRFGETKGNSAPLIIREPFIACGPNECKHFALTHYAAQPGGYYNGTRGDRNKLRHLISVKLGKIPTVENSIFHMAAWSGSACHDGKEWTYIGVDGPDNNALLKVKYGEAYTDTYHSYANKILRTQESACNCIGGNCYLMITDGSASGVSECRFLKIREGRIIKEIFPTGRVKHTEECTCGFASNKTIECACRDNSYTAKRPFVKLNVETDTAEIRLMCTDTYLDTPRPDDGSITGPCESNGDKGSGGIKGGFVHQRMESKIGRWYSRTMSKTERMGMGLYVKYDGDPWADSDALTFSGVMVSMKEPGWYSFGFEIKDKKCDVPCIGIEMVHDGGKETWHSAATAIYCLMGSGQLLWDTVTGVDMAL

SEQ ID NO: 29473 - protein, 466 aa, synthetic construct
  REGION 1..466: note = neuraminidase__InfluenzaB__AGX20122
MLPSTIQTLTLFLTSGGVLLSLYVSALLSYLLYSDILLKFSPTEITAPTMSLDCANASNVQAVNRSATKGVTFLLPEPEWTYPRLSCPGSTFQRALLISPHRFGETKGNSAPLIIREPFIACGPNECKHFALTHYAAQPGGYYNGTRGDRNKLRHLISVKLGKIPTVENSIFHMAAWSGSACHDGKEWTYIGVDGPDNDALLKVKYGEAYTDTYHSYANKILRTQESACNCIGGNCYLMITDGSASGVSECRFLKIREGRIIKEIFPTGRVKHTEECTCGFASNKTIECACRDNSYTAKRPFVKLNVETDTAEIRLMCTDTYLDTPRPDDGSITGPCESNGDKGSGGIKGGFVHQRMESKIGRWYSRTMSKTERMGMGLYVKYDGDPWADSDALAFSGVMVSMKEPGWYSFGFEIKDKKCDVPCIGIEMVHDGGKETWHSAATAIYCLMGSGQLLWDTVTGVDMAL

SEQ ID NO: 29474 - protein, 466 aa, synthetic construct
  REGION 1..466: note = neuraminidase__InfluenzaB__AGX20133
MLPSTIQTLTLFLTSGGVLLSLYVSALLSYLLYSDVLLKFSPTEITAPTMSLDCANASNVQAVNRSATKGVTFLLPEPEWTYPRLSCPGSTFQKALLISPHRFGETKGNSAPLIIREPFIACGPNECKHFALTHYAAQPGGYYNGTRGDRNKLRHLISVKLGKIPTVENSIFHMAAWSGSACHDGKEWTYIGVDGPDNDALLKVKYGEAYTDTYHSYANKILRTQESACNCIGGNCYLMITDGSASGVSECRFLKIREGRIIKEIFPTGRVKHTEECTCGFASNKTIECACRDNSYTAKRPFVKLNVETDTAEIRLMCTDTYLDTPRPDDGSITGPCESNGDKGSGGIKGGFVHQRMESKIGRWYSRTMSKTERMGMGLYVKYDGDPWADSDALAFSGVMVSMKEPGWYSFGFEIKDKKCDVPCIGIEMVHDGGKETWHSAATAIYCLMGSGQLLWDTVTGVDMAL

SEQ ID NO: 29475 - protein, 466 aa, synthetic construct
  REGION 1..466: note = neuraminidase__InfluenzaB__AGX20144
MLPSTIQTLTLFLTSGGVLLSLYVSALLSYLLYSDILLKFSPTEITAPTMSLDCANASNVQAVNRSATKGVTFLLPEPEWTYPRLSCPGSTFQKALLISPHRFGETKGNSAPLIIREPFIACGPNECKHFALTHYAAQPGGYYNGTRGDRNKLRHLISVKLGKIPTVENSIFHMAAWSGSACHDGKEWTYIGVDGPDNDALLKVKYGEAYTDTYHSYANKILRTQESACNCIGGNCYLMITDGSASGISECRFLKIREGRIIKEIFPTGRVKHTEECTCGFASNKTIECACRDNSYTAKRPFVKLNVETDTAEIRLMCTDTYLDTPRPDDGSITGPCESNGDKGSGGIKGGFVHQRMESKIGRWYSRTMSKTERMGMGLYVKYDGDPWADSDALAFSGVMVSMKEPGWYSFGFEIKDKKCDVPCIGIEMVHDGGKETWHSAATAIYCLMGSGQLLWDTVTGVDMAL

SEQ ID NO: 29476 - protein, 466 aa, synthetic construct; identical to SEQ ID NO: 29475
  REGION 1..466: note = neuraminidase__InfluenzaB__AGX20155

SEQ ID NO: 29477 - protein, 466 aa, synthetic construct; identical to SEQ ID NO: 29475
  REGION 1..466: note = neuraminidase__InfluenzaB__AGX20166

SEQ ID NO: 29478 - protein, 466 aa, synthetic construct; identical to SEQ ID NO: 28895
  REGION 1..466: note = neuraminidase__InfluenzaB__AGX20177

SEQ ID NO: 29479 - protein, 466 aa, synthetic construct; identical to SEQ ID NO: 28895
  REGION 1..466: note = neuraminidase__InfluenzaB__AGX20188

SEQ ID NO: 29480 - protein, 466 aa, synthetic construct; identical to SEQ ID NO: 28872
  REGION 1..466: note = neuraminidase__InfluenzaB__AGX20199

SEQ ID NO: 29481 - protein, 466 aa, synthetic construct; identical to SEQ ID NO: 28895
  REGION 1..466: note = neuraminidase__InfluenzaB__AGX20210

SEQ ID NO: 29482 - protein, 466 aa, synthetic construct; identical to SEQ ID NO: 29475
  REGION 1..466: note = neuraminidase__InfluenzaB__AGX20221

SEQ ID NO: 29483 - protein, 466 aa, synthetic construct
  REGION 1..466: note = neuraminidase__InfluenzaB__AGX20232
MLPSTIQTLTLFLTSGGVLLSLYVSASLSYLLYSGILLKFSPTEITAPTMPLDCANASNVQAVNRSATKGVTFLLPEPEWTYPRLSCPGSTFQKALLISPHRFGETKGNSAPLIIREPFIACGPNECKHFALTHYAAQPGGYYNGTRGDRNKLRHLISVKLGKIPTVENSIFHMAAWSGSACHDGKEWTYIGVDGPDNNALLKVKYGEAYTDTYHSYANKILRTQESACNCIGGNCYLMITDGSASGVSECRFLKIREGRIIKEIFPTGRVKHTEECTCGFASNETIECACRDNSYTAKRPFVKLNVETDTAEIRLMCTDTYLDTPRPNDGSITGPCESNGDKGGGGIKGGFVHQRMESKIGRWYSRTMSKTERMGMGLYVKYDGDPWADSDALAFSGVMVSMKEPGWYSFGFEIKDKKCDVPCIGIEMVHDGGKETWHSAATAIYCLMGSGQLLWDTVTGVDMAL

SEQ ID NO: 29484 - protein, 466 aa, synthetic construct; identical to SEQ ID NO: 28895
  REGION 1..466: note = neuraminidase__InfluenzaB__AGX20243

SEQ ID NO: 29485 - protein, 466 aa, synthetic construct; identical to SEQ ID NO: 29475
  REGION 1..466: note = neuraminidase__InfluenzaB__AGX20254

SEQ ID NO: 29486 - protein, 466 aa, synthetic construct; identical to SEQ ID NO: 28872
  REGION 1..466: note = neuraminidase__InfluenzaB__AGX20265

SEQ ID NO: 29487 - protein, 466 aa, synthetic construct; identical to SEQ ID NO: 29475
  REGION 1..466: note = neuraminidase__InfluenzaB__AGX20276

SEQ ID NO: 29488 - protein, 466 aa, synthetic construct; identical to SEQ ID NO: 28895
  REGION 1..466: note = neuraminidase__InfluenzaB__AGX20287

SEQ ID NO: 29489 - protein, 466 aa, synthetic construct
  REGION 1..466: note = neuraminidase__InfluenzaB__AGX20298
MLPSTIQTLTLFLTSGGVLLSLYVSALLSYLLYSDILLKFSPTEITAPTMSLDCANASNVQAVNRSATKGVTFLLPEPEWTYPRLSCPGSTFQKALLISPHRFGETKGNSAPLIIREPFIACGPNECKHFALTHYAAQPGGYYNGTRGDRNKLRHLISVKLGKIPTVENSIFHMAAWSGSACHDGKEWTYIGVDGPDNDALLKVKYGEAYTDTYHSYANKILRTQESACNCIGGNCYLMITDGSASGVSECRFLKIREGRIIKEIFPTGRVKHTEECTCGFASNKTIECACRDNSYTAKRPFVKLNVETDTAEIRLMCTDTYLDTPRPDDGSITGPCESNGDKGSGGIKGGFVHQRMESKIGRWYSRTMSKTERMGMGLYVKYDGDPWADSDALAFSGVMVSMKEPGWYSFGFEIKDKKCDVPCIGIEMVHDGGKETWQSAATAIYCLMGSGQLLWDTVTGVDMAL

SEQ ID NO: 29490 - protein, 466 aa, synthetic construct; identical to SEQ ID NO: 28872
  REGION 1..466: note = neuraminidase__InfluenzaB__AGX20320

SEQ ID NO: 29491 - protein, 466 aa, synthetic construct; identical to SEQ ID NO: 28895
  REGION 1..466: note = neuraminidase__InfluenzaB__AGX20331

SEQ ID NO: 29492 - protein, 466 aa, synthetic construct
  REGION 1..466: note = neuraminidase__InfluenzaB__AGX20342
MLPSTIQTLTLFLTSGGVLLSLYVSASLSYLLYSDILLKFSPTEITAPTMPLDCANASNVQAVNRSATKGVTLLLPEPEWTYPRLSCPGSTFQKALLISPHRFGETKGNSAPLIIREPFIACGPNECKHFALTHYAAQPGGYYNGTRGDRNKLRHLISVKLGKIPTVENSIFHMAAWSGSACHDGKEWTYIGVDGPDNNALLKVKYGEAYTDTYHSYANKILRTQESACNCIGGNCYLMVTDGSASGVSECRFLKIREGRIIKEIFPTGRVKHTEECTCGFASNKTIECACRDNSYTAKRPFVKLNVETDTAEIRLMCTDTYLDTPRPDDGSITGPCESNGDKGSGGIKGGFVHQRMESKIGRWYSRTMSKTERMGMGLYVKYDGDPWADSDALAFSGVMVSMKEPGWYSFGFEIKDKKCDVPCIGIEMVHDGGKETWHSAATAIYCLMGSGQLLWDTVTGVDMAL

SEQ ID NO: 29493 - protein, 466 aa, synthetic construct
  REGION 1..466: note = neuraminidase__InfluenzaB__AGX20353
MLPSTIQTLTLFLTSGGVLLSLYVSALLSYLLYSDILLKFSPTEIIAPTMSLDCANASNVQAVNRSATKGVTFLLPEPEWTYPRLSCPGSTFQKALLISPHRFGETKGNSAPLIIREPFIACGPNECKHFALTHYAAQPGGYYNRTRGDRNKLRHLISVKLGKIPTVENSIFHMAAWSGSACHDGKEWTYIGVDGPDNDALLKVKYGEAYTDTYHSYANKILRTQESACNCIGGNCYLMITDGSASGISECRFLKIREGRIIKEIFPTGRVKHTEECTCGFASNKTIECACRDNSYTAKRPFVKLNVETDTAEIRLMCTDTYLDTPRPDDGSITGPCESNGDKGSGGIKGGFVHQRMESKIGRWYSRTMSKTERMGMGLYVKYDGDPWADSDALAFSGVMVSMKEPGWYSFGFEIKDKKCDVPCIGIEMVHDGGKETWHSAATAIYCLMGSGQLLWDTVTGVDMAL

SEQ ID NO: 29494 - protein, 466 aa, synthetic construct; identical to SEQ ID NO: 28895
  REGION 1..466: note = neuraminidase__InfluenzaB__AGX20364

SEQ ID NO: 29495 - protein, 466 aa, synthetic construct; identical to SEQ ID NO: 28890
  REGION 1..466: note = neuraminidase__InfluenzaB__AGX20375

SEQ ID NO: 29496 - protein, 466 aa, synthetic construct
  REGION 1..466: note = neuraminidase__InfluenzaB__AGX20386
MLPSTIQTLTLFLTSGGVLLSLYVSALLSYLLYSDILLKFSPTEITAPTMSLDCANASNVQAVNRSATKGVTFLLPEPEWTHPRLSCPGSTFQKALLISPHRFGETKGNSAPLIIREPFIACGPNECKHFALTHYAAQPGGYYNGTRGDRNKLRHLISVKLGKIPTVENSIFHMAAWSGSACHDGKEWTYIGVDGPDNDALLKVKYGEAYTDTYHSYANKILRTQESACNCIGGNCYLMITDGSASGISECRFLKIREGRIIKEIFPTGRVKHTEECTCGFASNKTIECACRDNSYTAKRPFVKLNVETDTAEIRLMCTDTYLDTPRPDDGSITGPCESNGDKGSGGIKGGFVHQRMESKIGRWYSRTMSKTERMGMGLYVKYDGDPWADSDALAFSGVMVSMKEPGWYSFGFEIKDKKCDVPCIGIEMVHDGGKETWHSAATAIYCLMGSGQLLWDTVTGVDMAL

SEQ ID NO: 29497 - protein, 466 aa, synthetic construct; identical to SEQ ID NO: 28895
  REGION 1..466: note = neuraminidase__InfluenzaB__AGX20397

SEQ ID NO: 29498 - protein, 466 aa, synthetic construct; identical to SEQ ID NO: 28890
  REGION 1..466: note = neuraminidase__InfluenzaB__AGX20408

SEQ ID NO: 29499 - protein, 466 aa, synthetic construct; identical to SEQ ID NO: 28872
  REGION 1..466: note = neuraminidase__InfluenzaB__AGX20419

SEQ ID NO: 29500 - protein, 466 aa, synthetic construct
  REGION 1..466: note = neuraminidase__InfluenzaB__AGX20430
MLPSTIQTLTLFLTSGGVLLSLYVSALLSYLLYSDILLKFSPTEITAPTMSLDCANASNVQAVNRSATKGVTFLLPEPEWTYPRLSCPGSTFQRALLISPHRFGEAKGNSAPLIIREPFIACGPNECKHFALTHYAAQPGGYYNGTRGDRNKLRHLISVKLGKIPTVENSIFHMAAWSGSACHDGKEWTYIGVDGPDNDALLKVKYGEAYTDTYHSYANKILRTQESACNCIGGNCYLMITDGSASGVSECRFLKIREGRIIKEIFPTGRVKHTEECTCGFASNKTIECACRDNSYTAKRPFVKLNVETDTAEIRLMCTDTYLDTPRPDDGSITGPCESNGDKGSGGIKGGFVHQRMESKIGRWYSRTMSKTERMGMGLYVKYDGDPWADSDALAFSGVMVSMKEPGWYSFGFEIKDKKCDVPCIGIEMVHDGGKETWHSAATAIYCLMGSGQLLWDTVTGVDMAL

SEQ ID NO: 29501 - protein, 466 aa, synthetic construct; identical to SEQ ID NO: 28872
  REGION 1..466: note = neuraminidase__InfluenzaB__AGX20441

SEQ ID NO: 29502 - protein, 466 aa, synthetic construct
  REGION 1..466: note = neuraminidase__InfluenzaB__AGX20452
MLPSTIQTLTLFLTSGGVLLSLYVSASLSYLLYSDILLKFSPTEITAPTMSLDCANASNVQAVNRSATKGVTFLLPEPEWTYPRLSCPGSTFQKALLISPHRFGETKGNSAPLIIREPFIACGPNECKHFALTHYAAQPGGYYNGTRGDRNKLRHLISVKLGKIPTVENSIFHMAAWSGSACHDGKEWTYIGVDGPDNDALLKVKYGEAYTDTYHSYANKILRTQESACNCIGGNCYLMITDGSASGVSECRFLKIREGRIIKEIFPTGRVKHTEECTCGFASNKTIECACRDNSYTAKRPFVKLNVETDTAEIRLMCTDTYLDTPRPDDGSITGPCESNGDKGSGGIKGGFVHQRMESKIGRWYSRTMSKTERMGMGLYVKYDGDPWADSDALAFSGVMVSMKEPGWYSFGFEIRDKKCDVPCIGIEMVHDGGKETWHSAATAIYCLMGSGQLLWDTVTGVDMAL

SEQ ID NO: 29503 - protein, 466 aa, synthetic construct; identical to SEQ ID NO: 28895
  REGION 1..466: note = neuraminidase__InfluenzaB__AGX20463

SEQ ID NO: 29504 - protein, 466 aa, synthetic construct; identical to SEQ ID NO: 28895
  REGION 1..466: note = neuraminidase__InfluenzaB__AGX20474

SEQ ID NO: 29505 - protein, 466 aa, synthetic construct; identical to SEQ ID NO: 28895
  REGION 1..466: note = neuraminidase__InfluenzaB__AGX20485

SEQ ID NO: 29506 - protein, 466 aa, synthetic construct; identical to SEQ ID NO: 29475
  REGION 1..466: note = neuraminidase__InfluenzaB__AGX20496

SEQ ID NO: 29507 - protein, 466 aa, synthetic construct; identical to SEQ ID NO: 28895
  REGION 1..466: note = neuraminidase__InfluenzaB__AGX20507

SEQ ID NO: 29508 - protein, 466 aa, synthetic construct; identical to SEQ ID NO: 28895
  REGION 1..466: note = neuraminidase__InfluenzaB__AGX20518

SEQ ID NO: 29509 - protein, 466 aa, synthetic construct
  REGION 1..466: note = neuraminidase__InfluenzaB__AGX20529
MLPSTIQTLTLFLTSGGVLLSLYVSALLSYLLYSDILLKFSPTEITAPTMSLDCANASNVQAVNRSATKGVTFLLPEPEWTYPRLSCPGSTFQKALLISPHRFGETKGNSAPLIIREPFIACGPNECKHFALTHYAAQPGGYYNGTRGDRNKLRHLISVKLGKIPTVENSIFHMAAWSGSACHDGKEWTYIGVDGPDNDALLKVKYGEAYTDTYHSYANKILRTQESACNCIGGNCYLMITDGSASGVSECRFLKIREGRIIKEIFPTGRVKHTEECTCGFASNKTIECTCRDNSYTAKRPFVKLNVETDTAEIRLMCTDTYLDTPRPDDGSITGPCESNGDKGSGGIKGGFVHQRMESKIGRWYSRTMSKTERMGMGLYVKYDGDPWADSDALAFSGVMVSMKEPGWYSFGFEIKDKKCDVPCIGIEMVHDGGKETWHSAATAIYCLMGSGQLLWDTVTGVDMAL

SEQ ID NO: 29510 - protein, 466 aa, synthetic construct; identical to SEQ ID NO: 29473
  REGION 1..466: note = neuraminidase__InfluenzaB__AGX20540

SEQ ID NO: 29511 - protein, 466 aa, synthetic construct; identical to SEQ ID NO: 29119
  REGION 1..466: note = neuraminidase__InfluenzaB__AGX20551

SEQ ID NO: 29512 - protein, 466 aa, synthetic construct; identical to SEQ ID NO: 28872
  REGION 1..466: note = neuraminidase__InfluenzaB__AGX20562

SEQ ID NO: 29513 - protein, 466 aa, synthetic construct; identical to SEQ ID NO: 28895
  REGION 1..466: note = neuraminidase__InfluenzaB__AGX20573

SEQ ID NO: 29514 - protein, 466 aa, synthetic construct
  REGION 1..466: note = neuraminidase__InfluenzaB__AGX20584
MLPSTIQTLTLFLTSGGVLLSLYVSASLSYLLYSDILLKFSSTEITAPTMPLDCANASNVQAVNRSATKGVTLLLPEPEWTYPRLSCPGSTFQKALLISPHRFGETKGNSAPLIIREPFIACGPNECKHFALTHYAAQPGGYYNGTRGDRNKLRHLISVKLGKIPTVENSIFHMAAWSGSACHDGKEWTYIGVDGPDNNALLKVKYGEAYTDTYHSYANKILRTQESACNCIGGNCYLMITDGSASGVSECRFLKIREGRIIKEIFPTGRVKHTEECTCGFASNKTIECACRDNSYTAKRPFVKLNVETDTAEIRLMCTDTYLDTPRPNDGSITGPCESNGDKGSGGIKGGFVHQRMESRIGRWYSRTMSKTERMGMGLYVKYDGDPWTDSDALTFSGVMVSMKEPGWYSFGFEIKDKKCDVPCIGIEMVHDGGKETWHSAATAIYCLMGSGQLLWDTVTGVDMAL

SEQ ID NO: 29515 - protein, 466 aa, synthetic construct; identical to SEQ ID NO: 28895
  REGION 1..466: note = neuraminidase__InfluenzaB__AGX20595

SEQ ID NO: 29516 - protein, 466 aa, synthetic construct; identical to SEQ ID NO: 29473
  REGION 1..466: note = neuraminidase__InfluenzaB__AGX20606

SEQ ID NO: 29517 - protein, 466 aa, synthetic construct; identical to SEQ ID NO: 29473
  REGION 1..466: note = neuraminidase__InfluenzaB__AGX20617

SEQ ID NO: 29518 - protein, 466 aa, synthetic construct; identical to SEQ ID NO: 29500
  REGION 1..466: note = neuraminidase__InfluenzaB__AGX20628

SEQ ID NO: 29519 - protein, 466 aa, synthetic construct; identical to SEQ ID NO: 28900
  REGION 1..466: note = neuraminidase__InfluenzaB__AGX20639

SEQ ID NO: 29520 - protein, 466 aa, synthetic construct
  REGION 1..466: note = neuraminidase__InfluenzaB__AGX20650
MLPSTIQTLTLFLTSGGVLLSLYVSALLSYLLYSDILLKFSPTEITAPTMSLDCANASNVQAVNRSATKGVTFLLPEPEWTYPRLSCPGSTFQKALLISPHRFGETKGNSAPLIIREPFIACGPNECKHFALTHYAAQPGGYYNGTRGDRNKLRHLISVKLGKIPTVENSIFHMAAWSGSACHDGKEWTYIGVDGPDNDALLKVKYGEAYTDTYHSYANKILRTQESTCNCIGGNCYLMITDGSASGVSECRFLKIREGRIIKEIFPTGRVKHTEECTCGFASNKTIECACRDNSYTAKRPFVKLNVETDTAEIRLMCTDTYLDTPRPDDGSITGPCESNGDKGSGGIKGGFVHQRMESKIGRWYSRTMSKTERMGMGLYVKYDGDPWADSDALAFSGVMVSMKEPGWYSFGFEIKDKKCDVPCIGIEMVHDGGKETWHSAATAIYCLMGSGQLLWDTVTGVDMAL

SEQ ID NO: 29521 - protein, 466 aa, synthetic construct
  REGION 1..466: note = neuraminidase__InfluenzaB__AGX20661
MLPSTIQTLTLFLTSGGVLLSLYVSASLSYLLYSDILLKFSPTEITAPTMPLDCANASNVQAVNRSATKGVTLLLPEPEWTYPRLSCPGSTFQKALLISPHRFGETKGNSAPLIIREPFIACGPNECKHFALTHYAAQPGGYYNGTRGDRNKLRHLISVNLGKIPTVENSIFHMAAWSGSACHDGKEWTYIGVDGPDNNALLKVKYGEAYTDTYHSYANNILRTQESACNCIGGNCYLMITDGSASGVSECRFLKIREGRIIKEIFPTGRVKHTEECTCGFASNKTIECACRDNSYTAKRPFVKLNVETDTAEIRLMCTDTYLDTPRPNDGSITGPCESNGDKGSGGIKGGFVHQRMESKIGRWYSRTMSKTERMGMGLYVKYDGDPWTDSDALAFSGVMVSMKEPGWYSFGFEIKDKKCDVPCIGIEMVHDGGKETWHSAATAIYCLMGSGQLLWDTVTGVDMAL

SEQ ID NO: 29522 - protein, 466 aa, synthetic construct; identical to SEQ ID NO: 28956
  REGION 1..466: note = neuraminidase__InfluenzaB__AGX20683

SEQ ID NO: 29523 - protein, 466 aa, synthetic construct; identical to SEQ ID NO: 29119
  REGION 1..466: note = neuraminidase__InfluenzaB__AGX20694

SEQ ID NO: 29524 - protein, 466 aa, synthetic construct
  REGION 1..466: note = neuraminidase__InfluenzaB__AGX20705
MLPSTIQTLTLFLTSGGVLLSLYVSASLSYLLYSGILLKFSPTEITAPTMPLDCANASDVQAVNRSATKGVTLLLPEPEWTYPRLSCPGSTFQKALLISPHRFGETKGNSAPLIIREPFIACGPNECKHFALTHYAAQPGGYYNGTRGDRNKLRHLISVKLGKIPTVENSIFHMAAWSGSACHDGKEWTYIGVDGPDNNALLKVKYGEAYTDTYHSYANKILRTQESACNCIGGNCYLMITDGSASGVSECRFLKIREGRIIKEIFPTGRVKHTEECTCGFASNKTIECACRDNSYTAKRPFVKLNVETDTAEIRLMCTDTYLDTPRPNDGSITGPCESNGDKGSGGIKGGFVHQRMESKIGRWYSRTMSKTERMGMGLYVKYDGDPWADSDALTFSGVMVSMKEPGWYSFGFEIKDKKCDVPCIGIEMVHDGGKETWHSAATAIYCLMGSGQLLWDTVTGVDMAL

SEQ ID NO: 29525 - protein, 466 aa, synthetic construct
  REGION 1..466: note = neuraminidase__InfluenzaB__AGX20716
MLPSTIQTLTLFLTSGGVLLSLYVSASLSYLLYSDILLKFSPTEITAPTMPLDCANASNVQAVNRSATKGVTLLLPEPEWTYPRLSCPGSTFQKALLISPHRFGETKGNSAPLIIREPFIACGPNECKHFALTHYAAQPGGYYNGTRGDRNKLRHLISVKLGKIPTVENSIFHMAAWSGSACHDGKEWTYIGVDGPDNNALLKVKYGEAYTDTYHSYANKILRTQESACNCIGGNCYLMITDGSASGVSECRFLKIREGRIIKEIFPTGRVKHTEECTCGFASNKTIECACRDNSYTAKRPFVKLNVETDTAEIRLMCTDTYLDTPRPNDGSITGPCESDGDKGSGGIKGGFVHQRIESRIGRWYSRTMSKTERMGMGLYVKYDGDPWADSDALAFSGVMVSMKEPGWYSFGFEIKDKKCDVPCIGIEMVHDGGKETWHSAATAIYCLMGSGQLLWDTVTGVDMAL

SEQ ID NO: 29526 - protein, 466 aa, synthetic construct
  REGION 1..466: note = neuraminidase__InfluenzaB__AGX20727
MLPSTIQTLTLFLTSGGVLLSLYVSALLSYLLYSDILLKFSPTEITAPTMSLDCANASNVQAVNRSATKGVTFLLPEPEWTYPRLSCPGSTFQKALLISPHRFGETKGNSAPLIIREPFIACGPNECKHFALTHYAAQPGGYYNGTRGDRNKLRHLISVKLGKIPTVENSIFHMAAWSGSACHDGKEWTYIGVDGPDNDALLKVKYGEAYTDTYHSYANKILRTQESACNCIGGNCYLMITDGSASGVSECRFLKIREGRIIKEIFPTGRVKHTEECTCGFASNKTIECACRDNSYTAKRPFVKLNVETDTAEIRLMCTDTYLDTPRPDDGSTTGPCESNGDKGSGGIKGGFVHQRMESKIGRWYSRTMSKTERMGMGLYVKYDGDPWADSDALAFSGVMVSMKEPGWYSFGFEIKDKKCDVPCIGIEMVHDGGKETWHSAATAIYCLMGSGQLLWDTVTGVDMAL

SEQ ID NO: 29527 - protein, 466 aa, synthetic construct; identical to SEQ ID NO: 29119
  REGION 1..466: note = neuraminidase__InfluenzaB__AGX20738

SEQ ID NO: 29528 - protein, 466 aa, synthetic construct; identical to SEQ ID NO: 28895
  REGION 1..466: note = neuraminidase__InfluenzaB__AGX20749

SEQ ID NO: 29529 - protein, 466 aa, synthetic construct
  REGION 1..466: note = neuraminidase__InfluenzaB__AGX20760
MLPSTIQTLTLFLTSGGVLLSLYVSASLSYLLYSDILLKFSPTEITAPTMPLDCANASNVQAVNRSATKGVTLLLPEPEWTYPRLSCPGSTFQKALLISPHRFGETKGNSAPLIIREPFIACGPNECKHFALTHYAAQPGGYYNGTRGDRNKLRHLISVKLGKIPTVENSIFHMAAWSGSACHDGKEWTYIGVDGPDNNALLKVKYGEAYTDTYHSYANKILRTQESACNCIGGNCYLMITDGSASGVSECRFLKIREGRIIKEIFPTGRVKHTEECTCGFASNKTIECACRDNSYTAKRPFVKLNVETDTAEIRLMCTDTYLDTPRPNDGSITGPCESDGDKGSGGIKGGFVHQRMESRIGRWYSRTMSKTERMGMGLYVKYDGDPWADSDALAFSGVMVSMKEPGWYSFGFEIKDKKCDVPCIGIEMVHDGGKETWHSAATAIYCLMGSGQLLWDTVTGVDMAL

SEQ ID NO: 29530 - protein, 466 aa, synthetic construct; identical to SEQ ID NO: 28895
  REGION 1..466: note = neuraminidase__InfluenzaB__AGX20771

SEQ ID NO: 29531 - protein, 466 aa, synthetic construct
  REGION 1..466: note = neuraminidase__InfluenzaB__AGX20782
MLPSTIQTLTLFLTSGGVLLSLYVSASLSYLLYSDILLKFSPTEITAPTMPLDCANASNVQAVNHSATKGVTLLLPEPEWTYPRLSCPGSTFQKALLISSHRFGETKGNSAPLIIREPFVACGPNECKHFALTHYAAQPGGYYNGTRGDRNKLRHLISVKLGKIPTVENSIFHMAAWSGSACHDGKEWTYIGVDGPDNNALLKVKYGEAYTDTYHSYANKILRTQESACNCIGGNCYLMITDGSASGVSECRFLKIREGRIIKEIFPTGRVKHTEECTCGFASNKTIECACRDNSYTAKRPFVKLNVETDTAEIRLMCTDTYLDTPRPNDGSITGPCESDGDKGSGGIKGGFVHQRMESKIGRWYSRTMSRTERMGMGLYVKYDGDPWADSDALAFSGVMVSMKEPGWYSFGFEIKDKKCDVPCIGIEMVHDGGKETWHSAATAIYCLMGSGQLLWDTVTGVDMAL

SEQ ID NO: 29532 - protein, 466 aa, synthetic construct
  REGION 1..466: note = neuraminidase__InfluenzaB__AGX20793
MLPSTIQTLTLFLTSGGVLLSLYVSALLSYLLYSDILLKFSPTEITAPTMSLDCANTSNVQAVNRSATKGVTFLLPEPEWTYPRLSCPGSTFQKALLISPHRFGETKGNSAPLIIREPFIACGPNECKHFALTHYAAQPGGYYNGTRGDRNKLRHLISVKLGKIPTVENSIFHMAAWSGSACHDGKEWTYIGVDGPDNDALLKVKYGEAYTDTYHSYANKILRTQESACNCIGGNCYLMITDGSASGVSECRFLKIREGRIIKEIFPTGRVKHTEECTCGFASNKTIECACRDNSYTAKRPFVKLNVETDTAEIRLMCTDTYLDTPRPDDGSITGPCESNGDKGSGGIKGGFVHQRMESKIGRWYSRTMSKTERMGMGLYVKYDGDPWADSDALAFSGVMVSMKEPGWYSFGFEIKDKKCDVPCIGIEMVHDGGKETWHSAATAIYCLMGSGQLLWDTVTGVNMAL

SEQ ID NO: 29533 - protein, 466 aa, synthetic construct
  REGION 1..466: note = neuraminidase__InfluenzaB__AGX20804
MLPSTIQTLTLFITSGGVLLSLYVSALLSYLLYSDILLKFSPTEITAPTMSLDCANASNVQAVNRSATKGVTFLLPEPEWTYPRLSCPGSTFQKALLISPHRFGETKGNSAPLIIREPFIACGPNECKHFALTHYAAQPGGYYNGTRGDRNKLRHLISVKLGKIPTVENSIFHMAAWSGSACHDGKEWTYIGVDGPDNDALLKVKYGEAYTDTYHSYANKILRTQESACNCIGGNCYLMITDGSASGVSECRFLKIREGRIIKEIFPTGRVKHTEECTCGFASNKTIECACRDNSYTAKRPFVKLNVETDTAEIRLMCTDTYLDTPRPDDGSITGPCESNGDKGSGGIKGGFVHQRMESKIGRWYSRTMSKTERMGMGLYVKYDGDPWADSDALAFSGVMVSMKEPGWYSFGFEIKDKKCDVPCIGIEMVHDGGKETWHSAATAIYCLMGSGQLLWDTVTGVDMAL

SEQ ID NO: 29534 - protein, 466 aa, synthetic construct; identical to SEQ ID NO: 28956
  REGION 1..466: note = neuraminidase__InfluenzaB__AGX20815

SEQ ID NO: 29535 - protein, 466 aa, synthetic construct; identical to SEQ ID NO: 28956
  REGION 1..466: note = neuraminidase__InfluenzaB__AGX20826

SEQ ID NO: 29536 - protein, 466 aa, synthetic construct; identical to SEQ ID NO: 28956
  REGION 1..466: note = neuraminidase__InfluenzaB__AGX20837

SEQ ID NO: 29537 - protein, 466 aa, synthetic construct; identical to SEQ ID NO: 28956
  REGION 1..466: note = neuraminidase__InfluenzaB__AGX20848

SEQ ID NO: 29538 - protein, 466 aa, synthetic construct
  REGION 1..466: note = neuraminidase__InfluenzaB__AGX20870
MLPSTIQMLTLFLTSGGVLLSLYVSASLSYLLYSDILLKFSPTEITAPTMPLDCANASNVHAVNRSATKGVTFLLPEPEWTYPRLSCPGSTFQKALLISPHRFGETKGNSAPLIIREPFIACGPNECKHFALTHYAAQPGGYYNGTRGDRNKLRHLISVKLGKIPTVENSIFHMAAWSGSACHDGKEWTYIGVDGPDNNALLKIKYGEAYTDTYHSYANNILRTQESACNCIGGNCYLMITDGSASGVSECRFLKIREGRIIKEIFPTGRVKHTEECTCGFASNKTIECACRDNSYTAKRPFVKLNVETDTAEIRLMCTDTYLDTPRPDDGSITGPCESNGDKGSGGIKGGFVHQRMASKIGRWYSRTMSKTERKGMGLYVKYDGEPWTDSDALAFRGVMVSMKEPGWYSFGFEIKDKKCDVPCIGIEMVHDGGKETWHSAATAIYCLMGSGQLLWDTVTGVDMAL

SEQ ID NO: 29539 - protein, 466 aa, synthetic construct
  REGION 1..466: note = neuraminidase__InfluenzaB__AGX20881
MLPSTIQMLTLFLTSGGVLLSLYVSASLSYLLYSDILLKFSPTEITAPTMPLDCANASNVHAVNRSATKGVTFLLPEPEWTYPRLSCPGSTFQKALLISPHRFGETKGNSAPLIIREPFIACGPNECKHFALTHYAAQPGGYYNGTRGNRNKLRHLISVKLGKIPTVENSIFHMAAWSGSACHDGKEWTYIGVDGPDNNALLKIKYGEAYTDTYHSYANNILRTQESACNCIGGNCYLMITDGSASGVSECRFLKIREGRIIKEIFPTGRVKHTEECTCGFASNKTIECACRDNSYTAKRPFVKLNVETDTAEIRLMCTDTYLDTPRPDDGSITGPCESNGDKGSGGIKGGFVHQRMASKIGRWYSRTMSKTERKGMGLYVKYDGDPWTDSDALAFRGVMVSMKEPGWYSFGFEIKDKKCDVPCIGIEMVHDGGKETWHSAATAIYCLMGSGQLLWDTVTGVDMAL

SEQ ID NO: 29540 - protein, 466 aa, synthetic construct
  REGION 1..466: note = neuraminidase__InfluenzaB__AGX20892
MLPSTIQTLTLFLTSGGVLLSLYVSALLSYLLYSDILLKFSPTEITAPTMSLDCANASNVQAVNRSATKGVTFLLPEPEWTYPRLSCPGSTFQRALLISPHRFGEAKGNSAPLIIREPFIACGPNECKHFALTHYAAQPGGYYNGTRGDRNKLRHLISVKLGKIPTVENSIFHMAAWSGSACHDGKEWTYIGVDGPDNDALLKVKYGEAYTDTYHSYANKILRTQESACNCIGGNCYLMITDGSASGVSECRFLKIREGRIIKEILPTGRVKHTEECTCGFASNKTIECACRDNSYTAKRPFVKLNVETDTAEIRLMCTDTYLDTPRPDDGSITGPCESNGDKGSGGIKGGFVHQRMESKIGRWYSRTMSKTERMGMGLYVKYDGDPWADSDALAFSGVMVSMKEPGWYSFGFEIKDKKCDVPCIGIEMVHDGGKETWHSAATAIYCLMGSGQLLWDTVTGVDMAL

SEQ ID NO: 29541 - protein, 466 aa, synthetic construct; identical to SEQ ID NO: 28956
  REGION 1..466: note = neuraminidase__InfluenzaB__AGX20903

SEQ ID NO: 29542 - protein, 466 aa, synthetic construct; identical to SEQ ID NO: 28956
  REGION 1..466: note = neuraminidase__InfluenzaB__AGX20914

SEQ ID NO: 29543 - protein, 466 aa, synthetic construct
  REGION 1..466: note = neuraminidase__InfluenzaB__AGX20925
MLPSTIQTLTLFLTSGGVLLSLYVSALLSYLLYSDILLKFSPTEITAPTMSLDCANASNVQAVNRSATKGVTFLLPEPEWTYPRLSCPGSTFQKALLISPHRFGETKGNSAPLIIREPFIACGPNECKHFALTHYAAQPGGYYNGTRGDRNKLRHLISVKLGKIPTVENSIFHMAAWSGSACHDGKEWTYIGVDGPDNDALLKVKYGEAYTDTYHSYANKILRTQESACNCIGGNCYLMITDGSASGVSECRFLKIQEGRIIKEIFPTGRVKHTEECTCGFASNKTIECACRDNSYTAKRPFVKLNVETDTAEIRLMCTDTYLDTPRPDDGSITGPCESNGDKGSGGIKGGFVHQRMESKIGRWYSRTMSKTERMGMGLYVKYDGDPWADSDALAFSGVMVSMKEPGWYSFGFEIKDKKCDVPCIGIEMVHDGGKETWHSAATAIYCLMGSGQLLWDTVTGVDMAL

SEQ ID NO: 29544 - protein, 466 aa, synthetic construct
  REGION 1..466: note = neuraminidase__InfluenzaB__AGX20936
MLPSTIQTLTLFLTSGGVLLSLYVSALLSYLLYSDILPKFSPTEITAPTMSLDCANASNVQAVNRSATKGVTFLLPEPEWTYPRLSCPGSTFQKALLISPHRFGETKGNSAPLIIREPFIACGPNECKHFALTHYAAQPGGYYNGTRGDRNKLRHLISVKLGKIPTVENSIFHMAAWSGSACHDGKEWTYIGVDGPDNDALLKVKYGEAYTDTYHSYANKILRTQESACNCIGGNCYLMITDGSASGVSECRFLKIREGRIIKEIFPTGRVKHTEECTCGFASNKTIECACRDNSYTAKRPFVKLNVETDTAEIRLMCTDTYLDTPRPDDGSITGPCESNGDKGSGGIKGGFVHQRMESKIGRWYSRTMSKTERMGMGLYVKYDGDPWADSDALVFSGVMVSMKEPGWYSFGFEIKDKKCDVPCIGIEMVHDGGKETWHSAATAIYCLMGSGQLLWDTVTGVDMAL

SEQ ID NO: 29545 - protein, 466 aa, synthetic construct; identical to SEQ ID NO: 28895
  REGION 1..466: note = neuraminidase__InfluenzaB__AGX20947

SEQ ID NO: 29546 - protein, 466 aa, synthetic construct
  REGION 1..466: note = neuraminidase__InfluenzaB__AGX20958
MLPSTIQTLTLFLTSGGVLLSLYVSALLSYLLYSDILLKFSPTEITTPTMSLDCTNASNVQAVNRSATKGVTFLLPEPEWTYPRLSCPGSTFQKALLISPHRFGETKGNSAPLIIREPFIACGPNECKHFALTHYAAQPGGYYNGTRGDRNKLRHLISVKLGKIPTVENSIFHMAAWSGSACHDGKEWTYIGVDGPDNDALLKVKYGEAYTDTYHSYANKILRTQESACNCIGGNCYLMITDGSASGVSECRFLKIQEGRIIKEIFPTGRVKHTEECTCGFASNKTIECACRDNSYTAKRPFVKLNVETDTAEIRLMCTDTYLDTPRPDDGSITGPCESNGDKGSGGIKGGFVHQRMESKIGRWYSRTMSKTERMGMGLYVKYDGDPWADSDALAFSGVMVSMKEPGWYSFGFEIKDKKCDVPCIGIEMVHDGGKETWHSAATAIYCLMGSGQLLWDTVTGVDMAL

SEQ ID NO: 29547 - protein, 466 aa, synthetic construct; identical to SEQ ID NO: 29119
  REGION 1..466: note = neuraminidase__InfluenzaB__AGX20969

SEQ ID NO: 29548 - protein, 466 aa, synthetic construct; identical to SEQ ID NO: 29532
  REGION 1..466: note = neuraminidase__InfluenzaB__AGX20980

SEQ ID NO: 29549 - protein, 466 aa, synthetic construct
  REGION 1..466: note = neuraminidase__InfluenzaB__AGX20991
MLPSTIQTLTLFLTSGGVLLSLYVSALLSYLLYSDILPKFSPTEITAPTMSLDCANASNVQAVNRSATKGVTFLLPEPEWTYPRLSCPGSTFQKALLISPHRFGETKGNSAPLIIREPFIACGPNECKHFALTHYAAQPGGYYNGTRGDRNKLRHLISVKLGKIPTVENSIFHMAAWSGSACHDGKEWTYIGVDGPDNDALLKVKYGEAYTDTYHSYANKILRTQESACNCIGGNCYLMITDGSASGVSECRFLKIRKGRIIKEIFPTGRVKHTEECTCGFASNKTIECACRDNSYTAKRPFVKLNVETDTAEIRLMCTDTYLDTPRPDDGSITGPCESNGDKGSGGIKGGFVHQRMESKIGRWYSRTMSKTERMGMGLYVKYDGDPWADSDALVFSGVMVSMKEPGWYSFGFEIKDKKCDVPCIGIEMVHDGGKETWHSAATAIYCLMGSGQLLWDTVTGVDMAL

SEQ ID NO: 29550 - protein, 466 aa, synthetic construct; identical to SEQ ID NO: 28956
  REGION 1..466: note = neuraminidase__InfluenzaB__AGX21002

SEQ ID NO: 29551 - protein, 466 aa, synthetic construct
  REGION 1..466: note = neuraminidase__InfluenzaB__AGX21013
MLPSTIQTLTLFLTSGGVLLSLYVSALLSYLLYSDILLKFSPTEITAPTMSLDCANASNVQAVNRSATKGVTFLLPEPEWTYPRLSCPGSTFQKALLISPHRFGETKGNSAPLIIREPFIACGPNECKHFALTHYAAQPGGYYNGTRGDRNKLRHLISVKLGKIPTVENSIFHMAAWSGSACHDGKEWTYIGVDGPDNDALLKVKYGEAYTDTYHSYANKILRTQESACNCIGGNCYLMITDGSASGVSECRFLKIREGRIIKEIFPTGRVKHTEECTCGFASNKTIECACRDNSYTAKRPFVKLNVETDTAEIRLMCTNTYLDTPRPDDGSITGPCESNGDKGSGGIKGGFVHQRMESKIGRWYSRTMSKTERMGMGLYVKYDGDPWADSDALAFSGVMVSMKEPGWYSFGFEIKDKKCDVPCIGIEMVHDGGKETWHSAATAIYCLMGSGQLLWDTVTGVDMAL

SEQ ID NO: 29552 - protein, 466 aa, synthetic construct
  REGION 1..466: note = neuraminidase__InfluenzaB__AGX21024
MLPSTIQTLTLFLTSGGVLLSLYVSASLSYLLYSDILLKFSPTEITAPTMPLDCANASNVQAVNRSATKGVTLLLPEPEWTYPRLSCPGSTFQKALLISPNRFGETKGNSAPLIIREPFIACGPNECKHFALTHYAAQPGGYYNGTRGDRNKLRHLISVKLGKIPTVENSIFHMAAWSGSACHDGKEWTYIGVDGPDNNALLKVKYGEAYTDTYHSYANKILRTQESACNCIGGNCYLMITDGSASGVSECRFLKIREGRIIKEIFPTGRVKHTEECTCGFASNKTIECACRDNSYTAKRPFVKLNVETDTAEVRLMCTDTYLDTPRPNDGSITGPCESDGDKGSGGIKGGFVHQRMESKIGRWYSRTMSKTERMGMGLYVKYDGDPWADSDALTFSGVMVSMKEPGWYSFGFEIKDKKCDVPCIGIEMVHDGGKETWHSAATAIYCLMGSGQLLWDTVTGVDMAL

SEQ ID NO: 29553 - protein, 466 aa, synthetic construct; identical to SEQ ID NO: 28956
  REGION 1..466: note = neuraminidase__InfluenzaB__AGX21035

SEQ ID NO: 29554 - protein, 466 aa, synthetic construct; identical to SEQ ID NO: 29119
  REGION 1..466: note = neuraminidase__InfluenzaB__AGX21046

SEQ ID NO: 29555 - protein, 466 aa, synthetic construct; identical to SEQ ID NO: 29122
  REGION 1..466: note = neuraminidase__InfluenzaB__AGX21057

SEQ ID NO: 29556 - protein, 466 aa, synthetic construct; identical to SEQ ID NO: 29540
  REGION 1..466: note = neuraminidase__InfluenzaB__AGX21068

SEQ ID NO: 29557 - protein, 466 aa, synthetic construct
  REGION 1..466: note = neuraminidase__InfluenzaB__AGX21079
MLPSTIQTLTLFLTSGGVLLSLYVSASLSYLLYSDILLKFSPTEITAPAMPLDCANASNVQAVNRSATKGVTLLLPEPEWTYPRLSCPGSTFQKALLISPHRFGETKGNSAPLIIREPFIACGPNECKHFALTHYAAQPGGYYNGTRGDRNKLRHLISVKLGKIPTVENSIFHMAAWSGSACHDGKEWTYIGVDGPDNNALLKVKYGEAYTDTYHSYASKILRTQESACNCIGGNCYLMITDGSASGVSECRFLKIREGRIIKEIFPTGRVKHTEECTCGFASNKTIECACRDNSYTAKRPFVKLNVETDTAEIRLMCTDTYLDTPRPNDGSITGPCESDGDKGSGGIKGGFVHQRMESKIGRWYSRTMSKTERMGMGLYVKYDGDPWADSDALAFSGVMVSMKEPGWYSFGFEIKDKKCDVPCIGIEMVHDGGKETWHSAATAIYCLMGSGQLLWDTVTGVDMAL

SEQ ID NO: 29558 - protein, 466 aa, synthetic construct; identical to SEQ ID NO: 29122
  REGION 1..466: note = neuraminidase__InfluenzaB__AGX21088

SEQ ID NO: 29559 - protein, 466 aa, synthetic construct; identical to SEQ ID NO: 29122
  REGION 1..466: note = neuraminidase__InfluenzaB__AGX21099

SEQ ID NO: 29560 - protein, 466 aa, synthetic construct
  REGION 1..466: note = neuraminidase__InfluenzaB__AGX21110
MLPSTIQTLTLFLTSGGVLLSLYVSALLSYLLYSDILLKFSPTEITAPTMSLDCANASNVQAVNRFATKGVTFLLPEPEWTYPRLSCPGSTFQKALLISPHRFGETKGNSAPLIIREPFIACGPNECKHFALTHYAAQPGGYYNGTRGDRNKLRHLISVKLGKIPTVENSIFHMAAWSGSACHDGKEWTYIGVDGPDNDALLKVKYGEAYTDTYHSYANKILRTQESACNCIGGNCYLMITDGSASGVSECRFLKIREGRIIKEIFPTGRVKHTEECTCGFASNKTIECACRDNSYTAKRPFVKLNVETDTAEIRLMCTDTYLDTPRPDDGSITGPCESNGDKGSGGIKGGFVHQRMESKIGRWYSRTMSKTERMGMGLYVKYDGDPWADSDALAFSGVMVSMKEPGWYSFGFEIKDKKCDVPCIGIEMVHDGGKETWHSAATAIYCLMGSGQLLWDTVTGVDMAL

SEQ ID NO: 29561 - protein, 466 aa, synthetic construct
  REGION 1..466: note = neuraminidase__InfluenzaB__AGX21121
MLPSTIQTLTLFLTSGGVLLSLYVSALLSYLLYSDILLKFSPTEITAPTMSLDCANASNVQAVNRSATKGVTFLLPEPEWTYPRLSCPGSTFQKALLISPHRFGETKGNSAPLIIREPFIACGPNECKHFALTHYAAQPGGYYNGTRGDRNKLRHLISVKLGKIPTVENSIFHMAAWSGSACHDGKEWTYIGVDGPDNDALLKVKYGEAYTDTYHSYANKILRTQESACNCIGGNCYLMITDGSASGVSECRFLKIREGRITKEIFPTGRVKHTEECTCGFASNKTIECACRDNSYTAKRPFVKLNVETDTAEIRLMCTDTYLDTPRPDDGSITGPCESNGDKGSGGIKGGFVHQRMESKIGRWYSRTMSKTERMGMGLYVKYDGDPWADSDALAFSGVMVSMKEPGWYSFGFEIKDKKCDVPCIGIEMVHDGGKETWHSAATAIYCLMGSGQLLWDTVTGVDMAL

SEQ ID NO: 29562 - protein, 466 aa, synthetic construct; identical to SEQ ID NO: 29119
  REGION 1..466: note = neuraminidase__InfluenzaB__AGX21132

SEQ ID NO: 29563 - protein, 466 aa, synthetic construct; identical to SEQ ID NO: 28895
  REGION 1..466: note = neuraminidase__InfluenzaB__AGX21143

SEQ ID NO: 29564 - protein, 466 aa, synthetic construct; identical to SEQ ID NO: 28956
  REGION 1..466: note = neuraminidase__InfluenzaB__AGX21154

SEQ ID NO: 29565 - protein, 466 aa, synthetic construct
  REGION 1..466: note = neuraminidase__InfluenzaB__AGX21165
MLPSTIQTLTLFLTSGGVLLSLYVSALLSYLLYSDILLKFSPTEITAPTMSLDCANASNVQAVNRSATKGVTFLLPEPEWTYPRLSCPGSTFQKALLISPHRFGETKGNSAPLIIREPFIACGPNECKHFALTHYAAQPGGYYNGTRGDRNKLRHLISVKLGKIPTVENSIFHMAAWSGSACHDGKEWTYIGVDGPDNDALLKVKYGEAYTDTYHSYANKILRTQESACNCIGGNCYLMITDGSASGVSECRFLKIREGRIIKEIFPTGRVKHTEECTCGFASNKTIECACRDNSYTAKRPFVKLNMETDTAEIRLMCTDTYLDTPRPDDGSITGPCESNGDKGSGGIKGGFVHQRMESKIGRWYSRTMSKTERMGMGLYVKYDGDPWADSDALAFSGVMVSMKEPGWYSFGFEIKDKKCDVPCIGIEMVHDGGKETWHSAATAIYCLMGSGQLLWDTVTGVDMAL

SEQ ID NO: 29566 - protein, 466 aa, synthetic construct; identical to SEQ ID NO: 28956
  REGION 1..466: note = neuraminidase__InfluenzaB__AGX21176

SEQ ID NO: 29567 - protein, 466 aa, synthetic construct
  REGION 1..466: note = neuraminidase__InfluenzaB__AGX21187
MLPSTIQTLTLFLTSGGVLLSLYVSASLSYLLYSDILLKFSPTEITAPTMPLDCANASNVQAVNRSATKGVTLLLPEPEWTYPRLSCPGSTFQKALLISPHRFGETKGNSAPLIIREPFIACGPNECKHFALTHYAAQPGGYYNGTRGDRNKLRHLISVKLGKIPTVENSIFHMAAWSGSACHDGKEWTYIGVDGPDNNALLKVKYGEAYTDTYHSYANKILRTQESACNCIGGNCYLMITDGSASGVSECRFLKIREGRIIKEIFPTGRVKHTEECTCGFASNKTIECVCRDNSYTAKRPFVKLNVETDTAEVRLMCTDTYLDTPRPNDGSITGPCESDGDKGSGGIKGGFVHQRMESKIGRWYSRTMSKTERMGMGLYVKYDGDPWADSDALTFSGVMVSMKEPGWYSFGFEIKDKKCDVPCIGIEMVHDGGKETWHSAATAIYCLMGSGQLLWDTVTGVDMAL

SEQ ID NO: 29568 - protein, 466 aa, synthetic construct
  REGION 1..466: note = neuraminidase__InfluenzaB__AGX21198
MLPSTIQMLTLFLTSGGVLLSLYVSASLSYLLYSDILLKFSPTEITAPTMPLDCANASNVHAVNRSATKGVTFLLPEPEWTYPRLSCPGSTFQKALLISPHRFGETKGNSAPLIIREPFIACEPNECKHFALTHYAAQPGGYYNGTRGDRNKLRHLISVKLGKIPTVENSIFHMAAWSGSACHDGKEWTYIGVDGPDNNALLKIKYGEAYTDTYHSYANNILRTQESACNCIGGNCYLMITDGSASGVSECRFLKIREGRIIKEIFPTGRVKHTEECTCGFASNKTIECACRDNSYTAKRPFVKLNVETDTAEIRLMCTDTYLDTPRPDDGSITGPCESNGDKGSGGIKGGFVHQRMASKIGRWYSRTMSKTERKGMGLYVKYDGDPWTDSDALAFRGVMVSMKEPGWYSFGFEIKDKKCDVPCIGIEMVHDGGKETWHSAATAIYCLMGSGQLLWDTVTGVDMAL

SEQ ID NO: 29569 - protein, 466 aa, synthetic construct; identical to SEQ ID NO: 28956
  REGION 1..466: note = neuraminidase__InfluenzaB__AGX21209

SEQ ID NO: 29570 - protein, 466 aa, synthetic construct; identical to SEQ ID NO: 29119
  REGION 1..466: note = neuraminidase__InfluenzaB__AGX21220

SEQ ID NO: 29571 - protein, 466 aa, synthetic construct
  REGION 1..466: note = neuraminidase__InfluenzaB__AGX21231
MLPSTIQTLTLFLTSGGVLLSLYVSALLSYLLYSDILLKFSPTEITAPTMSLDCANASNVQAVNRSATKGVTFLLPESEWTYPRLSCPGSTFQKALLISPHRFGETKGNSAPLIIREPFIACGPNECKHFALTHYAAQPGGYYNGTRGDRNKLRHLISVKLGKIPTVENSIFHMAAWSGSACHDGKEWTYIGVDGPDNDALLKVKYGEAYTDTYHSYANKILRTQESACNCIGGNCYLMITDGSASGVSECRFLKIREGRIIKEIFPTGRVKHTEECTCGFASNKTIECACRDNSYTAKRPFVKLNVETDTAEIRLMCTDTYLDTPRPDDGSITGPCESNGDKGSGGIKGGFVHQRMESKIGRWYSRTMSKTERMGMGLYVKYDGDPWADSDALAFSGVMVSMKEPGWYSFGFEIKDKKCDVPCIGIEMVHDGGKETWHSAATAIYCLMGSGQLLWDTVTGVDMAL

SEQ ID NO: 29572 - protein, 466 aa, synthetic construct; identical to SEQ ID NO: 29122
  REGION 1..466: note = neuraminidase__InfluenzaB__AGX21242

SEQ ID NO: 29573 - protein, 466 aa, synthetic construct; identical to SEQ ID NO: 28956
  REGION 1..466: note = neuraminidase__InfluenzaB__AGX21253

SEQ ID NO: 29574 - protein, 466 aa, synthetic construct
  REGION 1..466: note = neuraminidase__InfluenzaB__AGX21264
MLPSTIQTLTLFLTSGGVLLSLYVSASLSYLLYSDILLKFSTTEITAPTMPLDCANASNVQAVNRSATKGVTLLLPEPEWTYPRLSCPGSTFQKALLISPHRFGENKGNSAPLIIREPFIACGPNECKHFALTHYAAQPGGYYNGTRGDRNKLRHLISVKLGKIPTVENSIFHMAAWSGSACHDGKEWTYIGVDGPDNNALLKVKYGEAYTDTYHSYANKILRTQESACNCIGGNCYLMITDGSASGVSECRFLKIREGRIIKEIFPTGRVKHTEECTCGFASNKTIECACRDNSYTAKRPFVKLNVETDTAEIRLMCTDTYLDTPRPNDGSITGPCESDGDKGSGGIKGGFVHQRMESKIGRWYSRTMSKTERMGMGLYVKYDGDPWADSDALAFSGVMVSMKEPSWYSFGFEIKDKKCDVPCIGIEMVHDGGKETWHSAATAIYCLMGSGQLLWDTVTGVDMAL

SEQ ID NO: 29575 - protein, 466 aa, synthetic construct; identical to SEQ ID NO: 28895
  REGION 1..466: note = neuraminidase__InfluenzaB__AGX21275

SEQ ID NO: 29576 - protein, 466 aa, synthetic construct; identical to SEQ ID NO: 28956
  REGION 1..466: note = neuraminidase__InfluenzaB__AGX21286

SEQ ID NO: 29577 - protein, 466 aa, synthetic construct
  REGION 1..466: note = neuraminidase__InfluenzaB__AGX21297
MLPSTIQTLTLFLTSGGVLLSLYVSASLSYLLYSDILLKFSPTEITAPTMPLDCANASNVQAVNRSATKGVTLLLPEPDWTYPRLSCPGSTFQKALLISPHRFGETKGNSAPLIIREPFIACGPNECKHFALTHYAAQPGGYYNGTRGDRNKLRHLISVKLGKIPTVENSIFHMAAWSGSACHDGKEWTYIGVDGPDNNALLKVKYGEAYTDTYHSYANKILRTQESACNCIGGNCYLMITDGSASGVSECRFLKIREGRIIKEIFPTGRVKHTEECTCGFASNKTIECACRDNSYTAKRPFVKLNVETDTAEVRLMCTDTYLDTPRPNDGSITGPCESDGDKGSGGIKGGFVHQRMESKIGRWYSRTMSKTERMGMGLYVKYDGDPWADSDALTFSGVMVSMKEPGWYSFGFEIKDKKCDVPCIGIEMVHDGGKETWHSAATAIYCLMGSGQLLWDTVTGVDMAL

SEQ ID NO: 29578 - protein, 466 aa, synthetic construct
  REGION 1..466: note = neuraminidase__InfluenzaB__AGX21308
MLPSTIQMLTLFLTSGGVLLSLYVSASLSYLLYSDILLKFSPTEITAPTMPLDCANASNVHAVNRSATKGVTFLLPEPEWTYPRLSCPGSTFQKALLISPHRFGETKGNSAPLIIREPFIACGPNECKHFALTHYAAQPGGYYNGTRGDRNKLRHLISVKLGKIPTVENSIFHMAAWSGSACHDGKEWTYIGVDGPDNNALLKIKYGEAYTDTYHSYANNILRTQESACNCIGGNCYLMITDGSASGVSECRFLKIREGRIIKEIFPTGRVKHTEECTCGFASNKTIECACRDNSYTAKRPFVKLNVETDTAEIRLMCTDTYLDTPRPDDGSITGPCESNGDKGSGGIKGGFVHQRMASKIGRWYSRTMSKTERKGMGLYVKYDGDPWTDSDALALRGVMVSMKEPGWYSFGFEIKDKKCDVPCIGIEMVHDGGKETWHSAATAIYCLMGSGQLLWDTVTGVDMAL

SEQ ID NO: 29579 - protein, 466 aa, synthetic construct; identical to SEQ ID NO: 28900
  REGION 1..466: note = neuraminidase__InfluenzaB__AGX21319

SEQ ID NO: 29580 - protein, 466 aa, synthetic construct; identical to SEQ ID NO: 28895
  REGION 1..466: note = neuraminidase__InfluenzaB__AGX21330

SEQ ID NO: 29581 - protein, 466 aa, synthetic construct; identical to SEQ ID NO: 28895
  REGION 1..466: note = neuraminidase__InfluenzaB__AGX21341

SEQ ID NO: 29582 - protein, 466 aa, synthetic construct; identical to SEQ ID NO: 29122
  REGION 1..466: note = neuraminidase__InfluenzaB__AGX21352

SEQ ID NO: 29583 - protein, 466 aa, synthetic construct
  REGION 1..466: note = neuraminidase__InfluenzaB__AGX21363
MLPSTIQTLTLFLTSGGVLLSLYVSASLSYLLYSDILLKFSPTEITAPTMPLDCANASNVQAVNRSATKGVTLLLPEPEWTYPRLSCPGSTFQKALLISSHRFGETKGNSAPLIIREPFVACGPNECKHFALTHYAAQPGGYYNGTRGDRNKLRHLISVKLGKIPTVENSIFHMAAWSGSACHDGKEWTYIGVDGPDNNALLKVKYGEAYTDTYHSYANKILRTQESACNCIGGNCYLMITDGSASGVSECRFLKIREGRIIKEIFPTGRVKHTEECTCGFASNKTIECACRDNSYTAKRPFVKLNVETDTAEIRLMCTDTYLDTPRPNDGSITGPCESDGDKGSGGIKGGFVHQRMESKIGRWYSRTMSKTERMGMGLYVKYDGDPWADSDALAFSGVMVSMKEPGWYSFGFEIKDKKCDVPCIGIEMVHDGGKETWHSAATAIYCLMGSGQLLWDTVTGVDMAL

SEQ ID NO: 29584 - protein, 466 aa, synthetic construct; identical to SEQ ID NO: 28895
  REGION 1..466: note = neuraminidase__InfluenzaB__AGX21374

SEQ ID NO: 29585 - protein, 466 aa, synthetic construct; identical to SEQ ID NO: 28956
  REGION 1..466: note = neuraminidase__InfluenzaB__AGX21385

SEQ ID NO: 29586 - protein, 466 aa, synthetic construct; identical to SEQ ID NO: 28956
  REGION 1..466: note = neuraminidase__InfluenzaB__AGX21396

SEQ ID NO: 29587 - protein, 466 aa, synthetic construct; identical to SEQ ID NO: 28895
  REGION 1..466: note = neuraminidase__InfluenzaB__AGX21407

SEQ ID NO: 29588 - protein, 466 aa, synthetic construct; identical to SEQ ID NO: 28895
  REGION 1..466: note = neuraminidase__InfluenzaB__AGX21418

SEQ ID NO: 29589 - protein, 466 aa, synthetic construct
  REGION 1..466: note = neuraminidase__InfluenzaB__AGX21429
MLPSTIQTLTLFLTSGGVLLSLYVSALLSYLLHSDILLKFSPTEITAPTMSLDCANASNVQAVNRSVTKGVTFLLPEPEWTYPRLSCPGSTFQKALLISPHRFGETKGNSAPLIIREPFIACGPNECKHFALTHYAAQPGGYYNGTRGDRNKLRHLISVKLGKIPTVENSIFHMAAWSGSACHDGKEWTYIGVDGPDNDALLKVKYGEAYTDTYHSYANKILRTQESACNCIGGNCYLMITDGSASGVSECRFLKIREGRIIKEIFPTGRVKHTEECTCGFASNKTIECACRDNSYTAKRPFVKLNVETDTAEIRLMCTDTYLDTPRPDDGSITGPCESNGDKGSGGIKGGFVHQRMESKIGRWYSRTMSKTERMGMGLYVKYDGDPWADSDALAFSGVMVSMKEPGWYSFGFEIKDKKCDVPCIGIEMVHDGGKETWHSAATAIYCLMGSGQLLWDTVTGVDMAL

SEQ ID NO: 29590 - protein, 466 aa, synthetic construct; identical to SEQ ID NO: 28956
  REGION 1..466: note = neuraminidase__InfluenzaB__AGX21440

SEQ ID NO: 29591 - protein, 466 aa, synthetic construct; identical to SEQ ID NO: 28956
  REGION 1..466: note = neuraminidase__InfluenzaB__AGX21451

SEQ ID NO: 29592 - protein, 466 aa, synthetic construct; identical to SEQ ID NO: 29540
  REGION 1..466: note = neuraminidase__InfluenzaB__AGX21462

SEQ ID NO: 29593 - protein, 466 aa, synthetic construct
  REGION 1..466: note = neuraminidase__InfluenzaB__AGX21473
MLPSTIQTLTLFLTSGGVLLSLYVSALLSYLLYSDILLKFSPTEITAPTMSLDCANASNVQAVNRSATKGVTFLLPEPEWTYPRLSCPGSTFQRALLISPHRFGEAKGNSAPLIIREPFIACGPNECKHFALTHYAAQPGGYYNGTRGDRNKLRHLISVKLGKIPTVENSIFHMAAWSGSACHDGKEWTYIGVDGPDNDALLKVKYGEAYTDTYHSYANKILRTQESACNCIGGNCYLMITDGSASGVSECRFLKIREGRIIKEILPTGRVKHTEECTCGFASNKTIECACRDNSYTAKRPFVKLNVETDTAEIRLMCTDTYLDTPRPDDGSITGPCESNGDKGSGGIKGGFVHQRMESKIGRWYSRTMSKTERMGMGLYVKYDGDPWADSDALVFSGVMVSMKEPGWYSFGFEIKDKKCDVPCIGIEMVHDGGKETWHSAATAIYCLMGSGQLLWDTVTGVDMAL

SEQ ID NO: 29594 - protein, 466 aa, synthetic construct; identical to SEQ ID NO: 28900
  REGION 1..466: note = neuraminidase__InfluenzaB__AGX21484

SEQ ID NO: 29595 - protein, 466 aa, synthetic construct; identical to SEQ ID NO: 28956
  REGION 1..466: note = neuraminidase__InfluenzaB__AGX21495

SEQ ID NO: 29596 - protein, 466 aa, synthetic construct; identical to SEQ ID NO: 28956
  REGION 1..466: note = neuraminidase__InfluenzaB__AGX21506

SEQ ID NO: 29597 - protein, 466 aa, synthetic construct
  REGION 1..466: note = neuraminidase__InfluenzaB__AGX21517
MLPSTIQTLTLFLTSGGVLLSLYVSALLSYLLYSNILLKFSPTEITAPTMSLDCANASNVQAVNRSATKGVTFLLPEPEWTYPRLSCPGSTFQKALLISPHRFGETKGNSAPLIIREPFIACGPNECKHFALTHYAAQPGGYYNGTRGDRNKLRHLISVKLGKIPTVENSIFHMAAWSGSACHDGKEWTYIGVDGPDNDALLKVKYGEAYTDTYHSYANKILRTQESACNCIGGNCYLMITDGSASGVSECRFLKIREGRIIKEIFPTGRVKHTEECTCGFASNKTIECACRDNSYTAKRPFVKLNVETDTAEIRLMCTDTYLDTPRPDDGSITGPCESNGDKGSGGIKGGFVHQRMESKIGRWYSRTMSKTERMGMGLYVKYDGDPWADSDALAFSGVMVSMKEPGWYSFGFEIKDKKCDVPCIGIEMVHDGGKETWHSAATAIYCLMGSGQLLWDTVTGVDMAL

SEQ ID NO: 29598 - protein, 466 aa, synthetic construct
  REGION 1..466: note = neuraminidase__InfluenzaB__AGX21528
MLPSTIQTLTLFLTSGGVLLSLYVSASLSYLLYSDILLKFSPTEITAPTMPLDCANASNVQAVNRSATKGVTLLLPEPEWTYPRLSCPGSTFQKALLISPHRFGETKGNSAPLIIREPFIACGPNECKHFALTHYAAQPGGYYNGTRGDRNKLRHLISVKLGKIPTVENSIFHMAAWSGSACHDGKEWTYIGVDGPDNNALLKVKYGEAYTDTYHSYANKILRTQESACNCIGGNCYLMITDGSASGVSECRFLKIREGRIIKEIFPTGRVKHTEECTCGFASNKTIECACRDNSYTAKRPFVKLNVETDTAEVRLMCTDTYLDTPRPNDGSITGPCESDGDKGSGGIKGGFVHQRMESKIGRWYSRTMSKTERMGMGLYVKYDGDPWADSDALTFSGVMVSMKEPGWYSFGFEIKDKKCDVPCIGIEMVHDSGKETWHSAATAIYCLMGSGQLLWDTVTGVDMAL

SEQ ID NO: 29599 - protein, 466 aa, synthetic construct; identical to SEQ ID NO: 28956
  REGION 1..466: note = neuraminidase__InfluenzaB__AGX21539

SEQ ID NO: 29600 - protein, 466 aa, synthetic construct
  REGION 1..466: note = neuraminidase__InfluenzaB__AGX21550
MLPSTIQTLTLFLTSGGVLLSLYVSASLSYLLYSDILLKFSPTEITAPTMPLDCANASNVQAVNRSATKGVTLLLPEPEWTYPRLSCPGSTFQKALLISPHRFGETKGNSAPLIIREPFIACGPNECKHFALTHYAAQPGGYYNGTRGDRNKLRHLISVKLGKIPTVENSIFHMAAWSGSACHDGKEWTYIGVDGPDNNALLKVKYGEAYTDTYHSYANKILRTQESACNCIGGNCYLMITDGSASGVSECRFLKIREGRIIKEIFPAGRVKHTEECTCGFASNKTIECACRDNSYTAKRPFVKLNVETDTAEVRLMCTDTYLDTPRPNDGSITGPCESDGDKGSGGIKGGFVHQRMESKIGRWYSRTMSKTERMGMGLYVKYDGDPWADSDALTFSGVMVSMKEPGWYSFGFEIKDKKCDVPCIGIEMVHDGGKETWHSAATAIYCLMGSGQLLWDTVTGVDMAL

SEQ ID NO: 29601 - protein, 466 aa, synthetic construct
  REGION 1..466: note = neuraminidase__InfluenzaB__AGX21561
MLPSTIQTLTLFLTSGGVLLSLYVSASLSYLLYSDILLKFSPTEITAPTMPLDCANASNVQAVNRSATKGVTLLLPEPEWTYPRLSCPGSTFQKALLISPHRFGETKGNSAPLIIREPFIACGPNECKHFALTHYAAQPGGYYNGTRGDRNKLRHLISVKLGKIPTVENSIFHMAAWSGSACHDGKEWTYIGVDGPDNNALLKVKYGEAYTDTYHSYANKILRTQESACNCIGGNCYLMITDGSASGVSECRFLKVREGRIIKEIFPTGRVKHTEECTCGFASNKTIECACRDNSYTAKRPFVKLNVETDTAEVRLMCTDTYLDTPRPNDGSITGPCESDGDKGSGGIKGGFVHQRMESKIGRWYSRTMSKTERMGMGLYVKYDGDPWADSDALTFSGVMVSMKEPGWYSFGFEIKDKKCDVPCIGIEMVHDGGKETWHSAATAIYCLMGSGQLLWDTVTGVDMAL

SEQ ID NO: 29602 - protein, 466 aa, synthetic construct; identical to SEQ ID NO: 28900
  REGION 1..466: note = neuraminidase__InfluenzaB__AGX21572

SEQ ID NO: 29603 - protein, 466 aa, synthetic construct
  REGION 1..466: note = neuraminidase__InfluenzaB__AGX21583
MLPSTIQTLTLFLTSGGVLLSLYVSALLSYLLYSDILLKFSPTEITAPTMSLDCANASNVQAVNRSATKGVTFLLPEPEWTYPRLSCPGSTFQRALLISPHRFGEAKGNSAPLIIREPFIACGPNECKHFALTHYAAQPGGYYNGTRGDRNKLRHLISVKLGKIPTVENSIFHMAAWSGSACHDGKEWTYIGVDGPDNDALLKVKYGEAYTDTYHSYANKILRTQESACNCIGGNCYLMITDGSASGVSECRFLKIREGRIIKEILPTGRVKHTEECTCGFASNKTIECACRDNSYTAKRPFVKLNVETDTAEIRLMCTDTYLDTPRPDDGSITGPCESNGDKGSGGIKGGFVHQRMESKIGRWYSRTMSKTERMGMELYVKYDGDPWADSDALAFSGVMVSMKEPGWYSFGFEIKDKKCDVPCIGIEMVHDGGKETWHSAATAIYCLMGSGQLLWDTVTGVDMAL

SEQ ID NO: 29604 - protein, 466 aa, synthetic construct; identical to SEQ ID NO: 28900
  REGION 1..466: note = neuraminidase__InfluenzaB__AGX21594

SEQ ID NO: 29605 - protein, 466 aa, synthetic construct; identical to SEQ ID NO: 29122
  REGION 1..466: note = neuraminidase__InfluenzaB__AGX21605

SEQ ID NO: 29606 - protein, 466 aa, synthetic construct
  REGION 1..466: note = neuraminidase__InfluenzaB__AGX21615
MLPSTIQTLTLFLTSGGVLLSLYVSASLSYLLYSDILLKFSTTEITAPTMPLDCANASNVQAVNRSATKGVTLLLPEPEWTYPRLSCPGSTFQKALLISPHRFGENKGNSAPLIIREPFIACGPNECKHFALTHYAAQPGGYYNGTRGDRNKLRHLISVKLGKIPTVENSIFHMAAWSGSACHDGKEWTYIGVDGPDNNALLKVKYGEAYTDTYHSYANKILRTQESACNCIGGNCYLMITDGSASGVSECRFLKIREGRIIKEIFPTGRVKHTEECTCGFASNKTIECACRDNSYTAKRPFVKLNVETDTAEIRLMCTDTYLDTPRPNDGSITGPCESDGDKGSGGIKGGFVHQRMESKIGRWYSRTMSKTERMGMGLYVKYDGDPWADSDALAFSGVMVSMKEPGWYSFGFEIKDKKCDVPCIGIEMVHDGGKETWHSAATAIYCLMGSGQLLWDTVTGVDMAL

SEQ ID NO: 29607 - protein, 466 aa, synthetic construct; identical to SEQ ID NO: 28956
  REGION 1..466: note = neuraminidase__InfluenzaB__AGX21626

SEQ ID NO: 29608 - protein, 466 aa, synthetic construct; identical to SEQ ID NO: 28956
  REGION 1..466: note = neuraminidase__InfluenzaB__AGX21637

SEQ ID NO: 29609 - protein, 466 aa, synthetic construct; identical to SEQ ID NO: 28956
  REGION 1..466: note = neuraminidase__InfluenzaB__AGX21648

SEQ ID NO: 29610 - protein, 466 aa, synthetic construct
  REGION 1..466: note = neuraminidase__InfluenzaB__AGX21659
MLPSTIQTLTLFLTSGGVLLSLYVSALLSYLLYSDILLKFSPTEITAPTMSLDCANASNVQAVNRSATKGVTFLLPEPEWTYPRLSCPGSTFQKALLISPHRFGETKGNSAPLIIREPFIACGPNECKHFALTHYAAQPGGYYNGTRGDRNKLRHLVSVKLGKIPTVENSIFHMAAWSGSACHDGKEWTYIGVDGPDNDALLKVKYGEAYTDTYHSYANKILRTQESACNCIGGNCYLMITDGSASGVSECRFLKIREGRIIKEIFPTGRVKHTEECTCGFASNKTIECACRDNSYTAKRPFVKLNVETDTAEIRLMCTDTYLDTPRPDDGSITGPCESNGDKGSGGIKGGFVHQRMESKIGRWYSRTMSKTERMGMGLYVKYGGDPWADSDALAFSGVMVSMKEPGWYSFGFEIKDKKCDVPCIGIEMVHDGGKETWHSAATAIYCLMGSGQLLWDTVTGVDMAL

SEQ ID NO: 29611 - protein, 466 aa, synthetic construct
  REGION 1..466: note = neuraminidase__InfluenzaB__AGX21670
MLPSTIQTLTLFLTSGGVLLSLYVSALLSYLLYSDILLKFSPTEITAPTMSLDCANASNVQAVNRSATKGVTFLLPEPEWTYPRLSCPGSTFQKALLISPHRFGETKGNSAPLIIREPFIACGPNECKHFALTHYAAQPGGYYNGTRGDRNKLRHLISVKLGKIPTVENSIFHMAAWSGSACHDGKEWTYIGVDGPDNDALLKVKYGEAYTDTYHSYANKILRTQESACNCIGGNCYLMITDGSASGVSECRFLKIREGRIIKEIFPTGRVKHTEECTCGFASNKTIECACRDNSYTAKRPFVKLNVETDTAEIRLMCTDTYLDTPRPDDGSITGPCESNGDKGSGGIKGGFVHQRMESKIGRWYSRTMSKTERMGMGLYVKYDGDPWADSDALAFSGVMVSMKEPGWYSFGFEIKDKKCDVPCIGTEMVHDGGKETWHSAATAIYCLMGSGQLLWDTVTGVDMAL

SEQ ID NO: 29612 - protein, 466 aa, synthetic construct
  REGION 1..466: note = neuraminidase__InfluenzaB__AGX21681
MLPSTIQMLTLFLTSGGVLLSLYVSASLSYLLYSDILLKFSPTEITAPTMPLDCANASNVHAVNRSATKGVTFLLPEPEWTYPRLSCPGSTFQKALLISPHRFGETKGNSAPLIIREPFIACGPNECKHFALTHYAAQPGGYYNGTRGDRNKLRHLISVKLGKIPTVENSIFHMAAWSGSACHDGKEWTYIGVDGPDNNALLKIKYGEAYTDTYHSYANNILRTQESACNCIGGNCYLMITDGSASGVSECRFLKIREGRIIKEIFPTGRVKHTEECTCGFASNKTIECACRDNSYTAKRPFVKLNVETDTAEIRLMCTDTYLDTPRPDDGSITGPCESNGDKGNGGIKGGFVHQRMASKIGRWYSRTMSKTERKGMGLYVKYDGDPWTDSDALAFRGVMVSMKEPGWYSFGFEIKDKKCDVPCIGIEMVHDGGKETWHSAATAIYCLMGSGQLLWDTVTGVDMAL

SEQ ID NO: 29613 - protein, 466 aa, synthetic construct; identical to SEQ ID NO: 28895
  REGION 1..466: note = neuraminidase__InfluenzaB__AGX21692

SEQ ID NO: 29614 - protein, 466 aa, synthetic construct; identical to SEQ ID NO: 29122
  REGION 1..466: note = neuraminidase__InfluenzaB__AGX21703

SEQ ID NO: 29615 - protein, 466 aa, synthetic construct
  REGION 1..466: note = neuraminidase__InfluenzaB__AGX21714
MLPSTIQTLTLFLTSGGVLLSLYVSASLSYLLYSDILLKFSPTEITAPAMPLDCANASNVQAVNRSATKGLTLLLPEPEWTYPRLSCPGSTFQKALLISPHRFGETKGNSAPLIIREPFIACGPNECKHFALTHYAAQPGGYYNGTRGDRNKLRHLISVKLGKIPTVENSIFHMAAWSGSACHDGKEWTYIGVDGPDNNALLKVKYGEAYTDTYHSYANKILRTQESACNCIGGNCYLMITDGSASGVSECRFLKIREGRIIKEIFPTGRVKHTEECTCGFASNKTIECACRDNSYTAKRPFVKLNVETDTAEIRLMCTDTYLDTPRPNDGSITGPCESDGDKGSGGIKGGFVHQRMESKIGRWYSRTMSKTERMGMGLYVKYDGDPWADSDALAFSGVMVSMKEPGWYSFGFEIKDKKCDVPCIGIEMVHDGGKETWHSAATAIYCLMGSGQLLWDTVTGVDMAL

SEQ ID NO: 29616 - protein, 466 aa, synthetic construct
  REGION 1..466: note = neuraminidase__InfluenzaB__AGX21725
MLPSTIQMLTLFLTSGGVLLSLYVSASLSYLLYSDILLKFSPTEITAPTMPLDCANASNVHAVNRSATKGVTFLLPEPEWTYPRLSCPGSTFQRALLISPHRFGETKGNSAPLIIREPFIACGPNECKHFALTHYAAQPGGYYNGTRGDRNKLRHLISVKLGKIPTVENSIFHMAAWSGSACHDGKEWTYIGVDGPDNNALLKIKYGEAYTDTYHSYANNILRTQESACNCIGGNCYLMITDGSASGVSECRFLKIREGRIIKEIFPTGRVKHTEECTCGFASNKTIECACRDNSYTAKRPFVKLNVETDTAEIRLMCTDTYLDTPRPDDGSITGPCESNGDKGSGGIKGGFVHQRMASKIGRWYSRTMSKTERKGMGLYVKYDGDPWTDSDALAFRGVMVSMKEPGWYSFGFEIKDKKCDVPCIGIEMVHDGGKETWHSAATAIYCLMGSGQLLWDTVTGVDMAL

SEQ ID NO: 29617 - protein, 466 aa, synthetic construct
  REGION 1..466: note = neuraminidase__InfluenzaB__AGX21747
MLPSTIQTLTLFLTSGGVLLSLYVSASLSYLLYSDILLKVSQTEITAPTMPLDCANASNVQAVNRSATKGVTLLLPEPEWTYPRLSCPGSTFQKALLISPHRFGETKGNSAPLIIREPFIACGPKECKHFALTHYAAQPGGYYNGTREDRNKLRHLISVKLGKIPTVENSIFHMAAWSGSACHDGREWTYIGVDGPDSNALLKIKYGEAYTDTYHSYAKNILRTQESACNCIGGDCYLMITDGSASGISECRFLKIREGRIIKEIFPTGRVKHTEECTCGFASNKTIECACRDNSYTAKRPFVKLNVETDTAEIRLMCTETYLDTPRPDDGSITGPCESNGDKGSGGIKGGFVHQRMASKIGRWYSRTMSKTKRMGMGLYVKYDGDPWTDSEALALSGVMVSMEEPGWYSFGFEIKDKKCDVPCIGIEMVHDGGKTTWHSAATAIYCLMGSGQLLWDTVTGVDMAL

SEQ ID NO: 29618 - protein, 466 aa, synthetic construct
  REGION 1..466: note = neuraminidase__InfluenzaB__AGX21758
MLPSTIQTLTLFLTSGGVLLSLYVSASLSYLLYSDILLKFTPTEITVPTMPLDCANASNVQAVNRSATKGVTLLLPEPEWTYPRLSCPGSTFQKALLISPHRFGETKGNSAPLIIREPFIACGPKECKHFALTHYAAQPGGYYNGTREDRNKLRHLISVKLGKIPTVENSIFHMAAWSGSACHDGKEWTYIGVDGPDSNALLKIKYGEAYTDTYHSYANNILRTQESACNCIGGNCYLMITDGSASGISECRFLKIREGRIIKEIFPTGRVKHTEECTCGFASNKTIECACRDNSYTAKRPFVKLNVETDTAEIRLMCTETYLDTPRPDDGSITGPCESNGNKGSGGIKGGFVHQRMASKIGRWYSRTMSKTKRMGMGLYVKYDGDPWTDSDALALSGVMVSMEEPGWYSFGFEIKDKKCDVPCIGIEMVHDGGKETWHSAATAIYCLMGSGQLLWDTVTGVDMAL

SEQ ID NO: 29619 - protein, 466 aa, synthetic construct
  REGION 1..466: note = neuraminidase__InfluenzaB__AGX21769
MLPSTIQTLTLFLTSGGVLLSLYVSASLSYLLYSDILLKFSQTEITAPTMPLDCANASNVQAANRSATKGVTLLLPEPEWTYPRLSCPGSTFQKALLISPHRFGETKGNSAPLIIREPFIACGPKECKHFALTHYAAQPGGYYNGTREDRNKLRHLISVKLGKIPTVENSIFHMAAWSGSACHDGREWTYIGVDGPDSNALLKIKYGEAYTDTYHSYAKNILRTQESACNCIGGDCYLMITDGSASGISECRFLKIREGRIIKEIFPTGRVKHTEECTCGFASNKTIECACRDNSYTAKRPFVKLNVETDTAEIRLMCTKTYLDTPRPNDGSITGPCESDGDKGSGGIKGGFVHQRMASKIGRWYSRTMSKTKRMGMGLYVKYDGDPWTDSEALALSGVMVSMEEPGWYSFGFEIKDKKCDVPCIGIEMVHDGGKTTWHSAATAIYCLMGSGQLLWDTVTGVDMAL

SEQ ID NO: 29620 - protein, 466 aa, synthetic construct
  REGION 1..466: note = neuraminidase__InfluenzaB__AGX21780
MLPSTIQTLTLFLTSGGVLLSLYVSASLSYLLYSDILLKFSQTEITAPTMPLDCANASNVQAVNRSATKGVTLLLPEPEWTYPRLSCPGSTFQKALLISPHRFGETKGNSAPLIIREPFIACGPKECKHFALTHYAAQPGGYYNGTREDRNKLRHLISVKLGKIPTVENSIFHMAAWSGSACHDGREWTYIGVDGPDSNALLKIKYGEAYTDTYHSYAKNILRTQESACNCIGGDCYLMITDGSASGISECRFLKIREGRIIKEIFPTGRVKHTEECTCGFASNKTIECACRDNSYTAKRPFVKLNVETDTAEIRLMCTETYLDTPRPNDGSITGPCESNGDKGSGGIKGGFVHQRMESKIGRWYSRTMSKTKRMGMGLYVKYDGDPWTDSEALALSGVMVSMEEPGWYSFGFEIKDKKCDVPCIGIEMVHDGGKTTWHSAATAIYCLMGSGQLLWDTVTGVDMTL

SEQ ID NO: 29621 - protein, 466 aa, synthetic construct
  REGION 1..466: note = neuraminidase__InfluenzaB__AGX21791
MLPSTIQTLTLFLTSGGVLLSLYVSASLSYLLYSDILLKFSPTEITAPTMPLDCANASNVQAVNRSATKGVTLLLPEPEWTYPRLSCPGSTFQKALLISPHRFGETKGNSAPLIIREPFIACGPKECKHFALTHYAAQPGGYYSGTRGDRNKLRHLISVKLGKIPTVENSIFHMAAWSGSACHDGKEWTYIGVDGPDNNALLKIKYGEAYTDTYHSYANNILRTQESACNCIGGNCYLMITDGSASGISECRFLKIREGRIIKEIFPTGRVKHTEECTCGFASNKTIECACRDNNYTAKRPFVKLNVETDTAEIRLMCTETYLDTPRPDDGSITGPCESNGDKGSGGIKGGFVHQRMASKIGRWYSRTMSKNKRMGMGLYVKYDGDPWADSDALALSGVMVSMEEPGWYSFGFEIKDKKCDVPCIGIEMVHDGGKETWHSAATAIYCLMGSGQLLWDTVTGVDMAL

SEQ ID NO: 29622 - protein, 466 aa, synthetic construct
  REGION 1..466: note = neuraminidase__InfluenzaB__AGX21802
MLPSTIQTLTLFLTSGGVLLSLYVSASLSYLLYSDILLKFSQTEITAPTMPLDCANASNVQAANRSATKGVTLLLPEPEWTYPRLSCPGSTFQKALLISPHRFGETKGNSAPLIIREPFIACGPKECKHFALTHYAAQPGGYYNGTREDRNKLRHLISVKLGKIPTVENSIFHMAAWSGSACHDGREWTYIGVDGPDSNALLKIKYGEAYTDTYHSYAKNILRTQESACNCIGGDCYLMITDGSASGISECRFLKIREGRIIKEIFPTGRVKHTEECTCGFASNKTIECACRDNSYTAKRPFVKLNVETDTAEIRLMCTETYLDTPRPNDGSITGPCESDGDKGSGGIKGGFVHQRMASKIGRWYSRTMSKTKRMGMGLYVKYDGDPWTDSEALALSGVMVSMEEPGWYSFGFEIKDKKCDVPCIGIEMVHDGGKTTWHSAATAIYCLMGSGQLLWDTVTGVDMAL

SEQ ID NO: 29623 - protein, 466 aa, synthetic construct
  REGION 1..466: note = neuraminidase__InfluenzaB__AGX21813
MLPSTIQTLTLFLTSGGVLLSLYVSASLSYLLYSDILLKFSQTEITAPKMPLDCANASNVQAANRSATKGVTLLLPEPEWTYPRLSCPGSTFQKALLISPHRFGETKGNSAPLIIREPFIACGPKECKHFALTHYAAQPGGYYNGTREDRNKLRHLISVKLGKIPTVENSIFHMAAWSGSACHDGREWTYIGVDGPDSNALLKIKYGEAYTDTYHSYAKNILRTQESACNCIGGDCYLMITDGSASGISECRFLKIREGRIIKEIFPTGRVKHTEECTCGFASNKTIECACRDNSYTAKRPFVKLNVETDTAEIRLMCTETYLDTPRPNDGSITGPCESDGDKGSGGIKGGFVHQRMASKIGRWYSRTMSKTKRMGMGLYVKYDGDPWTDSEALALSGVMVSMEEPGWYSFGFEIKDKKCDVPCIGIEMVHDGGKTTWHSAATAIYCLMGSGQLLWDTVTGVDMAL

SEQ ID NO: 29624 - protein, 466 aa, synthetic construct
  REGION 1..466: note = neuraminidase__InfluenzaB__AGX21824
MLPSTIQTLTLFLTSGGVLLSLYVSASLSYLLYSDILLKFSQTEITAPIMPLDCANASNVQAVNRSATKGVTLLLPEPEWTYPRLSCPGSTFQKALLISPHRFGETKGNSAPLIIREPFIACGPKECKHFALTHYAAQPGGYYNGTREDRNKLRHLISVKLGKIPTVENSIFHMAAWSGSACHDGREWTYIGVDGPDSNALLKIKYGEAYTDTYHSYAKNILRTQESACNCIGGDCYLMITDGPASGISECRFLKIREGRIIKEIFPTGRVKNTEECTCGFASNKTIECACRDNSYTAKRPFVKLNVETDTAEIRLMCTETYLDTPRPNDGSITGPCESNGDKGSGGIKGGFVHQRMASKIGRWYSRTMSKTKRMGMGLYVKYDGDPWTDSEALALSGVMVSMEEPGWYSFGFEIKDKKCDVPCIGIEMVHDGGKTTWHSAATAIYCLMGSGQLLWDTVTGVDMAL

SEQ ID NO: 29625 - protein, 466 aa, synthetic construct; identical to SEQ ID NO: 28743
  REGION 1..466: note = neuraminidase__InfluenzaB__AGX21835

SEQ ID NO: 29626 - protein, 466 aa, synthetic construct; identical to SEQ ID NO: 29131
  REGION 1..466: note = neuraminidase__InfluenzaB__AGX21846

SEQ ID NO: 29627 - protein, 466 aa, synthetic construct; identical to SEQ ID NO: 29131
  REGION 1..466: note = neuraminidase__InfluenzaB__AGX21857

SEQ ID NO: 29628 - protein, 466 aa, synthetic construct; identical to SEQ ID NO: 28743
  REGION 1..466: note = neuraminidase__InfluenzaB__AGX21868

SEQ ID NO: 29629 - protein, 466 aa, synthetic construct; identical to SEQ ID NO: 29129
  REGION 1..466: note = neuraminidase__InfluenzaB__AGX21879

SEQ ID NO: 29630 - protein, 466 aa, synthetic construct
  REGION 1..466: note = neuraminidase__InfluenzaB__AGX21890
MLPSTIQTLTLFLTSGGVLLSLYVSASLSYLLYSDILLKFSQTEIIAPIMPLDCANASNVQAVNHSATKGVTLLLPEPEWTYPRLSCPGSTFQKALLISPHRFGETKGNSAPLIIREPFIACGPKECKHFALTHYAAQPGGYYNGTREDRNKLRHLISVKLGKIPTVENSIFHMAAWSGSACHDGREWTYIGVDGPDSNALLKIKYGEAYTDTYHSYAKNILRTQESACNCIGGDCYLMITDGPASGISECRFLKIREGRIIKEIFPTGRVKHTEECTCGFASNKTIECACRDNSYTAKRPFVKLNVETDTAEIRLMCTETYLDTPRPNDGSITGPCESNGDKGSGGIKGGFVHQRMASKIGRWYSRTMSKTKRMGMGLYVKYDGDPWTDSEALALSGVMVSMEEPGWYSFGFEIKDKKCDVPCIGIEMVHDGGKTTWHSAATAIYCLMGSGQLLWDTVTGVDMAL

SEQ ID NO: 29631 - protein, 466 aa, synthetic construct; identical to SEQ ID NO: 28743
  REGION 1..466: note = neuraminidase__InfluenzaB__AGX21901

SEQ ID NO: 29632 - protein, 466 aa, synthetic construct; identical to SEQ ID NO: 28743
  REGION 1..466: note = neuraminidase__InfluenzaB__AGX21912

SEQ ID NO: 29633 - protein, 466 aa, synthetic construct
  REGION 1..466: note = neuraminidase__InfluenzaB__AGX21923
MLPSTIQTLTLFLTSGGVLLSLYVSASLSYLLYSDILLKFSQTEITAPIMPLDCTNASNVQAVNRSATKGVTLLLPEPEWTYPRLSCPGSTFQKALLISPHRFGETKGNSAPLIIREPFIACGPKECKHFALTHYAAQPGGYYNGTREDRNKLRHLISVKLGKIPTVENSIFHMAAWSGSACHDGREWTYIGVDGPDSNALLKIKYGEAYTDTYHSYAKNILRTQESACNCIGGDCYLMITDGPASGISECRFLKIREGRIIKEIFPTGRVKHTEECTCGFASNKTIECACRDNSYTAKRPFVKLNVETDTAEIRLMCTETYLDTPRPNDGSITGPCESNGDKGSGGIKGGFVHQRMASKIGRWYSRTMSKTKRMGMGLYVKYDGDPWTDSEALALSGVMVSMEEPGWYSFGFEIKDKKCDVPCIGIEMVHDGGKTTWHSAATAIYCLMGSGQLLWDTVTGVDMAL

SEQ ID NO: 29634 - protein, 466 aa, synthetic construct; identical to SEQ ID NO: 29630
  REGION 1..466: note = neuraminidase__InfluenzaB__AGX21934

SEQ ID NO: 29635 - protein, 466 aa, synthetic construct; identical to SEQ ID NO: 29131
  REGION 1..466: note = neuraminidase__InfluenzaB__AGX21945

SEQ ID NO: 29636 - protein, 466 aa, synthetic construct
  REGION 1..466: note = neuraminidase__InfluenzaB__AGX21956
MLPSTIQTLTLFLTSGGVLLSLYVSASLSYLLYSDILLKFSQTEITAPIMPLDCANTSNIQAVNRSATKGVTLLLPEPEWTYPRLSCPGSTFQKALLISPHRFGETKGNSAPLIIREPFIACGPKECKHFALTHYAAQPGGYYNGTREDRNKLRHLISVKLGKIPTVENSIFHMAAWSGSACHDGREWTYIGVDGPDSNALLKIKYGEAYTDTYHSYAKNILRTQESACNCIGGDCYLMITDGPASGISECRFLKIREGRIIKEIFPTGRVKHTEECTCGFASNKTIECACRDNSYTAKRPFVKLNVETDTAEIRLMCTETYLDTPRPNDGSITGPCESNGDKGSGGIKGGFVHQRMASKIGRWYSRTMSKTKRMGMGLYVKYDGDPWTDSEALALSGVMVSMEEPGWYSFGFEIKDKKCDVPCIGIEMVHDGGKTTWHSAATAIYCLMGSGQLLWDTVTGVDMAL

SEQ ID NO: 29637 - protein, 466 aa, synthetic construct; identical to SEQ ID NO: 29131
  REGION 1..466: note = neuraminidase__InfluenzaB__AGX21967

SEQ ID NO: 29638 - protein, 466 aa, synthetic construct; identical to SEQ ID NO: 28743
  REGION 1..466: note = neuraminidase__InfluenzaB__AGX21978

SEQ ID NO: 29639 - protein, 466 aa, synthetic construct; identical to SEQ ID NO: 29131
  REGION 1..466: note = neuraminidase__InfluenzaB__AGX21989

SEQ ID NO: 29640 - protein, 466 aa, synthetic construct; identical to SEQ ID NO: 29129
  REGION 1..466: note = neuraminidase__InfluenzaB__AGX22000

SEQ ID NO: 29641 - protein, 466 aa, synthetic construct
  REGION 1..466: note = neuraminidase__InfluenzaB__AGX22011
MLPSTIQTLTLFLTSGGVLLSLYVSASLSYLLYSDILLKFSQTEITAPIMPLDCANASNVQAVNRSATKGVTLLLPEPEWTYPRLSCPGSTFQKALLISPHRFGETKGNSAPLIIREPFIACGPKECKHFALTHYAAKPGGYYNGTREDRNKLRHLISVKLGKIPTVENSIFHMAAWSGSACHDGREWTYIGVDGPDSNALLKIKYGEAYTDTYHSYAKNILRTQESACNCIGGDCYLMITDGPASGISECRFLKIREGRIIKEIFPTGRVKHTEECTCGFASNKTIECACRDNNYTAKRPFVKLNVETDTAEIRLMCTETYLDTPRPNDGSITGPCESNGDKGSGGIKGGFVHQRMASKIGRWYSRTMSKTKRMGMGLYVKYDGDPWTDSEALALSGVMVSMEEPGWYSFGFEIKDKKCDVPCIGIEMVHDGGKTTWHSAATAIYCLMGSGQLLWDTVTGVDMAL

SEQ ID NO: 29642 - protein, 466 aa, synthetic construct; identical to SEQ ID NO: 28743
  REGION 1..466: note = neuraminidase__InfluenzaB__AGX22033

SEQ ID NO: 29643 - protein, 466 aa, synthetic construct; identical to SEQ ID NO: 28743
  REGION 1..466: note = neuraminidase__InfluenzaB__AGX22044

SEQ ID NO: 29644 - protein, 466 aa, synthetic construct; identical to SEQ ID NO: 29129
  REGION 1..466: note = neuraminidase__InfluenzaB__AGX22055

SEQ ID NO: 29645 - protein, 466 aa, synthetic construct; identical to SEQ ID NO: 28743
  REGION 1..466: note = neuraminidase__InfluenzaB__AGX22066

SEQ ID NO: 29646 - protein, 466 aa, synthetic construct; identical to SEQ ID NO: 29630
  REGION 1..466: note = neuraminidase__InfluenzaB__AGX22077

SEQ ID NO: 29647 - protein, 466 aa, synthetic construct; identical to SEQ ID NO: 28745
  REGION 1..466: note = neuraminidase__InfluenzaB__AGX22088

SEQ ID NO: 29648 - protein, 466 aa, synthetic construct; identical to SEQ ID NO: 29131
  REGION 1..466: note = neuraminidase__InfluenzaB__AGX22099

SEQ ID NO: 29649 - protein, 466 aa, synthetic construct; identical to SEQ ID NO: 29129
  REGION 1..466: note = neuraminidase__InfluenzaB__AGX22110

SEQ ID NO: 29650 - protein, 466 aa, synthetic construct; identical to SEQ ID NO: 29131
  REGION 1..466: note = neuraminidase__InfluenzaB__AGX22132

SEQ ID NO: 29651 - protein, 466 aa, synthetic construct
  REGION 1..466: note = neuraminidase__InfluenzaB__AGX22143
MLPSTIQTLTLFLTSGGVLLSLYVSASLSYLLYSDILLKFSQTEITAPIMPLDCANASNVQAVNRSATKGVTLLLPEPEWTYPRLSCPGSTFQKALLISPHRFGETKGNSAPLIIREPFIACGPKECKHFALTHYAAQPGGYYNGTREDRNKLRHLISVKLGKIPTVENSIFHMAAWSGSACHDGREWTYIGVDGPDSNALLKIKYGEAYTDTYHSYAKNILRTQESACNCIGGDCYLMITDGPASGISECRFLKIREGRIIKEIFPTGRVKHTEECTCGFASNKTIECACRDNSYTAKRPFVKLNVETDTAEIRLMCTETYLDTPRPNDGSITGPCESNGDKGSGGIKGGFVHQRMASKIGRWYSRTISKTKRMGMGLYVKYDGDPWTDSEALALSGVMVSMEEPGWYSFGFEIKDKKCDVPCIGIEMVHDGGKTTWHSAATAIYCLMGSGQLLWDTVTGVDMAL

SEQ ID NO: 29652 - protein, 466 aa, synthetic construct; identical to SEQ ID NO: 29651
  REGION 1..466: note = neuraminidase__InfluenzaB__AGX22154

SEQ ID NO: 29653 - protein, 466 aa, synthetic construct; identical to SEQ ID NO: 29651
  REGION 1..466: note = neuraminidase__InfluenzaB__AGX22165

SEQ ID NO: 29654 - protein, 466 aa, synthetic construct; identical to SEQ ID NO: 29630
  REGION 1..466: note = neuraminidase__InfluenzaB__AGX22176

SEQ ID NO: 29655 - protein, 466 aa, synthetic construct; identical to SEQ ID NO: 29651
  REGION 1..466: note = neuraminidase__InfluenzaB__AGX22187

SEQ ID NO: 29656 - protein, 466 aa, synthetic construct; identical to SEQ ID NO: 29651
  REGION 1..466: note = neuraminidase__InfluenzaB__AGX22198

SEQ ID NO: 29657 - protein, 466 aa, synthetic construct; identical to SEQ ID NO: 29651
  REGION 1..466: note = neuraminidase__InfluenzaB__AGX22209

SEQ ID NO: 29658 - protein, 466 aa, synthetic construct; identical to SEQ ID NO: 29129
  REGION 1..466: note = neuraminidase__InfluenzaB__AGX22220

SEQ ID NO: 29659 - protein, 466 aa, synthetic construct; identical to SEQ ID NO: 29131
  REGION 1..466: note = neuraminidase__InfluenzaB__AGX22231

SEQ ID NO: 29660 - protein, 466 aa, synthetic construct; identical to SEQ ID NO: 29630
  REGION 1..466: note = neuraminidase__InfluenzaB__AGX22242

SEQ ID NO: 29661 - protein, 466 aa, synthetic construct; identical to SEQ ID NO: 29129
  REGION 1..466: note = neuraminidase__InfluenzaB__AGX22253

SEQ ID NO: 29662 - protein, 466 aa, synthetic construct; identical to SEQ ID NO: 28743
  REGION 1..466: note = neuraminidase__InfluenzaB__AGX22264

SEQ ID NO: 29663 - protein, 466 aa, synthetic construct; identical to SEQ ID NO: 29129
  REGION 1..466: note = neuraminidase__InfluenzaB__AGX22275

SEQ ID NO: 29664 - protein, 466 aa, synthetic construct; identical to SEQ ID NO: 28743
  REGION 1..466: note = neuraminidase__InfluenzaB__AGX22286

SEQ ID NO: 29665 - protein, 466 aa, synthetic construct
  REGION 1..466: note = neuraminidase__InfluenzaB__AGX22297
MLPSTIQTLTLFLTLGGVLLSLYVSASLSYLLYSDILLKFSQTEITAPIMPLDCANASNVQAVNRSATKGVTLLLPEPEWTYPRLSCPGSTFQKALLISPHRFGETKGNSAPLIIREPFIACGPKECKHFALTHYAAQPGGYYNGTREDRNKLRHLISVKLGKIPTVENSIFHMAAWSGSACHDGREWTYIGVDGPDSNALLKIKYGEAYTDTYHSYAKNILRTQESACNCIGGDCYLMITDGPASGISECRFLKIREGRIIKEIFPTGRVKHTEECTCGFASNKTIECACRDNSYTAKRPFVKLNVETDTAEIRLMCTETYLDTPRPNDGSITGPCESNGDKGSGGIKGGFVHQRMASKIGRWYSRTMSKTKRMGMGLYVKYDGDPWTDSEALALSGVMVSMEEPGWYSFGFEIKDKKCDVPCIGIEMVHDGGKTTWHSAATAIYCLMGSGQLLWDTVTGVDMAL

SEQ ID NO: 29666 - protein, 466 aa, synthetic construct; identical to SEQ ID NO: 28743
  REGION 1..466: note = neuraminidase__InfluenzaB__AGX22308

SEQ ID NO: 29667 - protein, 466 aa, synthetic construct
  REGION 1..466: note = neuraminidase__InfluenzaB__AGX22330
MLPSTIQTLTLFLTSGGVLLSLYVSASLSYLLYSDILLKFSQTEITAPIMPLDCANASNVQAVNRSATKGVTLLLPEPEWTYPRLSCPGSTFQKALLISPHRFGETKGNSAPLIIREPFIACGPKECKHFALTHYAAQPGGYYNGTREDRNKLRHLISVKLGKIPTVENSIFHMTAWSGSACHDGKEWTYIGVDGPDSNALLKIKYGEAYTDTYHSYAKNILRTQESACNCIGGDCYLMITDGPASGISECRFLKIREGRIIKEIFPTGRVKHTEECTCGFASNKTIECACRDNSYTAKRPFVKLNVETDTAEIRLMCTETYLDTPRPNDGSITGPCESDGDKGSGGIKGGFVHQRMATKIGRWYSRTMSKTKRMGMGLYVKYDGDPWTDSEALALSGVMVSMEEPGWYSFGFEIKDKKCDVPCIGIEMVHDGGKTTWHSAATAIYCLMGSGQLLWDTVTGVDMAL

SEQ ID NO: 29668 - protein, 466 aa, synthetic construct; identical to SEQ ID NO: 29131
  REGION 1..466: note = neuraminidase__InfluenzaB__AGX22341

SEQ ID NO: 29669 - protein, 466 aa, synthetic construct; identical to SEQ ID NO: 29131
  REGION 1..466: note = neuraminidase__InfluenzaB__AGX22352

SEQ ID NO: 29670 - protein, 466 aa, synthetic construct; identical to SEQ ID NO: 29131
  REGION 1..466: note = neuraminidase__InfluenzaB__AGX22363

SEQ ID NO: 29671 - protein, 466 aa, synthetic construct; identical to SEQ ID NO: 29129
  REGION 1..466: note = neuraminidase__InfluenzaB__AGX22374

SEQ ID NO: 29672 - protein, 466 aa, synthetic construct; identical to SEQ ID NO: 28743
  REGION 1..466: note = neuraminidase__InfluenzaB__AGX22385

SEQ ID NO: 29673 - protein, 466 aa, synthetic construct; identical to SEQ ID NO: 28743
  REGION 1..466: note = neuraminidase__InfluenzaB__AGX22396

SEQ ID NO: 29674 - protein, 466 aa, synthetic construct; identical to SEQ ID NO: 29630
  REGION 1..466: note = neuraminidase__InfluenzaB__AGX22407

SEQ ID NO: 29675 - protein, 466 aa, synthetic construct
  REGION 1..466: note = neuraminidase__InfluenzaB__AGX22418
MLPSTIQTLTLFLTSGGVLLSLYVSASLSYLLYSDILLKFSQTEIIAPIMPLDCANASNVQAVNHSATKGVTLLLPEPEWTYPRLSCPGSTFQKALLISPHRFGETKGNSAPLIIREPFIACGPKECKHFALTHYAAQPGRYYNGTREDRNKLRHLISVKLGKIPTVENSIFHMAAWSGSACHDGREWTYIGVDGPDSNALLKIKYGEAYTDTYHSYAKNILRTQESACNCIGGDCYLMITDGPASGISECRFLKIREGRIIKEIFPTGRVKHTEECTCGFASNKTIECACRDNSYTAKRPFVKLNVETDTAEIRLMCTETYLDTPRPNDGSITGPCESNGDKGSGGIKGGFVHQRMASKIGRWYSRTMSKTKRMGMGLYVKYDGDPWTDSEALALSGVMVSMEEPGWYSFGFEIKDKKCDVPCIGIEMVHDGGKTTWHSAATAIYCLMGSGQLLWDTVTGVDMAL

SEQ ID NO: 29676 - protein, 466 aa, synthetic construct; identical to SEQ ID NO: 29129
  REGION 1..466: note = neuraminidase__InfluenzaB__AGX22429

SEQ ID NO: 29677 - protein, 466 aa, synthetic construct; identical to SEQ ID NO: 29129
  REGION 1..466: note = neuraminidase__InfluenzaB__AGX22440

SEQ ID NO: 29678 - protein, 466 aa, synthetic construct; identical to SEQ ID NO: 29129
  REGION 1..466: note = neuraminidase__InfluenzaB__AGX22449

SEQ ID NO: 29679 - protein, 466 aa, synthetic construct
  REGION 1..466: note = neuraminidase__InfluenzaB__AGX22460
MLPSTIQTLTLFLTSGGVLLSLYVSASLSYLLYSDILLKFSQTEITAPTMPLDCANASNVQAVNRSATKGVTLLLPELEWTYPRLSCPGSTFQKALLISPHRFGETKGNSAPLIIREPFIACGPKECKHFALTHYAAQPGGYYNGTREDRNKLRHLISVKLGKIPTVENSIFHMAAWSGSACHDGREWTYVGVDGPDSNALLKIKYGEAYTDTYHSYAKNILRTQESACNCIGGDCYLMITDGPASGISECRFLKIREGRIIKEIFPTGRVKHTEECTCGFASNKTIECACRDNSYTAKRPFVKLDVETDTAEIRLMCTETYLDTPRPNDGSITGPCEANGDKGSGGIKGGFVHQRMASKIGRWYSRTMSKTKRMGMGLYVKYDGDPWTDSEALALSGVMVSMEEPGWYSFGFEIKDKKCDVPCIGIEMVHDGGKTTWHSAATAIYCLMGSGQLLWDTVTGVDMAL

SEQ ID NO: 29680 - protein, 466 aa, synthetic construct; identical to SEQ ID NO: 28743
  REGION 1..466: note = neuraminidase__InfluenzaB__AGX22471

SEQ ID NO: 29681 - protein, 466 aa, synthetic construct; identical to SEQ ID NO: 28743
  REGION 1..466: note = neuraminidase__InfluenzaB__AGX22482

SEQ ID NO: 29682 - protein, 466 aa, synthetic construct; identical to SEQ ID NO: 28743
  REGION 1..466: note = neuraminidase__InfluenzaB__AGX22493

SEQ ID NO: 29683 - protein, 466 aa, synthetic construct
  REGION 1..466: note = neuraminidase__InfluenzaB__AGX22504
MLPSTIQTLTLFLTSGGVLLSLYVSASLSYLLYSDILLKFSTTEITAPTIPLDCANASNVQAVNRSATKGVTLLLPEPEWTYPRLSCPGSTFQKALLISPHRFGETKGNSAPLIIREPFIACGPKECKHFALTHYAAQPGGYYNGTREDRNKLRHLISVKLGKIPTVENSIFHMAAWSGSACHDGKEWTYIGVDGPDSNALLKIKYGEAYTDTYHSYANNILRTQESACNCIGGNCYLMITDGSASGISECRFLKIREGRIIKEIFPTGRVKHTEECTCGFASNKTIECACRDNSYTAKRPFVKLNVETDTAEIRLMCTETYLDTPRPDDGSITGPCESNGNKGSGGIKGGFVHQRMASKIGRWYSRTMSKTKRMGMGLYVKYDGDPWTDSDALALSGVMVSMEEPGWYSFGFEIKDKKCDVPCIGIEMVHDGGKETWHSAATAIYCLMGSGQLLWDTVTGVDMAL

SEQ ID NO: 29684 - protein, 466 aa, synthetic construct; identical to SEQ ID NO: 29129
  REGION 1..466: note = neuraminidase__InfluenzaB__AGX22515

SEQ ID NO: 29685 - protein, 466 aa, synthetic construct
  REGION 1..466: note = neuraminidase__InfluenzaB__AGX22526
MLPSTIQTLTLFLTSGGVLLSLYVSASLSYLLYSDILQKFSQTEITAPIMPLDCANASNVQAVNRSATKGVTLLLPEPEWTYPRLSCPGSTFQKALLISPHRFGETKGNSAPLIIREPFIACGPTECKHFALTHYAAQPGGYYNGTREDRNKLRHLISVKLGKIPTVENSIFHMAAWSGSACHDGKEWTYIGVDGPDSNALLKIKYGEAYTDTYHSYAKNILRTQESACNCIGGDCYLMITDGPASGISECRFLKIREGRIIKEIFPTGRVKHTEECTCGFASNKTIECACRDNSYTAKRPFVKLNVETDTAEIRLMCTETYLDTPRPNDGSITGPCESDGDKGSGGIKGGFVHQRMASKIGRWYSRTMSKTKRMGMGLYVKYDGDPWTDSEALALSGVMVSMEEPGWYSFGFEIKDKKCDVPCIGIEMVHDGGKTTWHSAATAIYCLMGSGQLLWDTVTGVDMAL

SEQ ID NO: 29686 - protein, 466 aa, synthetic construct; identical to SEQ ID NO: 28788
  REGION 1..466: note = neuraminidase__InfluenzaB__AGX22548

SEQ ID NO: 29687 - protein, 466 aa, synthetic construct; identical to SEQ ID NO: 28627
  REGION 1..466: note = neuraminidase__InfluenzaB__AGX22559

SEQ ID NO: 29688 - protein, 466 aa, synthetic construct; identical to SEQ ID NO: 28788
  REGION 1..466: note = neuraminidase__InfluenzaB__AGX22570

SEQ ID NO: 29689 - protein, 466 aa, synthetic construct
  REGION 1..466: note = neuraminidase__InfluenzaB__AGX22581
MLPSTIQTLTLFLTSGGVLLSLYVSASLSYLLYSDILLKFSQTEITAPIMPLDCANASNVQAVNRSATKGVTLLLPEPEWTYPRLSCPGSTFQKALLISPHRFGETKGNSAPLIIREPFIACGPKECKHFALTHYAAQPGGYYNGTREDRNKLRHLISVKLGKIPTVENSIFHMAAWSGSACHDGREWTYIGVDGPDNNALLKIKYGEAYTDTYHSYAKNILRTQESACNCIGGDCYLMITDGPASGISECRFLKIREGRIIKEIFPTGRVKHTEECTCGFASNKTIECACRDNNYTAKRPFVKLNVETDTAEIRLMCTETYLDTPRPNDGSITGPCESNGDKGSGGIKGGFVHQRMASKIGRWYSRTMSKTKRMGMGLYVKYDGDPWTDSEALALSGVMVSMEEPGWYSFGFEIKDKKCDVPCIGIEMVHDGGKTTWHSAATAIYCLMGSGQLLWDTVTGVDMAL

SEQ ID NO: 29690 - protein, 466 aa, synthetic construct; identical to SEQ ID NO: 28788
  REGION 1..466: note = neuraminidase__InfluenzaB__AGX22592

SEQ ID NO: 29691 - protein, 466 aa, synthetic construct; identical to SEQ ID NO: 28788
  REGION 1..466: note = neuraminidase__InfluenzaB__AGX22603

SEQ ID NO: 29692 - protein, 466 aa, synthetic construct; identical to SEQ ID NO: 29028
  REGION 1..466: note = neuraminidase__InfluenzaB__AGX22614

SEQ ID NO: 29693 - protein, 466 aa, synthetic construct; identical to SEQ ID NO: 28788
  REGION 1..466: note = neuraminidase__InfluenzaB__AGX22625

SEQ ID NO: 29694 - protein, 466 aa, synthetic construct
  REGION 1..466: note = neuraminidase__InfluenzaB__AGX22636
MLPSTIQTLTLFLTSGGVLLSLYVSASLSYLLYSDILLKFSQTEITAPIMPLDCANASNVQAVNRSAAKGVALLLPEPEWTYPRLSCPGSTFQKALLISPHRFGETKGNSAPLIIREPFIACGPTECKHFALTHYAAQPGGYYNGTREDRNKLRHLISVKLGKIPTVENSIFHMAAWSGSACHDGKEWTYIGVDGPDSNALLKIKYGEAYTDTYHSYAKNILRTQESACNCIGGDCYLMITDGPASGISECRFLKIREGRIIKEIFPTGRVKHTEECTCGFASNKTIECACRDNSYTAKRPFVKLNVETDTAEIRLMCTETYLDTPRPNDGSITGPCESDGDKGSGGIKGGFVHQRMASKIGRWYSRTMSKTKRMGMGLYVKYDGDPWTDSEALALSGVMVSMEEPGWYSFGFEIKDKKCDVPCIGIEMVHDGGKTTWHSAATAIYCLMGSGQLLWDTVTGVDMAL

SEQ ID NO: 29695 - protein, 466 aa, synthetic construct; identical to SEQ ID NO: 28788
  REGION 1..466: note = neuraminidase__InfluenzaB__AGX22647

SEQ ID NO: 29696 - protein, 466 aa, synthetic construct; identical to SEQ ID NO: 28627
  REGION 1..466: note = neuraminidase__InfluenzaB__AGX22658

SEQ ID NO: 29697 - protein, 466 aa, synthetic construct; identical to SEQ ID NO: 28788
  REGION 1..466: note = neuraminidase__InfluenzaB__AGX22669

SEQ ID NO: 29698 - protein, 466 aa, synthetic construct; identical to SEQ ID NO: 28788
  REGION 1..466: note = neuraminidase__InfluenzaB__AGX22680

SEQ ID NO: 29699 - protein, 466 aa, synthetic construct; identical to SEQ ID NO: 28788
  REGION 1..466: note = neuraminidase__InfluenzaB__AGX22691

SEQ ID NO: 29700 - protein, 466 aa, synthetic construct; identical to SEQ ID NO: 28788
  REGION 1..466: note = neuraminidase__InfluenzaB__AGX22702

SEQ ID NO: 29701 - protein, 466 aa, synthetic construct; identical to SEQ ID NO: 28788
  REGION 1..466: note = neuraminidase__InfluenzaB__AGX22713

SEQ ID NO: 29702 - protein, 466 aa, synthetic construct
  REGION 1..466: note = neuraminidase__InfluenzaB__AGX22724
MLPSTIQTLTLFLTSGGVLLSLYVSALLSYLLYSDILLKFSQTEITAPIMPLDCANASNVQAVNRSATKGVTLLLPEPEWTYPRLSCPGSTFQKALLISPHRFGETKGNSAPLIIREPFIACGPKECKHFALTHYAAQPGGYYNGTREDRNKLRHLISVKLGKIPTVENSIFHMAAWSGSACHDGREWTYIGVDGPDSNALLKIKYGEAYTDTYHSYAKNILRTQESACNCIGGDCYLMITDGPASGISECRFLKIREGRIIKEIFPTGRVKHTEECTCGFASNKTIECACRDNSYTAKRPFVKLNVETDTAEIRLMCTETYLDTPRPNDGSITGPCESNGDKGSGGIKGGFVHQRMASKIGRWYSRTMSKTKRMGMGLYVKYDGDPWTDSEALALSGVMVSMEEPGWYSFGFEIKDKKCDVPCIGIEMVHDGGKTTWHSAATAIYCLMGSGQLLWDTVTGVDMAL

SEQ ID NO: 29703 - protein, 466 aa, synthetic construct; identical to SEQ ID NO: 28788
  REGION 1..466: note = neuraminidase__InfluenzaB__AGX22735

SEQ ID NO: 29704 - protein, 466 aa, synthetic construct
  REGION 1..466: note = neuraminidase__InfluenzaB__AGX22746
MLPSTIQTLTLFLTSGGVLLSLYVSASLSYLLYSDILLKFSQTEITAPIMPLDCANASNVQAVNRSATKGVTLLLPEPEWTYPRLSCPGSTFQKALLISPHRFGETKGNSAPLIIREPFIACGPTECKHFALTHYAAQPGGYYNRTREDRNKLRHLISVKLGKIPTVENSIFHMAAWSGSACHDGKEWTYIGVDGPDSNALLKIKYGEAYTDTYHSYAKNILRTQESACNCIGGDCYLMITDGPASGISECRFLKIREGRIIKEIFPTGRVKHTEECTCGFASNKTIECACRDNSYTAKRPFVKLNVETDTAEIRLMCTETYLDTPRPNDGSITGPCESDGDKGSGGIKGGFVHQRMASKIGRWYSRTMSKTKRMGMGLYVKYDGDPWTDSEALALSGVMVSMEEPGWYSFGFEIKDKKCDVPCIGIEMVHDGGKTTWHSAATAIYCLMGSGQLLWDTVTGVDMAL

SEQ ID NO: 29705 - protein, 466 aa, synthetic construct; identical to SEQ ID NO: 28788
  REGION 1..466: note = neuraminidase__InfluenzaB__AGX22757

SEQ ID NO: 29706 - protein, 466 aa, synthetic construct; identical to SEQ ID NO: 28788
  REGION 1..466: note = neuraminidase__InfluenzaB__AGX22768

SEQ ID NO: 29707 - protein, 466 aa, synthetic construct; identical to SEQ ID NO: 29129
  REGION 1..466: note = neuraminidase__InfluenzaB__AGX22779

SEQ ID NO: 29708 - protein, 466 aa, synthetic construct; identical to SEQ ID NO: 28788
  REGION 1..466: note = neuraminidase__InfluenzaB__AGX22790

SEQ ID NO: 29709 - protein, 466 aa, synthetic construct
  REGION 1..466: note = neuraminidase__InfluenzaB__AGX22801
MLPSTIQTLTLFLTSGGVLLSLYVSASLSYLLYSDILLKFSQTEITAPIMPLDCANASNVQAVNRSAAKGVTLLLPEPEWTYPRLSCPGSTFQKALLISPHRFGETKGNSAPLIIREPFIACGPTECKHFALTHYAAQPGGYYNGTRGDRNKLRHLISVKLGKIPTVENSIFHMAAWSGSACHDGKEWTYIGVDGPDSNALLKIKYGEAYTDTYHSYAKNILRTQESACNCIGGNCYLMITDGSASGVSECRFLKIREGRIIKEIFPTGRVKHTEECTCGFASNKTIECACRDNSYTAKRPFVKLNVETDTAEIRLMCTETYLDTPRPNDGSITGPCESDGDKGSGGIKGGFVHQRMASKIGRWYSRTMSKTKRMGMGLYVKYDGDPWTDSEALALSGVMVSMEEPGWYSFGFEIKDKKCDVPCIGIEMVHDGGKTTWHSAATAIYCLMGSGQLLWDTVTGVDMAL

SEQ ID NO: 29710 - protein, 466 aa, synthetic construct; identical to SEQ ID NO: 28788
  REGION 1..466: note = neuraminidase__InfluenzaB__AGX22812

SEQ ID NO: 29711 - protein, 466 aa, synthetic construct; identical to SEQ ID NO: 28788
  REGION 1..466: note = neuraminidase__InfluenzaB__AGX22823

SEQ ID NO: 29712 - protein, 466 aa, synthetic construct; identical to SEQ ID NO: 28788
  REGION 1..466: note = neuraminidase__InfluenzaB__AGX22834

SEQ ID NO: 29713 - protein, 466 aa, synthetic construct; identical to SEQ ID NO: 28788
  REGION 1..466: note = neuraminidase__InfluenzaB__AGX22845

SEQ ID NO: 29714 - protein, 466 aa, synthetic construct; identical to SEQ ID NO: 28788
  REGION 1..466: note = neuraminidase__InfluenzaB__AGX22856

SEQ ID NO: 29715 - protein, 466 aa, synthetic construct; identical to SEQ ID NO: 28788
  REGION 1..466: note = neuraminidase__InfluenzaB__AGX22867

SEQ ID NO: 29716 - protein, 466 aa, synthetic construct; identical to SEQ ID NO: 28788
  REGION 1..466: note = neuraminidase__InfluenzaB__AGX22878

SEQ ID NO: 29717 - protein, 466 aa, synthetic construct
  REGION 1..466: note = neuraminidase__InfluenzaB__AGX22889
MLPSTIQTLTLFLTSGGVLLSLYVSASLSYLLYSDILLKFSQTEITAPIMPLDCANASNVQAVNRSAAKGVTLLLPEPEWTYPRLSCPGSTFQKALLISPHRFGETKGNSAPLIIREPFIACGPTECKHFALTHYAAQPGGYYNGTREDRNKLRHLISVKLGKIPTVENSIFHMAAWSGSACHDGKEWTYIGVDGPDSNALLKIKYGEAYTDTYHSYAKNILRTQESACNCIGGDCYLMITDGPASGISECRFLKIREGRIIKEIFPTGRVKHTEECTCGFASNKTIECACRDNSHTAKRPFVKLNVETDTAEIRLMCTETYLDTPRPNDGSITGPCESDGDKGSGGIKGGFVHQRMASKIGRWYSRTMSKTKRMGMGLYVKYDGDPWTDSEALALSGVMVSMEEPGWYSFGFEIKDKKCDVPCIGIEMVHDGGKTTWHSAATAIYCLMGSGQLLWDTVTGVDMAL

SEQ ID NO: 29718 - protein, 466 aa, synthetic construct; identical to SEQ ID NO: 28627
  REGION 1..466: note = neuraminidase__InfluenzaB__AGX22900

SEQ ID NO: 29719 - protein, 466 aa, synthetic construct
  REGION 1..466: note = neuraminidase__InfluenzaB__AGX22911
MLPSTIQTLTLFLTSGGVLLSLYVSASLSYLLYSDILLKFSQTEITAPIMPLDCANASNVQAVNRSAAKGVTLLLPEPEWTYPRLSCPGSTFQKALLISPHRFGETKGNSAPLIIREPFIACGPTECKHFALTHYAAQPGGYYNGTREDRNKLRHLISVKLGKIPTVENSIFHMAAWSGSACHDGKEWTYIGVDGPDSNALLKIKYGEAYTDTYHSYAKNILRTQESACNCIGGDCYLMITDGPASGTSECRFLKIREGRIIKEIFPTGRVKHTEECTCGFASNKTIECACRDNSYTAKRPFVKLNVETDTAEIRLMCTETYLDTPRPNDGSITGPCESDGDKGSGGIKGGFVHQRMASKIGRWYSRTMSKTKRMGMGLYVKYDGDPWTDSEALALSGVMVSMEEPGWYSFGFEIKDKKCDVPCIGIEMVHDGGKTTWHSAATAIYCLMGSGQLLWDTVTGVDMAL

SEQ ID NO: 29720 - protein, 466 aa, synthetic construct
  REGION 1..466: note = neuraminidase__InfluenzaB__AGX22922
MLPSTIQTLTLFLTSGGVLLSLYVSASLSYLLYSDILLKFSQTEITAPIMPLDCANASNVQAVNRSATKGVTLLLPEPEWTYPRLSCPGSTFQKALLISPHRFGETKGNSAPLIIREPFIACGPTECKHFALTHYAAQPGGYYNGTREDRNKLRHLISVKLGKIPTVENSIFHMAAWSGSACHDGKEWTYIGVDGPDSNALLKIKYGEAYTDTYHSYAKNILRTQESACNCIGGDCYLMITDGPASGISECRFLKIREGRIIKEIFPTGRVKHTEECTCGFASNKTIECACRDNSYTAKRPFVKLNVETDTAEIRLMCTETYLDTPRPNDGSITGPCESDGDKGSGGIKGGFVHQRMASKIGRWYSRTMSKTKRMGMGLYVKYDGDPWTDNEALALSGVMVSMEEPGWYSFGFEIKDKKCDVPCIGIEMVHDGGKTTWHSAATAIYCLMGSGQLLWDTVTGVDMAL

SEQ ID NO: 29721 - protein, 466 aa, synthetic construct; identical to SEQ ID NO: 28788
  REGION 1..466: note = neuraminidase__InfluenzaB__AGX22933

SEQ ID NO: 29722 - protein, 466 aa, synthetic construct; identical to SEQ ID NO: 28788
  REGION 1..466: note = neuraminidase__InfluenzaB__AGX22944

SEQ ID NO: 29723 - protein, 466 aa, synthetic construct; identical to SEQ ID NO: 28788
  REGION 1..466: note = neuraminidase__InfluenzaB__AGX22955

SEQ ID NO: 29724 - protein, 466 aa, synthetic construct; identical to SEQ ID NO: 28788
  REGION 1..466: note = neuraminidase__InfluenzaB__AGX22966

SEQ ID NO: 29725 - protein, 466 aa, synthetic construct; identical to SEQ ID NO: 28627
  REGION 1..466: note = neuraminidase__InfluenzaB__AGX22977

SEQ ID NO: 29726 - protein, 466 aa, synthetic construct; identical to SEQ ID NO: 29043
  REGION 1..466: note = neuraminidase__InfluenzaB__AGX22988

SEQ ID NO: 29727 - protein, 466 aa, synthetic construct
  REGION 1..466: note = neuraminidase__InfluenzaB__AGX22999
MLPSTIQTLTLFLTSGGVLLSLYVSASLSYLLYSDILLKFSQTEITAPIMPLDCANASNVQAVNRSAAKGVTLLLPEPEWAYPRLSCPGSTFQKALLISPHRFGETKGNSAPLIIREPFIACGPTECKHFALTHYAAQPGGYYNGTREDRNKLRHLISVKLGKIPTVENSIFHMAAWSGSACHDGKEWTYIGVDGPDSNALLKIKYGEAYTDTYHSYAKNILRTQESACNCIGGDCYLMITDGPASGISECRFLKIREGRIIKEIFPTGRVKHTEECTCGFASNKTIECACRDNSYTAKRPFVKLNVETDTAEIRLMCTETYLDTPRPNDGSITGPCESDGDKGSGGIKGGFVHQRMASKIGRWYSRTMSKTKRMGMGLYVKYDGDPWTDSEALALSGVMVSMEEPGWYSFGFEIKDKKCDVPCIGIEMVHDGGKTTWHSAATAIYCLMGSGQLLWDTVTGVDMAL

SEQ ID NO: 29728 - protein, 466 aa, synthetic construct; identical to SEQ ID NO: 29727
  REGION 1..466: note = neuraminidase__InfluenzaB__AGX23010

SEQ ID NO: 29729 - protein, 466 aa, synthetic construct; identical to SEQ ID NO: 28627
  REGION 1..466: note = neuraminidase__InfluenzaB__AGX23021

SEQ ID NO: 29730 - protein, 466 aa, synthetic construct; identical to SEQ ID NO: 28788
  REGION 1..466: note = neuraminidase__InfluenzaB__AGX23032

SEQ ID NO: 29731 - protein, 466 aa, synthetic construct
  REGION 1..466: note = neuraminidase__InfluenzaB__AGX23043
MLPSTIQTLTLFLTSGGVLLSLYVSASLSYLLYSDILLKFSQTEITAPIMPLDCANASNVQAVNRSAAKGVTLLLPEPEWTYPRLSCPGSTFQKALLISPHRFGETKGNSAPLIIREPFIACGPTECKHFALTHYAAQPGGYYNGTREDRNKLRHLISVKLGKIPTVENSIFHMAAWSGSACHDGKEWTYIGVDGPDSNALLKIKYGEAYTDTYHSYAKNILRTQESACNCIGGDCYLMITDGPALGISECRFLKIREGRIIKEIFPTGRVKHTEECTCGFASNKTIECACRDNSYTAKRPFVKLNVETDTAEIRLMCTETYLDTPRPNDGSITGPCESDGDKGSGGIKGGFVHQRMASKIGRWYSRTMSKTKRMGMGLYVKYDGDPWTDSEALALSGVMVSMEEPGWYSFGFEIKDKKCDVPCIGIEMVHDGGKTTWHSAATAIYCLMGSGQLLWDTVTGVDMAL

SEQ ID NO: 29732 - protein, 466 aa, synthetic construct; identical to SEQ ID NO: 28627
  REGION 1..466: note = neuraminidase__InfluenzaB__AGX23054

SEQ ID NO: 29733 - protein, 466 aa, synthetic construct; identical to SEQ ID NO: 28627
  REGION 1..466: note = neuraminidase__InfluenzaB__AGX23065

SEQ ID NO: 29734 - protein, 466 aa, synthetic construct; identical to SEQ ID NO: 28627
  REGION 1..466: note = neuraminidase__InfluenzaB__AGX23076

SEQ ID NO: 29735 - protein, 466 aa, synthetic construct; identical to SEQ ID NO: 28788
  REGION 1..466: note = neuraminidase__InfluenzaB__AGX23087

SEQ ID NO: 29736 - protein, 466 aa, synthetic construct; identical to SEQ ID NO: 28627
  REGION 1..466: note = neuraminidase__InfluenzaB__AGX23098

SEQ ID NO: 29737 - protein, 466 aa, synthetic construct
  REGION 1..466: note = neuraminidase__InfluenzaB__AGX23109
MLPSTIQTLTLFLTSGGVLLSLYVSASLSYLLYSDILLKFSQTEITAPIMPLDCANASNVQAVNRSATKGVTLLLPEPEWTYPRLSCPGSTFQKALLISPHRFGETKGNSAPLIIREPFIACGPTECKHFALTHYAAQPGGYYNGTREDRNKLRHLISVKLGKIPTVENSIFHMAAWSGSACHDGKEWTYIGVDGPDSNALLKIKYGEAYTDTYHSYAKNILRTQESACNCIRGDCYLMITDGPASGISECRFLKIREGRIIKEIFPTGRVKHTEECTCGFASNKTIECACRDNSYTAKRPFVKLNVETDTAEIRLMCTETYLDTPRPNDGSITGPCESDGDKGSGGIKGGFVHQRMASKIGRWYSRTMSKTKRMGMGLYVKYDGDPWTDSEALALSGVMVSMEEPGWYSFGFEIKDKKCDVPCIGIEMVHDGGKTTWHSAATAIYCLMGSGQLLWDTVTGVDMAL

SEQ ID NO: 29738 - protein, 466 aa, synthetic construct; identical to SEQ ID NO: 28788
  REGION 1..466: note = neuraminidase__InfluenzaB__AGX23120

SEQ ID NO: 29739 - protein, 466 aa, synthetic construct
  REGION 1..466: note = neuraminidase__InfluenzaB__AGX23131
MLPSTIQTLTLFLTSGGVLLSLYVSASLSYLLYSDILLKFSQTEIIAPIMPLDCANASNVQAVNRSAAKGVTLLLPEPEWTYPRLSCPGSTFQKALLISPHRFGETKGNSAPLIIREPFIACGPTECKHFALTHYAAQPGGYYNGTREDRNKLRHLISVKLGKIPTVENSIFHMAAWSGSACHDGKEWTYIGVDGPDSNALLKIKYGEAYTDTYHSYAKNILRTQESACNCIGGDCYLMITDGPASGISECRFLKIREGRIIKEIFPTGRVKHTEECTCGFASNKTIECACRDNSYTAKRPFVKLNVETDTAEIRLMCTETYLDTPRPNDGSITGPCESDGDKGSGGIKGGFVHQRMASKIGRWYSRTMSKTKRMGMGLYVKYDGDPWTDSEALALSGVMVSMEEPGWYSFGFEIKDKKCDVPCIGIEMVHDGGKTTWHSAATAIYCLMGSGQLLWDTVTGVDMAL

SEQ ID NO: 29740 - protein, 466 aa, synthetic construct; identical to SEQ ID NO: 28788
  REGION 1..466: note = neuraminidase__InfluenzaB__AGX23142

SEQ ID NO: 29741 - protein, 466 aa, synthetic construct; identical to SEQ ID NO: 28627
  REGION 1..466: note = neuraminidase__InfluenzaB__AGX23153

SEQ ID NO: 29742 - protein, 466 aa, synthetic construct; identical to SEQ ID NO: 28627
  REGION 1..466: note = neuraminidase__InfluenzaB__AGX23164

SEQ ID NO: 29743 - protein, 466 aa, synthetic construct; identical to SEQ ID NO: 28627
  REGION 1..466: note = neuraminidase__InfluenzaB__AGX23175

SEQ ID NO: 29744 - protein, 466 aa, synthetic construct
  REGION 1..466: note = neuraminidase__InfluenzaB__AGX23186
MLPSTTQTLTLFLTSGGVLLSLYVSASLSYLLYSDILLKFSQTEITAPIMPLDCANASNVQAVNRSAAKGVTLLLPEPEWTYPRLSCPGSTFQKALLISPHRFGETKGNSAPLIIREPFIACGPTECKHFALTHYAAQPGGYYNGTREDRNKLRHLISVKLGKIPTVENSIFHMAAWSGSACHDGKEWTYIGVDGPDSNALLKIKYGEAYTDTYHSYAKNILRTQESACNCIGGDCYLMITDGPASGISECRFLKIREGRIIKEIFPTGRVKHTEECTCGFASNKTIECACRDNSYTAKRPFVKLNVETDTAEIRLMCTETYLDTPRPNDGSITGPCESDGDKGSGGIKGGFVHQRMASKIGRWYSRTMSKTKRMGMGLYVKYDGDPWTDSEALALSGVMVSMEEPGWYSFGFEIKDKKCDVPCIGIEMVHDGGKTTWHSAATAIYCLMGSGQLLWDTVTGVDMAL

SEQ ID NO: 29745 - protein, 466 aa, synthetic construct; identical to SEQ ID NO: 28788
  REGION 1..466: note = neuraminidase__InfluenzaB__AGX23197

SEQ ID NO: 29746 - protein, 466 aa, synthetic construct; identical to SEQ ID NO: 28788
  REGION 1..466: note = neuraminidase__InfluenzaB__AGX23208

SEQ ID NO: 29747 - protein, 466 aa, synthetic construct; identical to SEQ ID NO: 28788
  REGION 1..466: note = neuraminidase__InfluenzaB__AGX23219

SEQ ID NO: 29748 - protein, 466 aa, synthetic construct
  REGION 1..466: note = neuraminidase__InfluenzaB__AGX23230
MLPSTIQTLTLFLTSGGVLLSLYVSASLSYLLYSDILLKFSQTEITAPIMPLDCANASNVQAVNRSAAKGVTLLLPEPEWTYPRLSCPGSTFQKALLISPHRFGETKGNSAPLIIREPFIACGPTECKHFALTHYAAQPGEYYNGTREDRNKLRHLISVKLGKIPTVENSIFHMAAWSGSACHDGKEWTYIGVDGPDSNALLKIKYGEAYTDTYHSYAKNILRTQESACNCIGGDCYLMITDGPSSGISECRFLKIREGRIIKEIFPTGRVKHTEECTCGFASNKTIECACRDNSYTAKRPFVKLNVETDTAEIRLMCTETYLDTPRPNDGSITGPCESDGDKGSGGIKGGFVHQRMASKIGRWYSRTMSKTKRMGMGLYVKYDGDPWTDSEALALSGVMVSMEEPGWYSFGFEIKDKKCDVPCIGIEMVHDGGKTTWHSAATAIYCLMGSGQLLWDTVTGVDMAL

SEQ ID NO: 29749 - protein, 466 aa, synthetic construct; identical to SEQ ID NO: 28627
  REGION 1..466: note = neuraminidase__InfluenzaB__AGX23241

SEQ ID NO: 29750 - protein, 466 aa, synthetic construct; identical to SEQ ID NO: 28788
  REGION 1..466: note = neuraminidase__InfluenzaB__AGX23252

SEQ ID NO: 29751 - protein, 466 aa, synthetic construct; identical to SEQ ID NO: 28788
  REGION 1..466: note = neuraminidase__InfluenzaB__AGX23263

SEQ ID NO: 29752 - protein, 466 aa, synthetic construct; identical to SEQ ID NO: 28788
  REGION 1..466: note = neuraminidase__InfluenzaB__AGX23274

SEQ ID NO: 29753 - protein, 466 aa, synthetic construct; identical to SEQ ID NO: 28627
  REGION 1..466: note = neuraminidase__InfluenzaB__AGX23285

SEQ ID NO: 29754 - protein, 466 aa, synthetic construct; identical to SEQ ID NO: 28788
  REGION 1..466: note = neuraminidase__InfluenzaB__AGX23296

SEQ ID NO: 29755 - protein, 466 aa, synthetic construct
  REGION 1..466: note = neuraminidase__InfluenzaB__AGX23307
MLPSTIQTLTLFLTSGGVLLSLYVSASLSYLLYSDILLKFSQTEITAPIMPLDCANASNVQAVNRSAAKGVTLLLPEPEWTYPRLSCPGSTFQKALLISPHRFGETKGNSAPLIIREPFIACGPTECKHFALTHYAAQPGGYYNGTREDRNKLRHLISVKLGKIPTVENSIFHMAAWSGSACHDGKEWTYVGVDGPDSNALLKIKYGEAYTDTYHSYAKNILRTQESACNCIGGDCYLMITDGPASGISECRFLKIREGRIIKEIFPTGRVKHTEECTCGFASNKTIECACRDNSYTAKRPFVKLNVETDTAEIRLMCTETYLDTPRPNDGSITGPCESDGDKGSGGIKGGFVHQRMASKIGRWYSRTMSKTKRMGMGLYVKYDGDPWTDSEALALSGVMVSMEEPGWYSFGFEIKDKKCDVPCIGIEMVHDGGKTTWHSAATAIYCLMGSGQLLWDTVTGVDMAL

SEQ ID NO: 29756 - protein, 466 aa, synthetic construct; identical to SEQ ID NO: 29755
  REGION 1..466: note = neuraminidase__InfluenzaB__AGX23318

SEQ ID NO: 29757 - protein, 466 aa, synthetic construct; identical to SEQ ID NO: 29755
  REGION 1..466: note = neuraminidase__InfluenzaB__AGX23329

SEQ ID NO: 29758 - protein, 466 aa, synthetic construct; identical to SEQ ID NO: 29755
  REGION 1..466: note = neuraminidase__InfluenzaB__AGX23340

SEQ ID NO: 29759 - protein, 466 aa, synthetic construct; identical to SEQ ID NO: 29755
  REGION 1..466: note = neuraminidase__InfluenzaB__AGX23351

SEQ ID NO: 29760 - protein, 466 aa, synthetic construct; identical to SEQ ID NO: 29755
  REGION 1..466: note = neuraminidase__InfluenzaB__AGX23362

SEQ ID NO: 29761 - protein, 466 aa, synthetic construct; identical to SEQ ID NO: 29755
  REGION 1..466: note = neuraminidase__InfluenzaB__AGX23373

SEQ ID NO: 29762 - protein, 466 aa, synthetic construct; identical to SEQ ID NO: 29755
  REGION 1..466: note = neuraminidase__InfluenzaB__AGX23384

SEQ ID NO: 29763 - protein, 466 aa, synthetic construct
  REGION 1..466: note = neuraminidase__InfluenzaB__AGX23395
MLPSTIQTLTLFLTSGGVLLSLYVSASLSYLLYSDILLKFSQTEITAPIMPLDCANASNVQAVNRSAAKGVTLLLPEPEWTYPRLSCPGSTFQKALLISPHRFGETKGNSAPLIIREPFIACGPTECKHFALTHYAAQPGGYYNGTREDRNKLRHLISVKLGKIPTVENSIFHMAAWSGSACHDGKEWTYVGVDGPDSNALLKIKYGEAYTDTYHSYAKNILRTQESACNCIGGDCYLMITDGPASGISECRFLKIREGRIIKEIFPTGRVKHTEECTCGFASNKTIECACRDNSYTAKRPFVKLNVETDTAEIRLMCTETYLDTPRPNDGSITGPCESDGDKGSGGIKGGFVHQRMASKIGRWYSRTMSKTKRMGMGLYVKYDGDPWTDSEALALSGVMVSMEEPGWYSFGFEIKDKKCDVPCIGIEMVHDGGKTTWHSAATAIYCLMGSGQLLWNTVTGVDMAL

SEQ ID NO: 29764 - protein, 466 aa, synthetic construct
  REGION 1..466: note = neuraminidase__InfluenzaB__AGX23417
MLPSTIQTLTLFLTSGGVLLSLYVSASLSYLLYSDILLKFSQTEITAPIMPLDCANASNVQAVNRSAAKGVTFLLPEPEWTYPRLSCPGSTFQKALLISPHRFGETKGNSAPLIIREPFIACGPTECKHFALTHYAAQPGGYYNGTREDRNKLRHLISVKLGKIPTVENSIFHMAAWSGSACHDGKEWTYIGVDGPDSNALLKIKYGEAYTDTYHSYAKNILRTQESACNCIGGDCYLMITDGPASGISECRFLKIREGRIIKEIFPTGRVKHTEECTCGFASNKTIECACRDNSYTAKRPFVKLNVETDTAEIRLMCTETYLDTPRPNDGSITGPCESDGDKGSGGIKGGFVHQRMASKIGRWYSRTMSKTKRMGMGLYVKYDGDPWTDSEALALSGVMVSMEEPGWYSFGFEIKDKKCDVPCIGIEMVHDGGKTTWHSAATAIYCLMGSGQLLWDTVTGVDMAL

SEQ ID NO: 29765 - protein, 466 aa, synthetic construct; identical to SEQ ID NO: 29764
  REGION 1..466: note = neuraminidase__InfluenzaB__AGX23428

SEQ ID NO: 29766 - protein, 466 aa, synthetic construct; identical to SEQ ID NO: 29147
  REGION 1..466: note = neuraminidase__InfluenzaB__AGX23450

SEQ ID NO: 29767 - protein, 466 aa, synthetic construct
  REGION 1..466: note = neuraminidase__InfluenzaB__AGX23461
MLPSTIQTLTLFLTSGGVLLSLYVSASLSYLLYSDILLKFSRTEITAPIMPLDCANASNIQAVNRSATKGVTLLLPEPEWTYPRLSCPGSTFQKALLISPHRFGETKGNSAPLIIREPFIACGPKECKHFALTHYAAQPGGYYNGTREDRNKLRHLISVKLGKIPTVENSIFHMAAWSGSACHDGREWTYIGVDGPDSNALLKIKYGEAYTDTYHSYAKNILRTQESACNCIGGDCYLMITDGPASGISECRFLKIREGRIIKEIFPTGRVKHTEECTCGFASNKTIECACRDNSYTAKRPFVKLNVETDTAEIRLMCTETYLDTPRPNDGSITGPCESNGDKGSGGIKGGFVHQRMASKIGRWYSRTMSKTKRMGMGLYVKYDGDPWTDSEALALSGVMVSIEEPGWYSFGFEIKDKKCDVPCIGIEMVHDGGKTTWHSAATAIYCLMGSGQLLWDTVTGVDMAL

SEQ ID NO: 29768 - protein, 466 aa, synthetic construct; identical to SEQ ID NO: 29147
  REGION 1..466: note = neuraminidase__InfluenzaB__AGX23472

SEQ ID NO: 29769 - protein, 466 aa, synthetic construct; identical to SEQ ID NO: 28788
  REGION 1..466: note = neuraminidase__InfluenzaB__AGX23483

SEQ ID NO: 29770 - protein, 466 aa, synthetic construct
  REGION 1..466: note = neuraminidase__InfluenzaB__AGX23494
MLPSTIQTLTLFLTSGGVLLSLYVSASLSYLLYSDILLKFSQTEITAPIMPLDCANASNVQAVNRSAAKGVTLLLPEPEWTYPRLSCPGSTFQKALLISPHRFGETKGNSAPLIIREPFIACGPTECKHFALTHYAAQPGGYYNGTREDRNKLRHLISVKLGKIPTVENSIFHMAAWSGSACHDGKEWTYVGVDGPDSNALLKIKYGEAYTDTYHSYAKNILRTQESACNCIGGDCYLMITDGPASGISECRFLKIREGRIIKEIFPTGRVKHTEECTCGFASNKTIECACRDNSYTAKRPFVKLNVETDTAEIRLMCTETYLDTPRPNDGSITGPCGSDGDKGSGGIKGGFVHQRMASKIGRWYSRTMSKTKRMGMGLYVKYDGDPWTDSEALALSGVMVSMDEPGWYSFGFEIKDKKCDVPCIGIEMVHDGGKTTWHSAATAIYCLMGSGQLLWDTVTGVDMAL

SEQ ID NO: 29771 - protein, 466 aa, synthetic construct
  REGION 1..466: note = neuraminidase__InfluenzaB__AGX23505
MLPSTIQTLTLFLTSGGVLLSLYVSASLSYLLYSDILLKFSQTEITAPIMPLDCANASNVQAVNRSAAKGVTLLLPEPEWTYPRLSCPGSTFQKALLISPHRFGETKGNSAPLIIREPFIACGPTECKHFALTHYAAQPGGYYNGTREDRNKLRHLISVKLGKIPTVENSIFHMAAWSGSACHDGKEWTYIGVDGPDNNALLKIKYGEAYTDTYHSYAKNILRTQESACNCIGGDCYLMITDGPASGISECRFLKIREGRIIKEIFPTGRVKHTEECTCGFASNKTIECACRDNSYTAKRPFVKLNVETDTAEIRLMCTETYLDTPRPNDGSITGPCESDGDKGSGGIKGGFVHQRMASKIGRWYSRTMSKTKRMGMGLYVKYDGDPWTDSEALALSGVMVSMEEPGWYSFGFEIKDKKCDVPCIGIEMVHDGGKTTWHSAATAIYCLMGSGQLLWDTVTGVDMAL

SEQ ID NO: 29772 - protein, 466 aa, synthetic construct
  REGION 1..466: note = neuraminidase__InfluenzaB__AGX23516
MLPSTIQTLTLFLTSGGVLLSLYVSASLSYLLYSDILLKFSQTEITAPIMPLDCANASNVQAVNRSAAKGVTLLLPEPEWTYPRLSCPGSTFQKALLISPHRFGETKGNSAPLIIREPFIACGPTECKHFALTHYAAQPGGYYNGTREDRNKLRHLISVKLGKIPTVENSIFHMAAWSGSACHDGKEWTYIGVDGPDSNALLKIKYGEAYTDTYHSYAKNILRTQESACNCIGGDCYLMITDGPASGVSECRFLKIREGRIIKEIFPTGRVKHTEECTCGFASNKTIECACRDNSYTAKRPFVKLNVETDTAEIRLMCTETYLDTPRPNDGSITGPCESDGDKGSGGIKGGFVHQRMASKIGRWYSRTMSKAKRMGMGLYVKYDGDPWTDSEALALSGVMVSMEEPGWYSFGFEIKDKKCDVPCIGIEMVHDGGKTTWHSAATAIYCLMGSGQLLWDTVTGVDMAL

SEQ ID NO: 29773 - protein, 466 aa, synthetic construct; identical to SEQ ID NO: 28788
  REGION 1..466: note = neuraminidase__InfluenzaB__AGX23527

SEQ ID NO: 29774 - protein, 466 aa, synthetic construct
  REGION 1..466: note = neuraminidase__InfluenzaB__AGX23538
MLPSTIQTLTLFLTSGGVLLSLYVSASLSYLLYSDILLKFSQTEITAPIMPLDCANASNVQAVNRSAAKGVTLLLPKPEWTYPRLSCPGSTFQKALLISPHRFGETKGNSAPLIIREPFIACGPTECKHFALTHYAAQPGGYYNGTREDRNKLRHLISVKLGKIPTVENSIFHMAAWSGSACHDGKEWTYIGVDGPDSNALLKIKYGEAYTDTYHSYAKNILRTQESACNCIGGDCYLMITDGPASGVSECRFLKIREGRIIKEIFPTGRVKHTEECTCGFASNKTIECACRDNSYTAKRPFVKLNVETDTAEIRLMCTETYLDTPRPNDGSITGPCESDGDKGSGGIKGGFVHQRMASKIGRWYSRTMSTTKRMGMGLYVKYDGDPWTDSEALALSGVMVSMEEPGWYSFGFEIKDKKCDVPCIGIEMVHDGGKTTWHSAATAIYCLMGSGQLLWDTVTGVDMAL

SEQ ID NO: 29775 - protein, 466 aa, synthetic construct
  REGION 1..466: note = neuraminidase__InfluenzaB__AGX23549
MLPSTIQTLTLFLTSGGVLLSLYVSASLSYLLYSDILLKFSQTEITAPIMPLDCANASNVQAVNRSAAKGVTLLLPEPEWTYPRLSCPGSTFQKALLISPHRFGETKGNSAPLIIREPFIACGPTECKHFALTHYAAQPGGYYNGTREDRNKLRHLISVKLGKIPTVENSIFHMAAWSGSACHDGKEWTYIGVDGPDSNALLKIKYGEAYTDTYHSYAKNILRTQESACNCIGGDCYLMITDGPASGVSECRFLKIREGRIIKEIFPTGRVKHTEECTCGFASNKTIECACRDNSYTAKRPFVKLNVETDTAEIRLMCTETYLDTPRPNDGSITGPCESDGDKGSGGIKGGFVHQRMASKIGRWYSRTMSTTKRMGMGLYVKYDGDPWTDSEALALSGVMVSMEEPGWYSFGFEIKDKKCDVPCIGIEMVHDGGKTTWHSAATAIYCLMGSGQLLWDTVTGVDMAL

SEQ ID NO: 29776 - protein, 466 aa, synthetic construct; identical to SEQ ID NO: 28788
  REGION 1..466: note = neuraminidase__InfluenzaB__AGX23560

SEQ ID NO: 29777 - protein, 466 aa, synthetic construct; identical to SEQ ID NO: 29770
  REGION 1..466: note = neuraminidase__InfluenzaB__AGX23571

SEQ ID NO: 29778 - protein, 466 aa, synthetic construct; identical to SEQ ID NO: 29770
  REGION 1..466: note = neuraminidase__InfluenzaB__AGX23582

SEQ ID NO: 29779 - protein, 466 aa, synthetic construct
  REGION 1..466: note = neuraminidase__InfluenzaB__AGX23593
MLPSTIQTLTLFLTSGGVLLSLYVSASLSYLLYSDILLKFSQTEITAPIMPLDCANASNVQAVNRSAAKGVTLLLPEPEWTYPRLSCPGSTFQKALLISPHRFGETKGNSAPLIIREPFIACGPTECKHFALTHYAAQPGGYYNGTREDRNKLRHLISVKLGKIPTVENSIFHMAAWSGSACHDGKEWTYIGVDGPDSNALLKIKYGEAYTDTYHSYAKNILRTQESACNCIGGDCYLMITDGPASGISECRFLKIREGRIIKEIFPTGRVKHTEECTCGFASNKTIECACRDNSYTAKRPFVKLNVETDTAEIRLMCTETYLDTPRPNDGSITGPCESDGDKGSGGIKGGFVHQRMASKIGRWYSRTMSKTKRMGMGLYVKYDGDPWTDSEALTLSGVMVSMEEPGWYSFGFEIKDKKCDVPCIGIEMVHDGGKTTWHSAATAIYCLMGSGQLLWDTVTGVDMAL

SEQ ID NO: 29780 - protein, 466 aa, synthetic construct; identical to SEQ ID NO: 28788
  REGION 1..466: note = neuraminidase__InfluenzaB__AGX23604

SEQ ID NO: 29781 - protein, 466 aa, synthetic construct
  REGION 1..466: note = neuraminidase__InfluenzaB__AGX23615
MLPSTIQTLTLFLTSGGVLLSLYVSASLSYLLYSDILLKFSQTEITTPIMPLDCANASNVQAVNRSAAKGVTLLLPEPEWTYPRLSCPGSTFQKALLISPHRFGETKGNSAPLIIREPFIACGPTECKHFALTHYAAQPGGYYNGTREDRNKLRHLISVKLGKIPTVENSIFHMAAWSGSACHDGKEWTYIGVDGPDSNALLKIKYGEAYTDTYHSYAKNILRTQESACNCIGGDCYLMITDGPASGISECRFLKIREGRIIKEIFPTGRVKHTEECTCGFASNKTIECACRDNSYTAKRPFVKLNVETDTAEIRLMCTETYLDTPRPNDGSITGPCESDGDKGSGGIKGGFVHQRMASKIGRWYSRTMSKTKRMGMGLYVKYDGDPWTDSEALALSGVMVSMEEPGWYSFGFEIKDKKCDVPCIGIEMVHDGGKTTWHSAATAIYCLMGSGQLLWDTVTGVDMAL

SEQ ID NO: 29782 - protein, 466 aa, synthetic construct; identical to SEQ ID NO: 29770
  REGION 1..466: note = neuraminidase__InfluenzaB__AGX23626

SEQ ID NO: 29783 - protein, 466 aa, synthetic construct; identical to SEQ ID NO: 29147
  REGION 1..466: note = neuraminidase__InfluenzaB__AGX23637

SEQ ID NO: 29784 - protein, 466 aa, synthetic construct; identical to SEQ ID NO: 28788
  REGION 1..466: note = neuraminidase__InfluenzaB__AGX23659

SEQ ID NO: 29785 - protein, 466 aa, synthetic construct; identical to SEQ ID NO: 29147
  REGION 1..466: note = neuraminidase__InfluenzaB__AGX23670

SEQ ID NO: 29786 - protein, 466 aa, synthetic construct; identical to SEQ ID NO: 29147
  REGION 1..466: note = neuraminidase__InfluenzaB__AGX23681

SEQ ID NO: 29787 - protein, 466 aa, synthetic construct; identical to SEQ ID NO: 29147
  REGION 1..466: note = neuraminidase__InfluenzaB__AGX23692

SEQ ID NO: 29788 - protein, 466 aa, synthetic construct; identical to SEQ ID NO: 29147
  REGION 1..466: note = neuraminidase__InfluenzaB__AGX23703

SEQ ID NO: 29789 - protein, 466 aa, synthetic construct
  REGION 1..466: note = neuraminidase__InfluenzaB__AGX23714
MLPSTIQTLTLFLTSGGVLLSLYVSASLSYLLYSDILLKFSQTEITAPIMPLDCANASNVQAVNRSAAKGVTLLLPEPEWTYPRLSCPGSTFQKALLISPHRFGETKGNSAPLIIREPFIACGPTECKHFALTHYAAQPGGYYNGTREDRNKLRHLISVKLGKIPTVENSIFHMAAWSGSACHDGKEWTYVGVDGPDSNALLKIKYGEAYTDTYHSYEKNILRTQESACNCIGGDCYLMITDGPASGISECRFLKIREGRIIKEIFPTGRVKHTEECTCGFASNKTIECACRDNSYTAKRPFVKLNVETDTAEIRLMCTETYLDTPRPNDGSITGPCGSDGDKGSGGIKGGFVHQRMASKIGRWYSRTMSKTKRMGMGLYVKYDGDPWTDSEALALSGVMVSMDEPGWYSFGFEIKDKKCDVPCIGIEMVHDGGKTTWHSAATAIYCLMGSGQLLWDTVTGVDMAL

SEQ ID NO: 29790 - protein, 466 aa, synthetic construct; identical to SEQ ID NO: 29147
  REGION 1..466: note = neuraminidase__InfluenzaB__AGX23725

SEQ ID NO: 29791 - protein, 466 aa, synthetic construct; identical to SEQ ID NO: 29770
  REGION 1..466: note = neuraminidase__InfluenzaB__AGX23736

SEQ ID NO: 29792 - protein, 466 aa, synthetic construct; identical to SEQ ID NO: 29147
  REGION 1..466: note = neuraminidase__InfluenzaB__AGX23747

SEQ ID NO: 29793 - protein, 466 aa, synthetic construct; identical to SEQ ID NO: 29147
  REGION 1..466: note = neuraminidase__InfluenzaB__AGX23758

SEQ ID NO: 29794 - protein, 466 aa, synthetic construct; identical to SEQ ID NO: 29770
  REGION 1..466: note = neuraminidase__InfluenzaB__AGX23769

SEQ ID NO: 29795 - protein, 466 aa, synthetic construct
  REGION 1..466: note = neuraminidase__InfluenzaB__AGX23780
MLPSTIQTLTLLLTSGGVLLSLYVSASLSYLLYSDILLKFSQTEITAPIMPLDCANASNVQAVNRSAAKGVTLLLPEPEWTYPRLSCPGSTFQKALLISPHRFGETKGNSAPLIIREPFIACGPTECKHFALTHYAAQPGGYYNGTREDRNKLRHLISVKLGKIPTVENSIFHMAAWSGSACHDGKEWTYIGVDGPDSNALLKIKYGEAYTDTYHSYAKNILRTQESACNCIGGDCYLMITDGPASGVSECRFLKIREGRIIKEIFPTGRVKHTEECTCGFASNKTIECACRDNSYTAKRPFVKLNVETDTAEIRLMCTETYLDTPRPNDGSITGPCESDGDKGSGGIKGGFVHQRMASKIGRWYSRTMSKTKRMGMGLYVKYDGDPWTDSEALALSGVMVSMEEPGWYSFGFEIKDKKCDVPCIGIEMVHDGGKTTWHSAATAIYCLMGSGQLLWDTVTGVDMAL

SEQ ID NO: 29796 - protein, 466 aa, synthetic construct
  REGION 1..466: note = neuraminidase__InfluenzaB__AGX23791
MLPSTIQTLTLFLTSGGVLLSLYVSASLSYLLYSDILLKFSQTEITAPIMPLDCANASNAQAVNRSAAKGVTLLLPEPEWTYPRLSCPGSTFQKALLISPHRFGETKGNSAPLIIREPFIACGPTECKHFALTHYAAQPGGYYNGTREDRNKLRHLISVKLGKIPTVENSIFHMAAWSGSACHDGKEWTYIGVDGPDSNALLKIKYGEAYTDTYHSYAKNILRTQESACNCIGGDCYLMITDGPASGVSECRFLKIREGRIIKEIFPTGRVKHTEECTCGFASNKTIECACRDNSYTAKRPFVKLNVETDTAEIRLMCTETYLDTPRPNDGSITGPCESDGDKGSGGIKGGFVHQRMASKIGRWYSRTMSKTKRMGMGLYVKYDGDPWTDSEALALSGVMVSMEEPGWYSFGFEIKDKKCDVPCIGIEMVHDGGKTTWHSAATAIYCLMGSGQLLWDTVTGVDMAL

SEQ ID NO: 29797 - protein, 466 aa, synthetic construct; identical to SEQ ID NO: 29770
  REGION 1..466: note = neuraminidase__InfluenzaB__AGX23802

SEQ ID NO: 29798 - protein, 466 aa, synthetic construct; identical to SEQ ID NO: 29770
  REGION 1..466: note = neuraminidase__InfluenzaB__AGX23813

SEQ ID NO: 29799 - protein, 466 aa, synthetic construct; identical to SEQ ID NO: 29770
  REGION 1..466: note = neuraminidase__InfluenzaB__AGX23824

SEQ ID NO: 29800 - protein, 466 aa, synthetic construct; identical to SEQ ID NO: 29770
  REGION 1..466: note = neuraminidase__InfluenzaB__AGX23846

SEQ ID NO: 29801 - protein, 466 aa, synthetic construct; identical to SEQ ID NO: 28788
  REGION 1..466: note = neuraminidase__InfluenzaB__AGX23857

SEQ ID NO: 29802 - protein, 466 aa, synthetic construct; identical to SEQ ID NO: 29770
  REGION 1..466: note = neuraminidase__InfluenzaB__AGX23868

SEQ ID NO: 29803 - protein, 466 aa, synthetic construct
  REGION 1..466: note = neuraminidase__InfluenzaB__AGX23879
MLPSTIQTLTLFLTSGGVLLSLYVSASLSYLLYSDILLKFSQTEITAPIMPLDCANASNVQAVNRSAAKGVTLLLPEPEWTYPRLSCPGSTFQKALLISPHRFGETKGNSAPLIIREPFIACGPTECKHFALTHYAAQPGGYYNGTREDRNKLRHLISVKLGKIPTVETSIFHMAAWSGSACHDGKEWTYIGVDGPDSNALLKIKYGEAYTDTYHSYAKNILRTQESACNCIGGDCYLMITDGPASGVSECRFLKIREGRIIKEIFPTGRVKHTEECTCGFASNKTIECACRDNSYTAKRPFVKLNVETDTAEIRLMCTETYLDTPRPNDGSITGPCESDGDKGSGGIKGGFVHQRMASKIGRWYSRTMSKTKRMGMGLYVKYDGDPWTDSEALALSGVMVSMEEPGWYSFGFEIKDKKCDVPCIGIEMVHDGGKTTWHSAATAIYCLMGSGQLLWDTVTGVDMAL

SEQ ID NO: 29804 - protein, 466 aa, synthetic construct; identical to SEQ ID NO: 29770
  REGION 1..466: note = neuraminidase__InfluenzaB__AGX23890

SEQ ID NO: 29805 - protein, 466 aa, synthetic construct; identical to SEQ ID NO: 28788
  REGION 1..466: note = neuraminidase__InfluenzaB__AGX23901

SEQ ID NO: 29806 - protein, 466 aa, synthetic construct
  REGION 1..466: note = neuraminidase__InfluenzaB__AGX23912
MLPSTIQTLTLFLTSGGVLLSLYVSASLSYLLYSDILLKFSQTEITAPIMPLDCANASNVQAVNRSAAKGVTLLLPEPEWTYPRLSCPGSTFQKALLISPHRFGETKGNSAPLIIREPFIACGPTECKHFALTHYAAQPGGYYNGTREDRNRLRHLISVKLGKIPTVENSIFHMAAWSGSACHDGKEWTYVGVDGPDSNALLKIKYGEAYTDTYHSYAKNILRTQESACNCIGGDCYLMITDGPASGISECRFLKIREGRIIKEIFPTGRVKHTEECTCGFASNKTIECACRDNSYTAKRPFVKLNVETDTAEIRLMCTETYLDTPRPNDGSITGPCGSDGDKGSGGIKGGFVHQRMASKIGRWYSRTMSKTKRMGMGLYVKYDGDPWTDSEALALSGVMVSMDEPGWYSFGFEIKDKKCDVPCIGIEMVHDGGKTTWHSAATAIYCLMGSGQLLWDTVTGVDMAL

SEQ ID NO: 29807 - protein, 466 aa, synthetic construct; identical to SEQ ID NO: 28960
  REGION 1..466: note = neuraminidase__InfluenzaB__AGX23934

SEQ ID NO: 29808 - protein, 466 aa, synthetic construct
  REGION 1..466: note = neuraminidase__InfluenzaB__AGX23945
MLPSTIQTLTLFLTSGGVLLSLYVSASLSYLLYSDILLKFSQTEITAPIMPLDCANASNVQAVNRSAAKGVTLLLPEPEWTYPRLSCPGSTFQKALLISPHRFGETKGNSAPLIIREPFIACGPTECKHFALTHYAAQPGGYYNGTREDRNKLRHLISVKLGKIPTVENSIFHMAAWSGSACHDGKEWTYVGVDGPDSNALLKIKYGEAYTDTYHSYAKNILRTQESACNCIGGDCYLMITDGPASGISECRFLKIREGRIIKEIFPTGRIKHTEECTCGFASNKTIECACRDNSYTAKRPFVKLNVETDTAEIRLMCTETYLDTPRPNDGSITGPCGSDGDKGSGGIKGGFVHQRMASKIGRWYSRTMSKTKRMGMGLYVKYDGDPWTDSEALALSGVMVSMDEPGWYSFGFEIKDKKCDVPCIGIEMVHDGGKTTWHSAATAIYCLMGSGQLLWDTVTGVDMAL

SEQ ID NO: 29809 - protein, 466 aa, synthetic construct
  REGION 1..466: note = neuraminidase__InfluenzaB__AGX23956
MLPSTIQTLTLFLTSGGVLLSLYVSASLSYLLYSDILLKFSQTEITAPIMPLDCANASNVQAVNRSAAKGVTLLLPEPEWTYPRLSCPGSTFQKALLISPHRFGETKGNSAPLIIREPFIACGPTECKHFALTHYAAQPGGYYNGTREDRNKLRHLISVKLGKIPTVENSIFHMAAWSGSACHDGKEWTYIGIDGPDSNALLKIKYGEAYTDTYHSYAKNILRTQESACNCIGGDCYLMITDGPASGVSECRFLKIREGRIIKEIFPTGRVKHTEECTCGFASNKTIECACRDNSYTAKRPFVKLNVETDTAEIRLMCTETYLDTPRPNDGSITGPCESDGDKGSGGIKGGFVHQRMASKIGRWYSRTMSKTKRMGMGLYVKYDGDPWTDSEALALSGVMVSMEEPGWYSFGFEIKDKKCDVPCIGIEMVHDGGKTTWHSAATAIYCLMGSGQLLWDTVTGVDMAL

SEQ ID NO: 29810 - protein, 466 aa, synthetic construct; identical to SEQ ID NO: 29147
  REGION 1..466: note = neuraminidase__InfluenzaB__AGX23967

SEQ ID NO: 29811 - protein, 466 aa, synthetic construct; identical to SEQ ID NO: 28960
  REGION 1..466: note = neuraminidase__InfluenzaB__AGX23978

SEQ ID NO: 29812 - protein, 466 aa, synthetic construct
  REGION 1..466: note = neuraminidase__InfluenzaB__AGX23989
MLPSTIQTLTLFLTSGGVLLSLYVSASLSYLLYSDILLKFSQTEITAPIMPLDCANASNVQAVNRSAAKGVTLLLPEPEWTYPRLSCPGSTFQKALLISPHRFGETKGNSAPLIIREPFIACGPTECKHFALTHYAAQPGGYYNGTREDRNKLRHLISVKLGKIPTVENSIFHMAAWSGSACHDGKEWTYIGVDGPDSNALLKIKYGEAYTDTYHSYAKNILRTQESACNCIGGDCYLMITDGPASGISECRFLKIREGRIIKEIFPTGRVKHTEECTCGFASNKTIECACRDNRYTAKRPFVKLNVETDKAEIRLMCTETYLDTPRPNDGSITGPCESDGDKGSGGIKGGFVHQRMASKIGRWYSRTMSKTKRMGMGLYVKYDGDPWTDSGALALSGVMVSIEEPGWYSFGFEIKDKKCDVPCIGIEMVHDGGKTTWHSAATAIYCLMGSGQLLWDTVTGVDMAL

SEQ ID NO: 29813 - protein, 466 aa, synthetic construct; identical to SEQ ID NO: 29770
  REGION 1..466: note = neuraminidase__InfluenzaB__AGX24000

SEQ ID NO: 29814 - protein, 466 aa, synthetic construct
  REGION 1..466: note = neuraminidase__InfluenzaB__AGX24011
MLPSTIQTLTLFLTSGGVLLSLYVSASLSYLLYSDILLKFSQTEITAPIMPLDYANASNVQAVNHSAAKGVTLLLPEPEWTYPRLSCPGSTFQKALLISPHRFGETKGNSAPLIIREPFIACGPTECKHFALTHYAAQPGGYYNGTREDRNKLRHLISVKLGKIPTVENSIFHMAAWSGSACHDGKEWTYIGVDGPDSNALLKIKYGEAYIDTYHSYAKNILRTQESACNCIGGDCYLMITDGPASGISECRFLKIREGRIIKEIFPTGRVKHTEECTCGFASNKTIECACRDNSYTAKRPFVKLNVETDTAEIRLMCTETYLDTPRPNDGSITGPCESDGDKGSGGIKGGFVHQRMASKIGRWYSRTMSKTKRMGMGLYVKYDGDPWTDSEALALSGVMVSMEEPGWYSFGFEIKDKKCDVPCIGIEMVHDGGKTTWHSAATAIYCLMGSGQLLWDTVTGVDMAL

SEQ ID NO: 29815 - protein, 466 aa, synthetic construct; identical to SEQ ID NO: 28960
  REGION 1..466: note = neuraminidase__InfluenzaB__AGX24022

SEQ ID NO: 29816 - protein, 466 aa, synthetic construct
  REGION 1..466: note = neuraminidase__InfluenzaB__AGX24033
MLPSTIQTLTLFLTSGGVLLSLYVSASLSYLLYSDILLKFSQTEITAQIMPLDCANASNVQAVNRSAAKGVTLLLPEPEWTYPRLSCPGSTFQKALLISPHRFGETKGNSAPLIIREPFIACGPTECKHFALTHYAAQPGGYYNGTREDRNKLRHLISVKLGKIPTVENSIFHMAAWSGSACHDGKEWTYIGVDGPDSNALLKIKYGEAYTDTYHSYAKNILRTQESACNCIGGDCYLMITDGPASGISECRFLKIREGRIIKEIFPTGRVKHTEECTCGFASNKTIECACRDNRYTAKRPFVKLNVETDKAEIRLMCTETYLDTPRPNDGSITGPCESDGDKGSGGIKGGFVHQRMASKIGRWYSRTMSKTKRMGMGLYVKYDGDPWTDSGALALSGVMVSIEEPGWYSFGFEIKDKKCDVPCIGIEMVHDGGKTTWHSAATAIYCLMGSGQLLWDTVTGVDMAL

SEQ ID NO: 29817 - protein, 466 aa, synthetic construct; identical to SEQ ID NO: 28960
  REGION 1..466: note = neuraminidase__InfluenzaB__AGX24044

SEQ ID NO: 29818 - protein, 466 aa, synthetic construct
  REGION 1..466: note = neuraminidase__InfluenzaB__AGX24055
MLPSTIQTLTLFLTSGGVLLSLYVSASLSYLLYSDILLKFSQTEITAPIMPLDCANASNVQAVNRSATKGVTLLLPELEWTYPRLSCPGSTFQKALLISPHRFGETKGNSAPLIIREPFVACGPTECKHFALTHYAAQPGGYYNGTREDRNKLRHLISVKLGKIPTVENSIFHMAAWSGSACHDGKEWTYIGVDGPNSNALLKIKYGEAYTDTYHSYAKNILRTQESACNCIGGDCYLMITDGPASGVSECRFLKIREGRIIKEIFPTGRVKHTEECTCGFASNKTIECACRDNSYTAKRPFVKLNVETDTAEIRLMCTETYLDTPRPNDGSITGPCESDGDKGSGGIKGGFVHQRMASKIGRWYSRTMSKTKRMGMGLYVKYDGDPWTDSEALALSGVMVSMEEPGWYSFGFEIKDKKCDVPCIGIEMVHDGGKTTWHSAATAIYCLMGSGQLLWDTVTGVDMAL

SEQ ID NO: 29819 - protein, 466 aa, synthetic construct; identical to SEQ ID NO: 28817
  REGION 1..466: note = neuraminidase__InfluenzaB__AGX24066

SEQ ID NO: 29820 - protein, 466 aa, synthetic construct
  REGION 1..466: note = neuraminidase__InfluenzaB__AGX24077
MLPSTIQTLTLFLTSGGVLLSLYVSASLSYLLYSDILLKFSQTEITAPIMPLDCANASNVQAVNRSAAKGVTLLLPEPEWTYPRLSCPGSTFQKALLISPHRFGETKGNSAPLIIREPFIACGPTECKHFALTHYAAQPGGYYNGTREDRNKLRHLISVKLGKIPTVENSIFHMAAWSGSACHDGKEWTYIGVDGPDSNALLKIKYGEAYTDTYHSYAKNILRTQESACNCIGGNCYLMITDGPASGISECRFLKIREGRIIKEIFPTGRVKHTEECTCGFASNKTIECACRDNRYTAKRPFVKLNVETDKAEIRLMCTETYLDTPRPNDGSITGPCESDGDKGSGGIKGGFVHQRMASKIGRWYSRTMSKTKRMGMGLYVKYDGDPWADSGALALSGVMVSIEEPGWYSFGFEIKDKKCDVPCIGIEMVHDGGKTTWHSAATAIYCLMGSGQLLWDTVTGVDMAL

SEQ ID NO: 29821 - protein, 466 aa, synthetic construct
  REGION 1..466: note = neuraminidase__InfluenzaB__AGX24088
MLPSTIQTLTLFITSGGVLLSLYVSASLSYLLYSDILLKFSQTEITAPIMPLDCANASNVQAVNRSAAKGVTLLLPEPEWTYPRLSCPGSTFQKALLISPHRFGETKGNSAPLIIREPFIACGPTECKHFALTHYAAQPGGYYNGTREDRNKLRHLISVKLGKIPTVENSIFHMAAWSGSACHDGKEWTYVGVDGPDSDALLKIKYGEAYTDTYHSYAKNILRTQESACNCIGGDCYLMITDGPASGISECRFLKIREGRIIKEIFPTGRVKHTEECTCGFASNKTIECACRDNSYTAKRPFVKLNVETDTAEIRLMCTETYLDTPRPNDGSITGPCGSDGDKGSGGIKGGFVHQRMASKIGRWYSRTMSKTKRMGMGLYVKYDGDPWTDSEALALSGVMVSMDEPGWYSFGFEIKDKKCDVPCIGIEMVHDGGKTTWHSAATAIYCLMGSGQLLWDTVTGVDMAL

SEQ ID NO: 29822 - protein, 466 aa, synthetic construct; identical to SEQ ID NO: 28960
  REGION 1..466: note = neuraminidase__InfluenzaB__AGX24099

SEQ ID NO: 29823 - protein, 466 aa, synthetic construct
  REGION 1..466: note = neuraminidase__InfluenzaB__AGX24110
MLPSTIQTLTLFLTSGGVLLSLYVSASLSYLLYSDILLKFSQTEITAPIMPLDCANASNVQAVNRSAAKGVTLLLPEPEWTYPRLSCPGSTFQKALLISPHRFGETKGNSAPLIIREPFIACGPTECKHFALTHYAAQPGGYYNGTREDRNKLRHLISVKLGKIPTVENSIFHMAAWSGSACHDGKEWTYVGVDGPDSNALLKIKYGEAYTDTYHSYAKNILRTQESACNCIGGDCYLMITDGPASGISECRFLKIREGRIIKEIFPTGRVKHTEECTCGFASNKTIECTCRDNSYTAKRPFVKLNVETDTAEIRLMCTETYLDTPRPNDGSITGPCGSDGDKGSGGIKGGFVHQRMASKIGRWYSRTMSKTKRMGMGLYVKYDGDPWTDSEALALSGVMVSMDEPGWYSFGFEIKDKKCDVPCIGIEMVHDGGKTTWHSAATAIYCLMGSGQLLWDTVTGVDMAL

SEQ ID NO: 29824 - protein, 466 aa, synthetic construct
  REGION 1..466: note = neuraminidase__InfluenzaB__AGX24121
MLPSTIQTLTLFLTSGGVLLSLYVSASLSYLLYSDILLKFSQTEITAPIMPLDYANASNVQAVNHSAAKGVTLLLPEPEWTYPRLSCPGSTFQKALLISPHRFGETKGNSAPLIIREPFIACGPTECKHFALTHYAAKPGGYYNGTREDRNKLRHLISVKLGKIPTVENSIFHMAAWSGSACHDGKEWTYIGVDGPDSNALLKIKYGEAYTDTYHSYAKNILRTQESACNCIGGDCYLMITDGPASGISECRFLKIREGRIIKEIFPTGRVKHTEECTCGFASNKTIECACRDNSYTAKRPFVKLNVETDTAEIRLMCTETYLDTPRPNDGSITGPCESDGDKGSGGIKGGFVHQRMASKIGRWYSRTMSKTKRMGMGLYVKYDGDPWTDSEALALSGVMVSMEEPGWYSFGFEIKDKKCDVPCIGIEMVHDGGKTTWHSAATAIYCLMGSGQLLWDTVTGVDMAL

SEQ ID NO: 29825 - protein, 466 aa, synthetic construct
  REGION 1..466: note = neuraminidase__InfluenzaB__AGX24132
MLPSTIQTLTLFLTSGGVLLSLYVSASLSYLLYSDILLKFSRTEITAPIMPLDCANASNVQAVNRSATKGVTLPLPEPEWTYPRLSCPGSTFQKALLISPHRFGETKGNSAPLIIREPFIACGPKECKHFALTHYAAQPGGYYNGTREDRNKLRHLISVKLGKIPTVENSIFHMAAWSGSACHDGREWTYIGVDGPDSNALLKIKYGEAYTDTYHSYAKNILRTQESACNCIGGDCYLMITDGPALGISECRFLKIREGRIIKEIFPTGRVKHTEECTCGFASNKTIECACRDNSYTAKRPFVKLNVETDTAEIRLMCTETYLDTPRPNDGSITGPCESNGDKGSGGIKGGFVHQRMASKIGRWYSRTMSKTKRMGMGLYVKYDGDPWTDSEALALSGVMVSMEEPGWYSFGFEIKDKKCDVPCIGIEMVHDGGKTTWHSAATAIYCLMGSGQLLWDTVTGVNMTL

SEQ ID NO: 29826 - protein, 466 aa, synthetic construct
  REGION 1..466: note = neuraminidase__InfluenzaB__AGX24143
MLPSTIQTLTLFLTSGGVLLSLYVSASLSYLLYSDILLKFSQTEITAPIMPLDCANASNVQAVNRSAAKGVTLLLPEPEWTYPRLSCPGSTFQKALLISPHRFGETKGNSAPLIIREPFIACGPTECKHFALTHYAAQPGGYYNGTREDRNKLRHLISVKLGKIPTVENSIFHMAAWSGSACHDGKEWTYIGVDGPDGNALLKIKYGEAYTDTYHSYAKNILRTQESACNCIGGDCYLMITDGPASGISECRFLKIREGRIIKEIFPTGRVKHTEECTCGFASNKTIECACRDNSYTAKRPFVKLNVETDTAEIRLMCTETYLDTPRPNDGSITGPCESDGDKGSGGIKGGFVHQRMASKIGRWYSRTMSKTKRMGMGLYVKYDGDPWTDSEALALSGVMVSMEEPGWYSFGFEIKDKKCDVPCIGIEMVHDGGKTTWHSAATAIYCLMGSGQLLWDTVTGVDMAL

SEQ ID NO: 29827 - protein, 466 aa, synthetic construct; identical to SEQ ID NO: 28960
  REGION 1..466: note = neuraminidase__InfluenzaB__AGX24154

SEQ ID NO: 29828 - protein, 466 aa, synthetic construct
  REGION 1..466: note = neuraminidase__InfluenzaB__AGX24165
MLPSTIQTLTLFLTSGGVLLSLYVSASLSYLLYSDILLKFSQTEITAPIMPLDYANASNVQAVNHSAAKGVTLLLPEPEWTYPRLSCPGSTFQKALLISPHRFGETKGNSAPLIIREPFIACGPTECKHFALTHYAAQPGGYYNGTREDRNKLRHLISVKLGKIPTVENSIFHMAAWSGSACHDGKEWTYIGVDGPDSNALLKIKYGEAYTDTYHSYAKNILRTQESACNCIGGDCYLMITDGPASGISECRFLKIREGRIIKEIFPTGRVKHTEECTCGFASNKTIECACRDNSYTAKRPFVKLNVETDTAEIRLMCTETYLDTPRPNDGSITGPCESDGDKGSGGIKGGFVHQRMASKIGRWYSRTMSKTKRMGMGLYVKYDGDPWTDSEALALNGVMVSMEEPGWYSFGFEIKDKKCDVPCIGIEMVHDGGKTTWHSAATAIYCLMGSGQLLWDTVTGVDMAL

SEQ ID NO: 29829 - protein, 466 aa, synthetic construct; identical to SEQ ID NO: 28817
  REGION 1..466: note = neuraminidase__InfluenzaB__AGX24176

SEQ ID NO: 29830 - protein, 466 aa, synthetic construct; identical to SEQ ID NO: 28817
  REGION 1..466: note = neuraminidase__InfluenzaB__AGX24187

SEQ ID NO: 29831 - protein, 466 aa, synthetic construct; identical to SEQ ID NO: 28817
  REGION 1..466: note = neuraminidase__InfluenzaB__AGX24198

SEQ ID NO: 29832 - protein, 466 aa, synthetic construct; identical to SEQ ID NO: 29147
  REGION 1..466: note = neuraminidase__InfluenzaB__AGX24231

SEQ ID NO: 29833 - protein, 466 aa, synthetic construct; identical to SEQ ID NO: 28817
  REGION 1..466: note = neuraminidase__InfluenzaB__AGX24242

SEQ ID NO: 29834 - protein, 466 aa, synthetic construct
  REGION 1..466: note = neuraminidase__InfluenzaB__AGX24275
MLPSTIQTLTLFLTSGGVLLSLYVSASLSYLLYSDILLKFSQTEITAPIMPLDCANASNVQAVNRSAAKGVTLLLPEPEWTYPRLSCPGSTFQKALLISPHRFGETKGNSAPLIIREPFIACGPTECKHFALTHYAAQPGGYYNGTREDRNKLRHLISVKLGKIPTVENSIFHMAAWSGSACHDGKEWTYIGVDGPDSNALLKIKYGEAYTDTYHSYAKNILRTQESACNCIGGDCYLMITDGPASGISECRFLKIREGRIIKEIFPTGRVKHTEECTCGFASNRTIECACRDNSYTAKRPFVKLNVETDTAEIRLMCTETYLDTPRPNDGSITGPCESDGDKGSGGIKGGFVHQRMASKIGRWYSRTMSKTRRMGMGLYVKYDGDPWTDSEALALSGVMVSMEEPGWYSFGFEIKDKKCDVPCIGIEMVHDGGKTTWHSAATAIYCLMGSGQLLWDTVTGVDMAL

SEQ ID NO: 29835 - protein, 466 aa, synthetic construct; identical to SEQ ID NO: 29412
  REGION 1..466: note = neuraminidase__InfluenzaB__AGX24286

SEQ ID NO: 29836 - protein, 466 aa, synthetic construct
  REGION 1..466: note = neuraminidase__InfluenzaB__AGX24297
MLPSTIQTLTLFLTSGGVLLSLYVSASLSYLLYSDILLKFSQTEITAPIMPLDCANASNVQAVNRSAAKGVTLLLPEPEWTYPRLSCPGSTFQKALLISPHRFGETRGNSAPLIIREPFIACGPTECKHFALTHYAAQPGGYYNGTREDRNKLRHLISVKLGKIPTVENSIFHMAAWSGSACHDGKEWTYIGVDGPDSNALLKIKYGEAYTDTYHSYAKNILRTQESACNCIGGDCYLMITDGPASGISECRFLKIREGRIIKEIFPTGRVKHTEECTCGFASNKTIECACRDNSYTAKRPFVKLNVETDTAEIRLMCTETYLDTPRPNDGSITGPCESDGDKGSGGIKGGFVHQRMASKIGRWYSRTMSKTKRMGMGLYVKYDGDPWTDSEALALSGVMVSMEEPGWYSFGFEIKDKKCDVPCIGIEMVHDGGKTTWHSAATAIYCLMGSGQLLWDTVTGVDMAL

SEQ ID NO: 29837 - protein, 466 aa, synthetic construct; identical to SEQ ID NO: 29412
  REGION 1..466: note = neuraminidase__InfluenzaB__AGX24319

SEQ ID NO: 29838 - protein, 466 aa, synthetic construct
  REGION 1..466: note = neuraminidase__InfluenzaB__AGX24330
MLPSTIQTLTLFLTSGGVLLSLYVSASLSYLLYSDILLKFSQTEITAPIMPLDYANASNVQAVNHSAAKGVTLLLPEPEWTYPRLSCPGSTFQKALLISPHRFGETKGNSAPLIIREPFIACGPTECKHFALTHYAAQPGGYYNGTREDRNKLRHLISVKLGKIPTVENSIFHMAAWSGSACHDGKEWTYIGVDGPDSNALLKIKYGEAYTDTYHSYAKNILRTQESACNCIGGDCYLMITDGPASGISECRFLKIREGRIIKEIFPTGRVKHTEECTCGFASNKTIECTCRDNSYTAKRPFVKLNVETDTAEIRLMCTETYLDTPRPNDGSITGPCESDGDKGSGGIKGGFVHQRMASKIGRWYSRTMSKTKRMGMGLYVKYDGDPWTDSEALALSGVMISMEEPGWYSFGFEIKDKKCDVPCIGIEMVHDGGKTTWYSAATAIYCLMGSGQLLWDTVTGVDMAL

SEQ ID NO: 29839 - protein, 466 aa, synthetic construct
  REGION 1..466: note = neuraminidase__InfluenzaB__AGX24341
MLPSTIQTLTLFLTSGGVLLSLYVSASLSYLLYSDILLKFSRTEITAPIMPLDCANASNVQAVNRSATKGVTLLLPEPEWTYPRLSCPGSTFQKALLISPHRFGETKGNSAPLIIREPFIACGPKECKHFALTHYAAQPGGYYNGTREDRNKLRHLISVKLGKIPTVENSIFHMAAWSGSACHDGREWTYIGVDGPDSNALLKIKYGEAYTDTYHSYAKNILRTQESACNCIGGDCYLMITDGPASGISECRFLKIREGRIIKEIFPTGRVKHTEECTCGFASNKTIECACRDNSYTAKRPFVKLNVETDTAEIRLMCTETYLDTPRPNDGSITGPCESNGDKGSGGIKGGFVHQRMASKIGRWYSRTMSKTKRMGMGLYVKYDGDPWTDSEALTLSGVMVSMEEPGWYSFGFEIKDKKCDVPCIGIEMVHDGGKTTWHSAATAIYCLMGSGQLLWDTVTGVNMTL

SEQ ID NO: 29840 - protein, 466 aa, synthetic construct
  REGION 1..466: note = neuraminidase__InfluenzaB__AGX24352
MLPSTIQTLTLFLTSGGVLLSLYVSASLSYLLYSDILLKFSRTEITAPIMPLDCANASNVQAVNRSATKGVTLLLPEPEWTYPRLSCPGSTFQKALLISPHRFGETKGNSAPLIIREPFIACGPKECKHFALTHYAAQPGGYYNGTREDRNKLRHLISVKLGKIPTVENSIFHMAAWSGSACHDGREWTYIGVDGPDNNALLKIKYGEAYTDTYHSYAKNILRTQESACNCIGGDCYLMITDGPASGISECRFLKIREGRIIKEIFPTGRVKHTEECTCGFASNKTIECACRDNSYTAKRPFVKLNVETDTAEIRLMCTETYLDTPRPNDGSITGPCESNGDKGSGGIKGGFVHQRMASKIGRWYSRTMSKTKRMGMGLYVKYDGDPWTDSEALALSGVMVSMEEPGWYSFGFEIKDKKCDVPCIGIEMVHDGGKTTWHSAATAIYCLMGSGQLLWDTVTGVNMTL

SEQ ID NO: 29841 - protein, 466 aa, synthetic construct; identical to SEQ ID NO: 29836
  REGION 1..466: note = neuraminidase__InfluenzaB__AGX24363

SEQ ID NO: 29842 - protein, 466 aa, synthetic construct; identical to SEQ ID NO: 29840
  REGION 1..466: note = neuraminidase__InfluenzaB__AGX24374

SEQ ID NO: 29843 - protein, 466 aa, synthetic construct
  REGION 1..466: note = neuraminidase__InfluenzaB__AGX24385
MLPSTIQTLTLFLTSGGVLLSLYVSASLSYLLYSDILLKFSRTEITAPTMPLDCANASNVQAVNRSATKGVTLLLPEPEWTYPRLSCPGSTFQKALLISPHRFGETKGNSAPLIIREPFIACGPKECKHFALTHYAAQPGGYYNGTREDRNKLRHLISVKLGKIPTVENSIFHMAAWSGSACHDGREWTYIGVDGPDSNALLKIKYGEAYTDTYHSYAKNILRTQESACNCIGGDCYLMITDGPASGISECRFLKIREGRIIKEIFPTGRVKHTEECTCGFASNKTIECACRDNSYTAKRPFVKLNVETDTAEIRLMCTETYLDTPRPNDGSITGPCESNGDKGSGGIKGGFVHQRMASKIGRWYSRTMSKTKRMGMGLYVKYDGDPWTDSEALALSGVMVSMEEPGWYSFGFEIKDKKCDVPCIGIEMVHDGGKTTWHSAATAIYCLMGSGQLLWDTVTGVNMTL

SEQ ID NO: 29844 - protein, 466 aa, synthetic construct
  REGION 1..466: note = neuraminidase__InfluenzaB__AGX24396
MLPSTIQTLTLFLTSGGVLLSLYVSASLSYLLYSDILLKFSQTEITAPIMPLDCANASNVQAVNRSAAKGVTLLLPEPEWTYPRLSCPGSTFQKALLISPHRFGETKGNSAPLIIREPFIACGPTECKHFALTHYAAQPGGYYNGTREDRNKLRHLISVKLGKIPTVENSIFHMAAWSGSACHDGKEWTYIGVDGPDSNALLKIKYGEAYTDTYHSYAKNILRTQESACNCIGGDCYLMITDGPASGISECRFLKIREGRIIKEIFPTGRVKHTEECTCGFASNKTIECACRDNRYTAKRPFVKLNVETDTAEIRLMCTETYLDTPRPNDGSITGPCESDGDKGSGGIKGGFVHQRMASKIGRWYSRTMSKTKRMGMGLYVKYDGDPWTDSGALALSGVMVSIEEPGWYSFGFEIKDKKCDVPCIGIEMVHDGGKTTWHSAATAIYCLMGSGQLLWDTVTGVDMAL

SEQ ID NO: 29845 - protein, 466 aa, synthetic construct; identical to SEQ ID NO: 29844
  REGION 1..466: note = neuraminidase__InfluenzaB__AGX24407

SEQ ID NO: 29846 - protein, 466 aa, synthetic construct; identical to SEQ ID NO: 28817
  REGION 1..466: note = neuraminidase__InfluenzaB__AGX24418

SEQ ID NO: 29847 - protein, 466 aa, synthetic construct; identical to SEQ ID NO: 28788
  REGION 1..466: note = neuraminidase__InfluenzaB__AGX24429

SEQ ID NO: 29848 - protein, 466 aa, synthetic construct
  REGION 1..466: note = neuraminidase__InfluenzaB__AGX24440
MLPSTIQTLTLFLTSGGVLLSLYVSASLSYLLYSDILLKFSQTEITAPIMPLDCANASNVQAVNRSAAKGVTLLLPEPEWTYPRLSCPGSTFQKALLISPHRFGETKGNSAPLIIREPFIACGTTECKHFALTHYAAQPGGYYNGTREDRNKLRHLISVKLGKIPTVENSIFHMAAWSGSACHDGKEWTYIGVDGPDSNALLKIKYGEAYTDTYHSYAKNILRTQESACNCIGGDCYLMITDGPASGISECRFLKIREGRIIKEIFPTGRVKHTEECTCGFASNKTIECACRDNRYTAKRPFVKLNVETDTAEIRLMCTETYLDTPRPNDGSITGPCESDGDKGSGGIKGGFVHQRMASKIGRWYSRTMSKTKRMGMGLYVKYDGDPWTDSGALALSGVMVSIEEPGWYSFGFEIKDKKCDVPCIGIEMVHDGGKTTWHSAATTIYCLMGSGQLLWDTVTGVDMAL

SEQ ID NO: 29849 - protein, 466 aa, synthetic construct; identical to SEQ ID NO: 29412
  REGION 1..466: note = neuraminidase__InfluenzaB__AGX24451

SEQ ID NO: 29850 - protein, 466 aa, synthetic construct
  REGION 1..466: note = neuraminidase__InfluenzaB__AGX24462
MLPSTIQTLTLFLTSGGVLLSLYVSASLSYLLYSDILLKFSQTEITAPIMPLDYANASNVQAVNHSAAKGVTLLLPEPEWTYPRLSCPGSTFQKALLISPHRFGETKGNSAPLIIREPFIACGPTECKHFALTHYAAQPGGYYNGTREDRNKLRHLISVKLGKIPTVENSIFHMAAWSGSACHDGKEWTYIGVDGPDSNALLKIKYGEAYTDTYHSYAKNILRTQESACNCIGGDCYLMITDGPASGISECRFLKIREGRIIKEIFPTGRVKHTEECTCGFASNKTIECACRDNSYTAKRPFVKLNVETDTAEIRLMCTETYLDTPRPNDGSITGPCESDGDKGSGGIKGGFVHQRMASKIGRWYSRTMSKTKRMGMGLYVKYDGDPWTDSEALALSGVMISMEEPGWYSFGFEIKDKKCDVPCIGIEMVHDGGKTTWHSAATAIYCLMGSGQLLWDTVTGVDMAL

SEQ ID NO: 29851 - protein, 466 aa, synthetic construct; identical to SEQ ID NO: 29850
  REGION 1..466: note = neuraminidase__InfluenzaB__AGX24473

SEQ ID NO: 29852 - protein, 466 aa, synthetic construct
  REGION 1..466: note = neuraminidase__InfluenzaB__AGX24484
MLPSTIQTLTLFLTSGGVLLSLYVSASLSYLLYSDILLKFSQTEITAPIMPLDCANASNVQAVNRSAAKGVTLLLPEPEWTYPRLSCPGSTFQKALLISPHRFGETKGNSAPLIIREPFIACGPTECKHFALTHYAAQPGGYYNGTREDRNKLRHLISVKLGKIPTVENSIFHMAAWSGSACHDGKEWTYIGVDGPDSNALLKIKYGEAYTDTYHSYAKNILRTQESACNCIGGDCYLMITDGPASGISECRFLKIREGRIIKEIFPTGRVKHTEECTCGFASNKTIECACRDNGYTAKRPFVKLNVETDTAEIRLMCTETYLDTPRPNDGSITGPCESDGDKGSGGIKGGFVHQRMASKIGRWYSRTMSKTRRMGMGLYVKYDGDPWTDSEALALSGVMVSMEEPGWYSFGFEIKDKKCDVPCIGIEMVHDGGKTTWHSAATAIYCLMGSGQLLWDTVTGVDMAL

SEQ ID NO: 29853 - protein, 466 aa, synthetic construct
  REGION 1..466: note = neuraminidase__InfluenzaB__AGX24495
MLPSTIQTLTLFLTSGGVLLSLYVSASLSYLLYSDILLKFSQTEITAPIMPLDCANASNVQVVNRSAAKGVTLLLPEPEWTYPRLSCPGSTFQKALLISPHRFGETKGNSAPLIIREPFIACGPTECKHFALTHYAAQPGGYYNGTREDRNKLRHLISVKLGKIPTVENSIFHMAAWSGSACHDGKEWTYIGVDGPDSNALLKIKYGEAYTDTYHSYAKNILRTQESACNCIGGDCYLMITDGPASGISECRFLKIREGRIIKEIFPTGRVKHTEECTCGFASNKTIECACRDNSYTAKRPFVKLNVETDTAEIRLMCTETYLDTPRPNDGSITGPCESDGDKGSGGIKGGFVHQRMASKIGRWYSRTMSKTRRMGMGLYVKYDGDPWTDSEALALSGVMVSMEEPGWYSFGFEIKDKKCDVPCIGIEMVHDGGKTTWHSAATAIYCLMGSGQLLWDTVTGVDMAL

SEQ ID NO: 29854 - protein, 466 aa, synthetic construct; identical to SEQ ID NO: 29412
  REGION 1..466: note = neuraminidase__InfluenzaB__AGX24506

SEQ ID NO: 29855 - protein, 466 aa, synthetic construct
  REGION 1..466: note = neuraminidase__InfluenzaB__AGX24517
MLPSTIQTLTLFLTSGGVLLSLYVSASLSYLLYSDILLKFSQTEITAPIMPLDCANASNVQAVNHSAAKGVTLLLPEPEWTYPRLSCPGSTFQKALLISPHRFGETKGNSAPLIIREPFIACGPTECKHFALTHYAAQPGGYYNGTREDRNKLRHLISVKLGKIPTVENSIFHMAAWSGSACHDGKEWTYIGVDGPDSNALLKIKYGEAYTDTYHSYAKNILRTQESACNCIGGDCYLMITDGPASGVSECRFLKIREGRIIKEIFPTGRVKHTEECTCGFASNKTIECACRDNSYTAKRPFVKLNVETDTAEIRLMCTETYLDTPRPNDGSITGPCESDGDKGSGGIKGGFVHQRMASKIGRWYSRTMSKTKRMGMGLYVKYDGDPWTDSEALALSGVMVSMEEPGWYSFGFEIKDKKCDVPCIGIEMVHDGGKTTWHSAATAIYCLMGSGQLLWDTVTGVDMAL

SEQ ID NO: 29856 - protein, 466 aa, synthetic construct; identical to SEQ ID NO: 29412
  REGION 1..466: note = neuraminidase__InfluenzaB__AGX24528

SEQ ID NO: 29857 - protein, 466 aa, synthetic construct; identical to SEQ ID NO: 29840
  REGION 1..466: note = neuraminidase__InfluenzaB__AGX24539

SEQ ID NO: 29858 - protein, 466 aa, synthetic construct
  REGION 1..466: note = neuraminidase__InfluenzaB__AGX24550
MLPSTIQTLTLFLTSGGVLLSLYVSASLSYLLYSDILLKFSQTEITAPIMPLDCANASNVQAVNRSAAKGVTLLIPEPEWTYPRLSCPGSTFQKALLISPHRFGETKGNSAPLIIREPFIACGPTECKHFALTHYAAQPGGYYNGTREDRNKLRHLISVKLGKIPTVENSIFHMAAWSGSACHDGKEWTYIGVDGPDSNALLKIKYGEAYTDTYHSYAKNILRTQESACNCIGGDCYLMITDGPASGISECRFLKIREGRIIKEIFPTGRVKHTEECTCGFASNKTIECACRDNSYTAKRPFVKLNVETDTAEIRLMCTETYLDTPRPNDGSITGPCESDGDKGSGGIKGGFVHQRMASKIGRWYSRTMSKTKRMGMGLYVKYDGDPWTDSEALALSGVMVSMEEPGWYSFGFEIKDKKCDVPCIGIEMVHDGGKTTWHSAATAIYCLMGSGQLLWDTVTGVDMAL

SEQ ID NO: 29859 - protein, 466 aa, synthetic construct; identical to SEQ ID NO: 29850
  REGION 1..466: note = neuraminidase__InfluenzaB__AGX24561

SEQ ID NO: 29860 - protein, 466 aa, synthetic construct; identical to SEQ ID NO: 28817
  REGION 1..466: note = neuraminidase__InfluenzaB__AGX24572

SEQ ID NO: 29861 - protein, 466 aa, synthetic construct
  REGION 1..466: note = neuraminidase__InfluenzaB__AGX24583
MLPSTIQTLTLFLTSGGVLLSLYVSASLSYLLYSDILLKFSQTEITAPIMPLDCANASNVQAVNRSAAKGVTLLLPEPEWTYPRLSCPGSTFQKALLISPHRFGETKGNSAPLIIREPFIACGPTECKHFALTHYAAQPGGYYNGTREDRNKLRHLISVKLGKIPTVENSIFHMAAWSGSACHDGKEWTYIGVDGPDSNALLKIKYGEAYTDTYHSYAKNILRTQESACNCIGGDCYLMITDGPASGISECRFLKIREGRIIKEIFPTGRVKHTEECTCGFASNKTIECACRDNSYTAKRPFVKLNVETDTAEIRLMCTETYLDTPRPNDGSITGPCESDGDKGSGGIKGGFVHQRMASKIGRWYSRTMSKTRRMGMGLYVKYDGDPWTDSGALALSGVMVSIEEPGWYSFGFEIKDKKCDVPCIGIEMVHDGGKTTWHSAATAIYCLMGSGQLLWDTVTGVDMAL

SEQ ID NO: 29862 - protein, 466 aa, synthetic construct; identical to SEQ ID NO: 29412
  REGION 1..466: note = neuraminidase__InfluenzaB__AGX24594

SEQ ID NO: 29863 - protein, 466 aa, synthetic construct; identical to SEQ ID NO: 29412
  REGION 1..466: note = neuraminidase__InfluenzaB__AGX24605

SEQ ID NO: 29864 - protein, 466 aa, synthetic construct; identical to SEQ ID NO: 29412
  REGION 1..466: note = neuraminidase__InfluenzaB__AGX24616

SEQ ID NO: 29865 - protein, 466 aa, synthetic construct; identical to SEQ ID NO: 29836
  REGION 1..466: note = neuraminidase__InfluenzaB__AGX24627

SEQ ID NO: 29866 - protein, 466 aa, synthetic construct; identical to SEQ ID NO: 29412
  REGION 1..466: note = neuraminidase__InfluenzaB__AGX24638

SEQ ID NO: 29867 - protein, 466 aa, synthetic construct
  REGION 1..466: note = neuraminidase__InfluenzaB__AGX24660
MLPSTIQTLTLFLTSGGVLLSLYVSASLSYLLYSDILLKFSRTEITAPIMPLDCANASNVQAVNRSATKGVTLLLPEPEWTYPRLSCPGSTFQKALLISPHRFGETKGNSAPLIIREPFIACGPKECKHFALTYYAAQPGGYYNGTREDRNKLRHLISVKLGKIPTVENSIFHMAAWSGSACHDGREWTYIGVDGPDSNALLKIKYGEAYTDTYHSYAKNILRTQESACNCIGGDCYLMITDGPASGISECRFLKIREGRIIKEIFPTGRVKHTEECTCGFASNKTIECACRDNSYTAKRPFVKLNVETDTAEIRLMCTETYLDTPRPNDGSITGPCESNGDKGSGGIKGGFVHQRMASKIGRWYSRTMSKTKRMGMGLYVKYDGDPWTDSEALALSGVMVSMEEPGWYSFGFEIKDKKCDVPCIGIEMVHDGGKTTWHSAATAIYCLMGSGQLLWDTVTGVNMTL

SEQ ID NO: 29868 - protein, 466 aa, synthetic construct
  REGION 1..466: note = neuraminidase__InfluenzaB__AGX24671
MLPSTIQTLTLFLTSGGVLLLLYVSASLSYLLYSDILLKFSQTEITAPIMPLDCANASNVQAVNRSAAKGVTLLLPEPEWTYPRLSCPGSTFQKALLISPHRFGETKGNSAPLIIREPFIACGPTECKHFALTHYAAQPGGYYNGTREDRNKLRHLISVKLGKIPTVENSIFHMAAWSGSACHDGKEWTYIGVDGPDSNALLKIKYGEAYTDTYHSYAKNILRTQESACNCIGGDCYLMITDGPASGISECRFLKIREGRIIKEIFPTGRVKHTEECTCGFASNKTIECACRDNSYTAKRPFVKLNVETDTAEIRLMCTETYLDTPRPNDGSITGPCESDGDKGSGGIKGGFVHQRMASKIGRWYSRTMSKTKRMGMGLYVKYDGDPWTDSEALALSGVMVSMEEPGWYSFGFEIKDKKCDIPCIGIEMVHDGGKTTWHSAATAIYCLMGSGQLLWDTVTGVDMAL

SEQ ID NO: 29869 - protein, 466 aa, synthetic construct
  REGION 1..466: note = neuraminidase__InfluenzaB__AGX24682
MLPSTIQTLTLFLTSGGVLLSLYVSASLSYLLYSDILLKFSRTEITAPIMPLDCANASNVQAVNRSATKGVTLLLPEPEWTYPRLSCPGSTFQKALLISPHRFGETKGNSAPLIIREPFIACGPKECKHFALTHYAAQPGGYYNGTREDRNKLRHLISVKLGKIPTVENSIFHMAAWSGSACHDGREWTYIGVDGPDSNALLKIKYGEAYTDTYHSYAKNILRTQESACNCIGGDCYLMITDGPASGISECRFLKIREGRIIKEIFPTGRVKHTEECTCGFASNKTIECACRDNSYTAKRPFVKLNVETDTAEIRLMCTETYLDTPRPNDGSITGPCESNGDKGSGGIKGGFVHQRMASKIGRWYSRTMSKTKRMGMGLYVKYDGDPWTDSEALVLSGVMVSMEEPGWYSFGFEIKDKKCDVPCIGIEMVHDGGKTTWHSAATAIYCLMGSGQLLWDTVTGVNMTL

SEQ ID NO: 29870 - protein, 466 aa, synthetic construct; identical to SEQ ID NO: 29412
  REGION 1..466: note = neuraminidase__InfluenzaB__AGX24693

SEQ ID NO: 29871 - protein, 466 aa, synthetic construct; identical to SEQ ID NO: 29412
  REGION 1..466: note = neuraminidase__InfluenzaB__AGX24704

SEQ ID NO: 29872 - protein, 466 aa, synthetic construct; identical to SEQ ID NO: 29412
  REGION 1..466: note = neuraminidase__InfluenzaB__AGX24715

SEQ ID NO: 29873 - protein, 466 aa, synthetic construct
  REGION 1..466: note = neuraminidase__InfluenzaB__AGX24737
MLPSTIQTLTLFLTSGGVLLSLYVSASLSYLLYSDILLKFSQTEITAPIMPLDCANASNVQAVNRSAAKGVTLLLPEPEWTYPRLSCPGSTFQKALLISPHRFGETKGNSAPLIIREPFIACGTTECKHFALTHYAAQPGGYYNGTREDRNKLRHLISVKLGKIPTVENSIFHMAAWSGSACHDGKEWTYIGVDGPDSNALLKIKYGEAYTDTYHSYAKNILRTQESACNCIGGDCYLMITDGPASGISECRFLKIREGRIIKEIFPTGRVKHTEECTCGFASNKTIECACRDNRYTAKRPFVKLNVETDTAEIRLMCTETYLDTPRPNDGSITGPCESDGDKGSGGIKGGFVHQRMASKIGRWYSRTMSKTKRMGMGLYVKYDGDPWTDSGALALSGVMVSIEEPGWYSFGFEIKDKKCDVPCIGIEMVHDGGKTTWHSAATAIYCLMGSGQLLWDTVTGVDMAL

SEQ ID NO: 29874 - protein, 466 aa, synthetic construct
  REGION 1..466: note = neuraminidase__InfluenzaB__AGX24748
MLPSTIQTLTLFLTSGGVLLSLYVSASLSYLLYSDILLKFSQTEITAPIMPLDCANASNVQAVNRSAAKGVTLLLPEPEWTYPRLSCPGSTFQKALLISPHRFGETKGNSAPLIIREPFIACGPTECKHFALTHYAAQPGRYYNGTREDRNKLRHLISVKLGKIPTVENSIFHMAAWSGSACHDGKEWTYIGVDGPDSNALLKIKYGEAYTDTYHSYAKNILRTQESACNCIGGDCYLMITDGPASGISECRFLKIREGRIIKEIFPTGRVKHTEECTCGFASNKTIECACRDNSYTAKRPFVKLNVETDTAEIRLMCTETYLDTPRPNDGSITGPCESDGDKGSGGIKGGFVHQRMASKIGRWYSRTMSKTKRMGMGLYVKYDGDPWTDSEALALSGVMVSMEEPGWYSFGFEIKDKKCDVPCIGIEMVHDGGKTTWHSAATAVYCLMGSGQLLWDTVTGVDMAL

SEQ ID NO: 29875 - protein, 466 aa, synthetic construct
  REGION 1..466: note = neuraminidase__InfluenzaB__AGX24759
MLPSTIQTLTLFLTSGGVLLSLYVSASLSYLLYSDILLKFSQTEITAPIMPLDCANASNVQAVNRSAAKGVTLLLPEPEWTYPRLSCPGSTFQKALLISPHRFGETKGNSAPLIIREPFIACGPTECKHFALTHYAAQPGGYYNGTREDRNKLRHLISVKLGKIPTVENSIFHMAAWSGSACHDGKEWTYIGVDGPDSNALLKIKYGEAYTDTYHSYAKNILRTQESACNCIGGDCYLMITDGPASGISECRFLKIREGRIIKEIFPTGRVKHTEECTCGFASNKTIECACRDNSYTAKRPFVKLNVETDTAEIRLMCTETYLDTPRPNDGSITGPCESDGDKGSGGIKGGFVHQRMASKIGRWYSRTMSKTKRMGMGLYVKYDGDPWTDSEALALSGVMVSMEEPGWYSFGFEIKDKKCDIPCIGIEMVHDGGKTTWHSAATAIYCLMGSGQLLWDTVTGVDMAL

SEQ ID NO: 29876 - protein, 466 aa, synthetic construct; identical to SEQ ID NO: 29412
  REGION 1..466: note = neuraminidase__InfluenzaB__AGX24770

SEQ ID NO: 29877 - protein, 466 aa, synthetic construct; identical to SEQ ID NO: 29874
  REGION 1..466: note = neuraminidase__InfluenzaB__AGX24781

SEQ ID NO: 29878 - protein, 466 aa, synthetic construct; identical to SEQ ID NO: 28788
  REGION 1..466: note = neuraminidase__InfluenzaB__AGX24792

SEQ ID NO: 29879 - protein, 466 aa, synthetic construct; identical to SEQ ID NO: 29836
  REGION 1..466: note = neuraminidase__InfluenzaB__AGX24803

SEQ ID NO: 29880 - protein, 466 aa, synthetic construct; identical to SEQ ID NO: 29412
  REGION 1..466: note = neuraminidase__InfluenzaB__AGX24814

SEQ ID NO: 29881 - protein, 466 aa, synthetic construct
  REGION 1..466: note = neuraminidase__InfluenzaB__AGX24825
MLPSTIQTLTLFLTSGGVLLSLYVSASLSYLLYSDILLKFSQTEITAPIMPLDCANASNVQAVNRSAAKGVTLLLPEPEWTYPRLSCPGSTFQKALLISPHRFGETKGNSAPLIIREPFIACGPTECKHFALTHYAAQPGEYYNGTREDRNKLRHLISVKLGKIPTVENSIFHMAAWSGSACHDGKEWTYIGVDGPDSNALLKIKYGEAYTDTYHSYAKNILRTQESACNCIGGDCYLMITDGPASGISECRFLKIREGRIIKEIFPTGRVKHTEECTCGFASNKTIECACRDNSYTAKRPFVKLNVETDTAEIRLMCTETYLDTPRPNDGSITGPCESDGDKGSGGIKGGFVHQRMASKIGRWYSRTMSKTRRMGMGLYVKYDGDPWTDSEALALSGVMVSMEEPGWYSFGFEIKDKKCDVPCIGIEMVHDGGKTTWHSAATAIYCLMGSGQLLWDTVTGVDMAL

SEQ ID NO: 29882 - protein, 466 aa, synthetic construct; identical to SEQ ID NO: 29412
  REGION 1..466: note = neuraminidase__InfluenzaB__AGX24836

SEQ ID NO: 29883 - protein, 466 aa, synthetic construct
  REGION 1..466: note = neuraminidase__InfluenzaB__AGX24847
MLPSTIQTLTLFLTSGGVLLSLYVSASLSYLLYSDILLKFSRTEITAPIMPLDCANASNVQAVNRSATKGVTLLLPEPEWTYPRLSCPGSTFQKALLISPHRFGETKGNSAPLIIREPFIACGPKECKHFALTHYAAQPGGYYNGTREDRNKLRHLISVKLGKIPTVENSIFHMAAWSGSACHDGREWTYIGVDGPDSNALLKIKYGEAYTDTYHSYAKNILRTQESACNCIGGDCYLMITDGPASGISECRFLKIREGRIIKEIFPTGRVKHTEECTCGFASNKTIECACRDNSYTAKRPFVKLNVETDTAEIRLMCTETYLDTPRPNDGSITGPCESNGDKGSGGIKGGFVHQRMASKIGRWYSRTMSKTKRMGMGLYVKYDGDPWTDSEALALSGVMVSMEEPGWYSFGFEIKDKKCDVPCIGIEMVHDGGKTTWHSAATAVYCLMGSGQLLWDTVTGVNMTL

SEQ ID NO: 29884 - protein, 466 aa, synthetic construct; identical to SEQ ID NO: 28896
  REGION 1..466: note = neuraminidase__InfluenzaB__AGX24858

SEQ ID NO: 29885 - protein, 466 aa, synthetic construct
  REGION 1..466: note = neuraminidase__InfluenzaB__AGX24869
MLPSTIQTLTLFLTSGGVLLSLYVSASLSYLLYSDILLKFSRTEMTAPIMPLGCANASNVQAVNRSATKGVTLLLPEPEWTYPRLSCPGSTFQKALLISPHRFGETKGNSAPLIIREPFIACGPKECKHFALTHYAAQPGGYYNGTREDRNKLRHLISVKLGKIPTVENSIFHMAAWSGSACHDGREWTYIGVDGPDSNALLKIKYGEAYTDTYHSYAKNILRTQESACNCIGGDCYLMITDGPASGISECRFLKIREGRIIKEIFPTGRVKHTEECTCGFASNKTIECACRDNSYTAKRPFVKLNVETDTAEIRLMCTETYLDTPRPNDGSITGPCESNGDKGSGGIKGGFVHQRMASKIGRWYSRTMSKTKRMGMGLYVKYDGDPWTDSEALALSGVMVSMEEPGWYSFGFEIKDKKCDVPCIGIEMVHDGGKTTWHSAATAIYCLMGSGQLLWDTVTGVNMTL

SEQ ID NO: 29886 - protein, 466 aa, synthetic construct
  REGION 1..466: note = neuraminidase__InfluenzaB__AGX24880
MLPSTIQMLTLFLTSGGVLLSLYVSASLSYLLYSDILLKFSRTEITAPIMPLDCANASNVQAVNRSATKGVTLLLPEPEWTYPRLSCPGSTFQKALLISPHRFGETKGNSAPLIIREPFIACGPKECKHFALTHYAAQPGGYYNGTREDRNKLRHLISVKLGKIPTVENSIFHMAAWSGSACHDGREWTYIGVDGPDSNALLKIKYGEAYTDTYHSYAKNILRTQESACNCIGGDCYLMITDGPASGISECRFLKIREGRIIKEIFPTGRVKHTEECTCGFASNKTIECACRDNSYTAKRPFVKLNVETDTAEIRLMCTETYLDTPRPNDGSITGPCESNGDKGSGGIKGGFVHQRMASKIGRWYSRTMSKTKRMGMGLYVKYDGDPWTDSEALALSGVMVSMEEPGWYSFGFEIKDKKCDVPCIGIEMVHDGGKTTWHSAATAIYCLMGSGQLLWDTVTGVNMTL

SEQ ID NO: 29887 - protein, 466 aa, synthetic construct
  REGION 1..466: note = neuraminidase__InfluenzaB__AGX24902
MLPSTIQTLTLFLTSGGVLLSLYVSALLSYLLYSDILLKFSRTEITAPIMPLDCANASNVQAVNRSATKGVTLLLPEPEWTYPRLSCPGSTFQKALLISPHRFGENKGNSAPLIIREPFIACGPKECKHFALTHYAAQPGGYYNGTREDRNKLRHLISVKLGKIPTVENSIFHMAAWSGSACHDGREWTYIGVDGPDSNALLKIKYGEAYTDTYHSYAKNILRTQESACNCIGGDCYLMITDGPASGISECRFLKIREGRIIKEIFPTGRVKHTEECTCGFASNKTIECACRDNNYTAKRPFVKLNVETDTAEIRLMCTETYLDTPRPNDGSITGPCESNGDKGSGGIKGGFVHQRMASKIGRWYSRTMSKTKRMGMGLYVKYDGDPWTDSEALALSGVMVSMEEPGWYSFGFEIKDKKCDVPCIGIEMVHDGGKTTWHSAATAIYCLMGSGQLLWDTVTGVNMTL

SEQ ID NO: 29888 - protein, 466 aa, synthetic construct; identical to SEQ ID NO: 28901
  REGION 1..466: note = neuraminidase__InfluenzaB__AGX84846

SEQ ID NO: 29889 - protein, 466 aa, synthetic construct; identical to SEQ ID NO: 28956
  REGION 1..466: note = neuraminidase__InfluenzaB__AGX84858

SEQ ID NO: 29890 - protein, 466 aa, synthetic construct; identical to SEQ ID NO: 28901
  REGION 1..466: note = neuraminidase__InfluenzaB__AGX84869

SEQ ID NO: 29891 - protein, 466 aa, synthetic construct
  REGION 1..466: note = neuraminidase__InfluenzaB__AGX84880
MLPSTIQTLTLFLTSGGVLLSLYVSASLSYLLYSDILLKFSPTEITAPTMSLDCANASNVQAVNRSATKGVIFLLPEPEWTYPRLSCPGSTFQKALLISPHRFGETKGNSAPLIIREPFIACGPNECKHFALTHYAAQPGGYYNGTRGDRNKLRHLISVKLGKIPTVENSIFHMAAWSGSACHDGKEWTYIGVDGPDNDALLKVKYGEAYTDTYHSYANKILRTQESACNCIGGNCYLMITDGSASGVSECRFLKIREGRIIKEIFPTGRVKHTEECTCGFASNKTIECACRDNSYTAKRPFVKLNVETDTAEIRLMCTDTYLDTPRPDDGSITGPCESNGDKGSGGIKGGFVHQRMESKIGRWYSRTMSKTERMGMGLYVKYDGDPWADSDALAFSGVMVSMKEPGWYSFGFEIKDKKCDVPCIGIEMVHDGGKETWHSAATAIYCLMGSGQLLWDTVTGVDMAL

SEQ ID NO: 29892 - protein, 466 aa, synthetic construct; identical to SEQ ID NO: 28901
  REGION 1..466: note = neuraminidase__InfluenzaB__AGX84891

SEQ ID NO: 29893 - protein, 466 aa, synthetic construct; identical to SEQ ID NO: 28956
  REGION 1..466: note = neuraminidase__InfluenzaB__AGX84902

SEQ ID NO: 29894 - protein, 466 aa, synthetic construct
  REGION 1..466: note = neuraminidase__InfluenzaB__AGX84924
MLPSTIQTLTLFLTSGGVLLSLYVSALLSYLLYSDILLKFSPTEITAPTMSLDYANASNVQAVNRSATKGVTFLLPEPEWTYPRLSCPGSTFQKALLISPHRFGETKGNSAPLIIREPFIACGPNECKHFALTHYAAQPGGYYNGTRGDRNKLRHLISVKLGKIPTVENSIFHMAAWSGSACHDGKEWTYIGVDGPDNDALLKVKYGEAYTDTYHSYANKILRTQESACNCIGGNCYLMITDGSASGVSECRFLKIREGRIIKEIFPTGRVKHTEECTCGFASNKTIECACRDNSYTAKRPFVKLNVETDTAEIRLMCTDTYLDTPRPDDGSITGPCESNGDKGSGGIKGGFVHQRMESKIGRWYSRTMSKTERMGMGLYVKYDGDPWADSDALAFSGVMVSMKEPGWYSFGFEIKDKKCDVPCIGIEMVHDGGKETWHSAATAIYCLMGSGQLLWDTVTGVDMAL

SEQ ID NO: 29895 - protein, 466 aa, synthetic construct
  REGION 1..466: note = neuraminidase__InfluenzaB__AGY46393
MLPSTIQTLTLFLTSGGVLLSLYVSASLSYLLYSDILLKFPSTEITAPTMPLDCANATNVQAVNRSATKGVTLLLPEPEWTYPRLSCPGSTFQKALLISPHRFGEIKGNSAPLIIREPFIACGPNECKHFALTHYAAQPGGYYNGTREDRNKLRHLISVKLGKIPTVENSIFHMAAWSGSACHDGREWTYIGVDGPDSNALLKIKYGEAYTDTYHSYAKNILRTQESACNCIGGDCYLMITDGPASGISECRFLKIREGRIIKEIFPTGRVKHTEECTCGFASNKTIECACRDNSYTAKRPFVKLNVETDTAEIRLMCTETYLDTPRPNDGSITGPCESNGDKGSGGIKGGFVHQRMASKIGRWYSRTMSKTERMGMGLYVKYDGDPWADSDALAFSGVMVSMEEPGWYSFGFEIKDKKCDVPCIGIEMVHDGGKETWHSAATAIYCLMGSGQLLWDTVTGVNMAL

SEQ ID NO: 29896 - protein, 466 aa, synthetic construct
  REGION 1..466: note = neuraminidase__InfluenzaB__AGY46397
MLPSTIQTLTLFLTSGGVLLSLYVSASLSYLLYSDILLKFSRTEITAPIMPLDCANASNVQAVNRSATKGVTLLLPEPEWTYPRLSCPGSTFQKALLISPHRFGETKGNSAPLIIREPFIACGPNECKHFALTHYAAQPGGYYNGTRGDRNKLRHLISVKLGKIPTVENSIFHMAAWSGSACHDGKEWTYIGVDGPDNNALLKVKYGEAYTDTYHSYANKILRTQESACNCIGGNCYLMITDGSASGVSECRFLKIREGRIIKEIFPTGRVKHTEECTCGFASNKTIECACRDNSYTAKRPFVKLNVETDTAEIRLMCTDTYLDTPRPNDGSITGPCESDGDKGSGGIKGGFVHQRMESKIGRWYSRTMSKTERMGMGLYVKYDGDPWADSDALAFSGVMVSMKEPGWYSFGFEIKDKKCDVPCIGIEMVHDGGKTTWHSAATAIYCLMGSGQLLWDTVTGVNMTL

SEQ ID NO: 29897 - protein, 466 aa, synthetic construct
  REGION 1..466: note = neuraminidase__InfluenzaB__AGY46399
MLPSTIQTLTLFLTSGGVLLSLYVSASLSYLLYSDILLKFSPTEIIAPTTPLDCANASNVQAVNRSATKGVTLLLPEPEWTYPRLSCPGSTFQKALLISPHRFGETKGNSAPLIIREPFIACGPKECKHFALTHYAAQPGGYYNGTREDRNKLRHLISVKLGKIPTVENSIFHMAAWSGSACHDGREWTYIGVDGPDSNALLKIKYGEAYTDTYHSYAKNILRTQESACNCIGGDCYLMITDGPASGISECRFLKIREGRIIKEIFPTGRVKHTEECTCGFASNKTIECACRDNSYTAKRPFVKLNVETDTAEIRLMCTETYLDTPRPNDGSITGPCESNGDKGSGGIKGGFVHQRMASKIGRWYSRTMSKTKRMGMGLYVKYDGDPWADSEALALSGVMVSMEEPGWYSFGFEIKDKKCDVPCIGIEMVHDGGKETWHSAATAIYCLMGSGQLLWDTVTGVDMAL

SEQ ID NO: 29898 - protein, 466 aa, synthetic construct
  REGION 1..466: note = neuraminidase__InfluenzaB__AGY46401
MLPSTIQTLTLFLTSGGVLLSLYVSASLSYLLYSDILLKFSPTEITAPTMPLDCANASNVQAVNRSATKGVTLLLPEPEWTYPRLSCPGSTFQKALLISPHRFGETKGNSAPLIIREPFIACGPKECKHFALTHYAAQPGGYYNGTREDRNKLRHLISVKLGKIPTVENSIFHMAAWSGSACHDGREWTYIGVDGPDSNALLKIKYGEAYTDTYHSYAKNILRTQESACNCIGGDCYLMITDGPASGISECRFLKIREGRIIKEIFPTGRVKHTEECTCGFASNKTIECACRDNSYTAKRPFVKLNVETDTAEIRLMCTETYLDTPRPNDGSITGPCESNGDKGSGGIKGGFVHQRMASKIGRWYSRTMSKTKRMGMGLYVKYDGDPWADSDALAFSGVMVSMKEPGWYSFGFEIKDKKCDVPCIGIEMVHDGGKETWHSAATAIYCLMGSGQLLWDTVTGVDMAL

SEQ ID NO: 29899 - protein, 466 aa, synthetic construct; identical to SEQ ID NO: 28616
  REGION 1..466: note = neuraminidase__InfluenzaB__AGZ59825

SEQ ID NO: 29900 - protein, 466 aa, synthetic construct; identical to SEQ ID NO: 28682
  REGION 1..466: note = neuraminidase__InfluenzaB__AGZ59836

SEQ ID NO: 29901 - protein, 466 aa, synthetic construct; identical to SEQ ID NO: 29371
  REGION 1..466: note = neuraminidase__InfluenzaB__AGZ59847

SEQ ID NO: 29902 - protein, 466 aa, synthetic construct
  REGION 1..466: note = neuraminidase__InfluenzaB__AGZ59858
MLPSTIQTLTLFLTSGGVLLSLYVSASLSYLLYSDILLKFSPTEITAPTMPLDCANASNVHAVNRSATKGVTLLLPEPEWTYPRLSCPGSTFQKALLISPHRFGETKGNSAPLIIREPFIACGPNECKHFALTHYAAQPGGYYNGKRGDRNKLRHLISVKLGKIPTVENSIFHMAAWSGSACHDGKEWTYIGVDGPDNNALLKIKYGEAYTDTYHSYANNILRTQESACNCIGGNCYLMITDGSASGVSECRFLKIREGRIIKEIFPTGRVKHTEECTCGFASNKTIECACRDNSYTAKRPFVKLNVETDTAEIRLMCTDTYLDTPRPDDGSITGPCESNGDKGSGGIKGGFVHQRMASKIGRWYSRTMSKTERMGMGLYVKYDGDPWADSDALAFSGVMVSMKEPGWYSFGFEIKDKKCDVPCIGIEMVHDGGKETWHSAATAIYCLMGSGQLLWDTVTGVDMAL

SEQ ID NO: 29903 - protein, 466 aa, synthetic construct
  REGION 1..466: note = neuraminidase__InfluenzaB__AGZ59869
MLPSTIQTLTLFLTSGGVLLSLYVSASLSYLLYSDILLKFSPTEITAPTMPLDCANASNVQAVNRSATKGVTLLLPEPEWTYPRLSCPGSTFQKAVLISPHRFGETKGNSAPLIIREPFIACGPNECKHFALTHYAAQPGGYYNGTRGDRNKLRHLISVKLGKIPTVENSIFHMAAWSGSACHDGKEWTYIGVDGPDNNALLKIKYGEAYTDTYHSYANKILRTQESACNCIGGNCYLMITDGSASGVSECRFLKIREGRIIKEIFPTGRVKHTEECTCGFASNKTIECACRDNSYTAKRPFVKLNVETDTAEIRLMCTDTYLDTPRPDDGSITGPCESNGDKGSGGIKGGFVHQRMASKIGRWYSRTMSKTERMGMGLYVKYDGDPWADSDALAFSGVMVSMKEPGWYSFGFEIKDKKCDVPCIGIEMVHDGGKETWHSAATAIYCLMGSGQLLWDTVTGVDMAL

SEQ ID NO: 29904 - protein, 466 aa, synthetic construct; identical to SEQ ID NO: 29400
  REGION 1..466: note = neuraminidase__InfluenzaB__AGZ59880

SEQ ID NO: 29905 - protein, 466 aa, synthetic construct; identical to SEQ ID NO: 29844
  REGION 1..466: note = neuraminidase__InfluenzaB__AGZ59891

SEQ ID NO: 29906 - protein, 466 aa, synthetic construct; identical to SEQ ID NO: 28961
  REGION 1..466: note = neuraminidase__InfluenzaB__AGZ59902

SEQ ID NO: 29907 - protein, 466 aa, synthetic construct; identical to SEQ ID NO: 28961
  REGION 1..466: note = neuraminidase__InfluenzaB__AGZ59913

SEQ ID NO: 29908 - protein, 466 aa, synthetic construct; identical to SEQ ID NO: 28961
  REGION 1..466: note = neuraminidase__InfluenzaB__AGZ59924

SEQ ID NO: 29909 - protein, 466 aa, synthetic construct; identical to SEQ ID NO: 28961
  REGION 1..466: note = neuraminidase__InfluenzaB__AGZ59935

SEQ ID NO: 29910 - protein, 466 aa, synthetic construct; identical to SEQ ID NO: 28961
  REGION 1..466: note = neuraminidase__InfluenzaB__AGZ59946

SEQ ID NO: 29911 - protein, 466 aa, synthetic construct
  REGION 1..466: note = neuraminidase__InfluenzaB__AGZ59957
MLPSTIQTLTLFLTSGGVLLSLYVSASLSYLLYSDILLKFSPTEITAPTMPLDCANASNVQAVNRSATKGVTLLLPEPEWTYPRLSCPGSTFQKALLISPHRFGETKGNSAPLIIREPFIACGPNECKHFALTHYAAQPGGYYNGTRGDRNKLRHLISVKLGKIPTVENSIFHMAAWSGSACHDGKEWTYIGVDGPDNNALLKVKYGEAYTDTYHSYANKILRTQESACNCIGGNCYLMITDGSASGVSECRFLKIREGRIIKEIFPTGRVKHTEECTCGFASNKTIECACRDNSYTAKRPFVKLNVETDTAEIRLMCTDTYLDTPRPNDGSITGPCESNGDKGSGGIKGGFVHQRMESKIGRWYSRTMSKTERMGMGLYVKYDGDPWADSDALAFSGVMVSMKEPGWYSFGFEIKDKKCDVPCIGIEMVHDGGKGTWHSAATAIYCLMGSGQLLWDTVTGVDMAL

SEQ ID NO: 29912 - protein, 466 aa, synthetic construct; identical to SEQ ID NO: 28961
  REGION 1..466: note = neuraminidase__InfluenzaB__AGZ59969

SEQ ID NO: 29913 - protein, 466 aa, synthetic construct; identical to SEQ ID NO: 28961
  REGION 1..466: note = neuraminidase__InfluenzaB__AGZ59980

SEQ ID NO: 29914 - protein, 466 aa, synthetic construct; identical to SEQ ID NO: 28961
  REGION 1..466: note = neuraminidase__InfluenzaB__AGZ59991

SEQ ID NO: 29915 - protein, 466 aa, synthetic construct; identical to SEQ ID NO: 28961
  REGION 1..466: note = neuraminidase__InfluenzaB__AGZ60003

SEQ ID NO: 29916 - protein, 466 aa, synthetic construct
  REGION 1..466: note = neuraminidase__InfluenzaB__AGZ60014
MLPSTIQTLTLFLTSGGVLLSLYVSALLSYLLYSDILLKFSPTEITAPTMSLDCANASNVQAVNRSATKGVTFLLPEPEWTYPRLSCPGSTFQRALLISPHRFGEAKGNSAPLIIREPFIACGPNECKHFALTHYAAQPGGYYNGTRGDRNKLRHLISVKLGKIPTVENSIFHMAAWSGSACHDGKEWTYIGVDGPDNDALLKVKYGEAYTDTYHSYANKILRTQESACNCIGGNCYLMITDGSASGVSECRFLKIREGQIIKEIFPTGRVKHTEECTCGFASNKTIECACRDNSYTAKRPFVKLNVETDTAEIRLMCTDTYLDTPRPDDGSITGPCESNGDKGSGGIKGGFVHQRMESKIGRWYSRTMSKTERMGMGLYVKYDGDPWADSDALAFSGVMVSMKEPGWYSFGFEIKDKKCDVPCIGIEMVHDGGKETWHSAATAIYCLMGSGQLLWDTVTGVDMAL

SEQ ID NO: 29917 - protein, 466 aa, synthetic construct; identical to SEQ ID NO: 28895
  REGION 1..466: note = neuraminidase__InfluenzaB__AGZ60025

SEQ ID NO: 29918 - protein, 466 aa, synthetic construct
  REGION 1..466: note = neuraminidase__InfluenzaB__AGZ60037
MLPSTIQTLTLFLTSGGVLLSLYVSALLSYLLYSDILLKFSPTEITAPTMSLDCANASNVQAVNRSATKGVTFLLPEPEWTYPRLSCPGSTFQKALLISPHRFGETKGNSAPLIIREPFIACGPNECKHFALTHYAAQPGGYYNGTRGDRNKLRHLISVKLGKIPTVENSIFHMAAWSGSACHDGKEWTYIGVDGPDNDALLKVKYGEAYTDTYHSYANKILRTQESACNCIGGNCYLMITDGSASGVSECRFLKIREGRIIKEIFPTGRVKHTEECTCGFASNKTIECACRDNSYTAKRPFVKLNVETDTAEIRLMCTDTYLDTPRPDDGSITGPCESNGDKGSGGIKGGFVHQRMESKIGRWYSRTMSKTERMGMGLYVKYDGDPWAESDALAFSGVMVSMKEPGWYSFGFEIKDKKCDVPCIGIEMVHDGGKETWHSAATAIYCLMGSGQLLWDTVTGVDIAL

SEQ ID NO: 29919 - protein, 466 aa, synthetic construct; identical to SEQ ID NO: 29131
  REGION 1..466: note = neuraminidase__InfluenzaB__AGZ60048

SEQ ID NO: 29920 - protein, 466 aa, synthetic construct; identical to SEQ ID NO: 29131
  REGION 1..466: note = neuraminidase__InfluenzaB__AGZ60059

SEQ ID NO: 29921 - protein, 466 aa, synthetic construct
  REGION 1..466: note = neuraminidase__InfluenzaB__AGZ60070
MLPSTIQTLTLFLTSGGVLLSLYVSASLSYLLYSDILLKFSTTEITAPTMPLDCANASNVQAVNHSAAKGVTLLLPEPEWTYPRLSCPGSTFQKALLISPHRFGETKGNSAPLIIREPFIACGPKECKHFALTHYAAQPGGYYNGTREDRNKLRHLISVKLGKIPTVENSIFHMAAWSGSACHDGKEWTYIGVDGPDSNALLKIKYGEAYTDTYHSYAHNILRTQESACNCIGGNCYLMITDGSASGISECRFLKIREGRIIKEIFPTGRVKHTEECTCGFANNKTIECACRDNSYTAKRPFVKLNVETDTAEIRLMCTETYLDTPRPDDGSITGPCESNGNKGSGGIKGGFVHQRMASKIGRWYSRTMSKTKRMGMGLYVKYDGDPWTDSDALVFSGVMISVEEPGWYSFGFEIKDKKCDVPCIGIEMVHDGGKETWHSAATAIYCLMGSGQLLWDTVTGVNMTL

SEQ ID NO: 29922 - protein, 466 aa, synthetic construct; identical to SEQ ID NO: 28627
  REGION 1..466: note = neuraminidase__InfluenzaB__AGZ60081

SEQ ID NO: 29923 - protein, 466 aa, synthetic construct; identical to SEQ ID NO: 29147
  REGION 1..466: note = neuraminidase__InfluenzaB__AGZ60092

SEQ ID NO: 29924 - protein, 466 aa, synthetic construct; identical to SEQ ID NO: 29770
  REGION 1..466: note = neuraminidase__InfluenzaB__AGZ60103

SEQ ID NO: 29925 - protein, 466 aa, synthetic construct; identical to SEQ ID NO: 28788
  REGION 1..466: note = neuraminidase__InfluenzaB__AGZ60135

SEQ ID NO: 29926 - protein, 466 aa, synthetic construct; identical to SEQ ID NO: 28960
  REGION 1..466: note = neuraminidase__InfluenzaB__AGZ60154

SEQ ID NO: 29927 - protein, 466 aa, synthetic construct
  REGION 1..466: note = neuraminidase__InfluenzaB__AGZ60164
MLPSTTQTLTLFLTSGGVLLSLYVSASLSYLLYSDILLKFSQTEITAPIMPLDCANASNVQAVNRSAAKGVTLLLPEPEWTYPRLSCPGSTFQKALLINPHRFGETKGNSAPLIIREPFIACGPTECKHFALTHYAAQPGGYYNGTREDRNKLRHLISVKLGKIPTVENSIFHMAAWSGSACHDGKEWTYIGVDGPDSNALLKIKYGEAYTDTYHSYAKNILRTQESACNCIGGDCYLMITDGPASGISECRFLKIREGRIIKEIFPTGRVKHTEECTCGFASNKTIECACRDNSYTAKRPFVKLNVETDTAEIRLMCTETYLDTPRPNDGSITGPCESDGDKGSGGIKGGFVHQRMASKIGRWYSRTMSKTKRMGMGLYVKYDGDPWTDSEALALSGVMVSMEEPGWYSFGFEIKDKKCDVPCIGIEMVHDGGKTTWHSAATAIYCLMGSGQLLWDTVTGVDMAL

SEQ ID NO: 29928 - protein, 466 aa, synthetic construct; identical to SEQ ID NO: 29840
  REGION 1..466: note = neuraminidase__InfluenzaB__AGZ60176

SEQ ID NO: 29929 - protein, 466 aa, synthetic construct; identical to SEQ ID NO: 28817
  REGION 1..466: note = neuraminidase__InfluenzaB__AGZ60187

SEQ ID NO: 29930 - protein, 466 aa, synthetic construct; identical to SEQ ID NO: 28817
  REGION 1..466: note = neuraminidase__InfluenzaB__AGZ60198

SEQ ID NO: 29931 - protein, 466 aa, synthetic construct; identical to SEQ ID NO: 28817
  REGION 1..466: note = neuraminidase__InfluenzaB__AGZ60210

SEQ ID NO: 29932 - protein, 466 aa, synthetic construct
  REGION 1..466: note = neuraminidase__InfluenzaB__AGZ60221
MLPTTIQTLTLFLTSGGVLLSLYVSASLSYLLYSDILLKFSRTEITAPIMPLDCANASNVQAVNRSATKGVTLLLPEPEWTYPRLSCPGSTFQKALLISPHRFGETKGNSAPLIIREPFIACGPKECKHFALTHYAAQPGGYYNGTREDRNKLRHLISVKLGKIPTVENSIFHMAAWSGSACHDGREWTYIGVDGPDSNALLKIKYGEAYTDTYHSYAKNILRTQESACNCIGGDCYLMITDGPASGISECRFLKIREGRIIKEIFPTGRVKHTEECTCGFASNKTIECACRDNSYTAKRPFVKLNVETDTAEIRLMCTETYLDTPRPNDGSITGPCESNGDKGSGGIKGGFVHQRMASKIGRWYSRTMSKTKRMGMGLYVKYDGDPWTDSEALALSGVMVSMEEPGWYSFGFEIKDKKCDVPCIGIEMVHDGGKTTWHSAATAIYCLMGSGQLLWDTVTGVNMTL

SEQ ID NO: 29933 - protein, 466 aa, synthetic construct
  REGION 1..466: note = neuraminidase__InfluenzaB__AGZ60272
MLPSTIQTLTLFLTSGGVLLSLYVSASLSYLLYSDILLKFSQTEITAPIMPLDCANASNVQAVNRSAAKGVTLLLPKPEWTYPRLSCPGSTFQKALLISPHRFGETKGNSAPLIIREPFIACGPTECKHFALTHYAAQPGGYYNGTREDRNKLRHLISVKLGKIPTVENSIFHMAAWSGSACHDGKEWTYIGVDGPDSNALLKIKYGEAYTDTYHSYAKNILRTQESACNCIGGDCYLMITDGPASGISECRFLKIREGRIIKEIFPTGRVKHTEECTCGFASNKTIECACRDNSYTAKRPFVKLNVETDTAEIRLMCTETYLDTPRPNDGSITGPCESDGDKGSGGIKGGFVHQRMASKIGRWYSRTMSKTKRMGMGLYVKYDGDPWTDSEALALSGVMVSMEEPGWYSFGFEIKDKKCDVPCIGIEMVHDGGKTTWHSAATAIYCLMGSGQLLWDTVTGVDMAL

SEQ ID NO: 29934 - protein, 465 aa, synthetic construct
  REGION 1..465: note = neuraminidase__InfluenzaB__AHL91182
MLPSTIQTLTLFLTSGGVLLSLYVSALLSYLLYSDILLKFSPKIIAPTMSLDCANASNVQAVNHSATKEMKFLPPEPEWTYPRLSCQGSTFQKALLISPHRFGEAKGNSAPLIIREPFIACGPKECKHFALTHYAAQPGGYYNGTREDRNKLRHLISVNLGKIPTVENSIFHMAAWSGSACHDGREWTYIGVDGPDSNALIKIKYGEAYTDTYHSYANNILRTQESACNCIGGDCYLMITDGSASGISKCRFLKIREGRIIKEIFPTGRVEHTEECTCGFASNKTIECACRDNSYTAKRPFVKLNVETDTAEIRLMCTETYLDTPRPDDGSITGPCESNGDKGRGGVKGGFVHQRMASKIGRWYSRTMSKTKRMGMELYVKYDGDPWTDSDALAPSGVMVSMEEPGWYSFGFEIKDKKCDVPCIGIEMVHDGGKRTWHSAATAIYCLMGSGQLLWDTVTGVDMAL

SEQ ID NO: 29935 - protein, 465 aa, synthetic construct
  REGION 1..465: note = neuraminidase__InfluenzaB__AHL91193
MLPSTIQTLTLFLTSGGVLLSLYVSALLSYLLYSDILLKFSPKIIAPTMSLDCANASNVQAVNHSATKEMKFLPSEPEWTYPRLSCQGSTFQKALLISPHRFGEAKGNSAPLIIREPFIACGPKECKHFALTHYAAQPGGYYNGTREDRNKLRHLISVNLGKIPTVENSIFHMAAWSGSACHDGREWTYIGVDGPDSNALIKIKYGEAYTDTYHSYANNILRTQESACNCIGGDCYLMITDGSASGISKCRFLKIREGRIIKEIFPTGRVEHTEECTCGFASNKTIECACRDNSYTAKRPFVKLNVETDTAEIRLMCTETYLDTPRPDDGSITGPCESNGDKGRGGVKGGFVHQRMASKIGRWYSRTMSKTKRMGMELYVKYDGDPWTDSDALAPSGVMVSMEEPGWYSFGFEIKDKKCDVPCIGIEMVHDGGKRTWHSAATAIYCLMGSGQLLWDTVTGVDMAL

SEQ ID NO: 29936 - protein, 465 aa, synthetic construct
  REGION 1..465: note = neuraminidase__InfluenzaB__AHL91204
MLPSTIQTLTLFLTSGGVLLSLYVSALLSYLLYSDVLLKFSPKIIAPTMSLDCANASNVQAVNHSATEEMTFLLPEPEWTYPRLSCQGSTFQKALLISPHRFGEAKGNSAPLIIREPFIACGPKECKHFALTHYAAQPGGYYNGTREDRNKLRHLISVNLGKIPTVENSIFHMAAWSGSACHDGREWTYIGVDGPDSNALIKIKYGEAYTDTYHSYANNILRTQESACNCIGGDCYLMITDGSASGISKCRFLKIREGRIIKEIFPTGRVEHTEECTCGFASNKTIECACRDNIYTAKRPFVKLNVETDTAEIRLMCTETYLDTPRPDDGSITGPCESNGDKGHGGIKGGFVHQRMASKIGRWYSRTMSKTKRMGMELYVKYDGDPWTDSDALAPSGVMVSMEEPGWYSFGFEIKDKKCDVPCIGIEMVHDGGKKTWHSAATAIYCLMGSGQLLWDTVTGVDMAL

SEQ ID NO: 29937 - protein, 465 aa, synthetic construct
  REGION 1..465: note = neuraminidase__InfluenzaB__AHL91215
MLPSTIQTLTLFLTSGGVLLSLYVSTLLSYLLYSDILLKFSPKIIAPTTSLDCANASNVQAVNHSATKEMKFLPTEPEWTYPRLSCQGSTFQKALLISPHRFGEAKGNSAPLIIREPFIACGPKECKHFALTHYAAQPGGYYNGTREDRNKLRHLISVNLGKIPTVENSIFHMAAWSGSACHDGREWTYIGVDGPDSNALIKIKYGEAYTDTYHSYANNILRTQESACNCIGGDCYLMITDGSASGISKCRFLKIREGRIIKEIFPTGRVEHTEECTCGFASNKTIECACRDNSYTAKRPFVKLNVETDTAEIRLMCTETYLDTPRPDDGSITGPCESNGDKGSGGVKGGFVHQRMTSKIGRWYSRTMSKTKRMGMELYVKYDGDPWTDSDALAPSGVMVSMEEPGWYSFGFEIKDKKCDVPCIGIEMVHDGGKRTWHSAATAIYCLMGSGQLLWDTVTGVDMAL

SEQ ID NO: 29938 - protein, 466 aa, synthetic construct; identical to SEQ ID NO: 28709
  REGION 1..466: note = neuraminidase__InfluenzaB__AHL91226

SEQ ID NO: 29939 - protein, 466 aa, synthetic construct; identical to SEQ ID NO: 28710
  REGION 1..466: note = neuraminidase__InfluenzaB__AHL91237

SEQ ID NO: 29940 - protein, 466 aa, synthetic construct; identical to SEQ ID NO: 28710
  REGION 1..466: note = neuraminidase__InfluenzaB__AHL91248

SEQ ID NO: 29941 - protein, 466 aa, synthetic construct; identical to SEQ ID NO: 28709
  REGION 1..466: note = neuraminidase__InfluenzaB__AHL91259

SEQ ID NO: 29942 - protein, 466 aa, synthetic construct; identical to SEQ ID NO: 28709
  REGION 1..466: note = neuraminidase__InfluenzaB__AHL91270

SEQ ID NO: 29943 - protein, 465 aa, synthetic construct; identical to SEQ ID NO: 28681
  REGION 1..465: note = neuraminidase__InfluenzaB__AHL91281

SEQ ID NO: 29944 - protein, 466 aa, synthetic construct
  REGION 1..466: note = neuraminidase__InfluenzaB__AHL91303
MLPSTIQTLTLFLTSGGVLLSLYVSASLSYLLYSDILLKFSPTEITAPTMPLDCANASNVQAVNRSATKGVTLLLPEPEWTYPRLSCPGSTFQKALLISPHRFGETKGNSAPLIIREPFIACGPKECKHFALTHYAAQPGGYYNGTREDRNKLRHLISVKLGKIPTVENSIFHMAAWSGSACHDGREWTYIGVDGPDSNALLKIKYGEAYTDTYHSYANNILRTQESACNCIGGDCYLMITDGSASGINECRFLKIREGRIIKEIFPTGRVEHTEECTCGFASNKTIECACRDNSYTAKRPFVKLNVETDTAEIRLMCTETYLDTPRPDDGSITGPCESNGDKGSGGIKGGFVHQRMASKIGRWYSRTMSKTRRMGMGLYVKYDGDPWTDSDALALSGVMVSMEEPGWYSFGFEIKDKKCDVPCIGIEMVHDGGKKTWHSAATAIYCLMGSGQLLWDTVTGVDMAL

SEQ ID NO: 29945 - protein, 466 aa, synthetic construct; identical to SEQ ID NO: 28710
  REGION 1..466: note = neuraminidase__InfluenzaB__AHL91314

SEQ ID NO: 29946 - protein, 466 aa, synthetic construct; identical to SEQ ID NO: 28710
  REGION 1..466: note = neuraminidase__InfluenzaB__AHL91325

SEQ ID NO: 29947 - protein, 466 aa, synthetic construct
  REGION 1..466: note = neuraminidase__InfluenzaB__AHL91347
MLPSTIQTLTLFLTSGGVLLSLYVSASLSYLLYSDVLLKFSPTEITAPTMPLDCANASNVQAVNRSATKGVTLLLPEPEWTYPRLSCPGSTFQKALLISPHRFGETKGNSAPLIIREPFIACGPKECKHFALTHYAAQPGGYYNGTREDRNKLRHLISVKLGKIPTVENSIFHMAAWSGSACHDGREWTYIGVDGPDSNALLKIKYGEAYTDTYHSYANNILRTQESACNCIGGDCYLMITDGSASGISECRFLKIREGRIVKEIFPTGRVEHTEECTCGFASNKTIECACRDNSYTAKRPFVKLNVETDTAEIRLMCTETYLDTPRPEDGSITGPCESNGDKGSGGIKGGFVHQRMASKIGRWYSRTMSKTKRMGMGLYVKYDGDPWTDSDALALSGVMVSMEEPGWYSFGFEIKDKKCDVPCIGIEMVHDGGKETWHSAATAIYCLMGSGQLLWDTVTGVDMAL

SEQ ID NO: 29948 - protein, 466 aa, synthetic construct; identical to SEQ ID NO: 29947
  REGION 1..466: note = neuraminidase__InfluenzaB__AHL91358

SEQ ID NO: 29949 - protein, 466 aa, synthetic construct; identical to SEQ ID NO: 28685
  REGION 1..466: note = neuraminidase__InfluenzaB__AHL91369

SEQ ID NO: 29950 - protein, 466 aa, synthetic construct; identical to SEQ ID NO: 28685
  REGION 1..466: note = neuraminidase__InfluenzaB__AHL91380

SEQ ID NO: 29951 - protein, 466 aa, synthetic construct
  REGION 1..466: note = neuraminidase__InfluenzaB__AHL91391
MLPSTIQTLTLFLTSGGVLLSLYVSASLSYLLYSDILLKFSPKEITAPTMPLNCANASNVQAVNRSATKGVTLPLPEPEWTYPRLSCPGSTFQKALLISPHRFGETKGNSAPLIIREPFIACGPKECKHFALTHYAAQPGGYYNGTREDRNKLRHLISVKLGKIPTVENSIFHMAAWSGSACHDGREWTYIGVDGPDNNALLKIKYGEAYTDTYHSYANNILRTQESACNCIGGDCYLMITDGSASGISECRFLKIREGRIIKEIFPTGRVEHTEECTCGFASNKTIECACRDNSYTAKRPFVKLNVETDTAEIRLMCTETYLDTPRPDDGSITGPCESNGDKGSGGIKGGFVHQRMASKIGRWYSRTMSKTKRMGMGLYVKYDGDPWIDSDALTLSGVMVSMEEPGWYSFGFEIKDKKCDVPCIGIEMVHDGGKTTWHSAATAIYCLMGSGQLLWDTVTGVDMAL

SEQ ID NO: 29952 - protein, 466 aa, synthetic construct
  REGION 1..466: note = neuraminidase__InfluenzaB__AHL91413
MLPSTIQTLTLFLTSGGVLLSLYVSASLSYLLYSDILLKFTPTEITAPTMPLDCANASNVQAVNLSATKGVTLLLPEPEWTYPRLSCPGSTFQKALLISPHRFGETKGNSAPLIIREPFIACGPKECKHFALTHYAAQPGGYYNGTREDRNKLRHLISVKLGKIPTVENSIFHMAAWSGSACHDGKEWTYIGVDGPDSNALLKIKYGEAYTDTYHSYANNILRTQESACNCIGGNCYLMITDGSASGISECRFLKIREGRIIKEIFPTGRVKHTEECTCGFASNKTIECACRDNSYTAKRPFVKLNVETDTAEIRLMCTETYLDTPRPDDGSITGPCESNGNKGSGGIKGGFVHQRMASKIGRWYSRTMSKTKRMGMGLYVKYDGDPWTDSDALALSGVMVSMEEPGWYSFGFEIKDKKCDVPCIGIEMVHDGGKETWHSAATAIYCLMGSGQLLWDTVTGVDMAL

SEQ ID NO: 29953 - protein, 466 aa, synthetic construct
  REGION 1..466: note = neuraminidase__InfluenzaB__AHL91446
MLPSTIQTLTLFLTSGGVLLSLYVSASLSYLLYSDILLKFSPTEITAPTMPLDCANASNVQAVNRSATKGMTLLLPEPEWTYPRLSCPGSTFQKALLISPHRFGETKGNSAPLIIREPFIACGPKECKHFALTHYAAQPGGYYNGTREDRNKLRHLISVKLGKIPTVENSIFHMAAWSGSACHDGKEWTYIGVDGPDSNALLKIKYGEAYTDTYHSYANNILRTQESACNCIGGNCYLMITDGSASGISECRFLKIREGRIIKEIFPTGRVEHTEECTCGFASNKTIECACRDNSYTAKRPFVKLNVETDTAEIRLMCTETYLDTPRPDDGSITGPCESNGGKGSGGIKGGFVHQRMESKIGRWYSRTMSKTKRMGMGLYVKYDGDPWTDSDALALSGVMVSMEEPGWYSFGFEIKDKECDVPCIGIEMVHDGGKETWHSAATAIYCLMGSGQLLWDTVTGVNMAL

SEQ ID NO: 29954 - protein, 466 aa, synthetic construct
  REGION 1..466: note = neuraminidase__InfluenzaB__AHL91457
MLPSTIQTLTLFLTSGGVLLSLYVSASLSYLLYSDILLKFSPTEITAPIMPLDCANASNVQAVNRSATKGVTLLLPEPEWTYPRLSCPGSTFQKALLISPHRFGETKGNSAPLIIREPFIACGPKECKHFALTHYAAQPGGYYNGTRGDRNKLRHLISVKLGKIPTVENSIFHMAAWSGSACHDGKEWTYIGVDGPDNNALLKIKYGEAYTDTYHSYANNTLRTQESACNCIGGNCYLMITDGSASGISECRFLKIREGRIIKEIFPTGRVKHTEECTCGFASNKTIECACRDNSYTAKRPFVKLNVETDTAEIRLMCTETYLDTPRPDDGSITGPCESNGNKGSGGIKGGFVHQRMASKIGRWYSRTMSKTKRMGMGLYVKYDGDPWTDSDALALSGVMVSMEEPGWYSFGFEIKDKKCDVPCIGIEMVHDGGKETWHSAATAIYCLMGSGQLLWDTVTGVDMAL

SEQ ID NO: 29955 - protein, 466 aa, synthetic construct
  REGION 1..466: note = neuraminidase__InfluenzaB__AHL91468
MLPSTIQTLTLFLTSGGVLLSLYVSASLSYLLYSDILLKFSPTEITAPTMPLDCANASNVQAVNRSATKGVTLLLPEPEWTYPRLSCPGSTFQKALLISPHRFGETKGNSAPLIIREPFIACGPKECKHFALTHYAAQPGGYYNGTREDRNKLRHLISVKLGKIPTVENSIFHMAAWSGSACHDGKEWTYIGVDGPDSNALLKIKYGEAYTDTYHSYANNILRTQESACNCIGGNCYLMITDGSASGISECRFLKIREGRIIKEIFPTGRVKHTEECTCGFASNKTIECACRDNSYTAKRPFVKLNVETDTAEIRLMCTETYLDTPRPDDGSITGPCESNGDKGSGGIKGGFVHQRMASKIGRWYSRTMSKTKRMGMGLYVKYDGDPWTDSDALALSGVMVSVGEPGWYSFGFEIKDKKCDVPCIGIEMVHDGGKETWHSAATAIYCLMGSGQLLWDTVTGVDMAL

SEQ ID NO: 29956 - protein, 466 aa, synthetic construct
  REGION 1..466: note = neuraminidase__InfluenzaB__AHL91479
MLPSTIQTLTLFLTSGGVLLSLYVSASLSYLLYSDILLKFSPTEITAPTMPSDCANASNVQAVNRSATKGVTLLLPEPEWTYPRLSCPGSTFQKALLISPHRFGETKGNSAPLIIREPFIACGPKECKHFALTHYAAQPGGYYNGTRGDRNKLRHLISVKLGKIPTVENSIFHMAAWSGSACHDGKEWTYIGVDGPDSNALLKIKYGEAYTDTYHSYANNILRTQESACNCIGGNCYLMITDGSASGISECRFLKIREGRIIKEIFPTGRVKHTEECTCGFASNKTIECACRDNSYTAKRPFVKLNVETDTAEIRLMCTETYLDTPRPDDGSITGPCESNGDKGSGGIKGGFVHQRMASKIGRWYSRTMSKTKRMGMGLYVKYDGDPWTDSDALALSGVMVSMEEPGWYSFGFEIKDKKCDVPCIGIEMVHDGGKETWHSAATAIYCLMGSGQLLWDTVTGVDMAL

SEQ ID NO: 29957 - protein, 466 aa, synthetic construct
  REGION 1..466: note = neuraminidase__InfluenzaB__AHL91501
MLPSTIQTLTLFLTSGGVLLSLYVSASLSYLLYSDILLKFSPTEITAPTMPLDCANASNVQAVNRSATKGMTLLLPEPEWTYPRLSCPGSTFQKALLISPHRFGETKGNSAPLIIREPFIACGPKECKHFALTHYAAQPGGYYNGTREDRNKLRHLISVKLGKIPTVENSIFHMAAWSGSACHDGKEWTYIGVDGPDSNALLKIKYGEAYTDTYHSYANNILRTQESACNCIGGNCYLMITDGSASGISECRFLKIREGRIIKEIFPTGRVEHTEECTCGFASNKTIECACRDNSYTAKRPFVKLNVETDTAEIRLMCTETYLDTPRPDDGSITGPCESNGGKGSGGIKGGFVHQRMESKIGRWYSRTMSKTKRMGMGLYVKYDGDPWTDSDALALSGVMVSMEEPGWYSFGFEIKDKKCDVPCIGIEMVHDGGKETWHSAATAIYCLMGSGQLLWDTVTGVNMAL

SEQ ID NO: 29958 - protein, 466 aa, synthetic construct
  REGION 1..466: note = neuraminidase__InfluenzaB__AHL91512
MLPSTIQTLTLFLTSGGVLLSLYVSASLSYLLYSDILLKFSPTEITAPTMPLDCANASNVQAVNRSATKGVTLLLPEPEWTYPRLSCPGSIFQKALLISPHRFGETKGNSAPLIIREPFIACGPKECKHFALTHYAAQPGGYYNGTRGDRNKLRHLISVKLGKIPTVENSIFHMAAWSGSACHDGKEWTYIGVDGPDSNALLKIKYGEAYTDTYHSYANNILRTQESACNCIGGNCYLMITDGSASGISECRFLKIREGRIIKEIFPTGRVKHTEECTCGFASNKTIECACRDNSYTAKRPFVKLNVETDTAEIRLMCTETYLDTPRPDDGSITGPCESNGDKGSGGIKGGFVHQRMASKIGRWYSRTMSKTKRMGMGLYVKYDGDPWTDSDALALSGVMVSMEEPGWYSFGFEIKDKKCDVPCIGIEMVHDGGKETWHSAATAIYCLMGSGQLLWDTVTGVDMAL

SEQ ID NO: 29959 - protein, 466 aa, synthetic construct
  REGION 1..466: note = neuraminidase__InfluenzaB__AHL91523
MLPSTIQTLTLFLTSGGVLLSLYVSASLSYLLYSDILLKFSPTEITAPTMPLDCANASNVQAVNRSATKGVTLLLPEPEWTYPRLSCPGSTFQKALLISPHRFGETKGNSAPLIIREPFIACGPKECKHFALTHYAAQPGGYYNGTRGDRNKLRHLISVKLGKIPTVENSIFHMAAWSGSACHDGKEWTYIGVDGPDNNALLKIKYGEAYTDTYHSYANNILRTQESACNCIGGNCYLMITDGSASGISECRFLKIREGRIIKEIFPTGRVKHTEECTCGFASNKTIECACRDNSYTAKRPFVKLNVETDTAEIRLMCTETYLDTPRPDDGSITGPCESNGDKGSGGIKGGFVHQRMASKIGRWYSRTMSKTKRMGMGLYVKYDGDPWTDSDALALSGVMVSMEEPGWYSFGFEIKDKKCDVPCIGIEMVHDGGKETWHSAATAIYCLMGSGQLLWDTVTGVDMAL

SEQ ID NO: 29960 - protein, 466 aa, synthetic construct; identical to SEQ ID NO: 29957
  REGION 1..466: note = neuraminidase__InfluenzaB__AHL91534

SEQ ID NO: 29961 - protein, 466 aa, synthetic construct
  REGION 1..466: note = neuraminidase__InfluenzaB__AHL91545
MLPSTIQTLTLFLTSGGVLLSLYVSASLSYLLYSDILLKFSPTEITAPTMPLDCANASNVQAVNRSATKGVTLLLPEPEWTYPRLSCPGSTFQKALLISPHRFGETKGNSAPLIIREPFIACGPKECKHFALTHYAAQPGGYYNGTRGDRNKLRHLISVKLGKIPTVENSIFHMAAWSGSACHDGKEWTYIGVDGPDSNALLKIKYGEAYTDTYHSYANNILRTQESACNCIGGNCYLMITDGSASGISECRFLKIREGRIIKEIFPTGRVKHTEECTCGFASNKTIECACRDNSYTAKRPFVKLNVETDTAEIRLMCTETYLDTPRPDDGSITGPCESNGDKGSGGIKGGFVHQRMTSKIGRWYSRTMSKTKRMGMGLYVKYDGDPWTDSDALALSGVMVSMEEPGWYSFGFEIKDKKCDVPCIGIEMVHDGGKGTWHSAATAIYCLMGSGQLLWDTVTGVDMAL

SEQ ID NO: 29962 - protein, 466 aa, synthetic construct; identical to SEQ ID NO: 29957
  REGION 1..466: note = neuraminidase__InfluenzaB__AHL91556

SEQ ID NO: 29963 - protein, 466 aa, synthetic construct; identical to SEQ ID NO: 29957
  REGION 1..466: note = neuraminidase__InfluenzaB__AHL91578

SEQ ID NO: 29964 - protein, 466 aa, synthetic construct; identical to SEQ ID NO: 28885
  REGION 1..466: note = neuraminidase__InfluenzaB__AHL91589

SEQ ID NO: 29965 - protein, 466 aa, synthetic construct
  REGION 1..466: note = neuraminidase__InfluenzaB__AHL91600
MLPSTIQTLTLFLTTGGVLLSLYVSASLSYLLYSDILLKFSPTEITAPTMPLDCANASNVQAVNRSATKGVTFLLPEPEWTYPRLSCPGSTFQKALLISPHRFGETKGNSAPLIIREPFIACGPKECKHFALTHYAAQPGGYYNGTRGDRNKLRHLISVKLGKIPTVENSIFHMAAWSGSACHDGKEWTYIGVDGPDSNALLKIKYGEAYTDTYHSYANNILRTQESACNCIGGNCYLMITDGSASGISECRFLKIREGRIIKEIFPTGRVKHTEECTCGFASNKTIECACRDNSYTAKRPFVKLNVETDTAEIRLMCTETYLDTPRPDDGSITGPCESNGDKGSGGIKGGFVHQRMASKIGRWYSRTMSKTKRMGMGLYVKYDGDPWTDSDALALSGVMVSMEEPGWYSFGFEIKDKKCDVPCIGIEMVHDGGKETWHSAATAIYCLMGSGQLLWDTVTGVDMAL

SEQ ID NO: 29966 - protein, 466 aa, synthetic construct; identical to SEQ ID NO: 29965
  REGION 1..466: note = neuraminidase__InfluenzaB__AHL91611

SEQ ID NO: 29967 - protein, 466 aa, synthetic construct; identical to SEQ ID NO: 29957
  REGION 1..466: note = neuraminidase__InfluenzaB__AHL91622

SEQ ID NO: 29968 - protein, 466 aa, synthetic construct; identical to SEQ ID NO: 29958
  REGION 1..466: note = neuraminidase__InfluenzaB__AHL91633

SEQ ID NO: 29969 - protein, 466 aa, synthetic construct; identical to SEQ ID NO: 29958
  REGION 1..466: note = neuraminidase__InfluenzaB__AHL91644

SEQ ID NO: 29970 - protein, 466 aa, synthetic construct
  REGION 1..466: note = neuraminidase__InfluenzaB__AHL91655
MLPSTIQTLTLFLTSGGVLLSLYVSASLSYLLYSDILLKFSPTEITAPTMPLDCANASNVQAVNRSATKEVTLLLPEPEWTYPRLSCPGSTFQKALLISPHRFGETKGNSAPLIIREPFIACGPKECKHFALTHYAAQPGGYYNGTRGDRNKLRHLISVKLGKIPTVENSIFHMAAWSGSACHDGKEWTYIGVDGPDSNALLKIKYGEAYTDTYHSYANNILRTQESACNCIGGNCYLMITDGSASGISECRFLKIREGRIIKEIFPTGRVKHTEECTCGFASNKTIECACRDNSYTAKRPFVKLNVETDTAEIRLMCTETYLDTPRPDDGSITGPCESNGDKGSGGIKGGFVHQRMASKIGRWYSRTMSKTKRMGMGLYVKYDGDPWTDSDALALSGVMVSMEEPGWYSFGFEIKDKKCDVPCIGIEMVHDGGKETWHSAATAIYCLMGSGQLLWDTVTGVDMAL

SEQ ID NO: 29971 - protein, 466 aa, synthetic construct; identical to SEQ ID NO: 29957
  REGION 1..466: note = neuraminidase__InfluenzaB__AHL91666

SEQ ID NO: 29972 - protein, 466 aa, synthetic construct; identical to SEQ ID NO: 29958
  REGION 1..466: note = neuraminidase__InfluenzaB__AHL91677

SEQ ID NO: 29973 - protein, 466 aa, synthetic construct; identical to SEQ ID NO: 29959
  REGION 1..466: note = neuraminidase__InfluenzaB__AHL91688

SEQ ID NO: 29974 - protein, 466 aa, synthetic construct; identical to SEQ ID NO: 28687
  REGION 1..466: note = neuraminidase__InfluenzaB__AHL91699

SEQ ID NO: 29975 - protein, 466 aa, synthetic construct
  REGION 1..466: note = neuraminidase__InfluenzaB__AHL91710
MLPSTIQTLTLFLTSGGVLLSLYVSASLSYLLYSDILLKFSPTEITAPTMPLDCANASNVQAVNHSATKGVTLLLPEPEWTYPRLSCPGSTFQKALLISPHRFGETKGNSAPLIIREPFIACGPKECKHFALTHYAAQPGGYYNGTRGDRNKLRHLISVKLGKIPTVENSIFHMAAWSGSACHDGKEWTYIGVDGPDSNALLKIKYGEAYTDTYHSYANNILRTQESACNCIGGNCYLMITDGSASGISECRFLKIREGRIIKEIFPTGRVKHTEECTCGFASNKTIECACRDNSYTAKRPFVKLNVETDTAEIRLMCTETYLDTPRPDDGSITGPCESNGDKGSGGIKGGFVHQRMASKIGRWYSRTMSKTKRMGMGLYVKYDGDPWTDSDALALSGVMVSMEEPGWYSFGFEIKDKKCDVPCIGIEMVHDGGKETWHSAATAIYCLMGSGQLLWDTVTGVDMAL

SEQ ID NO: 29976 - protein, 466 aa, synthetic construct; identical to SEQ ID NO: 28614
  REGION 1..466: note = neuraminidase__InfluenzaB__AHL91721

SEQ ID NO: 29977 - protein, 466 aa, synthetic construct; identical to SEQ ID NO: 28682
  REGION 1..466: note = neuraminidase__InfluenzaB__AHL91732

SEQ ID NO: 29978 - protein, 466 aa, synthetic construct; identical to SEQ ID NO: 28614
  REGION 1..466: note = neuraminidase__InfluenzaB__AHL91743

SEQ ID NO: 29979 - protein, 466 aa, synthetic construct
  REGION 1..466: note = neuraminidase__InfluenzaB__AHL91754
MLPSTIQTLTLLLTSGGVLLSLYVSASLSYLLYSDILLKFSPTEITAPTMPLDCANASNVQAVNRSATKGVTLLLPEPEWTYPRLSCPGSTFQKALLISPHRFGETKGNSAPLIIREPFIACGPKECKHFALTHYAAQPGGYYNGTRGDRNKLRHLISVKLGKIPTVENSIFHMAAWSGSACHDGKEWTYIGVDGPDSNALLKIKYGEAYTDTYHSYANNILRTQESACNCIGGNCYLMITDGSASGISECRFLKIREGRIIKEIFPTGRVKHTEECTCGFASNKTIECACRDNSYTAKRPFVKLNVETDTAEIRLMCTETYLDTPRPDDGSITGPCESNGDKGSGGIKGGFVHQRMASKIGRWYSRTMSKTKRMGMGLYVKYDGDPWTDSDALALSGVMVSMEEPGWYSFGFEIKDKKCDVPCIGIEMVHDGGKETWHSAATAIYCLMGSGQLLWDTVTGVDMAL

SEQ ID NO: 29980 - protein, 466 aa, synthetic construct; identical to SEQ ID NO: 28614
  REGION 1..466: note = neuraminidase__InfluenzaB__AHL91765

SEQ ID NO: 29981 - protein, 466 aa, synthetic construct
  REGION 1..466: note = neuraminidase__InfluenzaB__AHL91776
MLPSTIQTLTLFLTSGGVLLSLYVSASLSYLLYSDILLKFSPTEITAPTMPLDCANASNVQAVNRSATKGVTLLLPEPEWTYPRLSCPGSTFQKALLISPHRFGETKGNSAPLIIREPFIACGPKECKHFALTHYAAQPGGYYNGTRGDRNKLRHLISVKLGKIPTVETSIFHMAAWSGSACHDGKEWTYIGVDGPDNNALLKIKYGEAYTDTYHSYANNILRTQESACNCIGGNCYLMITDGSASGVSECRFLKIREGRIIKEIFPTGRVKHTEECTCGFASNKTIECACRDNSYTAKRPFVKLNVETDTAEIRLMCTETYLDTPRPDDGSITGPCESNGDKGSGGIKGGFVHQRMASKIGRWYSRTMSKTERMGMGLYVKYDGDPWADSDALALSGVMVSMEEPGWYSFGFEIKDKKCDVPCIGIEMVHDGGKETWHSAATAIYCLMGSGQLLWDTVTGVDMAL

SEQ ID NO: 29982 - protein, 466 aa, synthetic construct; identical to SEQ ID NO: 29981
  REGION 1..466: note = neuraminidase__InfluenzaB__AHL91787

SEQ ID NO: 29983 - protein, 466 aa, synthetic construct; identical to SEQ ID NO: 29981
  REGION 1..466: note = neuraminidase__InfluenzaB__AHL91798

SEQ ID NO: 29984 - protein, 466 aa, synthetic construct; identical to SEQ ID NO: 28618
  REGION 1..466: note = neuraminidase__InfluenzaB__AHL91809

SEQ ID NO: 29985 - protein, 466 aa, synthetic construct
  REGION 1..466: note = neuraminidase__InfluenzaB__AHL91820
MLPSTIQTLTLFLTSGGVLLSLYVSASLSYLLYSDILLKFSPTEITAPTMPLDCANASNVQAVNRSATKGVTLLLPEPEWTYPRLSCPGSTFQKALLISPHRFGETKGNSAPLIIREPFIACGPNECKHFALTHYAAQPGGYYNGTRGDRNKLRHLISVKLGKIPTVENSIFHMAAWSGSACHDGKEWTYIGVDGPDNNALLKIKYGEAYTDTYHSYANNILRTQESACNCIGGNCYLMVTDGSASGVSECRFLKIREGRIIKEIFPTGRVKHTEECTCGFASNKTIECACRDNSYTAKRPFVKLNVETDTAEIRLMCTETYLDTPRPDDGSITGPCESNGDKGSGGIKGGFVHQRMASKIGRWYSRTMSKTERMGMGLYVKYDGDPWADSDALALSGVMVSMEEPGWYSFGFEIKDKKCDVPCIGIEMVHDGGKETWHSAATAIYCLMGSGQLLWDTVTGVDMAL

SEQ ID NO: 29986 - protein, 466 aa, synthetic construct
  REGION 1..466: note = neuraminidase__InfluenzaB__AHL91831
MLPSTIQTLTLFLTSGGVLLSLYVSASLSYLLYSDILLKFSPTEITAPTMPLDCANASNVQAVNRSATKGVTLLLPEPEWTYPRLSCPGSTFQKALLISPHRFGETKGNSAPLIIREPFIACGPNECKHFALTHYAAQPGGYYNGTRGDRNKLRHLISVKLGKIPTVENSIFHMAAWSGSACHDGKEWTYIGVDGPDNNALLKIKYGEAYTDTYHSYANNILRTQESACNCIGGNCYLMITDGSASGVSECRFLKIREGRIIKEIFPTGRVKHTEECTCGFASNKTIECACRDNSYTAKRPFVKLNVETDTAEIRLMCTETYLDTPRPDDGSITGPCESNGDKGSGGIKGGFVHQRMTSKIGRWYSRTMSKTERMGMGLYVKYDGDPWADSDALALSGVMVSMEEPGWYSFGFEIKDKKCDVPCIGIEMVHDGGKETWHSAATAIYCLMGSGQLLWDTVTGVDMAL

SEQ ID NO: 29987 - protein, 466 aa, synthetic construct; identical to SEQ ID NO: 29131
  REGION 1..466: note = neuraminidase__InfluenzaB__AHL91842

SEQ ID NO: 29988 - protein, 466 aa, synthetic construct
  REGION 1..466: note = neuraminidase__InfluenzaB__AHL91853
MLPSTIQTLTLFLTSGGVLLSLYVSASLSYLLYSDILLKFSTTEITAPTMPSDCANASNVQAVNRSATKGVTLLLPEPEWTYPRLSCPGSTFQKALLISPHRFGETKGNSAPLIIREPFIACGPKECKHFALTHYAAQPGGYYNGTREDRNKLRHLISVKLGKIPTVENSIFHMAAWSGSACHDGKEWTYIGVDGPDSNALLKIKYGEAYTDTYHSYANNILRTQESACNCIGGNCYLMITDGSASGISECRFLKIREGRIIKEIFPTGRVKHTEECTCGFASNKTIECACRDNSYTAKRPFVKLNVETDTAEIRLMCTETYLDTPRPDDGSITGPCESNGNKGSGGIKGGFVHQRMASKIGRWYSRTMSKTKRMGMGLYVKYDGDPWTDSDALALSGVMVSMEEPGWYSFGFEIKDKKCDVPCIGIEMVHDGGKETWHSAATAIYCLMGSGQLLWDTVTGVDMAL

SEQ ID NO: 29989 - protein, 466 aa, synthetic construct; identical to SEQ ID NO: 29129
  REGION 1..466: note = neuraminidase__InfluenzaB__AHL91864

SEQ ID NO: 29990 - protein, 466 aa, synthetic construct; identical to SEQ ID NO: 29129
  REGION 1..466: note = neuraminidase__InfluenzaB__AHL91875

SEQ ID NO: 29991 - protein, 466 aa, synthetic construct; identical to SEQ ID NO: 28886
  REGION 1..466: note = neuraminidase__InfluenzaB__AHL91886

SEQ ID NO: 29992 - protein, 466 aa, synthetic construct; identical to SEQ ID NO: 28627
  REGION 1..466: note = neuraminidase__InfluenzaB__AHL91897

SEQ ID NO: 29993 - protein, 466 aa, synthetic construct; identical to SEQ ID NO: 28627
  REGION 1..466: note = neuraminidase__InfluenzaB__AHL91908

SEQ ID NO: 29994 - protein, 466 aa, synthetic construct
  REGION 1..466: note = neuraminidase__InfluenzaB__AHL91919
MLPSTIQTLTLFLTSGGVLLSLYVSASLSYLLYSDILLKFSQTEITAPIMPLDCANASNVQAVNRSATKGVTPLLPEPEWTYPRLSCPGSTFQKALLISPHRFGETKGNSAPLIIREPFIACGPKECKHFALTHYAAQPGGYYNGTREDRNKLRHLISVKLGKIPTVENSIFHMAAWSGSACHDGREWTYIGVDGPDSNALLKIKYGEAYTDTYHSYAKNILRTQESACNCIGGDCYLMITDGPASGISECRFLKIREGRIIKEIFPTGRVKHTEECTCGFASNKTIECACRDNSYTAKRPFVKLNVETDTAEIRLMCTETYLDTPRPNDGSITGPCESNGDKGSGGIKGGFVHQRMASKIGRWYSRTMSKTKRMGMGLYVKYDGDPWTDSEALALSGVMVSMEEPGWYSFGFEIKDKKCDVPCIGIEMVHDGGKTTWHSAATAIYCLMGSGQLLWDTVTGVDMAL

SEQ ID NO: 29995 - protein, 466 aa, synthetic construct; identical to SEQ ID NO: 29689
  REGION 1..466: note = neuraminidase__InfluenzaB__AHL91930

SEQ ID NO: 29996 - protein, 466 aa, synthetic construct; identical to SEQ ID NO: 28627
  REGION 1..466: note = neuraminidase__InfluenzaB__AHL91941

SEQ ID NO: 29997 - protein, 466 aa, synthetic construct; identical to SEQ ID NO: 28627
  REGION 1..466: note = neuraminidase__InfluenzaB__AHL91952

SEQ ID NO: 29998 - protein, 466 aa, synthetic construct; identical to SEQ ID NO: 28670
  REGION 1..466: note = neuraminidase__InfluenzaB__AHL91963

SEQ ID NO: 29999 - protein, 466 aa, synthetic construct
  REGION 1..466: note = neuraminidase__InfluenzaB__AHL91974
MLPSTIQTLTLFLTSGGVLLSLYVSASLSYLLYSDILLKFSPTEITTPTMPLDCANASNVQAVNRSATKGVTLLLPEPEWTYPRLSCPGSTFQKALLISPHRFGETKGNSAPLIIREPFIACGPNECKHFALTHYAAQPGGYYNGTRGDRNKLRHLISVKLGKIPTVENSIFHMAAWSGSACHDGKEWTYIGVDGPDNNALLKIKYGEAYTDTYHSYANNILRTQESACNCIGGNCYLMITDGSASGVSECRFLKIREGRIIKEIFPTGRVKHTEECTCGFASNKTIECACRDNSYTAKRPFVKLNVETDTAEIRLMCTDTYLDTPRPDDGSITGPCESNGDKGSGGIKGGFVHQRMASKIGRWYSRTMSKTERMGMGLYVKYDGDPWADSDALAFSGVMVSMKEPGWYSFGFEIKDKKCDVPCIGIEMVHDGGKETWHSAATAIYCLMGSGQLLWDTVTGVDMAL

SEQ ID NO: 30000 - protein, 466 aa, synthetic construct; identical to SEQ ID NO: 28670
  REGION 1..466: note = neuraminidase__InfluenzaB__AHL91985

SEQ ID NO: 30001 - protein, 466 aa, synthetic construct; identical to SEQ ID NO: 28627
  REGION 1..466: note = neuraminidase__InfluenzaB__AHL91995

SEQ ID NO: 30002 - protein, 466 aa, synthetic construct
  REGION 1..466: note = neuraminidase__InfluenzaB__AHL92006
MLPSTIQTLTLFLTSGGVLLSLYVSASLSYLLYSDILLKFSPTEITAPTMPLDCANASNVQAVNRSATKGVTLLLPEPEWTYPRLSCPGSTFQKALLISPHRFGETKGNSAPLIIREPFIACGPNECKHFALTHYAAQPGGYYNGTRGDRNKLRHLISVKLGKIPTVENSIFHMAAWSGSACHDGKEWTYIGVDGPDNNALLKIKYGEAYTDTYHSYANKILRTQESACNCIGGNCYLMITDGSASGVSECRFLKIREGRIIKEIFPTGRVKHTEECTCGFASNKTIECACRDNSYTAKRPFVKLNVETDTAEIRLMCTDTYLDTPRPDDGSITGPCESNGDKGSGGIKGGFVHQRMASKIGRWYSRTMSKTERMGMGLYVKYDGDPWADSDALAFSGVMVSMKEPGWYSFGFEIKDKKCDVPCIGVEMVHDGGKETWHSAATAIYCLMGSGQLLWDTVTGVDMAL

SEQ ID NO: 30003 - protein, 466 aa, synthetic construct; identical to SEQ ID NO: 28635
  REGION 1..466: note = neuraminidase__InfluenzaB__AHL92017

SEQ ID NO: 30004 - protein, 466 aa, synthetic construct; identical to SEQ ID NO: 28635
  REGION 1..466: note = neuraminidase__InfluenzaB__AHL92028

SEQ ID NO: 30005 - protein, 466 aa, synthetic construct
  REGION 1..466: note = neuraminidase__InfluenzaB__AHL92039
MLPSTIQTLTLFLTSGGVLLSLYVSASLSYLLYSDILLKFSPTEITAPTMPLDCANASNVHAVNRSATKGVTLLLPEPEWIYPRLSCPGSTFQKALLISPHRFGETKGNSAPLIIREPFIACGPNECKHFALTHYAAQPGGYYNGTRGDRNKLRHLISVKLGKIPTVENSIFHMAAWSGSACHDGKEWTYIGVDGPDNNALLKIKYGEAYTDTYHSYANNILRTQESACNCIGGNCYLMITDGSASGVSECRFLKIREGRIIKEIFPTGRVKHTEECTCGFASNKTIECACRDNSYTAKRPFVKLNVETDTAEIRLMCTDTYLDTPRPDDGSITGPCESNGDKGSGGIKGGFVHQRMASKIGRWYSRTMSKTERMGMGLYVKYNGDPWADSDALAFSGVMVSMKEPGWYSFGFEIKDKKCDVPCIGIEMVHDGGKETWHSAATAIYCLMGSGQLLWDTVTGVDMAL

SEQ ID NO: 30006 - protein, 466 aa, synthetic construct; identical to SEQ ID NO: 28635
  REGION 1..466: note = neuraminidase__InfluenzaB__AHL92050

SEQ ID NO: 30007 - protein, 466 aa, synthetic construct
  REGION 1..466: note = neuraminidase__InfluenzaB__AHL92061
MLPSTTQTLTLFLTSGGVLLSLYVSASLSYLLYSDILLKFSPTEITAPTMPLDCANASNVQAVNRSATKGVTLLLPEPEWTYPRLSCPGSTFQKALLISPHRFGETKGNSAPLIIREPFIACGPNECKHFALTHYAAQPGGYYNGTRGDRNKLRHLISVKLGKIPTVENSIFHMAAWSGSACHDGKEWTYIGVDGPDNNALLKIKYGEAYTDTYHSYANKILRTQESACNCIGGNCYLMITDGSASGVSECRFLKIREGRIIKEIFPTGRVKHTEECTCGFASNKTIECACRDNSYTAKRPFVKLNVETDTAEIRLMCTDTYLDTPRPDDGSITGPCESNGDKGSGGIKGGFVHQRMASKIGRWYSRTMSKTERMGMGLYVKYDGDPWADSDALAFSGVMVSMKEPGWYSFGFEIKDKKCDVPCIGIEMVHDGGKETWHSAATAIYCLMGSGQLLWDTVTGVDMAL

SEQ ID NO: 30008 - protein, 466 aa, synthetic construct
  REGION 1..466: note = neuraminidase__InfluenzaB__AHL92072
MLPSTIQTLTLFLTSGGVLLSLYVSASLSYLLYSDILLKFSPTEITAPTMPLDCANASNVQAVNHSATKGVTLLLPEPEWTYPRLSCPGSTFQKALLISPHRFGETKGNSAPLIIREPFIACGPNECKHFALTHYAAQPGGYYNGTRGDRNKLRHLISVKLGKIPTVENSIFHMAAWSGSACHDGKEWTYIGVDGPDNNALLKIKYGEAYTDTYHSYANKILRTQESACNCIGGNCYLMITDGSASGVSECRFLKIREGRIIKEIFPTGRVKHTEECTCGFASNKTIECACRDNSYTAKRPFVKLNVETDTAEIRLMCTDTYLDTPRPDDGSITGPCESNGDKGSGGIKGGFVHQRMASKIGRWYSRTMSKTERMGMGLYVKYDGDPWADSDALAFSGVMVSMKEPGWYSFGFEIKDKKCDVPCIGIEMVHDGGKETWHSAATAIYCLMGSGQLLWDTVTGVDMAL

SEQ ID NO: 30009 - protein, 466 aa, synthetic construct; identical to SEQ ID NO: 30008
  REGION 1..466: note = neuraminidase__InfluenzaB__AHL92083

SEQ ID NO: 30010 - protein, 466 aa, synthetic construct; identical to SEQ ID NO: 30008
  REGION 1..466: note = neuraminidase__InfluenzaB__AHL92094

SEQ ID NO: 30011 - protein, 466 aa, synthetic construct
  REGION 1..466: note = neuraminidase__InfluenzaB__AHL92105
MLPSTIQTLTLFLTSGGVLLSLYVSASLSYLLYSDILLKFSPTEITAPTMPLDCANASNVHAVNRSATKGVTLLLPEPEWTYPRLSCPGSTFQKALLISPHRFGETKGNSAPLIIREPFIACGPNECKHFALTHYAAQPGGYYNGTRGDRNKLRHLISVKLGKIPTVENSIFHMAAWSGSACHDGKEWTYIGVDGPDNNALLKIKYGEAYTDTYHSYANNILRTQESACNCIGGNCYLMITDGSASGVSECRFLKIREGRIIKEIFPTGRVKHTEECTCGFASNKTIECACRDNSYTAKRPFVKLNVETDTAEIRLMCTDTYLDTPRPDDGSITGPCESNGDKGGGGIKGGFVHQRMASKIGRWYSRTMSKTERMGMGLYVKYDGDPWADSDALAFSGVMVSLKEPGWYSFGFEIKDKKCDVPCIGIEMVHDGGKETWHSAATAIYCLMGSGQLLWDTVTGVDMAL

SEQ ID NO: 30012 - protein, 466 aa, synthetic construct; identical to SEQ ID NO: 28788
  REGION 1..466: note = neuraminidase__InfluenzaB__AHL92116

SEQ ID NO: 30013 - protein, 466 aa, synthetic construct; identical to SEQ ID NO: 30008
  REGION 1..466: note = neuraminidase__InfluenzaB__AHL92127

SEQ ID NO: 30014 - protein, 466 aa, synthetic construct; identical to SEQ ID NO: 30008
  REGION 1..466: note = neuraminidase__InfluenzaB__AHL92138

SEQ ID NO: 30015 - protein, 466 aa, synthetic construct; identical to SEQ ID NO: 30008
  REGION 1..466: note = neuraminidase__InfluenzaB__AHL92149

SEQ ID NO: 30016 - protein, 466 aa, synthetic construct
  REGION 1..466: note = neuraminidase__InfluenzaB__AHL92171
MLPSTIQTLTLFLTSGGVLLSLYVSASLSYLLYSDILLKFSPTEITAPTMPLDCANASNVQAVNHSATKGVTLLLPEPEWTYPRLSCPGSTFQKALLVSPHRFGETKGNSAPLIIREPFIACGPNECKHFALTHYAAQPGGYYNGTRGDRNKLRHLISVKLGKIPTVENSIFHMAAWSGSACHDGKEWTYIGVDGPDNNALLKIKYGEAYTDTYHSYANKILRTQESACNCIGGNCYLMITDGSASGVSECRFLKIREGRIIKEIFPTGRVKHTEECTCGFASNKTIECACRDNSYTAKRPFVKLNVETDTAEIRLMCTDTYLDTPRPDDGSITGPCESNGDKGSGGIKGGFVHQRMASKIGRWYSRTMSKTERMGMGLYVKYDGDPWADSDALAFSGVMVSMKEPGWYSFGFEIKDKKCDVPCIGIEMVHDGGKETWHSAATAIYCLMGSGQLLWDTVTGVDMAL

SEQ ID NO: 30017 - protein, 466 aa, synthetic construct
  REGION 1..466: note = neuraminidase__InfluenzaB__AHL92182
MLPSTIQTLTLFLTSGGVLLSLYVSASLSYLLYSDILLKFSPTEITAPTMPLDCANASNVHAVNRSATKGVTLLLPEPEWAYPRLSCPGSTFQKALLISPHRFGETKGNSAPLIIREPFIACGPNECKHFALTHYAAQPGGYYSGTRGDRNKLRHLISVKLGKIPTVENSIFHMAAWSGSACHDGKEWTYIGVDGPDNNALLKIKYGEAYTDTYHSYANNILRTQESACNCIGGNCYLMITDGSASGVSECRFLKIREGRIIKEIFPTGRVKHTEECTCGFASNKTIECACRDNSYTAKRPFVKLNVETDTAEIRLMCTDTYLDTPRPDDGSITGPCESNGDKGSGGIKGGFVHQRMASKIGRWYSRTMSKTERMGMGLYVKYDGDPWADSDALAFSGVMVSMKEPGWYSFGFEIKDKKCDVPCIGIEMVHDGGKETWHSAATAIYCLMGSGQLLWDTVTGVDMAL

SEQ ID NO: 30018 - protein, 466 aa, synthetic construct; identical to SEQ ID NO: 30017
  REGION 1..466: note = neuraminidase__InfluenzaB__AHL92193

SEQ ID NO: 30019 - protein, 466 aa, synthetic construct; identical to SEQ ID NO: 28788
  REGION 1..466: note = neuraminidase__InfluenzaB__AHL92204

SEQ ID NO: 30020 - protein, 466 aa, synthetic construct
  REGION 1..466: note = neuraminidase__InfluenzaB__AHL92215
MLPSTIQTLTLFLTSGGVLLSLYVSASLSYLLYSDILLKFSPTEITAPTMPLDCANASNVQAVNHSATKGVTLLLPEPEWTYPRLSCPGSTFQKALLISPHRFGETKGNSAPLIIREPFIACGPNECKHFALTHYAAQPGGYYNGTRGDRNKLRHLISVKLGKIPTVENSIFHMAAWSGSACHDGKEWTYIGVDGPDNNALLKIKYGEAYTDTYHSYANKILRTQESACNCIGGNCYLMITDGSASGVSECRFLKIREGRIIKEIFPKGRVKHTEECTCGFASNKTIECACRDNSYTAKRPFVKLNVETDTAEIRLMCTDTYLDTPRPDDGSITGPCESNGDKGSGGIKGGFVHQRMASKIGRWYSRTMSKTERMGMGLYVKYDGDPWADSDALAFSGVMVSMKEPGWYSFGFEIKDKKCDVPCIGIEMVHDGGKETWHSAATAIYCLMGSGQLLWDTVTGVDMAL

SEQ ID NO: 30021 - protein, 466 aa, synthetic construct; identical to SEQ ID NO: 30008
  REGION 1..466: note = neuraminidase__InfluenzaB__AHL92226

SEQ ID NO: 30022 - protein, 466 aa, synthetic construct; identical to SEQ ID NO: 28788
  REGION 1..466: note = neuraminidase__InfluenzaB__AHL92237

SEQ ID NO: 30023 - protein, 466 aa, synthetic construct; identical to SEQ ID NO: 30008
  REGION 1..466: note = neuraminidase__InfluenzaB__AHL92248

SEQ ID NO: 30024 - protein, 466 aa, synthetic construct
  REGION 1..466: note = neuraminidase__InfluenzaB__AHL92259
MLPSTIQTLTLFLTSGGVLLSLYVSASLSYLLYSDILLKFSPTEITASTMPLDCANASNVQAVNRSATKGVTLLLPEPEWTYPRLSCPGSTFQKALLISPHRFGETKGNSAPLIIREPFIACGPNECKHFALTHYAAQPGGYYNGTRGDRNKLRHLISVKLGKIPTVENSIFHMAAWSGSACHDGKEWTYIGVDGPDNDALLKIKYGEAYTDTYHSYANKILRTQESACNCIGGNCYLMITDGSASGVSECRFLKIREGRIIKEIFPTGRVKHTEECTCGFASNKTIECACRDNSYTAKRPFVKLNVETDTAEIRLMCTDTYLDTPRPDDGSITGPCESNGDKGSGGIKGGFVHQRMTSKIGRWYSRTMSKTERMGMGLYVKYDGDPWADSDALAFSGVMVSMKEPGWYSFGFEIKDKKCDVPCIGIEMVHDGGKETWHSAATAIYCLMGSGQLLWDTVTGVDMAL

SEQ ID NO: 30025 - protein, 466 aa, synthetic construct; identical to SEQ ID NO: 30008
  REGION 1..466: note = neuraminidase__InfluenzaB__AHL92270

SEQ ID NO: 30026 - protein, 466 aa, synthetic construct
  REGION 1..466: note = neuraminidase__InfluenzaB__AHL92281
MLPSTIQTLTLFLTSGGVLLSLYVSASLSYLLYSDILLKFSPTEITAPTMPLDCANASNVQAANHSATKGVTLLLPEPEWTYPRLSCPGSTFQKALLISPHRFGETKGNSAPLIIREPFIACGPNECKHFALTHYAAQPGGYYNGTRGDRNKLRHLISVKLGKIPTVENSIFHMAAWSGSACHDGKEWTYIGVDGPDNNALLKIKYGEAYTDTYHSYANKILRTQESACNCIGGNCYLMITDGSASGVSECRFLKIREGRIIKEIFPTGRVKHTEECTCGFASNKTIECACRDNSYTAKRPFVKLNVETDTAEIRLMCTDTYLDTPRPDDGSITGPCESNGDKGSGGIKGGFVHQRMASKIGRWYSRTMSKTERMGMGLYVKYDGDPWADSDALAFSGVMVSMKEPGWYSFGFEIKDKKCDVPCIGIEMVHDGGKETWHSAATAIYCLMGSGQLLWDTVTGVDMAL

SEQ ID NO: 30027 - protein, 466 aa, synthetic construct
  REGION 1..466: note = neuraminidase__InfluenzaB__AHL92303
MLPSTIQTLTLFLTSGGVLLSLYVSASLSYLLYSDILLKFSPTEITAPTMPLDCANASNVHAVNRSATKGVTFLLPEPEWTYPRLSCPGSTFQKALLISPHRFGETKGNSAPLIIREPFIACGPNECKHFALTHYAAQPGGYYNGTRGDRNKLRHLISVKLGKIPTVENSIFHMAAWSGSACHDGKEWTYIGVDGPDNNALLKIKYGEAYTDTYHSYANNILRTQESACNCIGGNCYLMITDGSASGVSECRFLKIREGRIIKEIFPTGRVKHTEECTCGFASNKTIECACRDNSYTAKRPFVKLNVETDTAEIRLMCTDTYLDTPRPDDGSITGPCESNGNKGSGGIKGGFVHQRMASKIGRWYSRTMSKTERMGMGLYVKYDGDPWADSDALAFSGVMVSMKEPGWYSFGFEIKDKKCDVPCIGIEMVHDGGKETWHSAATAIYCLMGSGQLLWDTVTGVDMAL

SEQ ID NO: 30028 - protein, 466 aa, synthetic construct
  REGION 1..466: note = neuraminidase__InfluenzaB__AHL92314
MLPSTIQTLTLFLTSGGVLLSLYVSASLSYLLYSDILLKFSQTKITAPIMPLDCANASNVQAVNRSAAKGVTLLLPEPEWTYPRLSCPGSTFQKALLISPHRFGETKGNSAPLIIREPFIACGPTECKHFALTHYAAQPGGYYNGTREDRNKLRHLISVKLGKIPTVENSIFHMAAWSGSACHDGKEWTYVGVDGPDSNALLKIKYGEAYTDTYHSYAKNILRTQESACNCIGGDCYLMITDGPASGISECRFLKIREGRIIKEIFPTGRVKHTEECTCGFASNKTIECACRDNSYTAKRPFVKLNVETDTAEIRLMCTETYLDTPRPNDGSITGPCESDGDKGSGGIKGGFVHQRMASKIGRWYSRTMSKTKRMGMGLYVKYDGDPWTDSEALALSGVMVSMDEPGWYSFGFEIKDKKCDVPCIGIEMVHDGGKTTWHSAATAIYCLMGSGQLLWDTVTGVDMAL

SEQ ID NO: 30029 - protein, 466 aa, synthetic construct
  REGION 1..466: note = neuraminidase__InfluenzaB__AHL92325
MLPSTIQTLTLFLTSGGVLLSLYVSASLSYLLYSDILLKFSQTEITAPIMPLDCANASNVQAVNRSAAKGVTLLLPEPEWTYPRLSCPGSTFQKALLISPHRFGETKGNSAPLIIREPFIACGPTECKHFALTHYAAQPGGYYNGTREDRNKLRHLISVKLGKIPTVENSIFHMAAWSGSACHDGKEWTYIGVDGPDSNALLKIKYGEAYTDTYHSYAKNILRTQESACNCIGGDCYLMITDGPASGISECRFLKIREGRIIKEIFPTGRVKHTEECTCGFASNKTIECACRDNSYTAKRPFVKLNVETDTAEIRLMCTETYLDTPRPNDGSITGPCESDGDKGSGGIKGGFVHQRMASKIGRWYSRTMSKTKRMGMGLYVKYDGDPWTDSEALALSGVMVSMGEPGWYSFGFEIKDKKCDVPCIGIEMVHDGGKTTWHSAATAIYCLMGSGQLLWDTVTGVDMAL

SEQ ID NO: 30030 - protein, 466 aa, synthetic construct; identical to SEQ ID NO: 28788
  REGION 1..466: note = neuraminidase__InfluenzaB__AHL92336

SEQ ID NO: 30031 - protein, 466 aa, synthetic construct
  REGION 1..466: note = neuraminidase__InfluenzaB__AHL92358
MLPSTIQTLTLFLTSGGVLLSLYVSASLSYLLYSDILLKFSQTEITAPIMPLDCANASNVQAVNRSAAKGVTLLLPEPEWTYPRLSCPGSTFQKALLISPHRFGETKGNSAPLIIREPFIACGPKECKHFALTHYAAQPGGYYNGTREDRNKLRHLISVKLGKIPTVENSIFHMAAWSGSACHDGKEWTYVGVDGPDSNALLKIKYGEAYTDTYHSYAKNILRTQESACNCIGGDCYLMITDGPASGISECRFLKIREGRIIKEIFPTGRVKHTEECTCGFASNKTIECACRDNSYTAKRPFVKLNVETDTAEIRLMCTETYLDTPRPNDGSITGPCESDGDKGSGGIKGGFVHQRMASKIGRWYSRTMSKTKRMGMGLYVKYDGDPWTDSEALALSGVMVSMEEPGWYSFGFEIKDKKCDVPCIGIEMVHDGGKTTWHSAATAIYCLMGSGQLLWDTVTGVDMAL

SEQ ID NO: 30032 - protein, 466 aa, synthetic construct; identical to SEQ ID NO: 30031
  REGION 1..466: note = neuraminidase__InfluenzaB__AHL92369

SEQ ID NO: 30033 - protein, 466 aa, synthetic construct
  REGION 1..466: note = neuraminidase__InfluenzaB__AHL92380
MLPSTIQTLTLFLTSGGVLLSLYVSASLSYLLYSDILLKFSRTEITAPIMPLDCANASNVQAVNRSATKGVKLLLPEPEWTYPRLSCPGSTFQKALLISPHRFGETKGNSAPLIIREPFIACGPKECKHFALTHYAAQPGGYYNGTREDRNKLRHLISVKLGKIPTVENSIFHMAAWSGSACHDGREWTYIGVDGPDSNALLKIKYGEAYTDTYHSYAKNILRTQESACNCIGGDCYLMITDGPASGISECRFLKIREGRIIKEIFPTGRVKHTEECTCGFASNKTIECACRDNSYTAKRPFVKLNVETDTAEIRLMCTETYLDTPRPNDGSITGPCESNGDKGSGGIKGGFVHQRMASKIGRWYSRTMSKTKRMGMGLYVKYDGDPWTDSEALALSGVMVSMEEPGWYSFGFEIKDKKCDVPCIGIEMVHDGGKTTWHSAATAIYCLMGSGQLLWDTVTGVNMTL

SEQ ID NO: 30034 - protein, 466 aa, synthetic construct
  REGION 1..466: note = neuraminidase__InfluenzaB__AHL92391
MLPSTIQTLTLFLTSGGVLLSLYVSASLSYLLYSDILLKFSRTEITAPIMPLDCANASNVQAVNRSATKGVTLLLPEPEWTYPRLSCPGSTFQKALLISPHRFGETKGNSAPLIIREPFIACGPKECKHFALTHYAAQPGGYYNGTREDRSKLRHLISVKLGKIPTVENSIFHMAAWSGSACHDGREWTYIGVDGPDSNALLKIKYGEAYTDTYHSYAKNILRTQESACNCIGGDCYLMITDGPASGISECRFLKIREGRIIKEIFPTGRVKHTEECTCGFASNKTIECACRDNSYTAKRPFVKLNVETDTAEIRLMCTETYLDTPRPNDGSITGPCESNGDKGSGGIKGGFVHQRMASKIGRWYSRTMSKTKRMGMGLYVKYDGDPWTDSEALALSGVMVSMEEPGWYSFGFEIKDKKCDVPCIGIEMVHDGGKTTWHSAATAIYCLMGSGQLLWDTVTGVNMTL

SEQ ID NO: 30035 - protein, 466 aa, synthetic construct; identical to SEQ ID NO: 28817
  REGION 1..466: note = neuraminidase__InfluenzaB__AHL92402

SEQ ID NO: 30036 - protein, 466 aa, synthetic construct; identical to SEQ ID NO: 28817
  REGION 1..466: note = neuraminidase__InfluenzaB__AHL92413

SEQ ID NO: 30037 - protein, 466 aa, synthetic construct; identical to SEQ ID NO: 28817
  REGION 1..466: note = neuraminidase__InfluenzaB__AHL92424

SEQ ID NO: 30038 - protein, 466 aa, synthetic construct
  REGION 1..466: note = neuraminidase__InfluenzaB__AHL92435
MLPSTIQTLTLFLTSGGVLLSLYVSASLSYLLYSDILLKFSQTEITAPIMPLDCANASNVQAVNRSAAKGVTLLLPEPEWTYPRLSCPGSTFQKALLISPHRFGETKGNSAPLIIREPFIACGPTECKHFALTHYAAQPGGYYNGTREDRNKLRHLISVKLGKIPTVENSIFHMAAWSGSACHDGKEWTYIGVDGPDSNALLKIKYGEAYTDTYHSYAKNILRTQESACNCIGGDCYLMITDGPASGISECRFLKIREGRIIKEIFPTGRVKHTEECTCGFASNKTIECACRDNSYTAKRPFVKLNVETDTAEIRLMCTETYLDTPRPNDGSITGPCESDGDKGSGGIKGGFVHQRMASKIGRWYSRTMSKTKRMGMGLYVKYDGDPWTDSEALALSGVMISMEEPGWYSFGFEIKDKKCDVPCIGIEMVHDGGKTTWHSAATAIYCLMGSGQLLWDTVTGVDMAL

SEQ ID NO: 30039 - protein, 466 aa, synthetic construct; identical to SEQ ID NO: 28817
  REGION 1..466: note = neuraminidase__InfluenzaB__AHL92446

SEQ ID NO: 30040 - protein, 466 aa, synthetic construct; identical to SEQ ID NO: 28817
  REGION 1..466: note = neuraminidase__InfluenzaB__AHL92457

SEQ ID NO: 30041 - protein, 466 aa, synthetic construct; identical to SEQ ID NO: 28817
  REGION 1..466: note = neuraminidase__InfluenzaB__AHL92468

SEQ ID NO: 30042 - protein, 466 aa, synthetic construct; identical to SEQ ID NO: 28817
  REGION 1..466: note = neuraminidase__InfluenzaB__AHL92479

SEQ ID NO: 30043 - protein, 466 aa, synthetic construct; identical to SEQ ID NO: 28788
  REGION 1..466: note = neuraminidase__InfluenzaB__AHL92490

SEQ ID NO: 30044 - protein, 466 aa, synthetic construct; identical to SEQ ID NO: 28817
  REGION 1..466: note = neuraminidase__InfluenzaB__AHL92501

SEQ ID NO: 30045 - protein, 466 aa, synthetic construct
  REGION 1..466: note = neuraminidase__InfluenzaB__AHL92512
MLPSTIQTLTLFLTSGGVLLSLYVSASLSYLLYSDILLKFSRTEITAPIMPLDCANASNVQAVNRSATKGVTLLLPEPEWTYPRLSCPGSTFQKALLISPHRFGETKGNSAPLIIREPFIACGPKECKHFALTHYAAQPGGYYNGTREDRNKLRHLISVKLGKIPTVENSIFHMVAWSGSACHDGREWTYIGVDGPDSNALLKIKYGEAYTDTYHSYAKNILRTQESACNCIGGDCYLMITDGPASGISECRFLKIREGRIIKEIFPTGRVKHTEECTCGFASNKTIECACRDNSYTAKRPFVKLNVETDTAEIRLMCTETYLDTPRPNDGSITGPCESNGDKGSGGIKGGFVHQRMASKIGRWYSRTMSKTKRMGMGLYVKYDGDPWTDSEALALSGVMVSMEEPGWYSFGFEIKDKKCDVPCIGIEMVHDGGKTTWHSAATAIYCLMGSGQLLWDTVTGVNMTL

SEQ ID NO: 30046 - protein, 466 aa, synthetic construct; identical to SEQ ID NO: 28817
  REGION 1..466: note = neuraminidase__InfluenzaB__AHL92523

SEQ ID NO: 30047 - protein, 466 aa, synthetic construct; identical to SEQ ID NO: 28817
  REGION 1..466: note = neuraminidase__InfluenzaB__AHL92534

SEQ ID NO: 30048 - protein, 466 aa, synthetic construct; identical to SEQ ID NO: 28788
  REGION 1..466: note = neuraminidase__InfluenzaB__AHL92545

SEQ ID NO: 30049 - protein, 466 aa, synthetic construct; identical to SEQ ID NO: 28817
  REGION 1..466: note = neuraminidase__InfluenzaB__AHL92556

SEQ ID NO: 30050 - protein, 466 aa, synthetic construct; identical to SEQ ID NO: 28817
  REGION 1..466: note = neuraminidase__InfluenzaB__AHL92567

SEQ ID NO: 30051 - protein, 466 aa, synthetic construct; identical to SEQ ID NO: 28817
  REGION 1..466: note = neuraminidase__InfluenzaB__AHL92578

SEQ ID NO: 30052 - protein, 466 aa, synthetic construct; identical to SEQ ID NO: 28788
  REGION 1..466: note = neuraminidase__InfluenzaB__AHL92589

SEQ ID NO: 30053 - protein, 466 aa, synthetic construct; identical to SEQ ID NO: 28817
  REGION 1..466: note = neuraminidase__InfluenzaB__AHL92600

SEQ ID NO: 30054 - protein, 466 aa, synthetic construct; identical to SEQ ID NO: 29844
  REGION 1..466: note = neuraminidase__InfluenzaB__AHL92611

SEQ ID NO: 30055 - protein, 466 aa, synthetic construct
  REGION 1..466: note = neuraminidase__InfluenzaB__AHL92622
MLPSTIQTLTLFLTSGGVLLSLYVSASLSYLLYSDILLKFSRTEITAPIMPLDCANASNVQAVNRSATKGVTFLLPEPEWTYPRLSCPGSTFQKALLISPHRFGETKGNSAPLIIREPFIACGPKECKHFALTHYAAQPGGYYNGTREDRNKLRHLISVKLGKIPTVENSIFHMAAWSGSACHDGREWTYIGVDGPDSNALLKIKYGEAYTDTYHSYAKNILRTQESACNCIGGDCYLMITDGPASGISECRFLKIREGRIIKEIFPTGRVKHTEECTCGFASNKTIECACRDNSYTAKRPFVKLNVETDTAEIRLMCTETYLDTPRPNDGSITGPCESNGDKGSGGIKGGFVHQRMASKIGRWYSRTMSKTKRMGMGLYVKYDGDPWTDSEALALSGVMVSMEEPGWYSFGFEIKDKKCDVPCIGIEMVHDGGKTTWHSAATAIYCLMGSGQLLWDTVTGVNMTL

SEQ ID NO: 30056 - protein, 466 aa, synthetic construct
  REGION 1..466: note = neuraminidase__InfluenzaB__AHL92633
MLPSTIQTLTLFLTSGGVLLSLYVSASLSYLLYSDILLKFSRTEITAPIMPLDCANASNVQAVNRSATKGVTFLLPEPEWTYPRLSCPGSTFQKALLISPHRFGETKGNSAPLIIREPFIACGPKECKHFALTHYAAQPGGYYNGTREDRNKLRHLISVKLGKIPIVENSIFHMAAWSGSACHDGREWTYIGVDGPDSNALLKIKYGEAYTDTYHSYAKNILRTQESACNCIGGDCYLMITDGPASGISECRFLKIREGRIIKEIFPTGRVKHTEECTCGFASNKTIECACRDNSYTAKRPFVKLNVETDTAEIRLMCTETYLDTPRPNDGSITGPCESNGDKGSGGIKGGFVHQRMASKIGRWYSRTMSKTKRMGMGLYVKYDGDPWTDSEALALSGVMVSMEEPGWYSFGFEIKDKKCDVPCIGIEMVHDGGKTTWHSAATAIYCLMGSGQLLWDTVTGVNMTL

SEQ ID NO: 30057 - protein, 466 aa, synthetic construct; identical to SEQ ID NO: 28788
  REGION 1..466: note = neuraminidase__InfluenzaB__AHL92644

SEQ ID NO: 30058 - protein, 466 aa, synthetic construct; identical to SEQ ID NO: 28788
  REGION 1..466: note = neuraminidase__InfluenzaB__AHL92655

SEQ ID NO: 30059 - protein, 466 aa, synthetic construct; identical to SEQ ID NO: 28817
  REGION 1..466: note = neuraminidase__InfluenzaB__AHL92666

SEQ ID NO: 30060 - protein, 466 aa, synthetic construct; identical to SEQ ID NO: 28817
  REGION 1..466: note = neuraminidase__InfluenzaB__AHL92677

SEQ ID NO: 30061 - protein, 466 aa, synthetic construct; identical to SEQ ID NO: 28788
  REGION 1..466: note = neuraminidase__InfluenzaB__AHL92688

SEQ ID NO: 30062 - protein, 466 aa, synthetic construct; identical to SEQ ID NO: 28817
  REGION 1..466: note = neuraminidase__InfluenzaB__AHL92699

SEQ ID NO: 30063 - protein, 466 aa, synthetic construct; identical to SEQ ID NO: 28817
  REGION 1..466: note = neuraminidase__InfluenzaB__AHL92710

SEQ ID NO: 30064 - protein, 466 aa, synthetic construct; identical to SEQ ID NO: 28817
  REGION 1..466: note = neuraminidase__InfluenzaB__AHL92721

SEQ ID NO: 30065 - protein, 466 aa, synthetic construct; identical to SEQ ID NO: 28817
  REGION 1..466: note = neuraminidase__InfluenzaB__AHL92732

SEQ ID NO: 30066 - protein, 466 aa, synthetic construct; identical to SEQ ID NO: 28817
  REGION 1..466: note = neuraminidase__InfluenzaB__AHL92743

SEQ ID NO: 30067 - protein, 466 aa, synthetic construct; identical to SEQ ID NO: 28817
  REGION 1..466: note = neuraminidase__InfluenzaB__AHL92754

SEQ ID NO: 30068 - protein, 466 aa, synthetic construct; identical to SEQ ID NO: 28817
  REGION 1..466: note = neuraminidase__InfluenzaB__AHL92765

SEQ ID NO: 30069 - protein, 466 aa, synthetic construct; identical to SEQ ID NO: 28817
  REGION 1..466: note = neuraminidase__InfluenzaB__AHL92776

SEQ ID NO: 30070 - protein, 466 aa, synthetic construct; identical to SEQ ID NO: 28817
  REGION 1..466: note = neuraminidase__InfluenzaB__AHL92787

SEQ ID NO: 30071 - protein, 466 aa, synthetic construct; identical to SEQ ID NO: 28817
  REGION 1..466: note = neuraminidase__InfluenzaB__AHL92798

SEQ ID NO: 30072 - protein, 466 aa, synthetic construct
  REGION 1..466: note = neuraminidase__InfluenzaB__AHL92809
MLPSTIQTLTLFLTSGGVLLSLYVSASLSYLLYSDILLKFSRTEITAPIMPLDCANASNVQAVNRSAIKGVTLLLPEPEWTYPRLSCPGSTFQKALLISPHRFGETKGNSAPLIIREPFIACGPKECKHFALTHYAAQPGGYYNGTREDRNKLRHLISVKLGKIPTVENSIFHMAAWSGSACHDGREWTYIGVDGPDSNALLKIKYGEAYTDTYHSYAKNILRTQESACNCIGGDCYLMITDGPASGISECRFLKIREGRIIKEIFPTGRVKHTEECTCGFASNKTIECACRDNSYTAKRPFVKLNVETDTAEIRLMCTETYLDTPRPNDGSITGPCESNGDKGSGGIKGGFVHQRMASKIGRWYSRTMSKTKRMGMGLYVKYDGDPWTDSEALALSGVMVSMEEPGWYSFGFEIKDKKCDVPCIGIEMVHDGGKTTWHSAATAIYCLMGSGQLLWDTVTGVNMTL

SEQ ID NO: 30073 - protein, 466 aa, synthetic construct
  REGION 1..466: note = neuraminidase__InfluenzaB__AHL92820
MLPSTIQTLTLFLTSGGVLLSLYVSASLSYLLYSDILLKFSRTEITAPIMPLDCANASNVQAVNRSATKGVTLLLPEPEWTYPRLSCPGSTFQKALLISPHRFGETKGNSAPLIIREPFIACGPKECKHFALTHYAAQPGGYYNGTREDRNKLRHLISVKLGKIPTVENSIFHMAAWSGSACHDGREWTYIGVDGPDSNALLKIKYGEAYTDTYHSYAKNILRTQESACNCIGGDCYLMITDGPASGISECRFLKIREGRIIKEIFPTGRVKHTEECTCGFASNKTIECACRDNSYTAKRPFVKLNVETDTAEIRLMCTETYLDTPRPNDGSITGPCESNGDKGSGGIKGGFVHQRMASKIGRWYSRTMSKTKRMGMGLYVKYDGDPWTDSEALALSGVMVSMEEPGWYSFGFEIKDKKCDVPCIGIEMVHDGGKKTWHSAATAIYCLMGSGQLLWDTVTGVNMTL

SEQ ID NO: 30074 - protein, 466 aa, synthetic construct
  REGION 1..466: note = neuraminidase__InfluenzaB__AHL92842
MLPSTIQTLTLFLTSGGVLLSLYVSASLSYLLYSDILLKFSRTEITAPIMPLDCANASNVQAVNRSTTKGVTLLLPEPEWTYPRLSCPGSTFQKALLISPHRFGETKGNSAPLIIREPFIACGPKECKHFALTHYAAQPGGYYNGTREDRNKLRHLISVKLGKIPTVENSIFHMAAWSGSACHDGREWTYIGVDGPDSNALLKIKYGEAYTDTYHSYAKNILRTQESACNCIGGDCYLMITDGPASGISECRFLKIREGRIIKEIFPTGRVKHTEECTCGFASNKTIECACRDNSYTAKRPFVKLNVETDTAEIRLMCTETYLDTPRPNDGSITGPCESNGDKGSGGIKGGFVHQRMASKIGRWYSRTMSKTKRMGMGLYVKYDGDPWTDSEALALSGVMVSMEEPGWYSFGFEIKDKKCDVPCIGIEMVHDGGKTTWHSAATAIYCLMGSGQLLWDTVTGVNMTL

SEQ ID NO: 30075 - protein, 466 aa, synthetic construct; identical to SEQ ID NO: 28817
  REGION 1..466: note = neuraminidase__InfluenzaB__AHL92853

SEQ ID NO: 30076 - protein, 466 aa, synthetic construct; identical to SEQ ID NO: 28817
  REGION 1..466: note = neuraminidase__InfluenzaB__AHL92864

SEQ ID NO: 30077 - protein, 466 aa, synthetic construct; identical to SEQ ID NO: 28670
  REGION 1..466: note = neuraminidase__InfluenzaB__AHL92875

SEQ ID NO: 30078 - protein, 466 aa, synthetic construct; identical to SEQ ID NO: 28627
  REGION 1..466: note = neuraminidase__InfluenzaB__AHL92886

SEQ ID NO: 30079 - protein, 466 aa, synthetic construct
  REGION 1..466: note = neuraminidase__InfluenzaB__AHL92897
MLPSTIQTLTLFLTSGGVLLSLYVSASLSYLLYSDILLKFSPTEITAPTIPLDCANASNVQAVNRSATKGVTLLLPEPEWTYPRLSCPGSTFQKALLISPHRFGETKGNSAPLIIREPFIACGPNECKHFALTHYAAQPGGYYNGTRGDRNKLRHLISVKLGKIPTVENSIFHMAAWSGSACHDGKEWTYIGVDGPDNNALLKIKYGEAYTDTYHSYANNILRTQESACNCIGGNCYLMITDGSASGVSECRFLKIREGRIIKEIFPTGRVKHTEECTCGFASNKTIECACRDNSYTAKRPFVKLNVETDTAEIRLMCTDTYLDTPRPDDGSITGPCESNGDKGSGGIKGGFVHQRMASKIGRWYSRTMSKTERMGMGLYVKYDGDPWADSDALAFSGVMVSMKEPGWYSFGFEIKDKKCDVPCIGIEMVHDGGKETWHSAATAIYCLMGSGQLLWDTVTGVDMAL

SEQ ID NO: 30080 - protein, 466 aa, synthetic construct
  REGION 1..466: note = neuraminidase__InfluenzaB__AHL92908
MLPSTIQTLTLFLTLGGVLLSLYVSASLSYLLYSDILLKFSQTEITAPIMPLDCANASNVQAVNRSATKGVTLLLPEPEWTYPRLSCPGSTFQKALLISPHRFGETKGNSAPLIIREPFIACGPKECKHFALTHYAAQPGGYYNGTREDRNKLRHLISVKLGKIPTVENSIFHMAAWSGSACHDGKEWTYIGVDGPDSNALLKIKYGEAYTDTYHSYAKNILRTQESACNCIGGDCYLMITDGPASGISECRFLKIREGRIIKEIFPTGRVKHTEECTCGFASNKTIECACRDNSYTAKRPFVKLNVETDTAEIRLMCTETYLDTPRPNDGSITGPCESNGDKGSGGIKGGFVHQRMASKIGRWYSRTMSKTKRMGMGLYVKYDGDPWTDSEALALSGVMVSMEEPGWYSFGFEIKDKKCDVPCIGIEMVHDGGKTTWHSAATAVYCLMGSGQLLWDTITGVDMAL

SEQ ID NO: 30081 - protein, 466 aa, synthetic construct
  REGION 1..466: note = neuraminidase__InfluenzaB__AHL92919
MLPSTIQTLTLFLTSGGVLLSLYVSASLSYLLYSDILLKFSPTEITAPTMPLDCANASNVQAVNRSATKGVTLLLPEPEWTYPRLSCPGSTFQKALLISPHRFGETKGNSAPLIIREPFIACGPNECKHFALTHYAAQPGGYYNGTRGDRNKLRHLISVKLGKIPTVENSIFHMAAWSGSACHDGKEWTYIGIDGPDNNALLKIKYGEAYTDTYHSYANNILRTQESACNCIGGNCYLMITDGSASGVSECRFLKIREGRIIKEIFPTGRVKHTEECTCGFASNKTIECACRDNSYTAKRPFVKLNVETDTAEIRLMCTDTYLDTPRPDDGSITGPCESNGDKGSGGIKGGFVHQRMASKIGRWYSRTMSKTERMGMGLYVKYDGDPWADSDALAFSGVMVSMKEPGWYSFGFEIKDKKCDVPCIGIEMVHDGGKETWHSAATAIYCLMGSGQLLWDTVTGVDMAL

SEQ ID NO: 30082 - protein, 466 aa, synthetic construct
  REGION 1..466: note = neuraminidase__InfluenzaB__AHL92930
MLPSTIQTLTLFLTSGGVLLSLYVSASLSYLLYSDILLKFSPTEITAPTMPLDCANASNVQAVNRSATKGVTLLLPEPEWTYPRLSCPGSTFQKALLISPHRFGETKGNSAPLIIREPFIACGPNECKHFALTHYAAQPGGYYNGTRGDRNKLRHLISVKLGKIPTVENSIFHMAAWSGSACHDGKEWTYIGVDGPDNDALLKIKYGEAYTDTYHSYANNILRTQESACNCIGGNCYLMITDGSASGVSECRFLKIREGRIIKEIFPTGRVKHTEECTCGFASNKTIECACRDNSYTAKRPFVKLDVETDTAEIRLMCTDTYLDTPRPDDGSITGPCESNGDKGSGGIKGGFVHQRMASKIGRWYSRTMSKTERMGMGLYVKYDGDPWADSDALAFSGVMVSMKEPGWYSFGFEIKDKKCDVPCIGIEMVHDGGKETWHSAATAIYCLMGSGQLLWDTVTGVDMAL

SEQ ID NO: 30083 - protein, 466 aa, synthetic construct; identical to SEQ ID NO: 28627
  REGION 1..466: note = neuraminidase__InfluenzaB__AHL92941

SEQ ID NO: 30084 - protein, 466 aa, synthetic construct; identical to SEQ ID NO: 28635
  REGION 1..466: note = neuraminidase__InfluenzaB__AHL92952

SEQ ID NO: 30085 - protein, 466 aa, synthetic construct; identical to SEQ ID NO: 28635
  REGION 1..466: note = neuraminidase__InfluenzaB__AHL92963

SEQ ID NO: 30086 - protein, 466 aa, synthetic construct
  REGION 1..466: note = neuraminidase__InfluenzaB__AHL92974
MLPSTIQTLTLFLTSGGVLLSLYVSASLSYLLYSDILLKFSPTEITAPTMPLDCANASNVHAVNRSATKGVTLLLPEPEWTYPRLSCPGSTFQKALLISPHRFGETKGNSAPLIIREPFIACGPNECKHFALTHYAAQPGGYYNGTRGDRNKLRHLISVKLGKIPTVENSIFHMAAWSGSACHDGKEWTYIGVDGPDNNALLKIKYGEAYTDTYHSYANNILRTQESACNCIGGNCYLMITDGSASGVSECRFLKIREGRIIKEIFPTGRVKHTEECTCGFASNKTIECACRDNSYTAKRPFVKLNVETDTAEIRLMCTDTYLDTPRPDDGSITGPCESNGDKGSGGIKGGFVHQRMASKIGRWYSRTMSKTERMGMGLYVKYNGDPWADSDALAFSGVMVSMKEPGWYSFGFEIKDKKCDVPCIGIEMVHDGGKETWHSAATAIYCLMGSGQLLWDTVTGVDMAL

SEQ ID NO: 30087 - protein, 466 aa, synthetic construct; identical to SEQ ID NO: 28635
  REGION 1..466: note = neuraminidase__InfluenzaB__AHL92985

SEQ ID NO: 30088 - protein, 466 aa, synthetic construct; identical to SEQ ID NO: 28635
  REGION 1..466: note = neuraminidase__InfluenzaB__AHL92996

SEQ ID NO: 30089 - protein, 466 aa, synthetic construct; identical to SEQ ID NO: 30008
  REGION 1..466: note = neuraminidase__InfluenzaB__AHL93008

SEQ ID NO: 30090 - protein, 466 aa, synthetic construct; identical to SEQ ID NO: 30017
  REGION 1..466: note = neuraminidase__InfluenzaB__AHL93019

SEQ ID NO: 30091 - protein, 466 aa, synthetic construct; identical to SEQ ID NO: 30017
  REGION 1..466: note = neuraminidase__InfluenzaB__AHL93030

SEQ ID NO: 30092 - protein, 466 aa, synthetic construct; identical to SEQ ID NO: 30031
  REGION 1..466: note = neuraminidase__InfluenzaB__AHL93041

SEQ ID NO: 30093 - protein, 466 aa, synthetic construct; identical to SEQ ID NO: 30031
  REGION 1..466: note = neuraminidase__InfluenzaB__AHL93052

SEQ ID NO: 30094 - protein, 466 aa, synthetic construct; identical to SEQ ID NO: 28817
  REGION 1..466: note = neuraminidase__InfluenzaB__AHL93063

SEQ ID NO: 30095 - protein, 466 aa, synthetic construct; identical to SEQ ID NO: 28817
  REGION 1..466: note = neuraminidase__InfluenzaB__AHL93074

SEQ ID NO: 30096 - protein, 466 aa, synthetic construct; identical to SEQ ID NO: 28817
  REGION 1..466: note = neuraminidase__InfluenzaB__AHL93085

SEQ ID NO: 30097 - protein, 466 aa, synthetic construct; identical to SEQ ID NO: 30074
  REGION 1..466: note = neuraminidase__InfluenzaB__AHL93096

SEQ ID NO: 30098 - protein, 466 aa, synthetic construct; identical to SEQ ID NO: 28817
  REGION 1..466: note = neuraminidase__InfluenzaB__AHL93107

SEQ ID NO: 30099 - protein, 466 aa, synthetic construct; identical to SEQ ID NO: 28817
  REGION 1..466: note = neuraminidase__InfluenzaB__AHL93118

SEQ ID NO: 30100 - protein, 466 aa, synthetic construct; identical to SEQ ID NO: 28788
  REGION 1..466: note = neuraminidase__InfluenzaB__AHL93129

SEQ ID NO: 30101 - protein, 466 aa, synthetic construct; identical to SEQ ID NO: 28817
  REGION 1..466: note = neuraminidase__InfluenzaB__AHL93140

SEQ ID NO: 30102 - protein, 466 aa, synthetic construct; identical to SEQ ID NO: 28788
  REGION 1..466: note = neuraminidase__InfluenzaB__AHL93151

SEQ ID NO: 30103 - protein, 466 aa, synthetic construct; identical to SEQ ID NO: 28817
  REGION 1..466: note = neuraminidase__InfluenzaB__AHL93162

SEQ ID NO: 30104 - protein, 466 aa, synthetic construct; identical to SEQ ID NO: 28817
  REGION 1..466: note = neuraminidase__InfluenzaB__AHL93173

SEQ ID NO: 30105 - protein, 466 aa, synthetic construct; identical to SEQ ID NO: 28788
  REGION 1..466: note = neuraminidase__InfluenzaB__AHL93184

SEQ ID NO: 30106 - protein, 466 aa, synthetic construct; identical to SEQ ID NO: 28817
  REGION 1..466: note = neuraminidase__InfluenzaB__AHL93195

SEQ ID NO: 30107 - protein, 466 aa, synthetic construct; identical to SEQ ID NO: 28817
  REGION 1..466: note = neuraminidase__InfluenzaB__AHL93206

SEQ ID NO: 30108 - protein, 466 aa, synthetic construct; identical to SEQ ID NO: 28961
  REGION 1..466: note = neuraminidase__InfluenzaB__AHL93217

SEQ ID NO: 30109 - protein, 466 aa, synthetic construct; identical to SEQ ID NO: 28961
  REGION 1..466: note = neuraminidase__InfluenzaB__AHL93228

SEQ ID NO: 30110 - protein, 466 aa, synthetic construct
  REGION 1..466: note = neuraminidase__InfluenzaB__AHL93239
MLPSTIQTLTLFLTSGGVLLSLYVSASLSYLLYSDILLKFSPTEITAPTMPLDCANASNVQAVNRSATKGVTFLLPEPEWTYPRLSCPGSTFQKALLISPHRFGETKGNSAPLIIREPFIACGPNECKHFALTHYAAQPGGYYNGTRGDRNKLRHLISVKLGKIPTVENSIFHMAAWSGSACHDGKEWTYIGVDGPDNNALLKVKYGEAYTDTYHSYANKILRTQESACNCIGGNCYLMITDGSASGVSECRFLKIREGRIIKEIFPTGRVKHTEECTCGFASNKTIECACRDNSYTAKRPFVKLNVETDTAEIRLMCTDTYLDTPRPDDGSITGPCESNGDKGSGGIKGGFVHQRMESKIGRWYSRTMSKTERMGMGLYVKYDGDPWADSDALAFSGVMVSMKEPGWYSFGFEIKDKKCDVPCIGIEMVHDGGKETWHSAATAIYCLMGSGQLLWDTVTGVDMAL

SEQ ID NO: 30111 - protein, 466 aa, synthetic construct
  REGION 1..466: note = neuraminidase__InfluenzaB__AHL93250
MLPSTIQMLTLFLTSGGVLLSLYVSASLSYLLYSDILLKFSPTEITAPTMPLDCANASNVHAVNRSATKGVTFLLPEPEWTYPRLSCPGSTFQKALLISPHRFGETKGNSAPLIIREPFIACGPNECKHFALTHYAAQPGGYYNGTRGDRNKLRHLISVKLGKIPTVENSIFHMAAWSGSACHDGKEWTYIGVDGPDNNALLKIKYGEAYTDTYHSYANNILRTQESACNCIGGNCYLMITDGSASGVSECRFLKIREGRIIKEIFPTGRVKHTEECTCGFASNKTIECACRDNSYTAKRPFVKLNVETDTAEIRLMCTDTYLDTPRPDDGSITGPCESNGDKGSGGIKGGFVHQRMASKIGRWYSRTMSKTERMGMGLYVKYDGDPWTDSDALAFRGVMVSMKEPGWYSFGFEIKDKKCDVPCIGIEMVHDGGKETWHSAATAIYCLMGSGQLLWDTVTGVDMAL

SEQ ID NO: 30112 - protein, 466 aa, synthetic construct; identical to SEQ ID NO: 28961
  REGION 1..466: note = neuraminidase__InfluenzaB__AHL93261

SEQ ID NO: 30113 - protein, 466 aa, synthetic construct; identical to SEQ ID NO: 28961
  REGION 1..466: note = neuraminidase__InfluenzaB__AHL93272

SEQ ID NO: 30114 - protein, 466 aa, synthetic construct; identical to SEQ ID NO: 28961
  REGION 1..466: note = neuraminidase__InfluenzaB__AHL93283

SEQ ID NO: 30115 - protein, 466 aa, synthetic construct; identical to SEQ ID NO: 28961
  REGION 1..466: note = neuraminidase__InfluenzaB__AHL93294

SEQ ID NO: 30116 - protein, 466 aa, synthetic construct
  REGION 1..466: note = neuraminidase__InfluenzaB__AHL93305
MLPSTIQTLTLFLTSGGVLLSLYVSASLSYLLYSDILLKFSPTEITAPTMPLDCANASNVQAVNRSATKGVTLLLPEPEWTYPRLSCPGSTFQKALLISPHRFGETKGNSAPLIIREPFVACGPNECKHFALTHYAAQPGGYYNGTRGDRNKLRHLISVKLGKIPTVENSIFHMAAWSGSACHDGKEWTYIGVDGPDNNALLKVKYGEAYTDTYHSYANKILRTQESACNCIGGNCYLMITDGSASGVSECRFLKIREGRIIKEIFPTGRVKHTEECTCGFASNKTIECACRDNSYTAKRPFVKLNVETDTAEIRLMCTDTYLDTPRPNDGSITGPCESNGDKGSGGIKGGFVHQRMESKIGRWYSRTMSKTERMGMGLYVKYDGDPWADSDALAFSGVMVSMKEPGWYSFGFEIKDKKCDVPCIGIEMVHDGGKETWHSAATAIYCLMGSGQLLWDTVTGVDMAL

SEQ ID NO: 30117 - protein, 466 aa, synthetic construct; identical to SEQ ID NO: 28961
  REGION 1..466: note = neuraminidase__InfluenzaB__AHL93316

SEQ ID NO: 30118 - protein, 466 aa, synthetic construct
  REGION 1..466: note = neuraminidase__InfluenzaB__AHL93338
MLPSTIQTLTLFLTSGGVLLSLYVSASLSYLLYSDILLKFSPTEITAPTMPLDCANASNVQAVNRSATKGVTLLLPEPEWTYPRLSCPGSTFQKALLISPHRFGETKGNSAPLIIREPFIACGPNECKHFALTHYAAQPGGYYNGTRGDRNKLRHLISVKLGKIPTVENSIFHMAAWSGSACHDGKEWTYIGVDGPDNNALLKVKYGEAYTDTYHSYANKILRTQESACNCIGGNCYLMITDGSASGVSECRFLKIREGRIIKEIFPTGRVKHTEECTCGFASNKTIECACRDNSYTAKRPFVKLNVETDAAEIRLMCTDTYLDTPRPNDGSITGPCESNGDKGSGGIKGGFVHQRMESKIGRWYSRTMSKTERMGMGLYVKYDGDPWADSDALAFSGVMVSMKEPGWYSFGFEIKDKKCDVPCIGIEMVHDGGKETWHSAATAIYCLMGSGQLLWDTVTGVDMAL

SEQ ID NO: 30119 - protein, 466 aa, synthetic construct
  REGION 1..466: note = neuraminidase__InfluenzaB__AHL93349
MLPSTIQTLTLFLTSGGVLLSLYVSASLSYLLYSDILLKFSPTEITAPTMPLDCANASNVQAVNRSATKGVTLLLPEPEWTYPRLSCQGSTFQKALLISPHRFGETKGNSAPLIIREPFIACGPNECKHFALTHYAAQPGGYYNGTRGDRNKLRHLISVKLGKIPTVENSIFHMAAWSGSACHDGKEWTYIGVDGPDNNALLKVKYGEAYTDTYHSYANKILRTQESACNCIGGNCYLMITDGSASGVSECRFLKIREGRIIKEIFPTGRVKHTEECTCGFASNKTIECACRDNSYTAKRPFVKLNVETDTAEIRLMCTDTYLDTPRPNDGSITGPCESNGDKGSGGIKGGFVHQRMESKIGRWYSRTMSKTERMGMELYVKYDGDPWADSDALAFSGVMVSMKEPGWYSFGFEIKDKKCDVPCIGIEMVHDGGKETWHSAATAIYCLMGSGQLLWDTVTGVNMAL

SEQ ID NO: 30120 - protein, 466 aa, synthetic construct; identical to SEQ ID NO: 28961
  REGION 1..466: note = neuraminidase__InfluenzaB__AHL93371

SEQ ID NO: 30121 - protein, 466 aa, synthetic construct
  REGION 1..466: note = neuraminidase__InfluenzaB__AHL93382
MLPSTIQTLTLFLTSGGVLLSLYVSASLSYLLYSDILLKFSPTEITAPTMPLDCANASNVQAVNRSATKGVTLLLPEPEWTYPRLSCPGSTFQKALLISPHRFGETKGNSAPLIIREPFIACGPNECKHFALTHYAAQPGGYYNGTRGDRNKLRHLISVKLGKIPTVENSIFHMAAWSGSACHDGKEWTYIGVDGPDNNALLKVKYGEAYTDTYHSYANKILRTQESACNCIGGNCYLMITDGSASGVSECRFLKIREGRIIKEIFPTGRVKHTEECTCGFASNKTIECACRDNSYTAKRPFVKLNVETDTAEIRLMCTDTYLDTPRPNDGSITGPCESNGDKGSGGIKGGFVHQRMESKIGRWYSRTMSKTERMGMELYVKYDGDPWADSDALAFSGVMVSMKEPGWYSFGFEIKDKKCDVPCIGIEMVHDGGKETWHSAATAIYCLMGSGQLLWDTVTGVNMAL

SEQ ID NO: 30122 - protein, 466 aa, synthetic construct; identical to SEQ ID NO: 28961
  REGION 1..466: note = neuraminidase__InfluenzaB__AHL93393

SEQ ID NO: 30123 - protein, 466 aa, synthetic construct; identical to SEQ ID NO: 28961
  REGION 1..466: note = neuraminidase__InfluenzaB__AHL93404

SEQ ID NO: 30124 - protein, 466 aa, synthetic construct; identical to SEQ ID NO: 28961
  REGION 1..466: note = neuraminidase__InfluenzaB__AHL93415

SEQ ID NO: 30125 - protein, 466 aa, synthetic construct; identical to SEQ ID NO: 28961
  REGION 1..466: note = neuraminidase__InfluenzaB__AHL93426

SEQ ID NO: 30126 - protein, 466 aa, synthetic construct; identical to SEQ ID NO: 28961
  REGION 1..466: note = neuraminidase__InfluenzaB__AHL93437

SEQ ID NO: 30127 - protein, 466 aa, synthetic construct; identical to SEQ ID NO: 30121
  REGION 1..466: note = neuraminidase__InfluenzaB__AHL93448

SEQ ID NO: 30128 - protein, 467 aa, synthetic construct
  REGION 1..467: note = neuraminidase__InfluenzaB__AHL93459
MLPSTIQTLTLFLTSGGVLLSLYVSASLSYLLYSDILLKFSPTEITAPTMPLDCANASNVQAVNRSATKGVTLLLLPEPEWTYPRLSCPGSTFQKALLISPHRFGETKGNSAPLIIREPFIACGPNECKHFALTHYAAQPGGYYNGTRGDRNKLRHLISVKLGKIPTVENSIFHMAAWSGSACHDGKEWTYIGVDGPDNNALLKVKYGEAYTDTYHSYANKILRTQESACNCIGGNCYLMITDGSASGVSECRFLKIREGRIIKEIFPTGRVKHTEECTCGFASNKTIECACRDNSYTAKRPFVKLNVETDTAEIRLMCTDTYLDTPRPNDGSITGPCESNGDKGSGGIKGGFVHQRMESKIGRWYSRTMSKTERMGMGLYVKYDGDPWADSDALAFSGVMVSMKEPGWYSFGFEIKDKKCDVPCIGIEMVHDGGKETWHSAATAIYCLMGSGQLLWDTVTGVDMAL

SEQ ID NO: 30129 - protein, 466 aa, synthetic construct
  REGION 1..466: note = neuraminidase__InfluenzaB__AHL93470
MLPSTIQTLTLFLTSGGVLLSLYVSASLSYLLYSDILLKFSPTEITAPTMPLDCANASNVQAVNRSATKGVTLLLPEPEWTYPRLSCPGSTFQKALLISPHRFGETKGNSAPLIIREPFIACGPNECKHFALTHYAAQPGGYYNGTRGDRNKLRHLISVKLGKIPTVENSIFHMAAWSGSACHDGKEWTYIGVDGPDNNALLKVKYGEAYTDTYHSYANKILRTQESACNCIGGNCYLMITDGSASGVSECRFLKIREGRIIKEIFPTGRVKHTEECTCGFASNKTIECACRDNSYTAKRPFVKLNVETDTAEIRLMCTDTYLDTPRPNDGSITGPCESNGDKGSGGIKGGFVHQRMESKIGRWYSRTMSKTERMGMGLYVKYDGDPWADSDALTFSGVMVSMKEPGWYSFGFEIKDKKCDVPCIGIEMVHDGGKETWHSAATAIYCLMGSGQLLWDTVTGVDMAL

SEQ ID NO: 30130 - protein, 466 aa, synthetic construct; identical to SEQ ID NO: 28898
  REGION 1..466: note = neuraminidase__InfluenzaB__AHL93481

SEQ ID NO: 30131 - protein, 466 aa, synthetic construct; identical to SEQ ID NO: 28956
  REGION 1..466: note = neuraminidase__InfluenzaB__AHL93492

SEQ ID NO: 30132 - protein, 466 aa, synthetic construct; identical to SEQ ID NO: 28817
  REGION 1..466: note = neuraminidase__InfluenzaB__AHL93503

SEQ ID NO: 30133 - protein, 466 aa, synthetic construct
  REGION 1..466: note = neuraminidase__InfluenzaB__AHL93514
MLPSTIQTLTLFLTSGGVLLSLYVSASLSYLLYSDILLKFSPTEITAPTMPLDCANASNVQAVNRSATKGVTLLLPEPEWTYPRLSCPGSTFQKALLISPHRFGETKGNSAPLIIREPFIACGPNECKHFALTHYAAQPGGYYNGTRGDRNKLRHLISIKLGKIPTVENSIFHMAAWSGSACHDGKEWTYIGVDGPDNNALLKVKYGEAYTDTYHSYANKILRTQESACNCIGGNCYLMITDGSASGVSECRFLKIREGRIIKEIFPTGRVKHTEECTCGFASNKTIECACRDNSYTAKRPFVKLNVETDTAEIRLMCTDTYLDTPRPDDGSITGSCESNGDKGSGGIKGGFVHQRMESKIGRWYSRTMSKTERMGMGLYVKYDGDPWADSDALTFSGVMVSMKEPGWYSFGFEIKDKKCDVPCIGIEMVHDGGKETWHSAATAIYCLMGSGQLLWDTVTGVDMAL

SEQ ID NO: 30134 - protein, 466 aa, synthetic construct; identical to SEQ ID NO: 28817
  REGION 1..466: note = neuraminidase__InfluenzaB__AHL93525

SEQ ID NO: 30135 - protein, 466 aa, synthetic construct; identical to SEQ ID NO: 28956
  REGION 1..466: note = neuraminidase__InfluenzaB__AHL93536

SEQ ID NO: 30136 - protein, 466 aa, synthetic construct
  REGION 1..466: note = neuraminidase__InfluenzaB__AHL93558
MLPSTIQTLTLFLTSGGVLLSLYVSASLSYLLYSDILLKFSPTEITAPAMPLDCANASNVQAVNRSATKGVTLLLPEPEWTYPRLSCPGSTFQKALLISPHRFGETKGNSAPLIIREPFIACGPNECKHFALTHYAAQPGGYYNGTRGDRNKLRHLISVKLGKIPTVENSIFHMAAWSGSACHDGKEWTYIGVDGPDNNALLKVKYGEAYTDTYHSYANKILRTQESACNCIGGNCYLMITDGSASGVSECRFLKIREGRIIKEIFPTGRVKHTEECTCGFASNKTIECACRDNSYTAKRPFVKLNVETDTAEIRLMCTDTYLDTPRPNDGSITGPCESDGDKGSGGIKGGFIHQRMESKIGRWYSRTMSKTERMGMGLYVKYDGDPWADSDALAFSGVMVSMKEPGWYSFGFEIKDKKCDVPCIGIEMVHDGGKETWHSAATAIYCLMGSGQLLWDTVTGVDMAL

SEQ ID NO: 30137 - protein, 466 aa, synthetic construct
  REGION 1..466: note = neuraminidase__InfluenzaB__AHL93569
MLPSTIQTLTLFLTSGGVLLSLYVSASLSYLLYSDILLKFSPTEITAPTMPLDCANASNVQAVNRSATKGVTLLLPEPEWTYPRLSCPGSTFQKALLISPHRFGETKGNSAPLIIREPFIACGPNECKHFALTHYAAQPGGYYNGTRGDRNKLRHLISVKLGKIPTVENSIFHMAAWSGSACHDGKEWTYIGVDGPDNNALLKVKYGEAYTDTYHSYANKILRTQESACNCIGGNCYLMITDGSASGVSECRFLKIREGRIIKEIFPTGRVKHTEECTCGFASNKTIECACRDNSYTAKRPFVKLNVETDTAEIRLMCTDTYLDTPRPNDGSITGPCESDGDKGSGGIKGGFVHQRMESKIGRWYSRTMSKTERMGMGLYVKYDGDPWADSDALTFSGVMVSMKEPGWYSFGFEIKDKKCDVPCIGIEMVHDGGKETWHSAATAIYCLMGSGQLLWDTVTGVDMAL

SEQ ID NO: 30138 - protein, 466 aa, synthetic construct; identical to SEQ ID NO: 28956
  REGION 1..466: note = neuraminidase__InfluenzaB__AHL93580

SEQ ID NO: 30139 - protein, 466 aa, synthetic construct; identical to SEQ ID NO: 28956
  REGION 1..466: note = neuraminidase__InfluenzaB__AHL93591

SEQ ID NO: 30140 - protein, 466 aa, synthetic construct
  REGION 1..466: note = neuraminidase__InfluenzaB__AHL93613
MLPSTIQTLTLFLTSGGVLLSLYVSASLSYLLYSDILLKFSPTEITAPTMPLDCANASNVQAVNRSATKGVTLLLPEPEWTYPRLSCPGSTFQKALLISPHRFGETKGNSAPLIIREPFIACGPNECKHFALTHYAAQPGGYYNGTRGDRNKLRHLISVKLGKIPTVENSIFHMAAWSGSACHDGKEWTYIGVDGPDNNALLKVKYGEAYTDTYHSYANKILRTQESACNCIGGNCYLMVTDGSASGVSECRFLKIREGRIIKEIFPTGRVKHTEECTCGFASNKTIECACRDNSYTAKRPFVKLNVETDTAEIRLMCTDTYLDTPRPDDGSITGPCESNGDKGSGGIKGGFVHQRMESKIGRWYSRTMSKTERMGMGLYVKYDGDPWADSDALVFSGVMVSMKEPGWYSFGFEIKDKKCDVPCIGIEMVHDGGKETWHSAATAIYCLMGSGQLLWDTVTGVDMAL

SEQ ID NO: 30141 - protein, 466 aa, synthetic construct; identical to SEQ ID NO: 28956
  REGION 1..466: note = neuraminidase__InfluenzaB__AHL93624

SEQ ID NO: 30142 - protein, 466 aa, synthetic construct; identical to SEQ ID NO: 30140
  REGION 1..466: note = neuraminidase__InfluenzaB__AHL93635

SEQ ID NO: 30143 - protein, 466 aa, synthetic construct; identical to SEQ ID NO: 30140
  REGION 1..466: note = neuraminidase__InfluenzaB__AHL93646

SEQ ID NO: 30144 - protein, 466 aa, synthetic construct; identical to SEQ ID NO: 28817
  REGION 1..466: note = neuraminidase__InfluenzaB__AHL93657

SEQ ID NO: 30145 - protein, 466 aa, synthetic construct; identical to SEQ ID NO: 28956
  REGION 1..466: note = neuraminidase__InfluenzaB__AHL93668

SEQ ID NO: 30146 - protein, 466 aa, synthetic construct
  REGION 1..466: note = neuraminidase__InfluenzaB__AHL93679
MLPSTIQTLTLFLTSGGVLLSLYVSALLSYLLYSDILLKFSPTEITAPTMSLDCANASNVQAVNRSATKGVTFLLPEPEWTYPRLSCPGSTFQKALLISPHRFGETKGNSAPLIIREPFIACGPNECKHFALTHYAAQPGGYYNGTRGDRNKLRHLISVKLGKIPTVENSIFHMAAWSGSACHDGKEWTYIGVDGPDNDALLKVKYGEAYTDTYHSYANKILRTQESACNCIGGNCYLMITDGSASGVSECRFLKIREGRIIKEILPTGRVKHTEECTCGFASNKTIECACRDNSYTAKRPFVKLNVETDTAEIRLMCTDTYLDTPRPDDGSITGPCESNGDKGSGGIKGGFVHQRMESKIGRWYSRTMSKTERMGMGLYVKYDGDPWADSDALAFSGVMVSMKEPGWYSFGFEIKDKKCDVPCIGIEMVHDGGKETWHSAATAIYCLMGSGQLLWDTVTGVDMAL

SEQ ID NO: 30147 - protein, 466 aa, synthetic construct; identical to SEQ ID NO: 30140
  REGION 1..466: note = neuraminidase__InfluenzaB__AHL93690

SEQ ID NO: 30148 - protein, 466 aa, synthetic construct; identical to SEQ ID NO: 30140
  REGION 1..466: note = neuraminidase__InfluenzaB__AHL93701

SEQ ID NO: 30149 - protein, 466 aa, synthetic construct; identical to SEQ ID NO: 30140
  REGION 1..466: note = neuraminidase__InfluenzaB__AHL93712

SEQ ID NO: 30150 - protein, 466 aa, synthetic construct
  REGION 1..466: note = neuraminidase__InfluenzaB__AHL93723
MLPSTIQMLTLFLTSGGVLLSLYVSASLSYLLYSDILLKFSPTEITAPTMPLDCANASNVHAVNRSATKGVTFLLPEPEWTYPRLSCPGSTFQKALLISPHRFGETKGNSAPLIIREPFIACGPNECKHFALTHYAAQPGGYYNGTRGDRNKLRHLISVKLGKIPTVENSIFHMAAWSGSACHDGKEWTYIGVDGPDNNALLKIKYGEAYTDTYHSYANNILRTQESACNCIGGNCYLMITDGSASGVSECRFLKIREGRIIKEIFPTGRVKHTEECTCGFASNKTIECACRDNSYTAKRPFVKLNVETDTAEIRLMCTDTYLDTPRPDDGSTTGPCESNGDKGSGGIKGGFVHQRMASKIGRWYSRTMSKTERKGMGLYVKYDGDPWTDSDALAFRGVMVSMKEPGWYSFGFEIKDKKCDVPCIGIEMVHDGGKETWHSAATAIYCLMGSGQLLWDTVTGVDMAL

SEQ ID NO: 30151 - protein, 466 aa, synthetic construct; identical to SEQ ID NO: 28956
  REGION 1..466: note = neuraminidase__InfluenzaB__AHL93734

SEQ ID NO: 30152 - protein, 466 aa, synthetic construct
  REGION 1..466: note = neuraminidase__InfluenzaB__AHL93745
MLPSTIQMLTLFLTSGGVLLSLYVSASLSYLLYSDILLKFSPTEITAPTMPLDCANASNVHAVNRSATKGVTFLLPEPEWTYPRLSCPGSTFQKALLISPHRFGETKGNSAPLIIREPFIACGPNECKHFALTHYAAQPGGYYNGTRGDRNKLRHLISVKLGKIPTVENSIFHMAAWSGSACHDGKEWTYIGVDGPDNNALLKIKYGEAYTDTYHSYANNVLRTQESACNCIGGNCYLMITDGSASGVSECRFLKIREGRIIKEIFPTGRVKHTEECTCGFASNKTIECACRDNSYTAKRPFVKLNVETDTAEIRLMCTDTYLDTPRPDDGSITGPCESNGDKGSGGIKGGFVHQRMASKIGRWYSRTMSKTERKGMGLYVKYDGDPWTDSDALAFRGVMVSMKEPGWYSFGFEIKDKKCDVPCIGIEMVHDGGKETWHSAATAIYCLMGSGQLLWDTVTGVDMAL

SEQ ID NO: 30153 - protein, 466 aa, synthetic construct; identical to SEQ ID NO: 29119
  REGION 1..466: note = neuraminidase__InfluenzaB__AHL93756

SEQ ID NO: 30154 - protein, 466 aa, synthetic construct; identical to SEQ ID NO: 30140
  REGION 1..466: note = neuraminidase__InfluenzaB__AHL93767

SEQ ID NO: 30155 - protein, 466 aa, synthetic construct
  REGION 1..466: note = neuraminidase__InfluenzaB__AHL93778
MLPSTIQTLILFLTSGGVLLSLYVSALLSYLLYSDILLKFSPTEITAPTMSLDCANASNVQAVNRSATKGVTFLLPEPEWTYPRLSCPGSIFQKALLISPHRFGETKGNSAPLIIREPFIACGPNECKHFALTHYAAQPGGYYNGTRGDRNKLRHLISVKLGKIPTVENSIFHMAAWSGSACHDGKEWTYIGVDGPDNDALLKVKYGEAYTDTYHSYANKILRTQESACNCIGGNCYLMITDGSASGVSECRFLKIREGRIIKEIFPTGRVKHTEECTCGFASNKTIECACRDNSYTAKRPFVKLNVETDTAEIRLMCTDTYLDTPRPDDGSITGPCESNGDKGSGGIKGGFVHQRMESKIGRWYSRTMSKTERMGMGLYVKYDGDPWADSDALAFSGVMVSMKEPGWYSFGFEIKDKKCDVPCIGIEMVHDGGKETWHSAATAIYCLMGSGQLLWDTVTGVDMAL

SEQ ID NO: 30156 - protein, 466 aa, synthetic construct
  REGION 1..466: note = neuraminidase__InfluenzaB__AHL93789
MLPSTIQTLTLFLTSGGVLLSLYVSASLSYLLYSDILLKFSPTGITAPTMPLDCANASNVQAVNRSATKGVTLLLPEPEWTYPRLSCPGSTFQKALLISPHRFGETKGNSAPLIIREPFIACGPNECKHFALTHYAAQPGGYYNGTRGDRNKLRHLISVKLGKIPTVENSIFHMAAWSGSACHDGKEWTYIGVDGPDNNALLKVKYGEAYTDTYHSYANKILRTQESACNCIGGNCYLMVTDGSASGVSECRFLKIREGRIIKEIFPTGRVKHTEECTCGFASNKTIECACRDNSYTAKRPFVKLNVETDTAEIRLMCTDTYLDTPRPDDGSITGPCESNGDKGSGGIKGGFVHQRMESKIGRWYSRTMSKTERMGMGLYVKYDGDPWADSDALVFSGVMVSMKEPGWYSFGFEIKDKKCDVPCIGIEMVHDGGKETWHSAATAIYCLMGSGQLLWDTVTGVDMAL

SEQ ID NO: 30157 - protein, 466 aa, synthetic construct; identical to SEQ ID NO: 28956
  REGION 1..466: note = neuraminidase__InfluenzaB__AHL93800

SEQ ID NO: 30158 - protein, 466 aa, synthetic construct; identical to SEQ ID NO: 28956
  REGION 1..466: note = neuraminidase__InfluenzaB__AHL93811

SEQ ID NO: 30159 - protein, 466 aa, synthetic construct; identical to SEQ ID NO: 29492
  REGION 1..466: note = neuraminidase__InfluenzaB__AHL93822

SEQ ID NO: 30160 - protein, 466 aa, synthetic construct; identical to SEQ ID NO: 28956
  REGION 1..466: note = neuraminidase__InfluenzaB__AHL93833

SEQ ID NO: 30161 - protein, 466 aa, synthetic construct
  REGION 1..466: note = neuraminidase__InfluenzaB__AHL93844
MLPSTIQTLTLFLTSGGVLLSLYVSASLSYLLYSGILLKFSPTEITAPTMPLDCANASNVQAVNRSATKEVTLLLPEPEWTYPRLSCPGSTFQKALLISPHRFGETKGNSAPLIIREPFIACGPNECKHFALTHYAAQPGGYYNGTRGDRNKLRHLISVKLGKIPTVENSIFHMAAWSGSACHDGKEWTYIGVDGPDDNALLKVKYGEAYTDTYHSYAHKILRTQESACNCIGGNCYLMITDGSASGVSECRFLKIREGRIIKEIFPTGRVKHTEECTCGFASNKTIECACRDNSYTAKRPFVKLNVETDTAEIRLMCTDTYLDTPRPNDGSITGPCESNGDKGSGGIKGGFVHQRMESKIGRWYSRTMSKTERMGMGLYVKYDGDPWADSDALAFSGVMVSMKEPGWYSFGFEIKDKKCDVPCIGIEMVHDGGKETWHSAATAIYCLMGSGQLLWDTVTGVDMAL

SEQ ID NO: 30162 - protein, 466 aa, synthetic construct; identical to SEQ ID NO: 28956
  REGION 1..466: note = neuraminidase__InfluenzaB__AHL93855

SEQ ID NO: 30163 - protein, 466 aa, synthetic construct; identical to SEQ ID NO: 28956
  REGION 1..466: note = neuraminidase__InfluenzaB__AHL93866

SEQ ID NO: 30164 - protein, 466 aa, synthetic construct; identical to SEQ ID NO: 28956
  REGION 1..466: note = neuraminidase__InfluenzaB__AHL93877

SEQ ID NO: 30165 - protein, 466 aa, synthetic construct; identical to SEQ ID NO: 28956
  REGION 1..466: note = neuraminidase__InfluenzaB__AHL93888

SEQ ID NO: 30166 - protein, 466 aa, synthetic construct
  REGION 1..466: note = neuraminidase__InfluenzaB__AHL93899
MLPSTIQMLTLFLTSGGVLLSLYVSASLSYLLYSDILLKFSPTEITAPTMPLDCANASNVHAVNRSATKGVTFLLPEPEWTYPRLSCPGSTFQKALLISPHRFGETKGNSAPLIIREPFIACEPNECKHFALTHYAAQPGGYYNGTRGDRNKLRHLISVKLGKIPTVENSIFHMAAWSGSACHDGKEWTYIGVDGPDNNALLKIKYGEAYTDTYHSYANNILRTQESACNCIGGNCYLMITDGSASGVSECRFLKIREGRIIKEIFPTGRVKHTEECTCGFASNKTIECACRDNSYTAKRPFVKLNVETDTAEIRLMCTDTYLDTPRPDDGSTTGPCESNGDKGSGGIKGGFVHQRMASKIGRWYSRTMSKTERKGMGLYVKYDGDPWTDSDALAFRGVMVSMKEPGWYSFGFEIKDKKCDVPCIGIEMVHDGGKETWHSAATAIYCLMGSGQLLWDTVTGVDMAL

SEQ ID NO: 30167 - protein, 466 aa, synthetic construct
  REGION 1..466: note = neuraminidase__InfluenzaB__AHL93910
MLPSTIQMLTLFLTSGGVLLSLYVSASLSYLLYSDILLKFSPTEITAPTMPLDCANASNVHAVNRSATKGVTFLLPEPEWTYPRLSCPGSTFQKALLISPHRFGETKGNSAPLIIREPFIACGPNECKHFALTHYAAQPGGYYNGTRGDRNKLRHLISVKLGKIPTVENSIFHMAAWSGSACHDGKEWTYIGVDGPDNNALLKIKYGEAYTDTYHSYANNILRTQESACNCIGGNCYLMITDGSASGVSECRFLKIREGRIIKEIFPTGRVKHTEECTCGFASNKTIECTCRDNSYTAKRPFVKLNVETDTAEIRLMCTDTYLDTPRPDDGGITGPCESNGDKGSGGIKGGFVHQRMASKIGRWYSRTMSKTERKGMGLYVKYDGDPWTDSDALAFRGVMVSMKEPGWYSFGFEIKDKKCDVPCIGIEMVHDGGKETWHSAATAIYCLMGSGQLLWDTVTGVDMAL

SEQ ID NO: 30168 - protein, 466 aa, synthetic construct; identical to SEQ ID NO: 28956
  REGION 1..466: note = neuraminidase__InfluenzaB__AHL93921

SEQ ID NO: 30169 - protein, 466 aa, synthetic construct
  REGION 1..466: note = neuraminidase__InfluenzaB__AHL93932
MLPSTIQTLTLFLTSGGVLLSLYVSASLSYLLYSDILLKFSPTEITAPTMPLDCANASNVQAVNRSATKGVTLLLPEPEWTYPRLSCPGSTFQKALLISPHRFGETKGNSAPLIIREPFIACGPNECKHFALTHYAAQPGGYYNGTRGDRNKLRHLISVKLGKIPTVENSIFHMAAWSGSACHDGKEWTYIGVDGPDNNALLKVKYGEAYTDTYHSYANKILRTQESACNCIGGNCYLMVTDGSASGVSECRFLKIREGRIIKEIFPTGRVKHTEECTCGFASNKTIECACRDNSYTAKRPFVKLNVETDTAEIRLMCTDTYLDTPRPDDGSITGPCESNGDKGSGGIKGGFVHQRMESKIGRWYSRTMSKTERMGMELYVKYDGDPWADSDALAFSGVMVSMKEPGWYSFGFEIKDKKCDVPCIGIEMVHDGGKETWHSAATAIYCLMGSGQLLWDTVTGVDMAL

SEQ ID NO: 30170 - protein, 466 aa, synthetic construct; identical to SEQ ID NO: 29119
  REGION 1..466: note = neuraminidase__InfluenzaB__AHL93943

SEQ ID NO: 30171 - protein, 466 aa, synthetic construct; identical to SEQ ID NO: 28956
  REGION 1..466: note = neuraminidase__InfluenzaB__AHL93954

SEQ ID NO: 30172 - protein, 466 aa, synthetic construct
  REGION 1..466: note = neuraminidase__InfluenzaB__AHL93965
MLPSTIQTLTLFLTSGGVLLSLYVSASLSYLLYSDILLKFSPTEITAPAMPLDCANASNVQAVNCSATKGVTLLLPEPEWTYPRLSCPGSTFQKALLISPHRFGETKGNSAPLIIREPFIACGPNECKHFALTHYAAQPGGYYNGTRGDRNKLRHLISVKLGKIPTVENSIFHMAAWSGSACHDGKEWTYIGVDGPDNNALLKVKYGEAYTDTYHSYANKILRTQESACNCIGGNCYLMITDGSASGVSECRFLKIREGRIIKEIFPTGRVKHTEECTCGFASNKTIECACRDNSYTAKRPFVKLNVETDTAEIRLMCTDTYLDTPRPNDGSITGPCESDGDKGNGGIKGGFVHQRMESKIGRWYSRTMSKTERMGMGLYVKYDGDPWADSDALAFSGVMVSMKEPGWYSFGFEIKDKKCDVPCIGIEMVHDGGKETWHSAATAIYCLMGSGQLLWDTVTGVDMAL

SEQ ID NO: 30173 - protein, 466 aa, synthetic construct; identical to SEQ ID NO: 28875
  REGION 1..466: note = neuraminidase__InfluenzaB__AHL93976

SEQ ID NO: 30174 - protein, 466 aa, synthetic construct; identical to SEQ ID NO: 30146
  REGION 1..466: note = neuraminidase__InfluenzaB__AHL93987

SEQ ID NO: 30175 - protein, 466 aa, synthetic construct
  REGION 1..466: note = neuraminidase__InfluenzaB__AHL93998
MLPSTIQTLTLFLTSGGVLLSLYVSASLSYLLYSDILLKFSQTEITAPIMPLDCANASNVQAVNRSAAKGVTLLLPEPEWTYPRLSCPGSTFQKALLISPHRFGEIKGNSAPLIIREPFIACGPTECKHFALTHYAAQPGGYYNGTREDRNKLRHLISVKLGKIPTVENSIFHMAAWSGSACHDGKEWTYIGVDGPDSNALLKIKYGEAYTDTYHSYAKNILRTQESACNCIGGDCYLMITDGPASGVSECRFLKIREGRIIKEIFPTGRVKHTEECTCGFASNKTIECACRDNRYTAKRPFVKLNVETDTAEIRLMCTETYLDTPRPNDGSITGPCESDGDKGSGGIKGGFVHQRMASKIGRWYSRTMSKTKRMGMGLYVKYDGDPWTDSEALALSGVMVSMEEPGWYSFGFEIKDKKCDVPCIGIEMVHDGGKTTWHSAATAIYCLMGSGQLLWDTVTGVDMAL

SEQ ID NO: 30176 - protein, 466 aa, synthetic construct
  REGION 1..466: note = neuraminidase__InfluenzaB__AHL94009
MLPSTIQMLTLFLTSGGVLLSLYVSASLSYLLYSDILLKFSPTEITAPTMPLDCANASNVHAVNRSATKGVTFLLPEPKWTYPRLSCPGSTFQKALLISPHRFGETKGNSAPLIIREPFIACGPNECRHFALTHYAAQPGGYYNGTRGDRNKLRHLISVKLGKIPTVENSIFHMAAWSGSACHDGKEWTYIGVDGPDNNALLKIKYGEAYTDTYHSYANNILRTQESACNCIGGNCYLMITDGSASGVSECRFLKIREGRIIKEIFPTGRVKHTEECTCGFASNKTIECACRDNSYTAKRPFVKLNVETDTAEIRLMCTDTYLDTPRPDDGSITGPCESNGDKGSGGIKGGFVHQRMASKIGRWYSRTMSKTERKGMGLYVKYDGDPWTDSDALAFRGVMVSMKEPGWYSFGFEIKDKKCDVPCIGIEMVHDGGKETWHSAATAIYCLMGSGQLLWDTVTGVDMAL

SEQ ID NO: 30177 - protein, 466 aa, synthetic construct; identical to SEQ ID NO: 28956
  REGION 1..466: note = neuraminidase__InfluenzaB__AHL94020

SEQ ID NO: 30178 - protein, 466 aa, synthetic construct; identical to SEQ ID NO: 28956
  REGION 1..466: note = neuraminidase__InfluenzaB__AHL94031

SEQ ID NO: 30179 - protein, 466 aa, synthetic construct; identical to SEQ ID NO: 29119
  REGION 1..466: note = neuraminidase__InfluenzaB__AHL94042

SEQ ID NO: 30180 - protein, 466 aa, synthetic construct
  REGION 1..466: note = neuraminidase__InfluenzaB__AHL94053
MLPSTIQTLTLFLTSGGVLLSLYLSALLSYLLYSDILLKFSPTEITAPTMSLDCANASNVQAVNRSATKGVTFLLPEPEWTYPRLSCPGSTFQRALLISPHRFGETKGNSAPLIIREPFIACGPNECKHFALTHYAAQPGGYYNGTRGDRNKLRHLISVKLGKIPTVENSIFHMAAWSGSACHDGKEWTYIGVDGPDNDALLKVKYGEAYTDTYHSYANKILRTQESACNCIGGNCYLMITDGSASGVSECRFLKIREGRIIKEIFPTGRVKHTEECTCGFASNKTIECACRDNSYTAKRPFVKLNVETDTAEIRLMCTDTYLDTPRPDDGSITGPCESNGDKGSGGIKGGFVHQRMESKIGRWYSRTMSKTERMGMGLYVKYDGDPWADSDALAFSGVMVSMKEPGWYSFGFEIKDKKCDVPCIGIEMVHDGGKETWHSAATAIYCLMGSGQLLWDTVTGVDMAL

SEQ ID NO: 30181 - protein, 466 aa, synthetic construct; identical to SEQ ID NO: 28956
  REGION 1..466: note = neuraminidase__InfluenzaB__AHL94064

SEQ ID NO: 30182 - protein, 466 aa, synthetic construct; identical to SEQ ID NO: 28956
  REGION 1..466: note = neuraminidase__InfluenzaB__AHL94075

SEQ ID NO: 30183 - protein, 466 aa, synthetic construct
  REGION 1..466: note = neuraminidase__InfluenzaB__AHL94086
MLPSTIQTLTLFLTSGGVLLSLYVSASLSYLLYSDILLKFSRTEITAPIMPLDCANASNVQAVNRSATKGVTFLLPEPEWTYPRLSCPGSTFQKALLISPHRFGETKGNSAPLIIREPFVACGPKECKHFALTHYAAQPGGYYNGTREDRNKLRHLISVKLGKIPTVENSIFHMAAWSGSACHDGREWTYIGVDGPDSNALLKIKYGEAYTDTYHSYAKNILRTQESACNCIGGDCYLMITDGPASGISECRFLKIREGRIIKEIFPTGRVKHTEECTCGFASNKTIECACRDNSYTAKRPFVKLNVETDTAEIRLMCTETYLDTPRPNDGSITGPCESNGDKGSGGIKGGFVHQRMASKIGRWYSRTMSKTKRMGMGLYVKYDGDPWTDSEALALSGVMVSMEEPGWYSFGFEIKDKKCDVPCIGIEMVHDGGKTTWHSAATAIYCLMGSGQLLWDTVTGVNMTL

SEQ ID NO: 30184 - protein, 466 aa, synthetic construct; identical to SEQ ID NO: 29119
  REGION 1..466: note = neuraminidase__InfluenzaB__AHL94095

SEQ ID NO: 30185 - protein, 466 aa, synthetic construct; identical to SEQ ID NO: 28956
  REGION 1..466: note = neuraminidase__InfluenzaB__AHL94106

SEQ ID NO: 30186 - protein, 466 aa, synthetic construct
  REGION 1..466: note = neuraminidase__InfluenzaB__AHL94117
MLPSTIQMLTLFLTSGGVLLSLYVSASLSYLLYSDILLKFSPTEITAPTMPLDCANASNVHAVNRSATKGVTFLLPEPEWTYPRLSCPGSTFQKALLISPHRFGETKGNSAPLIIREPFIACGPNECKHFALTHYAAQPGGYYNGTRGDRNKLRHLISVKLGKIPTVENSIFHMAAWSGSACHDGKEWTYIGVDGPDNNALLKIKYGEAYTDTYHSYANNILRTQESACNCIGGNCYLMITDGSASGVSECRFLKIREGRIIKEIFPTGRVKHTEECTCGFASNKTIECACRDNSYTAKRPFVKLNVETDTAEIRLMCTDTYLDTPRPDDGSITGPCESNGDKGSGGIKGGFVHQRMASKIGRWYSRTMSKTERKGMGLHVKYDGDPWTDSDALAFRGVMVSMKEPGWYSFGFEIKDKKCDVPCIGIEMVHDGGKETWHSAATAIYCLMGSGQLLWDTVTGVNMAL

SEQ ID NO: 30187 - protein, 466 aa, synthetic construct; identical to SEQ ID NO: 28956
  REGION 1..466: note = neuraminidase__InfluenzaB__AHL94128

SEQ ID NO: 30188 - protein, 466 aa, synthetic construct
  REGION 1..466: note = neuraminidase__InfluenzaB__AHL94139
MLPSTIQTLTLFLTSGGVLLSLYVSALLSYLLYSDILLKFSPTEITAPTMSLDCANASNVQAVNRSATKGVTFLLPEPEWTYPRLSCPGSTFQRALLISPHRFGETKGNSAPLIIREPFIACGPNECKHFALTHYAAQPGGYYNGTRGDRNKLRHLISVKLGKIPTVENSIFHMAAWSGSACHDGKEWTYIGVDGPDNDALLKVKYGEAYTDTYHSYANKILRTQESACNCIGGNCYLMITDGSASGVSECRFLKIREGRIIKEIFPTGRVKHTEECTCGFASNKTIECACRDNSYTAKRPFVKLNVETDTAEIKLMCTDTYLDTPRPDDGSITGPCESNGDKGSGGIKGGFVHQRMESKIGRWYSRTMSKTERMGMGLYVKYDGDPWADSDALAFSGVMVSMKEPGWYSFGFEIKDKKCDVPCIGIEMVHDGGKETWHSAATAIYCLMGSGQLLWDTVTGVDMAL

SEQ ID NO: 30189 - protein, 466 aa, synthetic construct; identical to SEQ ID NO: 30146
  REGION 1..466: note = neuraminidase__InfluenzaB__AHL94150

SEQ ID NO: 30190 - protein, 466 aa, synthetic construct
  REGION 1..466: note = neuraminidase__InfluenzaB__AHL94161
MLPSTIQMLTLFLTSGGVLLSLYVSASLSYLLYSDILLKFSPTEITAPTMPLDCANASNVHAVNRSATKGVTFLLPEPEWTYPRLSCPGSTFQKALLISPHRFGETKGNSAPLIIREPFIACGPNECKHFALTHYAAQPGGYYNGTRGDRNKLRHLISVKLGKIPTVENSIFHMAAWSGSACHDGKEWTYIGVDGPDNNALLKIKYGEAYTDTYHSYANNILRTQESACNCIGGNCYLMITDGSASGVSECRFLKIREGRIIKEIFPTGRVKHTEECTCGFASNKTIECACRDNSYTAKRPFVKLNVETDTAKIRLMCTDTYLDTPRPDDGSITGPCESNGDKGSGGIKGGFVHQRMASKIGRWYSRTMSKTERKGMGLYVKYDGDPWTDSDALAFRGVMVSMKEPGWYSFGFEIKDKKCDVPCIGIEMVHDGGKETWHSAATAIYCLMGSGQLLWDTVTGVDMAL

SEQ ID NO: 30191 - protein, 466 aa, synthetic construct; identical to SEQ ID NO: 30146
  REGION 1..466: note = neuraminidase__InfluenzaB__AHL94183

SEQ ID NO: 30192 - protein, 467 aa, synthetic construct
  REGION 1..467: note = neuraminidase__InfluenzaB__AHL94194
MLPSTIQTLTLFLTSGGVLLSLYVSALLSYLLYSDILLKFSPTEITAPTMSLDCANASNVQAVNRSATKGVTFLLLPEPEWTYPRLSCPGSTFQRALLISPHRFGETKGNSAPLIIREPFIACGPNECKHFALTHYAAQPGGYYNGTRGDRNKLRHLISVKLGKIPTVENSIFHMAAWSGSACHDGKEWTYIGVDGPDNDALLKVKYGEAYTDTYHSYANKILRTQESACNCIGGNCYLMITDGSASGVSECRFLKIREGRIIKEIFPTGRVKHTEECTCGFASNKTIECACRDNSYTAKRPFVKLNVETDTAEIRLMCTDTYLDTPRPDDGSITGPCESNGDKGSGGIKGGFVHQRMESKIGRWYSRTMSKTERMGMGLYVKYDGDPWADSDALAFSGVMVSMKEPGWYSFGFEIKDKKCDVPCIGIEMVHDGGKETWHSAATAIYCLMGSGQLLWDTVTGVDMAL

SEQ ID NO: 30193 - protein, 466 aa, synthetic construct; identical to SEQ ID NO: 28956
  REGION 1..466: note = neuraminidase__InfluenzaB__AHL94205

SEQ ID NO: 30194 - protein, 466 aa, synthetic construct; identical to SEQ ID NO: 29119
  REGION 1..466: note = neuraminidase__InfluenzaB__AHL94214

SEQ ID NO: 30195 - protein, 466 aa, synthetic construct
  REGION 1..466: note = neuraminidase__InfluenzaB__AHL94224
MLPSTIQMLTLFLTSGGVLLSLYVSASLSYLLYSDILLKFSPTEITAPTMPLDCANASNVHAVNRSATKGVTFLLPEPEWTYPRLSCPGSTFQKALLISPHRFGETKGNSAPLIIREPFIACGPNECKHFALTHYAAQPGGYYNGTRGDRNKLRHLISVKLGKIPTVENSIFHMAAWSGSACHDGKEWTYIGVDGPDNNALLKIKYGEAYTDTYHSYANNILRTQESACNCIGGNCYLMITDGSASGVSECRFLKIREGRIIKEIFPTGRVKHTEECTCGFASNKTIECACRDNSYTAKRPFVKLNVETDTAEIRLMCTDTYLDTPRPDDGSITGPCESNGDKGSGGIKGGFVHQRMASKIGRWYSRTMSKTERKGMGLYVKYDGDPWIDSDALAFRGVMVSMKEPGWYSFGFEIKDKKCDVPCIGIEMVHDGGKETWHSAATAIYCLMGSGQLLWDTVTGVDMAL

SEQ ID NO: 30196 - protein, 466 aa, synthetic construct; identical to SEQ ID NO: 28956
  REGION 1..466: note = neuraminidase__InfluenzaB__AHL94235

SEQ ID NO: 30197 - protein, 466 aa, synthetic construct; identical to SEQ ID NO: 29119
  REGION 1..466: note = neuraminidase__InfluenzaB__AHL94246

SEQ ID NO: 30198 - protein, 466 aa, synthetic construct; identical to SEQ ID NO: 29119
  REGION 1..466: note = neuraminidase__InfluenzaB__AHL94257

SEQ ID NO: 30199 - protein, 466 aa, synthetic construct; identical to SEQ ID NO: 28817
  REGION 1..466: note = neuraminidase__InfluenzaB__AHL94267

SEQ ID NO: 30200 - protein, 466 aa, synthetic construct; identical to SEQ ID NO: 28817
  REGION 1..466: note = neuraminidase__InfluenzaB__AHL94278

SEQ ID NO: 30201 - protein, 466 aa, synthetic construct; identical to SEQ ID NO: 28817
  REGION 1..466: note = neuraminidase__InfluenzaB__AHL94299

SEQ ID NO: 30202 - protein, 466 aa, synthetic construct
  REGION 1..466: note = neuraminidase__InfluenzaB__AHL94310
MLPSTIQTLTLFLTSGGVLLSLYVSASLSYLLYSDILLKFSRTEITAPIMPLDCANASNVQAVNRSATKGVTPLLPEPEWTYPRLSCPGSTFQKALLISPHRFGETKGNSAPLIIREPFIACGPKECKHFALTHYAAQPGGYYNGTREDRNKLRHLISVKLGKIPTVENSIFHMAAWSGSACHDGREWTYIGVDGPDSNALLKIKYGEAYTDTYHSYAKNILRTQESACNCIGGDCYLMITDGSASGISECRFLKIREGRIIKEIFPTGRVKHTEECTCGFASNKTIECACRDNSYTAKRPFVKLNVETDTAEIRLMCTETYLDTPRPNDGSIAGPCESNGDEGSGGIKGGFVHQRMASKIGRWYSRTMSKTKRMGMGLYVKYDGDPWTDSEALALSGVMVSMEEPGWYSFGFEIKDKKCDVPCIGIEMVHDGGKTTWHSAATAIYCLMGSGQLLWDTVTGVNMTL

SEQ ID NO: 30203 - protein, 466 aa, synthetic construct; identical to SEQ ID NO: 30202
  REGION 1..466: note = neuraminidase__InfluenzaB__AHL94321

SEQ ID NO: 30204 - protein, 466 aa, synthetic construct
  REGION 1..466: note = neuraminidase__InfluenzaB__AHL94332
MLPSTIQTLTLFLTSGGVLLSLYVSASLSYLLYSDILLKFSRTEITAPIMPLDCANASNVQAVNRSATKGVTPLLPEPEWTYPRLSCPGSTFQKALLISPHRFGETKGNSAPLIIREPFIACGPKECKHFALTHYAAQPGGYYNGTREDRNKLRHLISVKLGKIPTVENSIFHMAAWSGSACHDGREWTYIGVDGPDSNALLKIKYGEAYTDTYHSYAKNILRTQESACNCIGGDCYLMITDGPASGISECRFLKIREGRIIKEIFPTGRVKHTEECTCGFASNKTIECACRDNSYTAKRPFVKLNVETDTAEIRLMCTETYLDTPRPNDGSITGPCESNGDEGSGGIKGGFVHQRMASKIGRWYSRTMSKTKRMGMGLYVKYDGDPWTDSEALALSGVMVSMEEPGWYSFGFEIKDKKCDVPCIGIEMVHDGGKTTWHSAATAIYCLMGSGQLLWDTVTGVNMTL

SEQ ID NO: 30205 - protein, 466 aa, synthetic construct; identical to SEQ ID NO: 28817
  REGION 1..466: note = neuraminidase__InfluenzaB__AHL94343

SEQ ID NO: 30206 - protein, 466 aa, synthetic construct
  REGION 1..466: note = neuraminidase__InfluenzaB__AHL94354
MLPSTIQTLTLFLTSGGVLLSLYVSASLSYLLYSDILLKFSPTEITAPTMPLDCANASNVQAVNRSATKGVTLLLPEPEWTYPRLSCPGSTFQKALLISPHRFGETKGNSAPLIIREPFIACGPNECKHFALTHYAAQPGGYYNGTRGDRNKLRHLISVKLGKIPTVENSIFHMAAWSGSACHDGKEWTYIGVDGPDNNALLKVKYGEAYTDTYHSYANKILRTQESACNCIGGNCYLMITDGSASGVSECRFLKIREGRIIKEIFPTGRVKHTEECTCGFASNKTIECACRDNRYTAKRPFVKLNVETDTAEIRLMCTDTYLDTPRPNDGSITGPCESDGDKGSGGIKGGFVHQRMKSKIGRWYSRTMSKTERMGMGLYVKYDGDPWADSDALAFSGVMVSMKEPGWYSFGFEIKDKKCDVPCIGIEMVHDGGKETWHSAATAIYCLMGSGQLLWDTVTGVDMAL

SEQ ID NO: 30207 - protein, 466 aa, synthetic construct; identical to SEQ ID NO: 30206
  REGION 1..466: note = neuraminidase__InfluenzaB__AHL94365

SEQ ID NO: 30208 - protein, 466 aa, synthetic construct
  REGION 1..466: note = neuraminidase__InfluenzaB__AHL94387
MLPSTIQTLTLFLTSGGVLLSLYVSASLSYLLYSDILLKFSPTEITAPTMPLDCANASTVQAVNRSATKGVTLLLPEPEWTYPRLSCPGSTFQKALLISPHRFGETKGNSAPLIIREPFIACGPNECKHFALTHYAAQPGGYYNGTRGDRNKLRHLISVKLGKIPTVENSIFHMAAWSGSACHDGKEWTYLGVDGPDNNALLKVKYGEAYTDTYHSYANKILRTQESACNCIGGNCYLMITDGSASGVSECRFLKIREGRIIKEIFPTGRVKHTEECTCGFASNKTIECACRDNRYTAKRPFVKLNVETDTAEIRLMCTDTYLDTPRPNDGSITGPCESDGDKGSGGIKGGFVHQRMKSKIGRWYSRTMSKTERMGMGLYVKYDGDPWADSDALAFSGVMVSMKEPGWYSFGFEIKDKKCDVPCIGIEMVHDGGKEIWHSAATAIYCLMGSGQLLWDTVTGVDMAL

SEQ ID NO: 30209 - protein, 467 aa, synthetic construct
  REGION 1..467: note = neuraminidase__InfluenzaB__AHL94398
MLPSTIQTLTLFLTSGGVLLSLYVSASLSYLLYSDILLKFSPTEITAPTMPLDCANASNVQAVNRSATKGVTLLLLPEPEWTYPRLSCPGSTFQKALLISPHRFGETKGNSAPLIIREPFIACGPNECKHFALTHYAAQPGGYYNGTRGDRNKLRHLISVKLGKIPTVENSIFHMAAWSGSACHDGKEWTYIGVDGPDNNALLKVKYGEAYTDTYHSYANKILRTQESACNCIGGNCYLMITDGSASGVSECRFLKIREGRIIKEIFPTGRVKHTEECTCGFASNKTIECACRDNRYTAKRPFVKLNVETDTAEIRLMCTDTYLDTPRPNDGSITGPCESDGDKGSGGIKGGFVHQRMKSKIGRWYSRTMSKTERMGMGLYVKYDGDPWADSDALAFSGVMVSMKEPGWYSFGFEIKDKKCDVPCIGIEMVHDGGKETWHSAATAIYCLMGSGQLLWDTVTGVDMAL

SEQ ID NO: 30210 - protein, 466 aa, synthetic construct; identical to SEQ ID NO: 30206
  REGION 1..466: note = neuraminidase__InfluenzaB__AHL94409

SEQ ID NO: 30211 - protein, 466 aa, synthetic construct
  REGION 1..466: note = neuraminidase__InfluenzaB__AHL94431
MLPSTIQTLTLFLTSGGVLLSLYVSASLSYLLYSDILLKFSQTEITAPIMPLDCANASNVQAVNHSAAKGVTLILPEPEWTYPRLSCPGSTFQKALLISPHRFGEIKGNSAPLIIREPFIACGPTECKHFALTHYAAQPGGYYNGTREDRNKLRHLISVKLGKIPTVENSIFHMAAWSGSACHDGKEWTYIGVDGPDSNALLKIKYGEAYTDTYHSYAKNILRTQESACNCIGGDCYLMITDGPASGVSECRFLKIREGRIIKEIFPTGRVKHTEECTCGFASNKTIECACRDNRYTAKRPFVKLNVETDTAEIRLMCTETYLDTPRPNDGSITGPCESDGDKGSGGIKGGFVHQRMASKIGRWYSRTMSKTKRMGMGLYVKYDGDPWTDSEALALSGVMISMEEPGWYSFGFEIKDKKCDVPCIGIEMVHDGGKTTWHSAATAIYCLMGSGQLLWDTVTGVDMAL

SEQ ID NO: 30212 - protein, 466 aa, synthetic construct
  REGION 1..466: note = neuraminidase__InfluenzaB__AHL94442
MLPSTIQTLTLFLTSGGVLLSLYMSASLSYLLYSDILLKFSRTEITAPIMPLDCANASNVQAVNRSATKGVTPLLPEPEWTYPRLSCPGSTFQKALLISPHRFGETKGNSAPLIIREPFIACGPKECKHFALTHYAAQPGGYYNGTREDRNKLRHLISVKLGKIPTVENSIFHMAAWSGSACHDGREWTYIGVDGPDSNALLKIKYGEAYTDTYHSYAKNILRTQESACNCIGGDCYLMITDGSASGISECRFLKIREGRIIKEIFPTGRVKHTEECTCGFASNKTIECACRDNSYTAKRPFVKLNVETDTAEIRLMCTETYLDTPRPNDGSIAGPCESNGDEGSGGIKGGFVHQRMASKIGRWYSRTMSKTKRMGMGLYVKYDGDPWTDSEALALSGVMVSMEEPGWYSFGFEIKDKKCDVPCIGIEMVHDGGKTTWHSAATAIYCLMGSGQLLWDTVTGVNMTL

SEQ ID NO: 30213 - protein, 466 aa, synthetic construct; identical to SEQ ID NO: 30202
  REGION 1..466: note = neuraminidase__InfluenzaB__AHL94464

SEQ ID NO: 30214 - protein, 466 aa, synthetic construct; identical to SEQ ID NO: 28817
  REGION 1..466: note = neuraminidase__InfluenzaB__AHL94475

SEQ ID NO: 30215 - protein, 466 aa, synthetic construct; identical to SEQ ID NO: 30206
  REGION 1..466: note = neuraminidase__InfluenzaB__AHL94486

SEQ ID NO: 30216 - protein, 466 aa, synthetic construct; identical to SEQ ID NO: 28817
  REGION 1..466: note = neuraminidase__InfluenzaB__AHL94497

SEQ ID NO: 30217 - protein, 466 aa, synthetic construct; identical to SEQ ID NO: 30202
  REGION 1..466: note = neuraminidase__InfluenzaB__AHL94508

SEQ ID NO: 30218 - protein, 466 aa, synthetic construct
  REGION 1..466: note = neuraminidase__InfluenzaB__AHL94519
MLPSTIQTLTLFLTSGGVLLSLYVSASLSYLLYSDILLKFSPTEITAPTMPLDCANASNVQAVNRSATKGVTLLLPEPEWTYPRLSCPGSTFQKALLISPHRFGETKGNSAPLIIREPFIACGPNECKHFALTHYAAQPGGYYNGTRGDRNKLRHLISVKLGKIPTVENSIFHMAAWSGSACHDGKEWTYIGVDGPDNNALLKVKYGEAYTDTYHSYANKILRTQESACNCIGGNCYLMITDGSASGVSECRFLKIREGRIIKEIFPTGRVKHTEECTCGFASNKTIECACRDNSYTAKRPFVKLNVETDTAEIRLMCTDTYLDTPRPNDGSITGPCESDGDKGSGGIKGGFVHQRMESKIGRWYSRTMSKTERMGMGLYVKYDGDPWTDSDALAFSGVMVSMKEPGWYSFGFEIKDKKCDVPCIGIEMVHDGGKETWHSAATAIYCLMGSGQLLWDTVTGVDMAL

SEQ ID NO: 30219 - protein, 466 aa, synthetic construct; identical to SEQ ID NO: 30202
  REGION 1..466: note = neuraminidase__InfluenzaB__AHL94530

SEQ ID NO: 30220 - protein, 466 aa, synthetic construct; identical to SEQ ID NO: 30206
  REGION 1..466: note = neuraminidase__InfluenzaB__AHL94541

SEQ ID NO: 30221 - protein, 466 aa, synthetic construct
  REGION 1..466: note = neuraminidase__InfluenzaB__AHL94563
MLPSTIQTLTLFLTLGGVLLSLYVSASLSYLLYSDILLKFSRTEITAPIMPLDCANASNVQAVNRSATKGVTLLLPEPEWTYPRLSCPGSTFQKALLISPHRFGETKGNSAPLIIREPFIACGPKECKHFALTHYAAQPGGYYNGTREDRNKLRHLISVKLGKIPTVENSIFHMAAWSGSACHDGREWTYIGVDGPDSNALLKIKYGEAYTDTYHSYAKNILRTQESACNCIGGDCYLMITDGPASGISECRFLKIREGRIIKEIFPTGRVKHTEECTCGFASNKTIECACRDNSYTAKRPFVKLNVETDTAEIRLMCTETYLDTPRPNDGSITGPCESNGDKGSGGIKGGFVHQRMASKIGRWYSRTMSKTKRMGMGLYVKYDGDPWTDSEALALSGVMVSMEEPGWYSFGFEIKDKKCDVPCIGIEMVHDGGKTTWHSAATAIYCLMGSGQLLWDTVTGVNMTL

SEQ ID NO: 30222 - protein, 466 aa, synthetic construct; identical to SEQ ID NO: 30175
  REGION 1..466: note = neuraminidase__InfluenzaB__AHL94574

SEQ ID NO: 30223 - protein, 466 aa, synthetic construct
  REGION 1..466: note = neuraminidase__InfluenzaB__AHL94585
MLPSTIQTLTLFLTSGGVLLSLYVSASLSYLLYSDILLKFSQTEITAPIMPLDCANASNVQAVNRSAAKGVTLLLPEPEWTYPRLSCPGSTFQKALLISPHRFGEIKGNSAPLIIREPFIACGPTECKHFALTHYAAQPGGYYNGTREDRNKLRHLISVKLGKIPTVENSIFHMAAWSGSACHDGKEWTYIGVDGPDSNALLKIKYGEAYTDTYHSYAKNILRTQESACNCIGGDCYLMITDGPASGVSECRFLKIREGRIIKEIFPKGRVKHTEECTCGFASNKTIECACRDNRYTAKRPFVKLNVETDTAEIRLMCTETYLDTPRPNDGSITGPCESDGDKGSGGIKGGFVHQRMASKIGRWYSRTMSKTKRMGMGLYVKYDGDPWTDSEALALSGVMVSMEEPGWYSFGFEIKDKKCDVPCIGIEMVHDGGKTTWHSAATAIYCLMGSGQLLWDTVTGVDMAL

SEQ ID NO: 30224 - protein, 466 aa, synthetic construct; identical to SEQ ID NO: 30175
  REGION 1..466: note = neuraminidase__InfluenzaB__AHL94596

SEQ ID NO: 30225 - protein, 466 aa, synthetic construct
  REGION 1..466: note = neuraminidase__InfluenzaB__AHL94607
MLPSTIQTLTLFLTSGGVLLSLYVSASLSYLLYSDILLKFSPTEITAPTMPLDCANASNVQAVNRSATKGVTLLLPEPEWTYPRLSCPGSTFQKALLISPHRFGETKGNSAPLIIREPFIACGPNECKHFALTHYAAQPGGYYNGTRGDRNKLRHLISVKLGKIPTVENSIFHMAAWSGSACHDGKEWTYIGVDGPDNNALLKVKYGEAYTDTYHSYANKILRTQESACNCIGGNCYLMITDGSASGVSECRFLKIREGRIIKEIFPTGRVKHTEECTCGFASNKTIECACRDNRYTAKRPFVKLNVETDTAEIRLMCTDTYLDTPRPNDGSITGPCESDGDKGSGGIKGGFVHQRLKSKIGRWYSRTMSKTERMGMGLYVKYDGDPWADSDALTFSGVMVSMKEPGWYSFGFEIKDKKCDVPCIGIEMVHDGGKETWHSAATAIYCLMGSGQLLWDTVTGVDMAL

SEQ ID NO: 30226 - protein, 466 aa, synthetic construct; identical to SEQ ID NO: 30206
  REGION 1..466: note = neuraminidase__InfluenzaB__AHL94618

SEQ ID NO: 30227 - protein, 466 aa, synthetic construct; identical to SEQ ID NO: 30202
  REGION 1..466: note = neuraminidase__InfluenzaB__AHL94628

SEQ ID NO: 30228 - protein, 466 aa, synthetic construct; identical to SEQ ID NO: 30206
  REGION 1..466: note = neuraminidase__InfluenzaB__AHL94639

SEQ ID NO: 30229 - protein, 466 aa, synthetic construct
  REGION 1..466: note = neuraminidase__InfluenzaB__AHL94650
MLPSTIQTLTLFLTSGGVLLSLYVSASLSYLLYSDILLKFSPTEITAPTMPLDCANASNVQAVNRSATKGVTLLLPEPEWTYPRLSCPGSTFQKALLISPHRFGETKGNSAPLIIREPFIACGPNECKHFALTHYAAQPGGYYNGTRGDRNKLRHLISVKLGKIPTVENSIFHMAAWSGSACHDGKEWTYIGVDGPDNNALLKVKYGEAYTDTYHSYANKILRTQESACNCIGGNCYLMITDGSASGVSECRFLKIREGRIIREIFPTGRVKHTEECTCGFASNKTIECACRDNRYTAKRPFVKLNVETDTAEIRLMCTDTYLDTPRPNDGSITGPCESDGDKGSGGIKGGFVHQRMKSKIGRWYSRTMSKTERMGMGLYVKYDGDPWADSDALAFSGVMVSMKEPGWYSFGFEIKDKKCDVPCIGIEMVHDGGKETWHSAATAIYCLMGSGQLLWDTVTGVDMAL

SEQ ID NO: 30230 - protein, 466 aa, synthetic construct
  REGION 1..466: note = neuraminidase__InfluenzaB__AHL94661
MLPSTIQTLTLFLTSGGVLLSLYVSASLSYLLYSDILLKFPSTEITAPTMPLDCANASNVQAVNRSATKGVTLLLPEPEWTYPRLSCPGSTFQKALLISPHRFGETKGNSAPLIIREPFIACGPKECKHFALTHYAAQPGGYYNGTRGDRNKLRHLISVKLGKIPTVENSIFHMAAWSGSACHDGKEWTYIGVDGPDNNALLKIKYGEAYTDTYHSYANNILRTQESACNCIGGNCYLMITDGSASGVSECRFLKIREGRIIKEIFPTGRIQHTEECTCGFASNKTIECACRDNSYTAKRPFVKLNVETDTAEIRLMCTKTYLDTPRPEDGSITGPCESNGGKGSGGIKGGFVHQRMASKIGRWYSRTMSKTERKGMGLYVKYNGDPWADSDALVFSGVMVSMEEPGWYSFGFEIKDKKCDVPCIGIEMVHDGGKETWHSAATAIYCLMGSGQLLWDTVTGVNMTL

SEQ ID NO: 30231 - protein, 466 aa, synthetic construct
  REGION 1..466: note = neuraminidase__InfluenzaB__AHL94672
MLPSTIQTLTLFLTSGGVLLSLYVSASLSYLLYSDILLKFSRTEITAPIMPLDCANASNVQAVNRSATKGVTPLLPEPEWTYPRLSCPGSTFQKALLISPHRFGETKGNSAPLIIREPFIACGPKECKHFALTHYAAQPGGYYNGTREDRNKLRHLISVKLGKIPTVENSIFHMAAWSGSACHDGREWTYIGVDGPDSNALLKIKYGEAYTDTYHSYAKNILRTQESACNCIGGDCYLMITDGSASGISECRFLKIREGRIIKEIFPTGRVKHTEECTCGFASNKTIECACRDNSYTAKRPFVKLNVETDTAEIRLMCTETYLDTPRPNDGSISGPCESNGDEGSGGIKGGFVHQRMASKIGRWYSRTMSKTKRMGMGLYVKYDGDPWTDSEALALSGVMVSMEEPGWYSFGFEIKDKKCDVPCIGIEMVHDGGKTTWHSAATAIYCLMGSGQLLWDTVTGVNMTL

SEQ ID NO: 30232 - protein, 466 aa, synthetic construct
  REGION 1..466: note = neuraminidase__InfluenzaB__AHL94683
MLPSTIQTLTLFLTSGGVLLSLYVSASLSYLLYSDILLKFSRTEITAPIMPLDCANASNVQAVNRSATKGVTPLLPEPEWTYPRLSCPGSTFQKALLISPHRFGETKGNSAPLIIREPFIACGPKECKHFALTHYAAQPGGYYNGTREDRNKLRHLISVKLGKIPTVENSIFHMAAWSGSACHDGREWTYIGVDGPDSNALLKIKYGEAYTDTYHSYAKNILRTQESACNCIGGDCYLMITDGSASGISECRFLKIREGRIIKEIFPTGRVKHTEECTCGFASNKTIECACRDNSYTAKRPFVKLNVETDTAEIRLMCTETYLDTPRPNDGSITGPCESNGGEGSGGIKGGFVHQRMASKIGRWYSRTMSKTKRMGMGLYVKYDGDPWTDSEALALSGVMVSMEEPGWYSFGFEIKDKKCDVPCIGIEMVHDGGKTTWHSAATAIYCLMGSGQLLWDTVTGVNMTL

SEQ ID NO: 30233 - protein, 466 aa, synthetic construct
  REGION 1..466: note = neuraminidase__InfluenzaB__AHL94694
MLPSTIQTLTLFLTSGGVLLSLYVSASLSYLLYSDILLKFSPTEITAPTMPLDCANASNVQAVNRSATKGVTLLLPEPEWTYPRLSCPGSTFQKALLISPHRFGETKGNSAPLIIREPFIACGPNECKHFALTHYAAQPGGYYNGTRGDRNKLRHLISVKLGKIPTVENSIFHMAAWSGSACHDGKEWTYIGVDGPDNNALLKVKYGEAYTDTYHSYANKILRTQESACNCIGGNCYLMITDGSASGVSECRFLKIREGRIIKEIFPTGRVKHTEECTCGFASNKTIECACRDNRYTAKRPFVKLNVETDTAEIRLMCTDTYLDTPRPNDGSITGPCESDGDKGSGGIKGGFVHQRMKSKIGRWYSRTMSKTERMGMGLYVKYDGDPWADSDALTFSGVMVSMKEPGWYSFGFEIKDKKCDVPCIGIEMVHDGGKETWHSAATAIYCLMGSGQLLWDTVTGVDMAL

SEQ ID NO: 30234 - protein, 466 aa, synthetic construct; identical to SEQ ID NO: 30206
  REGION 1..466: note = neuraminidase__InfluenzaB__AHL94705

SEQ ID NO: 30235 - protein, 466 aa, synthetic construct; identical to SEQ ID NO: 28817
  REGION 1..466: note = neuraminidase__InfluenzaB__AHL94716

SEQ ID NO: 30236 - protein, 466 aa, synthetic construct
  REGION 1..466: note = neuraminidase__InfluenzaB__AHL94727
MLPSTIQTLTLFLTSGGVLLSLYVSASLSYLLYSDILLKFPSTEITAPTMPLDCANTSNVQAVNRSATKGVTLLLPEPEWTYPRLSCPGSTFQKALLISPHRFGETKGNSAPLIIREPFIACGPKECKHFALTHYAAQPGGYYNGTRGDRNKLRHLISVKLGKIPTVENSIFHMAAWSGSACHDGKEWTYIGVDGPDNNALLKIKYGEAYTDTYHSYANNILRTQESACNCIGGNCYLMITDGSASGVSECRFLKIREGRIIKEIFPTGRIQHTEECTCGFASNKTIECACRDNSYTAKRPFVKLNVETDTAEIRLMCTKTYLDTPRPEDGSITGPCESNGGKGSGGIKGGFVHQRMASKIGRWYSRTMSKTERKGMGLYVKYNGDPWADSDALVFSGVMVSMEEPGWYSFGFEIKDKKCDVPCIGIEMVHDGGKETWHSAATAIYCLMGSGQLLWDTVTGVNMTL

SEQ ID NO: 30237 - protein, 466 aa, synthetic construct; identical to SEQ ID NO: 28817
  REGION 1..466: note = neuraminidase__InfluenzaB__AHL94738

SEQ ID NO: 30238 - protein, 466 aa, synthetic construct
  REGION 1..466: note = neuraminidase__InfluenzaB__AHL94749
MLPSTIQTLTLFLTSGGVLLSLYVSASLSYLLYSDILLKFSPTEITAPTMPLDCANASNVQAVNRSATKGVTLLLPEPEWTYPRLSCPGSTFQKALLISPHRFGETKGNSAPLIIREPFIACGPNECKHFALTHYAAQPGGYYNGTRGDRNKLRHLISVKLGKIPTVENSIFHMAAWSGSACHDGKEWTYIGVDGPDNNALLKVKYGEAYTDTYHSYANKILRTQESACNCIGGNCYLMITDGSASGVSECRFLKIREGRIIKEIFPTGRVKHTEECTCGFASNKTIECACRDNRYTAKRPFVKLNVETDTAEIRLMCTDTYLDTPRPNDGSITGPCESDGDKGSGGIKGGFVHQRMKSKIGRWYSRTMSKTERMGMGLYVKYDGDPWADSDALAFSGVMVSMKEPGWYSFGFEIKDKKCDVPCIGVEMVHDGGKETWHSAATAIYCLMGSGQLLWDTVTGVDMAL

SEQ ID NO: 30239 - protein, 466 aa, synthetic construct
  REGION 1..466: note = neuraminidase__InfluenzaB__AHL94760
MLPSTIQTLTLFLTSGGVLLSLYVSASLSYLLYSDILLKFSQTEITAPIMPLDCANASNVQAVNHSAAKGVTLLLPEPEWTYPRLSCPGSTFQKALLISPHRFGEIKGNSAPLIIREPFIACGPTECKHFALTHYAAQPGGYYNGTREDRNKLRHLISVKLGKIPTVENSIFHMAAWSGSACHDGKEWTYIGVDGPDSNALLKIKYGEAYTDTYHSYAKNILRTQESACNCIGGDCYLMITDGPASGVSECRFLKIREGRIIKEIFPTGRVKHTEECTCGFASNKTIECACRDNRYTAKRPFVKLNVETDTAEIRLMCTETYLDTPRPNDGSITGPCESDGDKGSGGIKGGFVHQRMASKIGRWYSRTMSKTKRMGMGLYVKYDGDPWTDSEALALSGVMVSMEEPGWYSFGFEIKDKKCDIPCIGIEMVHDGGKTTWHSAATAIYCLMGSGQLLWDTVTGVDMAL

SEQ ID NO: 30240 - protein, 466 aa, synthetic construct; identical to SEQ ID NO: 30206
  REGION 1..466: note = neuraminidase__InfluenzaB__AHL94770

SEQ ID NO: 30241 - protein, 466 aa, synthetic construct; identical to SEQ ID NO: 30204
  REGION 1..466: note = neuraminidase__InfluenzaB__AHL94781

SEQ ID NO: 30242 - protein, 466 aa, synthetic construct; identical to SEQ ID NO: 30202
  REGION 1..466: note = neuraminidase__InfluenzaB__AHL94791

SEQ ID NO: 30243 - protein, 466 aa, synthetic construct; identical to SEQ ID NO: 30233
  REGION 1..466: note = neuraminidase__InfluenzaB__AHL94801

SEQ ID NO: 30244 - protein, 466 aa, synthetic construct; identical to SEQ ID NO: 30202
  REGION 1..466: note = neuraminidase__InfluenzaB__AHL94812

SEQ ID NO: 30245 - protein, 466 aa, synthetic construct; identical to SEQ ID NO: 30202
  REGION 1..466: note = neuraminidase__InfluenzaB__AHL94821

SEQ ID NO: 30246 - protein, 466 aa, synthetic construct; identical to SEQ ID NO: 30206
  REGION 1..466: note = neuraminidase__InfluenzaB__AHL94831

SEQ ID NO: 30247 - protein, 466 aa, synthetic construct
  REGION 1..466: note = neuraminidase__InfluenzaB__AHL94840
MLPSTIQTLTLFLTSGGVLLSLYVSASLSYLLYSGILLKFSRTEITAPIMPLDCANASNVQAVNRSATKGVTLLLPEPEWTYPRLSCPGSTFQKALLISPHRFGETKGNSAPLIIREPFIACGPKECKHFALTHYAAQPGGYYNGTREDRNKLRHLISVKLGKIPTVENSIFHMAAWSGSACHDGREWTYIGVDGPDSNALLKIKYGEAYTDTYHSYAKNILRTQESACNCIGGDCYLMITDGPASGISECRFLKIREGRIIKEIFPTGRVKHTEECTCGFASNKTIECACRDNSYTAKRPFVKLNVETDTAEIRLMCTETYLDTPRPNDGSITGPCESNGDKGSGGIKGGFVHQRMASKIGRWYSRTMSKTKRMGMGLYVKYDGDPWTDSEALALSGVMVSMEEPGWYSFGFEIKDKKCDVPCIGIEMVHDGGKTTWHSAATAIYCLMGSGQLLWDTVTGVNMTL

SEQ ID NO: 30248 - protein, 466 aa, synthetic construct
  REGION 1..466: note = neuraminidase__InfluenzaB__AHL94851
MLPSTIQTLTLFLTSGGVLLSLYVSASLSYLLYSDILLKFSQTEITAPIMPLDCTNASNVQAVNRSAAKGVTLLLPEPEWTYPRLSCPGSTFQKALLISPHRFGEIKGNSAPLIIREPFIACGPTECKHFALTHYAAQPGGYYNGTREDRNKLRHLISVKLGKIPTVENSIFHMAAWSGSACHDGKEWTYIGVDGPDSNALLKIKYGEAYTDTYHSYAKNILRTQESACNCIGGDCYLMITDGPASGVSECRFLKIREGRIIKEIFPTGRVKHTEECTCGFASNKTIECACRDNRYTAKRPFVKLNVETDTAEIRLMCTETYLDTPRPNDGSITGPCESDGDKGSGGIKGGFVHQRMTSKIGRWYSRTMSKTKRMGMGLYVKYDGDPWTDSEALALSGVMVSMEEPGWYSFGFEIKDKKCDVPCIGIEMVHDGGKTTWHSAATAIYCLMGSGQLLWDTVTGVDMAL

SEQ ID NO: 30249 - protein, 466 aa, synthetic construct; identical to SEQ ID NO: 28635
  REGION 1..466: note = neuraminidase__InfluenzaB__AHL94862

SEQ ID NO: 30250 - protein, 466 aa, synthetic construct; identical to SEQ ID NO: 28817
  REGION 1..466: note = neuraminidase__InfluenzaB__AHL94873

SEQ ID NO: 30251 - protein, 466 aa, synthetic construct; identical to SEQ ID NO: 30121
  REGION 1..466: note = neuraminidase__InfluenzaB__AHL94884

SEQ ID NO: 30252 - protein, 466 aa, synthetic construct; identical to SEQ ID NO: 28961
  REGION 1..466: note = neuraminidase__InfluenzaB__AHL94893

SEQ ID NO: 30253 - protein, 466 aa, synthetic construct; identical to SEQ ID NO: 28961
  REGION 1..466: note = neuraminidase__InfluenzaB__AHL94904

SEQ ID NO: 30254 - protein, 466 aa, synthetic construct
  REGION 1..466: note = neuraminidase__InfluenzaB__AHL94915
MLPSTIQTLTLFLTSGGVLLSLYVSASLSYLLYSDILLKFSPTEITAPTMPLDCANASNVQVVNRSATKGVTLLLPEPEWTYPRLSCPGSTFQKALLISPHRFGETKGNSAPLIIREPFIACGPNECKHFALTHYAAQPGGYYNGTRGDRNKLRHLISVKLGKIPTVENSIFHMAAWSGSACHDGKEWTYIGVDGPDNNALLKVKYGEAYTDTYHSYANKILRTQESACNCIGGNCYLMITDGSASGVSECRFLKIREGRIIKEIFPTGRVKHTEECTCGFASNKTIECACRDNSYTAKRPFVKLNVETDTAEIRLMCTDTYLDTPRPDDGSITGPCESNGDKGSGGIKGGFVHQRMESKIGRWYSRTMSKTERMGMGLYVKYDGDPWADSDALAFSGVMVSMKEPGWYSFGFEIKDKKCDVPCIGIEMVHDGGKETWHSAATAIYCLMGSGQLLWDTVTGVDMAL

SEQ ID NO: 30255 - protein, 466 aa, synthetic construct; identical to SEQ ID NO: 30121
  REGION 1..466: note = neuraminidase__InfluenzaB__AHL94926

SEQ ID NO: 30256 - protein, 466 aa, synthetic construct
  REGION 1..466: note = neuraminidase__InfluenzaB__AHL94937
MLPSTIQTLTLFLTSGGVLLSLYVSASLSYLLYSDILLKFSPTEITAPTLPLDCANASNVQAVNRSATKGVTLLLPEPEWTYPRLSCPGSTFQKALLISPHRFGETKGNSAPLIIREPFIACGPNECKHFALTHYAAQPGGYYNGTRGDRNKLRHLISVKLGKIPTVENSIFHMAAWSGSACHDGKEWTYIGVDGPDNNALLKVKYGEAYTDTYHSYANKILRTQESACNCIGGNCYLMITDGSASGVSECRFLKIREGRIIKEIFPTGRVKHTEECTCGFASNKTIECACRDNSYTAKRPFVKLNVETDTAEIRLMCTDTYLDTPRPNDGSITGPCESNGDKGSGGIKGGFVHQRMESKIGRWYSRTMSKTERMGMGLYVKYDGDPWADSDALAFSGVMVSMKEPGWYSFGFEIKDKKCDVPCIGIEMVHDGGKETWHSAATAIYCLMGSGQLLWDTVTGVDMAL

SEQ ID NO: 30257 - protein, 466 aa, synthetic construct; identical to SEQ ID NO: 30140
  REGION 1..466: note = neuraminidase__InfluenzaB__AHL94948

SEQ ID NO: 30258 - protein, 466 aa, synthetic construct; identical to SEQ ID NO: 28956
  REGION 1..466: note = neuraminidase__InfluenzaB__AHL94959

SEQ ID NO: 30259 - protein, 466 aa, synthetic construct; identical to SEQ ID NO: 28956
  REGION 1..466: note = neuraminidase__InfluenzaB__AHL94969

SEQ ID NO: 30260 - protein, 466 aa, synthetic construct; identical to SEQ ID NO: 28956
  REGION 1..466: note = neuraminidase__InfluenzaB__AHL94978

SEQ ID NO: 30261 - protein, 466 aa, synthetic construct
  REGION 1..466: note = neuraminidase__InfluenzaB__AHM00990
MLPSTIQTLTLFLTSGGVLLSLYVSASLSYLLYSDILLKFSQTEITAPIMPLDCTNASNVQAVNHSAAKGVTLLLPEPEWTYPRLSCPGSTFQKALLISPHRFGEIKGNSAPLIIREPFIACGPTECKHFALTHYAAQPGGYYNGTREDRNKLRHLISVKLGKIPTVENSIFHMAAWSGSACHDGKEWTYIGVDGPDSNALLKIKYGEAYTDTYHSYAKNILRTQESACNCIGGDCYLMITDGPASGVSECRFLKIREGRIIKEIFPTGRVKHTEECTCGFASNKTIECACRDNRYTAKRPFVKLNVETDTAEIRLMCTETYLDTPRPNDGSITGPCESDGDKGSGGIKGGFVHQRMASKIGRWYSRTMSKTKRMGMGLYVKYDGDPWTDSEALALSGVMVSMEEPGWYSFGFEIKDKKCDVPCIGIEMVHDGGKTTWHSAATAIYCLMGSGQLLWDTVTGVDMAL

SEQ ID NO: 30262 - protein, 466 aa, synthetic construct; identical to SEQ ID NO: 30206
  REGION 1..466: note = neuraminidase__InfluenzaB__AHM01001

SEQ ID NO: 30263 - protein, 466 aa, synthetic construct
  REGION 1..466: note = neuraminidase__InfluenzaB__AHM01012
MLPSTIQTLTLFLTSGGVLLSLYVSASLSYLLYSDILLKFSPTEITAPTMPLDCANASNVQAVNRSATKGVTLLLPEPEWTYPRLSCPGSTFQKALLISPHRFGETKGNSAPLIIREPFIACGPNECKHFALTHYAAQPGGYYNGTRGDRNKLRHLISVKLGKIPTVENSIFHMAAWSGSACHDGKEWTYIGVDGPDNNALLKVKYGEAYTDTYHSYANKILRTQESACNCIGGNCYLMITDGSASGVSECRFLKIREGRIIKEIFPTGRVKHTEECTCGFASNKTIECACRDNRYTAKRPFVKLNVETDTAEIRLMCTDTYLDTPRPNDGSITGPCESDGDKGSGGIKGGFVHQRMKSKIGRWYSRTMSKTERMGMGLYVKYDGDPWTDSDALAFSGVMVSMKEPGWYSFGFEIKDKKCDVPCIGIEMVHDGGKETWHSAATAIYCLMGSGQLLWDTVTGVDMAL

SEQ ID NO: 30264 - protein, 466 aa, synthetic construct; identical to SEQ ID NO: 30206
  REGION 1..466: note = neuraminidase__InfluenzaB__AHM01023

SEQ ID NO: 30265 - protein, 466 aa, synthetic construct; identical to SEQ ID NO: 30206
  REGION 1..466: note = neuraminidase__InfluenzaB__AHM01034

SEQ ID NO: 30266 - protein, 466 aa, synthetic construct
  REGION 1..466: note = neuraminidase__InfluenzaB__AHM01045
MLPSTIQTLTLFLTSGGVLLSLYVSASLSYLLYSDILLKFSPTEITAPTMPLDCANASNVQAVNRSATKGVTLLLPEPGWTYPRLSCPGSTFQKALLISPHRFGETKGNSAPLIIREPFIACGPNECKHFALTHYAAQPGGYYNGTRGDRNKLRHLISVKLGKIPTVENSIFHMAAWSGSACHDGKEWTYIGVDGPDNNALLKVKYGEAYTDTYHSYANKILRTQESACNCIGGNCYLMITDGSASGVSECRFLKIREGRIIKEIFPTGRVKHTEECTCGFASNKTIECACRDNRYTAKRPFVKLNVETDTAEIRLMCTDTYLDTPRPNDGSITGPCESDGDKGSGGIKGGFVHQRMKSKIGRWYSRTMSKTERMGMGLYVKYDGDPWADSDALAFSGVMVSMKEPGWYSFGFEIKDKKCDVPCIGIEMVHDGGKETWHSAATAIYCLMGSGQLLWDTVAGVDMAL

SEQ ID NO: 30267 - protein, 466 aa, synthetic construct
  REGION 1..466: note = neuraminidase__InfluenzaB__AHM01056
MLPSTTQTLTLFLTSGGVLLSLYVSASLSYLLYSDILLKFSPTEITAPTMPLDCANASNVQAVNRSATKGVTLLLPEPEWTYPRLSCPGSTFQKALLISPHRFGETKGNSAPLIIREPFIACGPNECKHFALTHYAAQPGGYYNGTRGDRNKLRHLISVKLGKIPTVENSIFHMAAWSGSACHDGKEWTYIGVDGPDNNALLKVKYGEAYTDTYHSYANKILRTQESACNCIGGNCYLMITDGSASGVSECRFLKIREGRIIKEIFPTGRVKHTEECTCGFASNKTIECACRDNRYTAKRPFVKLNVETDTAEIRLMCTDTYLDTPRPNDGSITGPCESDGDKGSGGIKGGFVHQRMKSKIGRWYSRTMSKTERMGMGLYVKYDGDPWADSDALVFSGVMVSMKEPGWYSFGFEIKDKKCDVPCIGIEMVHDGGKETWHSAATAIYCLMGSGQLLWDTVTGVDMAL

SEQ ID NO: 30268 - protein, 466 aa, synthetic construct; identical to SEQ ID NO: 30206
  REGION 1..466: note = neuraminidase__InfluenzaB__AHM01067

SEQ ID NO: 30269 - protein, 466 aa, synthetic construct; identical to SEQ ID NO: 30175
  REGION 1..466: note = neuraminidase__InfluenzaB__AHM01078

SEQ ID NO: 30270 - protein, 466 aa, synthetic construct
  REGION 1..466: note = neuraminidase__InfluenzaB__AHM01089
MLPSTIQTLTLFLTSGGVLLSLYVSASLSYLLYSDILLKFSPTEITAPTMPLDCANASNVQAVNRSAAKGVTLLLPEPEWTYPRLSCPGSTFQKALLISPHRFGETKGNSAPLIIREPFIACGPNECKHFALTHYAAQPGGYYNGTRGDRNKLRHLISVKLGKIPTVENSIFHMAAWSGSACHDGKEWTYIGVDGPDNNALLKVKYGEAYTDTYHSYANKILRTQESACNCIGGNCYLMITDGSASGVSECRFLKIREGRIIKEIFPTGRVKHTEECTCGFASNKTIECACRDNRYTAKRPFVKLNVETDTAEIRLMCTDTYLDTPRPNDGSITGPCESDGDKGSGGIKGGFVHQRMKSKIGRWYSRTMSKTERMGMGLYVKYDGDPWADSDALAFSGVMVSMKEPGWYSFGFEIKDKKCDVPCIGIEMVHDGGKETWHSAATAIYCLMGSGQLLWDTVTGVDMAL

SEQ ID NO: 30271 - protein, 466 aa, synthetic construct; identical to SEQ ID NO: 30175
  REGION 1..466: note = neuraminidase__InfluenzaB__AHM01100

SEQ ID NO: 30272 - protein, 466 aa, synthetic construct; identical to SEQ ID NO: 30206
  REGION 1..466: note = neuraminidase__InfluenzaB__AHM01111

SEQ ID NO: 30273 - protein, 466 aa, synthetic construct
  REGION 1..466: note = neuraminidase__InfluenzaB__AHM01122
MLPSTIQTLTLFLTSGGVLLSLYVSASLSYLLYSDILLKFSPTEITAPTMPLDCANASNVQAVNRSATKGVKLLLPEPEWTYPRLSCPGSTFQKALLISPHRFGETKGNSAPLIIREPFIACGPNECKHFALTHYAAQPGGYYNGTRGDRNKLRHLISVKLGKIPTVENSIFHMAAWSGSACHDGKEWTYIGVDGPDNNALLKVKYGEAYTDTYHSYANKILRTQESACNCIGGNCYLMITDGSASGVSECRFLKIREGRIIKEIFPTGRVKHTEECTCGFASNKTIECACRDNRYTAKRPFVKLNVETDTAEIRLMCTDTYLDTPRPNDGSITGPCESDGDKGSGGIKGGFVHQRMKSKIGRWYSRTMSKTERMGMGLYVKYDGDPWADSDALAFSGVMVSMKEPGWYSFGFEIKDKKCDVPCIGIEMVHDGGKETWHSAATAIYCLMGSGQLLWDTVTGVDMAL

SEQ ID NO: 30274 - protein, 466 aa, synthetic construct; identical to SEQ ID NO: 30206
  REGION 1..466: note = neuraminidase__InfluenzaB__AHM01133

SEQ ID NO: 30275 - protein, 466 aa, synthetic construct
  REGION 1..466: note = neuraminidase__InfluenzaB__AHM01144
MLPSTIQTLTLFLTSGGVLLSLYVSASLSYLLYSDILLKFSPTEITAPTMPLDCANASNVQAVNRSAAKGVTLLLPEPEWTYPRLSCPGSTFQKALLISPHRFGETKGNSAPLIIREPFIACGPNECKHFALTHYAAQPGGYYNGTRGDRNKLRHLISVKLGKIPTVENSIFHMAAWSGSACHDGKEWTYIGVDGPDNNALLKVKYGEAYTDTYHSYANKILRTQESACNCIGGNCYLMITDGSASGISECRFLKIREGRIIKEIFPTGRVKHTEECTCGFASNKTIECACRDNRYTAKRPFVKLNVETDTAEIRLMCTDTYLDTPRPNDGSITGPCESDGDKGSGGIKGGFVHQRMKSKIGRWYSRTMSKTERMGMGLYVKYDGDPWADSDALAFSGVMVSMKEPGWYSFGFEIKDKKCDVPCIGIEMVHDGGKETWHSAATAIYCLMGSGQLLWDTVTGVDMAL

SEQ ID NO: 30276 - protein, 466 aa, synthetic construct; identical to SEQ ID NO: 30206
  REGION 1..466: note = neuraminidase__InfluenzaB__AHM01166

SEQ ID NO: 30277 - protein, 466 aa, synthetic construct
  REGION 1..466: note = neuraminidase__InfluenzaB__AHM01188
MLPSTIQTLTLFLTSGGVLLSLYVSASLSYLLYSDILLKFSPTEITAPTMPLDCANASNVQAVNHSATKGVTLLLPEPEWTYPRLSCPGSTFQKALLISPHRFGETKGNSAPLIIREPFIACGPNECKHFALTHYAAQPGGYYNGTRGDRNKLRHLISVKLGKIPTVENSIFHMAAWSGSACHDGKEWTYIGVDGPDNNALLKVKYGEAYTDTYHSYANKILRTQESACNCIGGNCYLMITDGSASGVSECRFLKIREGRIIKEIFPTGRVKHTEECTCGFASNKTIECACRDNRYTAKRPFVKLNVETDTAEIRLMCTDTYLDTPRPNDGSITGPCESDGDKGSGGIKGGFVHQRMKSKIGRWYSRTMSKTERMGMGLYVKYDGDPWADSDALVFSGVMVSMKEPGWYSFGFEIKDKKCDVPCIGIEMVHDGGKETWHSAATAIYCLMGSGQLLWDTVTGVDMAL

SEQ ID NO: 30278 - protein, 466 aa, synthetic construct; identical to SEQ ID NO: 30270
  REGION 1..466: note = neuraminidase__InfluenzaB__AHM01199

SEQ ID NO: 30279 - protein, 466 aa, synthetic construct
  REGION 1..466: note = neuraminidase__InfluenzaB__AHM01210
MLPSTIQTLTLFLTSGGVLLSLYVSASLSYLLYSDILLKFSPTEITAPTMPLDCANASNVQAVNRSATKGVTLLLPEPGWTYPRLSCPGSTFQKALLISPHRFGEAKGNSAPLIIREPFIACGPNECKHFALTHYAAQPGGYYNGTRGDRNKLRHLISVKLGKIPTVENSIFHMAAWSGSACHDGKEWTYIGVDGPDNNALLKVKYGEAYTDTYHSYANKILRTQESACNCIGGNCYLMITDGSASGVSECRFLKIREGRIIKEIFPTGRVKHTEECTCGFASNKTIECACRDNRYTAKRPFVKLNVETDTAEIRLMCTDTYLDTPRPNDGSITGPCESDGDKGSGGIKGGFVHQRMKSKIGRWYSRTMSKTERMGMGLYVKYDGDPWADSDALAFSGVMVSMKEPGWYSFGFEIKDKKCDVPCIGIEMVHDGGKETWHSAATAIYCLMGSGQLLWDTVAGVDMAL

SEQ ID NO: 30280 - protein, 466 aa, synthetic construct
  REGION 1..466: note = neuraminidase__InfluenzaB__AHM01221
MLPSTIQTLTLFLTSGGVLLSLYVSASLSYLLYSDILLKFSPTEITAPTMPLDCANASNFQAVNRSATKGVTFLLPEPEWTYPRLSCPGSTFQKALLISPHRFGETKGNSAPLIIREPFIACGPNECKHFALTHYAAQPGGYYNGTRGDRNKLRHLISVKLGKIPTVENSIFHMAAWSGSACHDGKEWTYIGVDGPDNNALLKVKYGEAYTDTYHSYANKILRTQESACNCIGGNCYLMITDGSASGVSECRFLKIREGRIIKEIFPTGRVKHTEECTCGFASNKTIECACRDNRYTAKRPFVKLNVETDTAEIRLMCTDTYLDTPRPNDGSITGPCESDGDKGSGGIKGGFVHQRMKSKIGRWYSRTMSKTERMGMGLYVKYDGDPWADSDALAFSGVMVSMKEPGWYSFGFEIKDKKCDVPCIGIEMVHDGGKETWHSAATAIYCLMGSGQLLWDTVTGVDMAL

SEQ ID NO: 30281 - protein, 466 aa, synthetic construct; identical to SEQ ID NO: 30175
  REGION 1..466: note = neuraminidase__InfluenzaB__AHM01232

SEQ ID NO: 30282 - protein, 466 aa, synthetic construct; identical to SEQ ID NO: 30206
  REGION 1..466: note = neuraminidase__InfluenzaB__AHM01243

SEQ ID NO: 30283 - protein, 466 aa, synthetic construct
  REGION 1..466: note = neuraminidase__InfluenzaB__AHM01254
MLPSTIQTLTLFLTSGGVLLSLYVSASLSYLLYSDILLKFSPTEITAPTMPLDCANASNVQAVNRSATKGVTLLLPEPEWTYPRLSCPGSTFQKALLISPHRFGETKGNSAPLIIREPFIACGPNECKHFALTHYAAQPGGYYNGTRGDRNKLRHLISVKLGKIPTVENSIFHMAAWSGSACHDGKEWTYIGVDGPDNNALLKVKYGEAYTDTYHSYANKILRTQESACNCIGGNCYLMITDGSASGVSECRFLKIREGRIIKEIFPTGRVKHTEECTCGFASNKTIECACRDNRYTAKRPFVKLNVETDTAEIRLMCTDTYLDTPRPNDGSITGPCESDGDKGSGGIKGGFVHQRMKSKIGRWYSRTMSKTERMGMGLYVKYDGDPWADSDALVFSGVMVSMKEPGWYSFGFEIKDKKCDVPCIGIEMVHDGGKETWHSAATAIYCLMGSGQLLWDTVTGVDMAL

SEQ ID NO: 30284 - protein, 466 aa, synthetic construct
  REGION 1..466: note = neuraminidase__InfluenzaB__AHM01265
MLPSTIQTLTLFLTSGGVLLSLYVSASLSYLLYSDILLKFSPTEITAPTMPLDCANASNVQAVNRSATKGVTLLLPEPEWTYPRLSCPGSTFQKALLISPHRFGETKGNSAPLIIREPFIACGPNECKHFALTHYAAQPGGYYNGTRGDRNKLRHLISVKLGKIPTVENSIFHMAAWSGSACHDGKEWTYIGVDGPDNNALLKVKYGEAYTDTYHSYANKILRTQESACNCIGGNCYLMITDGSASGVSECRFLKIREGRIIKEIFPTGRVKHTEECTCGFASNKTIECACRDNRYTAKRPFVKLNVETDTAEIRLMCTDTYLDTPRPNDGSITGPCESDGDEGSGGIKGGFVHQRMKSKIGRWYSRTMSKTERMGMGLYVKYDGDPWADSDALAFSGVMVSMKEPGWYSFGFEIKDKKCDVPCIGIEMVHDGGKETWHSAATAIYCLMGSGRLLWDTVTGVDMAL

SEQ ID NO: 30285 - protein, 466 aa, synthetic construct
  REGION 1..466: note = neuraminidase__InfluenzaB__AHM01276
MLPSTIQTLTLFLTSGGVLLSLYVSASLSYLLYSDILLKFSQTEITAPIMPLDCTNASNVQAVNRSAAKGVTLLLPEPEWTYPRLSCPGSTFQKALLISPHRFGEIKGNSAPLIIREPFIACGPTECKHFALTHYAAQPGGYYNGTREDRNKLRHLISVKLGKIPTVENSIFHMAAWSGSACHDGKEWTYIGVDGPDSNALLKIKYGEAYTDTYHSYAKNILRTQESACNCIGGDCYLMITDGPASGVSECRFLKIREGRIIKEIFPTGRVKHTEECTCGFASNKTIECACRDNRYTAKRPFVKLNVETDTAEIRLMCTETYLDTPRPNDGSITGPCESDGDKGSGGIKGGFVHQRMASKIGRWYSRTMSKTKRMGMGLYVKYDGDPWTDSEALALSGVMVSMEEPGWYSFGFEIKDKKCDVPCIGIEMVHDGGKTTWHSAATAIYCLMGSGQLLWDTVTGVDMAL

SEQ ID NO: 30286 - protein, 466 aa, synthetic construct; identical to SEQ ID NO: 30270
  REGION 1..466: note = neuraminidase__InfluenzaB__AHM01287

SEQ ID NO: 30287 - protein, 466 aa, synthetic construct; identical to SEQ ID NO: 30270
  REGION 1..466: note = neuraminidase__InfluenzaB__AHM01298

SEQ ID NO: 30288 - protein, 466 aa, synthetic construct; identical to SEQ ID NO: 30285
  REGION 1..466: note = neuraminidase__InfluenzaB__AHM01309

SEQ ID NO: 30289 - protein, 466 aa, synthetic construct; identical to SEQ ID NO: 30206
  REGION 1..466: note = neuraminidase__InfluenzaB__AHM01320

SEQ ID NO: 30290 - protein, 466 aa, synthetic construct; identical to SEQ ID NO: 30270
  REGION 1..466: note = neuraminidase__InfluenzaB__AHM01331

SEQ ID NO: 30291 - protein, 466 aa, synthetic construct; identical to SEQ ID NO: 30206
  REGION 1..466: note = neuraminidase__InfluenzaB__AHM01342

SEQ ID NO: 30292 - protein, 466 aa, synthetic construct
  REGION 1..466: note = neuraminidase__InfluenzaB__AHM01353
MLPSTIQTLTLFLTSGGVLLSLYVSASLSYLLYSDILLKFSPTEITAPTMPLDCANASNVQAVNRSATKGVTLLLPEPGWTYPRLSCPGSTFQKALLISPHRFGETKGNSAPLIIREPFIACGPNECKHFALTHYAAQPGGYYNGTRGDRNKLRHLISVKLGKIPTVENSIFHMAAWSGSACHDGKEWTYIGVDGPDNNALLKVKYGEAYTDTYHSYANKILRTQESACNCIGGNCYLMITDGSASGVSECRFLKIREGRIIKEIFPTGRVKHTEECTCGFASNKTIECACRDNRYTAKRPFVKLNVETDTAEIRLMCTDTYLDTPRPNDGSITGPCESDGDKGSGGIKGGFVHQRMKSKIGRWYSRTMSKTERMGMGLYVKYDGDPWADSDALAFSGVMVSMKEPGWYSFGFEIKDKKCDVPCIGIEMVHDGGKETWHSAATAIYCLMGSGQLLWDTVTGVDMAL

SEQ ID NO: 30293 - protein, 466 aa, synthetic construct
  REGION 1..466: note = neuraminidase__InfluenzaB__AHM01364
MLPSTIQTLTLFLTSGGVLLSLYVSASLSYLLYSDILLKFSPTEITAPTMPLDCANASNVQAVNRSATKGVTLLLPEPEWTYPRLSCPGSTFQKALLISPHRFGETKGNSAPLIIREPFIACGPNECKHFALTHYAAQPGGYYNGTRGDRNKLRHLISVKLGKIPTVENSIFHMAAWSGSACHDGKEWTYIGVDGPDNNALLKVKYGEAYTDTYHSYANKILRTQESACNCIGGNCYLMITDGSASGVSECRFLKIREGRIIKEIFPTGRVKHTEECTCGFASNKTIECACRDNRYTAKRPFVKLNVETDTAEIRLMCTDTYLDTPRPNDGSITGPCESDGDEGSGGIKGGFVHQRMKSKIGRWYSRTMSKTERMGMGLYVKYDGDPWADSDALAFSGVMVSMKEPGWYSFGFEIKDKKCDVPCIGIEMVHDGGKETWHSAATAIYCLMGSGQLLWDTVTGVDMAL

SEQ ID NO: 30294 - protein, 466 aa, synthetic construct; identical to SEQ ID NO: 30285
  REGION 1..466: note = neuraminidase__InfluenzaB__AHM01375

SEQ ID NO: 30295 - protein, 466 aa, synthetic construct; identical to SEQ ID NO: 30285
  REGION 1..466: note = neuraminidase__InfluenzaB__AHM01386

SEQ ID NO: 30296 - protein, 466 aa, synthetic construct; identical to SEQ ID NO: 30206
  REGION 1..466: note = neuraminidase__InfluenzaB__AHM01397

SEQ ID NO: 30297 - protein, 466 aa, synthetic construct; identical to SEQ ID NO: 30206
  REGION 1..466: note = neuraminidase__InfluenzaB__AHM01408

SEQ ID NO: 30298 - protein, 466 aa, synthetic construct; identical to SEQ ID NO: 30206
  REGION 1..466: note = neuraminidase__InfluenzaB__AHM01419

SEQ ID NO: 30299 - protein, 466 aa, synthetic construct
  REGION 1..466: note = neuraminidase__InfluenzaB__AHM01430
MLPSTIQTLTLFLTSGGVLLSLYVSASLSYLLYSDILLKFSPTEITAPTMPLDCANASNVQAVNRSATKGVTLLLPEPEWTYPRLSCPGSTFQKALLISPHRFGETKGNSAPLIIREPFIACGPNECKHFALTHYAAQPGGYYNGTRGDRNKLRHLISVKLGKIPTVENSIFHMAAWSGSACHDGKEWTYIGVDGPDNNALLKVKYGEAYTDTYHSYANKILRTQESACNCIGGNCYLMITDGSASGVSECRFLKIREGRIIKEIFPTGRVKHTEECTCGFASNKTIECACRDNRYTAKRPFVKLNVETDTAEIRLMCTDTYLDTPRPNDGSITGPCESDGDEGSGGIKGGFVHQRMKSKIGRWYSRTMSKTERMGMGLYVKYDGDPWADSDALAFSGVMVSMKEPGWYSFGFEIKDKKCDVPCIGIEMVHDGGKETWHSAATAIYCLMGSGRLLWDTATGVDMAL

SEQ ID NO: 30300 - protein, 466 aa, synthetic construct
  REGION 1..466: note = neuraminidase__InfluenzaB__AHM01441
MLPSTIQTLTLFLTSGGVLLSLYVSASLSYLLYSDILLKFSQTEITAPTMPLDCANASNVQAVNRSAAKGVTLLLPEPEWTYPRLSCPGSTFQKALLISPHRFGEIKGNSAPLIIREPFIACGPTECKHFALTHYAAQPGGYYNGTREDRNKLRHLISVKLGKIPTVENSIFHMAAWSGSACHDGKEWTYIGVDGPDSNALLKIKYGEAYTDTYHSYAKNILRTQESACNCIGGDCYLMITDGPASGVSECRFLKIREGRIIKEIFPTGRVKHTEECTCGFASNKTIECACRDNRYTAKRPFVKLNVETDTAEIRLMCTETYLDTPRPNDGSITGPCESDGDKGSGGIKGGFVHQRMASKIGRWYSRTMSKTKRMGMGLYVKYDGDPWTDSEALALSGVMVSMEEPGWYSFGFEIKDKKCDVPCIGIEMVHDGGKTTWHSAATAIYCLMGSGQLLWDTVTGVDMAL

SEQ ID NO: 30301 - protein, 466 aa, synthetic construct; identical to SEQ ID NO: 30206
  REGION 1..466: note = neuraminidase__InfluenzaB__AHM01463

SEQ ID NO: 30302 - protein, 466 aa, synthetic construct
  REGION 1..466: note = neuraminidase__InfluenzaB__AHM01474
MLPSTIQTLTLFLTSGGVLLSLYVSASLSYLLYSDILLKFSQTEITAPIMPLDCINASNVQAVNRSAAKGVTLLLPEPEWTYPRLSCPGSTFQKALLISPHRFGEIKGNSAPLIIREPFIACGPTECKHFALTHYAAQPGGYYNGTREDRNKLRHLISVKLGKIPTVENSIFHMAAWSGSACHDGKEWTYIGVDGPDSNALLKIKYGEAYTDTYHSYAKNILRTQESACNCIGGDCYLMITDGPASGVSECRFLKIREGRIIKEIFPTGRVKHTEECTCGFASNKTIECACRDNRYTAKRPFVKLNVETDTAEIRLMCTETYLDTPRPNDGSITGPCESDGDKGSGGIKGGFVHQRMASKIGRWYSRTMSKTKRMGMGLYVKYDGDPWTDSEALALSGVMVSMEEPGWYSFGFEIKDKKCDVPCIGIEMVHDGGKTTWHSAATAIYCLMGSGQLLWDTVTGVDMAL

SEQ ID NO: 30303 - protein, 466 aa, synthetic construct
  REGION 1..466: note = neuraminidase__InfluenzaB__AHM01485
MLPSTIQTLTLFLTSGGVLLSLYVSASLSYLLYSDILLKFSPTEITAPIMPLDCTNASNVQAVNRSAAKGVTLLLPEPEWTYPRLSCPGSTFQKALLISPHRFGEIKGNSAPLIIREPFIACGPTECKHFALTHYAAQPGGYYNGTREDRNKLRHLISVKLGKIPTVENSIFHMAAWSGSACHDGKEWTYIGVDGPDSNALLKIKYGEAYTDTYHSYAKNILRTQESACNCIGGDCYLMITDGPASGVSECRFLKIREGRIIKEIFPTGRVKHTEECTCGFASNKTIECACRDNRYTAKRPFVKLNVETDTAEIRLMCTETYLDTPRPNDGSITGPCESDGDKGSGGIKGGFVHQRMASKIGRWYSRTMSKTKRMGMGLYVKYDGDPWTDSEALALSGVMVSMEEPGWYSFGFEIKDKKCDVPCIGIEMVHDGGKTTWHSAATAIYCLMGSGQLLWDTVTGVDMAL

SEQ ID NO: 30304 - protein, 466 aa, synthetic construct; identical to SEQ ID NO: 30285
  REGION 1..466: note = neuraminidase__InfluenzaB__AHM01496

SEQ ID NO: 30305 - protein, 466 aa, synthetic construct
  REGION 1..466: note = neuraminidase__InfluenzaB__AHM01507
MLPSTIQTLTLFLTSGGVLLSLYVSASLSYLLYSDILLKFSQTEITAPIMPLDCANASNVQAVNRSAAKGVTLLLPEPEWTYPRLSCPGSTFQKALLISPHRFGEIKGNSAPLIVREPFIACGPTECKHFALTHYAAQPGGYYNGTREDRNKLRHLISVKLGKIPTVENSIFHMAAWSGSACHDGKEWTYIGVDGPDSNALLKIKYGEAYTDTYHSYAKNILRTQESACNCIGGDCYLMITDGPASGVSECRFLKIREGRIIKEIFPTGRVKHTEECTCGFASNKTIECACRDNRYTAKRPFVKLNVETDTAEIRLMCTETYLDTPRPNDGSITGPCESDGDKGSGGIKGGFVHQRMASKIGRWYSRTMSKTKRMGMGLYVKYDGDPWTDSEALALSGVMVSIEEPGWYSFGFEIKDKKCDVPCIGIEMVHDGGKTTWHSAATAIYCLMGSGQLLWDTVTGVDMAL

SEQ ID NO: 30306 - protein, 466 aa, synthetic construct; identical to SEQ ID NO: 30285
  REGION 1..466: note = neuraminidase__InfluenzaB__AHM01518

SEQ ID NO: 30307 - protein, 466 aa, synthetic construct
  REGION 1..466: note = neuraminidase__InfluenzaB__AHM01529
MLPSTIQTLTLFLTSGGVLLSLYVSASLSYLLYSDILLKFSQTEITAPIMPLDCTNASNVQAVNRSAAKGVTLLLPEPEWTYPRLSCPGSTFQKALLISPHRFGEIKGNSAPLIIREPFIACGPTECKHFALTHYAAQPGGYYNGTREDRNKLRHLISVKLGKIPTVENSIFHMAAWSGSACHDGKEWTYIGVDGPDSNALLKIKYGEAYTDTYHSYAKNILRTQESACNCIGGDCYLMITDGPASGVSECRFLKIREGRIIKEILPTGRVKHTEECTCGFASNKTIECACRDNRYTAKRPFVKLNVETDTAEIRLMCTETYLDTPRPNDGSITGPCESDGDKGSGGIKGGFVHQRMASKIGRWYSRTMSKTKRMGMGLYVKYDGDPWTDSEALALSGVMVSMEEPGWYSFGFEIKDKKCDVPCIGIEMVHDGGKTTWHSAATAIYCLMGSGQLLWDTVTGVDMAL

SEQ ID NO: 30308 - protein, 466 aa, synthetic construct; identical to SEQ ID NO: 30175
  REGION 1..466: note = neuraminidase__InfluenzaB__AHM01540

SEQ ID NO: 30309 - protein, 466 aa, synthetic construct; identical to SEQ ID NO: 30285
  REGION 1..466: note = neuraminidase__InfluenzaB__AHM01551

SEQ ID NO: 30310 - protein, 466 aa, synthetic construct; identical to SEQ ID NO: 30285
  REGION 1..466: note = neuraminidase__InfluenzaB__AHM01562

SEQ ID NO: 30311 - protein, 466 aa, synthetic construct; identical to SEQ ID NO: 28792
  REGION 1..466: note = neuraminidase__InfluenzaB__AHZ13597

SEQ ID NO: 30312 - protein, 467 aa, synthetic construct
  REGION 1..467: note = neuraminidase__InfluenzaB__AHZ36701
MLPSTIQMLTLFLTSGGVLLSLYVSASLSYLLYSDILLKFSPTEITAPTMPLDCANASNVHAVNRSATKGVTFLLLPEPEWTYPRLSCPGSTFQKALLISPHRFGETKGNSAPLIIREPFIACGPNECKHFALTHYAAQPGGYYNGTRGDRNKLRHLISVKLGKIPTVENSIFHMAAWSGSACHDGKEWTYIGVDGPDNNALLKIKYGEAYTDTYHSYANNILRTQESACNCIGGNCYLMITDGSASGVSECRFLKIRKGRIIKEIFPTGRVKHTEECTCGFASNKTIECACRDNSYTAKRPFVKLNVETDTAEIRLMCTDTYLDTPRPDDGSITGPCESNGDKGSGGIKGGFVHQRMASKIGRWYSRTMSKTERMGMGLYVKYDGDPWTDSDALAFRGVMVSMKEPGWYSFGFEIKDKKCDVPCIGIEMVHDGGKETWHSAATAIYCLMGSGQLLWDTVTGVDMAL

SEQ ID NO: 30313 - protein, 467 aa, synthetic construct
  REGION 1..467: note = neuraminidase__InfluenzaB__AHZ36756
MLPSTIQMLTLFLTSGGVLLSLYVSASLSYLLYSDILLKFSPTEITAPTMPLDCANASNVHAVNRSATKGVTFLLLPEPEWTYPRLSCPGSTFQKALLISPHRFGETKGNSAPLIIREPFIACGPNECKHFALTHYAAQPGGYYNGTRGDRNKLRHLISVKLGKIPTVENSIFHMAAWSGSACHDGKEWTYIGVDGPDNNALLKIKYGEAYTDTYHSYANNILRTQESACNCIGGNCYLMITDGSASGVSECRFLKIREGRIIKEIFPTGRVKHTEECTCGFASNKTIECACRDNSYTAKRPFVKLNVETDTAEIRLMCTDTYLDTPRPDDGSITGPCESNGDKGSGGIKGGFVHQRMASKIGRWYSRTMSKTERMGMGLYVKYDGDPWTDSDALAFRGVMVSMKEPGWYSFGFEIKDKKCDVPCIGIEMVHDGGKETWHSAATAIYCLMGSGQLLWDTVTGVDMAL

SEQ ID NO: 30314 - protein, 466 aa, synthetic construct
  REGION 1..466: note = neuraminidase__InfluenzaB__AHZ36767
MLPSTIQTLTLFLTSGGVLLSLYVSASLSYLLYSDILLKFSPTEITAPTRPLDCANASNVQAVNRSATKGVTLLLPEPEWTYPRLSCPGSTFQKALLISPHRFGETKGNSAPLIIREPFIACGPNECKHFALTHYAAQPGGYYNGTRGDRNKLRHLISVKLGKIPTVENSIFHMAAWSGSACHDGKEWTYIGVDGPDNNALLKVKYGEAYTDTYHSYANKILRTQESACNCIGGNCYLMITDGSASGVSECRFLKIREGRIIKEIFPTGRVKHTEECTCGFASNKTIECACRDNRYTAKRPFVKLNVETDTAEIRLMCTDTYLDTPRPNDGSITGPCESDGDKGSGGIKGGFVHQRMKSKIGRWYSRTMSKTERMGMGLYVKYDGDPWADSDALAFSGVMVSMKEPGWYSFGFEIKDKKCDVPCIGIEMVHDGGKETWHSAATAIYCLMGSGQLLWDTVTGVDMAL

SEQ ID NO: 30315 - protein, 466 aa, synthetic construct
  REGION 1..466: note = neuraminidase__InfluenzaB__AHZ36778
MLPSTIQTLTLFLTSGGVLLSLYVSASLSYLLYSDILLKFPSTEITAPTMPLDCANASNVQAVNRSATKGVTLLLPEPEWTYPRLSCPGSTFQKALLISPHRFGETKGNSAPLIIREPFIACGPKECKHFALTHYAAQPGGYYNGTRGDRNKLRHLISVKLGKIPTVENSIFHMAAWSGSACHDGKEWTYIGVDGPDNNALLKIKYGEAYTDTYHSYANNILRTQESACNCIGGNCYLMITDGSASGVSECRFLKIREGRIIKEIFPTGRIQHTEECTCGFASNKTIECACRDNSYTAKRPFVKLNVETDTAEIRLMCTKTYLDTPRPEDGSITGPCESNGGKGSGGIKGGFVHQRMASKIGRWYSRTMSKTERKGMGLYVKYNGDPWADSDALVFSGVMISMEEPGWYSFGFEIKDKKCDVPCIGIEMVHDGGKETWHSAATAIYCLMGSGQLLWDTVTGVNMTL

SEQ ID NO: 30316 - protein, 466 aa, synthetic construct
  REGION 1..466: note = neuraminidase__InfluenzaB__AHZ36789
MLPSTIQTLTLFLTSGGVLLSLYVSASLSYLLYSDILLKFSPTEITAQTMPLDCANASNVQAVNRSATKGVTLLPPEPEWTYPRLSCPGSTFQKALLISPHRFGETKGNSAPLIIREPFIACGPNECKHFALTHYAAQPGGYYNGTRGDRNKLRHLISVKLGKIPTVENSIFHMAAWSGSACHDGKEWTYIGVDGPDNNALLKVKYGEAYTDTYHSYANKILRTQESACNCIGGNCYLMITDGSASGVSECRFLKIREGRIIKEIFPTGRVKHTEECTCGFASNKTIECACRDNRYTAKRPFVKLNVETDTAEIRLMCTDTYLDTPRPNDGSITGPCESDGDKGSGGIKGGFVHQRMKSKIGRWYSRTMSKTERMGMGLYVKYDGDPWADSDALAFSGVMVSMKEPGWYSFGFEMKDKKCDVPCIGIEMVHDGGKETWHSAATAIYCLMGSGQLLWDTVTGVDMAL

SEQ ID NO: 30317 - protein, 466 aa, synthetic construct; identical to SEQ ID NO: 30316
  REGION 1..466: note = neuraminidase__InfluenzaB__AHZ36800

SEQ ID NO: 30318 - protein, 466 aa, synthetic construct
  REGION 1..466: note = neuraminidase__InfluenzaB__AHZ36811
MLPSTIQTLTLFLTSGGVLLSLYVSASLSYLLYSDILLKFSQTEITAPIMPLDCTNASNVQAVNRSAAKGVTLLLPEPEWTYPRLSCPGSTFQKALLISPHRFGEIKGNSAPLIIREPFIACGPTECKHFALTHYAAQPGGYYNGTREDRNKLRHLISVKLGKIPTVENSIFHMAAWSGSACHDGKEWTYIGVDGPDSNALLKIKYGEAYTDTYHSYAKNILRTQESACNCIGGDCYLMITDGPASGVSECRFLKIREGRIIREIFPTGRVKHTEECTCGFASNKTIECACRDNRYTAKRPFVKLNVETDTAEIRLMCTETYLDTPRPNDGSITGPCESDGDKGSGGIKGGFVHQRMASKIGRWYSRTMSKTKRMGMGLYVKYDGDPWTDSEALALSGVMVSMEEPGWYSFGFEIKDKKCDVPCIGIEMVHDGGKTTWHSAATAIYCLMGSGQLLWDTVTGVDMAL

SEQ ID NO: 30319 - protein, 467 aa, synthetic construct; identical to SEQ ID NO: 30313
  REGION 1..467: note = neuraminidase__InfluenzaB__AHZ36822

SEQ ID NO: 30320 - protein, 466 aa, synthetic construct
  REGION 1..466: note = neuraminidase__InfluenzaB__AHZ36833
MLPSTIQTLTLFLTSGGVLLSLYVSASLSYLLYSDILLKFSPTEITAPTRPLDCANASNVQAVNRSATKGVTLLLPEPEWTYPRLSCPGSTFQKALLISPHRFGETKGNSAPLIIREPFIACGPNECKHFALTHYAAQPGGYYNGTRGDRNKLRHLISVKLGKIPTVENSIFHMAAWSGSACHDGKEWTYIGVDGPDNNALLKVKYGEAYTDTYHSYANKILRTQESACNCIGGNCYLMITDGSASGVSECRFLKVREGRIIKEIFPTGRVKHTEECTCGFASNKTIECACRDNRYTAKRPFVKLNVETDTAEIRLMCTDTYLDTPRPNDGSITGPCESDGDKGSGGIKGGFVHQRMKSKIGRWYSRTMSKTERMGMGLYVKYDGDPWADSDALAFSGVMVSMKEPGWYSFGFEIKDKKCDVPCIGIEMVHDGGKETWHSAATAIYCLMGSGQLLWDTVTGVDMAL

SEQ ID NO: 30321 - protein, 466 aa, synthetic construct
  REGION 1..466: note = neuraminidase__InfluenzaB__AHZ36844
MLPSTIQTLTLFLTSGGVLLSLYVSASLSYLLYSDILLKFSPTEITAPTRPLDCANASNVQAVNRSATKEVTLLLPEPEWTYPRLSCPGSTFQKALLISPHRFGETKGNSAPLIIREPFIACGPNECKHFALTHYAAQPGGYYNGTRGDRNKLRHLISVKLGKIPTVENSIFHMAAWSGSACHDGKEWTYIGVDGPDNNALLKVKYGEAYTDTYHSYANKILRTQESACNCIGGNCYLMITDGSASGVSECRFLKIREGRIIKEIFPTGRVKHTEECTCGFASNKTIECACRDNRYTAKRPFVKLNVETDTAEIRLMCTDTYLDTPRPNDGSITGPCESDGDKGSGGIKGGFVHQRMKSKIGRWYSRTMSKTERMGMGLYVKYDGDPWADSDALAFSGVMVSMKEPGWYSFGFEIKDKKCDVPCIGIEMVHDGGKETWHSAATAIYCLMGSGQLLWDTVTGVDMAL

SEQ ID NO: 30322 - protein, 466 aa, synthetic construct
  REGION 1..466: note = neuraminidase__InfluenzaB__AHZ36855
MLPSTIQTLTLFLTSGGVLLSLYVSASLSYLLYSDILLKFSPTEITVQTMPLDCANASNVQAVNRSATKGVTLLPPEPEWTYPRLSCPGSTFQKALLISPHRFGETKGNSAPLIIREPFIACGPNECKHFALTHYAAQPGGYYNGTRGDRNKLRHLISVKLGKIPTVENSIFHMAAWSGSACHDGKEWTYIGVDGPDNNALLKVKYGEAYTDTYHSYANKILRTQESACNCIGGNCYLMITDGSASGVSECRFLKIREGRIIKEIFPTGRVKHTEECTCGFASNKTIECACRDNRYTAKRPFVKLNVETDTAEIRLMCTDTYLDTPRPNDGSITGPCESDGDKGSGGIKGGFVHQRMKSKIGRWYSRTMSKTERMGMGLYVKYDGDPWADSDALAFSGVMVSMKEPGWYSFGFEMKDKKCDVPCIGIEMVHDGGKETWHSAATAIYCLMGSGQLLWDTVTGVDMAL

SEQ ID NO: 30323 - protein, 467 aa, synthetic construct; identical to SEQ ID NO: 30313
  REGION 1..467: note = neuraminidase__InfluenzaB__AHZ36866

SEQ ID NO: 30324 - protein, 466 aa, synthetic construct
  REGION 1..466: note = neuraminidase__InfluenzaB__AHZ36877
MLPSTIQTLTLFLTSGGVLLSLYVSASLSYLLYSDILLKFSPPEITAPTMPLDCANASNVQAVNRSATKGVTLLLPEPEWTYPRLSCPGSTFQKALLISPHRFGETKGNSAPLIIREPFIACGPNECKHFALTHYAAQPGGYYNGTRGDRNKLRHLISVKLGKIPTVENSIFHMAAWSGSACHDGKEWTYIGVDGPDNNALLKVKYGEAYTDTYHSYANKILRTQESACNCIGGNCYLMITDGSASGVSECRFLKIREGRIIKEIFPTGRVKHTEECTCGFASNKTIECACRDNRYTAKRPFVKLNVETDTAEIRLMCTDTYLDTPRPNDGSITGPCESDGDKGSGGIKGGFVHQRMKSKIGRWYSRTMSKTERMGMGLYVKYDGDPWADSDALAFSGVMVSMKEPGWYSFGFEIKDKKCDVPCIGIEMVHDGGKETWHSAATAIYCLMGSGQLLWDTVTGVDMAL

SEQ ID NO: 30325 - protein, 467 aa, synthetic construct; identical to SEQ ID NO: 30313
  REGION 1..467: note = neuraminidase__InfluenzaB__AHZ36888

SEQ ID NO: 30326 - protein, 467 aa, synthetic construct; identical to SEQ ID NO: 30313
  REGION 1..467: note = neuraminidase__InfluenzaB__AHZ36899

SEQ ID NO: 30327 - protein, 467 aa, synthetic construct; identical to SEQ ID NO: 30313
  REGION 1..467: note = neuraminidase__InfluenzaB__AHZ36910

SEQ ID NO: 30328 - protein, 466 aa, synthetic construct; identical to SEQ ID NO: 30315
  REGION 1..466: note = neuraminidase__InfluenzaB__AHZ36921

SEQ ID NO: 30329 - protein, 466 aa, synthetic construct
  REGION 1..466: note = neuraminidase__InfluenzaB__AHZ36932
MLPSTIQTLTLFLTSGGVLLSLYVSASLSYLLYSDILLKFSPTEITAQTMPLDCANASNVQAVNRSATKGVTLLPPEPEWTYPRLSCPGSTFQKALLISPHRFGETKGNSAPLIIREPFIACGPNECKHFALTHYAAQPGGYYNGTRGDRNKLRHLISVKLGKIPTVENSIFHMAAWSGSACHDGKEWTYIGVDGPDNNALLKVKYGEAYTDTYHSYANKILRTQESACNCIGGNCYLMITDGSASGVSECRFLKIREGRIIKEIFPTGRVKHTEECTCGFASNKTMECACRDNRYTAKRPFVKLNVETDTAEIRLMCTDTYLDTPRPNDGSITGPCESDGDKGSGGIKGGFVHQRMKSKIGRWYSRTMSKTERMGMGLYVKYDGDPWADSDALAFSGVMVSMKEPGWYSFGFEMKDKKCDVPCIGIEMVHDGGKETWHSAATAIYCLMGSGQLLWDTVTGVDMAL

SEQ ID NO: 30330 - protein, 466 aa, synthetic construct
  REGION 1..466: note = neuraminidase__InfluenzaB__AHZ36943
MLPSTIQTLTLFLTSGGVLLSLYVSASLSYLLYSDILLKFSPTEITAPTMPLDCANASNVQAVNRSATKGVTLLPPEPEWTYPRLSCPGSTFQKALLISPHRFGETKGNSAPLIIREPFIACGPNECKHFALTHYAAQPGGYYNGTRGDRNKLRHLISVKLGKIPTVENSIFHMAAWSGSACHDGKEWTYIGVDGPDNNALLKVKYGEAYTDTYHSYANKILRTQESACNCIGGNCYLMITDGSASGVSECRFLKIREGRIIKEIFPTGRVKHTEECTCGFASNKTIECACRDNRYTAKRPFVKLNVETDTAEIRLMCTDTYLDTPRPNDGSITGPCESDGDKGSGGIKGGFVHQRMKSKIGRWYSRTMSKTERMGMGLYVKYDGDPWADSDALAFSGVMVSMKEPGWYSFGFEMKDRKCDVPCIGIEMVHDGGKETWHSAATAIYCLMGSGQLLWDTVTGVDMAL

SEQ ID NO: 30331 - protein, 467 aa, synthetic construct; identical to SEQ ID NO: 30313
  REGION 1..467: note = neuraminidase__InfluenzaB__AHZ36954

SEQ ID NO: 30332 - protein, 466 aa, synthetic construct
  REGION 1..466: note = neuraminidase__InfluenzaB__AHZ36965
MLPSTIQTLTLFLTSGGVLLSLYVSASLSYLLYSDILLKFSPPEINAPTMPLDCANASNVQAVNRSATKGVTLLLPEPEWTYPRLSCPGSTFQKALLISPHRFGETKGNSAPLIIREPFIACGPNECKHFALTHYAAQPGGYYNGTRGDRNKLRHLISVKLGKIPTVENSIFHMAAWSGSACHDGKEWTYIGVDGPDNNALLKVKYGEAYTDTYHSYANKILRTQESACNCIGGNCYLMITDGSASGVSECRFLKIREGRIIKEIFPTGRVKHTEECTCGFASNKTIECACRDNRYTAKRPFVKLNVETDTAEIRLMCTDTYLDTPRPNDGSITGPCESDGDKGSGGIKGGFVHQRMKSKIGRWYSRTMSKTERMGMGLYVKYDGDPWADSDALAFSGVMVSMKEPGWYSFGFEIKDKKCDVPCIGIEMVHDGGKETWHSAATAIYCLMGSGQLLWDTVTGVDMAL

SEQ ID NO: 30333 - protein, 467 aa, synthetic construct; identical to SEQ ID NO: 30313
  REGION 1..467: note = neuraminidase__InfluenzaB__AHZ36976

SEQ ID NO: 30334 - protein, 467 aa, synthetic construct; identical to SEQ ID NO: 30313
  REGION 1..467: note = neuraminidase__InfluenzaB__AHZ36987

SEQ ID NO: 30335 - protein, 466 aa, synthetic construct; identical to SEQ ID NO: 30316
  REGION 1..466: note = neuraminidase__InfluenzaB__AHZ36998

SEQ ID NO: 30336 - protein, 466 aa, synthetic construct
  REGION 1..466: note = neuraminidase__InfluenzaB__AHZ37009
MLPSTIQTLTLFLTLGGVLLSLYVSASLSYLLYSDILLKFSPTEITAPTMPLGCANASNVQAVNRSATKGVTLLLPEPEWTYPRLSCPGSTFQKALLISPHRFGETKGNSAPLIIREPFIACGPNECKHFALTHYAAQPGGYYNGTRGDRNKLRHLISVKLGKIPTVENSIFHMAAWSGSACHDGKEWTYIGVDGPDNNALLKVKYGEAYTDTYHSYANKILRTQESACNCIGGNCYLMITDGSASGVSECRFLKIREGRIIKEIFPTGRVKHTEECTCGFASNKTIECACRDNRYTAKRPFVKLNVEADTAEIRLMCTDTYLDTPRPNDGSITGPCESDGDKGSGGIKGGFVHQRMKSKIGRWYSRTMSKTERMGMGLYVKYDGDPWADSDALAFSGVMVSMKEPGWYSFGFEIKDKKCDVPCIGIEMVHDGGKETWHSAATAIYCLMGSGQLLWDTVTGVDMAL

SEQ ID NO: 30337 - protein, 466 aa, synthetic construct; identical to SEQ ID NO: 30314
  REGION 1..466: note = neuraminidase__InfluenzaB__AHZ37020

SEQ ID NO: 30338 - protein, 466 aa, synthetic construct; identical to SEQ ID NO: 30316
  REGION 1..466: note = neuraminidase__InfluenzaB__AHZ37031

SEQ ID NO: 30339 - protein, 466 aa, synthetic construct; identical to SEQ ID NO: 30314
  REGION 1..466: note = neuraminidase__InfluenzaB__AHZ37042

SEQ ID NO: 30340 - protein, 466 aa, synthetic construct; identical to SEQ ID NO: 30316
  REGION 1..466: note = neuraminidase__InfluenzaB__AHZ37064

SEQ ID NO: 30341 - protein, 466 aa, synthetic construct; identical to SEQ ID NO: 30314
  REGION 1..466: note = neuraminidase__InfluenzaB__AHZ37075

SEQ ID NO: 30342 - protein, 466 aa, synthetic construct; identical to SEQ ID NO: 30314
  REGION 1..466: note = neuraminidase__InfluenzaB__AHZ37086

SEQ ID NO: 30343 - protein, 466 aa, synthetic construct
  REGION 1..466: note = neuraminidase__InfluenzaB__AHZ37097
MLPSTIQTLTLFLTSGGVLLSLYVSASLSYLLYSDILLKFSPTEITAPTMPLDCANASNVQAVNRSATKGVTLLPPEPEWTYPRLSCPGSTFQKALLISPHRFGETKGNSAPLIIREPFIACGPNECKHFALTHYAAQPGGYYNGTRGDRNKLRHLISVKLGKIPTVENSIFHMAAWSGSACHDGKEWTYIGVDGPDNNALLKVKYGEAYTDTYHSYANKILRTQESACNCIGGNCYLMITDGSASGVSECRFLKIREGRIIKEIFPTGRVKHTEECTCGFASNKTIECACRDNRYTAKRPFVKLNVETDTAEIRLMCTDTYLDTPRPNDGSITGPCESDGDKGSGGIKGGFVHQRMKSKIGRWYSRTMSKTERMGMGLYVKYDGDPWADSDALAFSGVMVSMKEPGWYSFGFEMKDKKCDVPCIGIEMVHDGGKETWHSAATAIYCLMGSGQLLWDTVTGVDMAL

SEQ ID NO: 30344 - protein, 466 aa, synthetic construct; identical to SEQ ID NO: 30314
  REGION 1..466: note = neuraminidase__InfluenzaB__AHZ37108

SEQ ID NO: 30345 - protein, 466 aa, synthetic construct
  REGION 1..466: note = neuraminidase__InfluenzaB__AHZ41774
MLPSTIQMLTLFLTSGGVLLSLYVSASLSYLLYSDILLKFSPTEITAPTMPLDCANASNVHAVNRSATKGVTFLLPEPEWTYPRLSCPGSTFQKALLISPHRFGETKGNSAPLIIREPFIACGSNECRHFALTHYAAQPGGYYNGTRGDRNKLRHLISVKLGKIPTVENSIFHMAAWSGSACHDGKEWTYIGVDGPDNNALLKIKYGEAYTDTYHSYANNILRTQESACNCIGGNCYLMITDGSASGVSECRFLKIREGRIIKEIFPTGRVKHTEECTCGFASNKTIECACRDNSYTAKRPFVKLNVETDTAEIRLMCTDTYLDTPRPDDGSITGPCESNGDKGSGGIKGGFVHQRMASKIGRWYSRTMSKTERKGMGLYVKYDGDPWTDNDALAFRGVMVSMKEPGWYSFGFEIKDKKCDVPCIGIEMVHDGGKETWHSAATAIYCLMGSGQLLWDTVTGVDMAL

SEQ ID NO: 30346 - protein, 466 aa, synthetic construct; identical to SEQ ID NO: 28956
  REGION 1..466: note = neuraminidase__InfluenzaB__AHZ41785

SEQ ID NO: 30347 - protein, 466 aa, synthetic construct; identical to SEQ ID NO: 28956
  REGION 1..466: note = neuraminidase__InfluenzaB__AHZ41796

SEQ ID NO: 30348 - protein, 466 aa, synthetic construct
  REGION 1..466: note = neuraminidase__InfluenzaB__AHZ41807
MLPSTIQMLTLFLTSGGVLLSLYVSASLSYLLYSDILLKFSPTEITAPTMPLDCANASNVHAVNRSATKGVTFLLPEPEWTYPRLSCPGSTFQKALLISPHRFGETKGNSAPLIIREPFIACGPNECKHFALTHYAAQPGGYYNGTRGDRNKLRHLISVKLGKIPTVENSIFHMAAWSGSACHDGKEWTYIGVDGPDNNALLKIKYGEAYTDTYHSYANNILRTQESACNCIEGNCYLMITDGSASGVSECRFLKIREGRIIKEIFPTGRVKHTEECTCGFASNKTIECACRDNSYTAKRPFVKLNVETDTAEIRLMCTDTYLDTPRPDDGSITGPCESNGDKGSGGIKGGFVHQRMASKIGRWYSRTMSKTERKGMGLYVKYDGDPWTDSDALAFRGVMVSMKEPGWYSFGFEIKDKKCDVPCIGIEMVHDGGKETWHSAATAIYCLMGSGQLLWDTVTGVDMAL

SEQ ID NO: 30349 - protein, 466 aa, synthetic construct
  REGION 1..466: note = neuraminidase__InfluenzaB__AHZ41818
MLPSTIQTLTLFLTSGGVLLSLYVSASLSYLLYSDILLKFSPTEITAPTMPLDCANASNVQAVNRSATKGVTLLLPEPEWTYPRLSCPGSTFQKALLISPHRFGETKGNSAPLIIREPFIACGPNECKHFALTHYAAQPGGYYNGTRGDRNKLRHLISVKLGKIPTVENSIFHMAAWSGSACHDGKEWTYIGVDGPDNNALLKVKYGEAYTDTYHSYANKILRTQESACNCIGGNCYLMVTDGSASGVSECRFLKIREGRIIKEIFPTGRVKHTEECTCGFASNKTIECACRDNSYTAKRPFVKLNVETDTAEIRLMCTDTYLDTPRPDDGSITGPCESNGDKGSGGIKGGFVHQRMESKIGRWYSRTMSKTERMGMGLYVKYDGDPWADSDALVFSGVMVSMKEPGWYSFGFEIKDKKCDVPCIGIEMVHDGGKETWHSAATAIYCLMGSGQLLWDTVTGVNMAL

SEQ ID NO: 30350 - protein, 466 aa, synthetic construct; identical to SEQ ID NO: 28956
  REGION 1..466: note = neuraminidase__InfluenzaB__AHZ41829

SEQ ID NO: 30351 - protein, 466 aa, synthetic construct
  REGION 1..466: note = neuraminidase__InfluenzaB__AHZ41840
MLPSTIQMLTLFLTSGGVLLSLYVSASLSYLLYSDILLKFSPTEITAPTMPLDCANASNVHAVNRSATKGVTFLLPEPEWTYPRLSCPGSTFQKALLISPHRFGETKGNSAPLIIREPFIACGPNECRHFALTHYAAQPGGYYNGTRGDRNKLRHLISVKLGKIPTVENSIFHMAAWSGSACHDGKEWTYIGVDGPDNNALLKIKYGEAYTDTYHSYANNILRTQESACNCIGGNCYLMITDGSASGVSECRFLKIREGRIIKEIFPTGRVKHTEECTCGFASNKTIECACRDNSYTAKRPFVKLNVETDTAEIRLMCTDTYLDTPRPDDGSITGPCESNGDKGSGGIKGGFVHQRMASKIGRWYSRTMSKTERKGMGLYVKYDGDPWTDSDALAFRGVMVSMKEPGWYSFGFEIKDKKCDVPCIGIEMVHDGGKETWHSAATAIYCLMGSGQLLWDTVTGVDMAL

SEQ ID NO: 30352 - protein, 466 aa, synthetic construct; identical to SEQ ID NO: 28956
  REGION 1..466: note = neuraminidase__InfluenzaB__AHZ41851

SEQ ID NO: 30353 - protein, 466 aa, synthetic construct; identical to SEQ ID NO: 30202
  REGION 1..466: note = neuraminidase__InfluenzaB__AHZ41862

SEQ ID NO: 30354 - protein, 466 aa, synthetic construct
  REGION 1..466: note = neuraminidase__InfluenzaB__AHZ41873
MLPSTIQTLTLFLTSGGVLLSLYVSASLSYLLYSDILLKFSPTEITAPTMPLDCANASNAQAVNRSATKGVTLLLPEPEWTYPRLSCPGSTFQKALLISPHRFGETKGNSAPLIIREPFIACGPNECKHFALTHYAAQPGGYYNGTRGDRNKLRHLISVKLGKIPTVENSIFHMAAWSGSACHDGKEWTYIGVDGPDNNALLKVKYGEAYTDTYHSYANKILRTQESACNCIGGNCYLMITDGSASGVSECRFLKIREGRIIKEIFPTGRVKHTEECTCGFASNKTIECACRDNRYTAKRPFVKLNVETDTAEIRLMCTDTYLDTPRPNDGSITGPCESDGDKGSGGIKGGFVHQRMKSKIGRWYSRTMSKTERMGMGLYVKYDGDPWADSDALTFSGVMVSMKEPGWYSFGFEIKDKKCDVPCIGIEMVHDGGKETWHSAATAIYCLMGSGQLLWDTVTGVDMAL

SEQ ID NO: 30355 - protein, 466 aa, synthetic construct; identical to SEQ ID NO: 28792
  REGION 1..466: note = neuraminidase__InfluenzaB__AIL94981

SEQ ID NO: 30356 - protein, 466 aa, synthetic construct; identical to SEQ ID NO: 28792
  REGION 1..466: note = neuraminidase__InfluenzaB__AIL94992

SEQ ID NO: 30357 - protein, 466 aa, synthetic construct; identical to SEQ ID NO: 28817
  REGION 1..466: note = neuraminidase__InfluenzaB__AIL95003

SEQ ID NO: 30358 - protein, 466 aa, synthetic construct
  REGION 1..466: note = neuraminidase__InfluenzaB__AIL95014
MLPSTIQTLTLFLTSGGVLLSLYVSASLSYLLYSDILLKFSQTEITAPIMPLDCANASNVQAVNRSAAKGVTLLLPEPEWTYPRLSCPGSTFQKALLISPHRFGETKGNSAPLIIREPFIACGPTECKHFALTHYAAQPGGYYNGTREDRNKLRHLISVKLGKIPTVENSIFHMAAWSGSACHDGKEWTYIGVDGPDSNALLKIKYGEAYTDTYHSYAKNILRTQESACNCIGGDCYLMITDGPASGVSECRFLKIREGRIIKEIFPTGRVKHTEECTCGFASNKTIECACRDNSYTAKRPFVKLNVETDTAEIRLMCTETYLDTPRPNDGSITGPCESDGDKGSGGIKGGFVHQRMASKIGRWYSRTMSKTKRMGMGLYVKYDGDPWTDSEALALSGVMVSMEEPGWYSFGFEIKDKKCDVPCIGIEMVHDGGKTTWHSAATAIYCLMGSGQLLWDTVTGVDMTL

SEQ ID NO: 30359 - protein, 466 aa, synthetic construct; identical to SEQ ID NO: 28817
  REGION 1..466: note = neuraminidase__InfluenzaB__AIL95025

SEQ ID NO: 30360 - protein, 466 aa, synthetic construct
  REGION 1..466: note = neuraminidase__InfluenzaB__AIL95036
MLSSTIQTLTLFLTSGGVLLSLYVSASLSYLLYSDILLKFSPKEITAPTMPLDCANASNVQAVNHSATKGVTLLLPEPEWTYPRLSCPGSTFQKALLISPHRFGETKGNSAPLIIREPFIACGPNECKHFALTHYAAQPGGYYNGTRGDRNKLRHLISVKLGKIPTVENSIFHMAAWSGSACHDGKEWTYIGVDGPDNNALLKVKYGEAYTDTYHSYANKILRTQESACNCIGGNCYLMITDGSASGVSECRFLKIREGRIIKEIFPTGRVKHTEECTCGFASNKTIECACRDNSYTAKRPFVKLNVETDTAEIRLMCTDTYLDTPRPDDGSITGPCESNGDKGSGGIKGGFVHQRMESKIGRWYSRTMSKTERMGMGLYVKYDGDPWADSDALAFSGVMVSMKEPGWYSFGFEIKDKKCDVPCIGIEMVHDGGKETWHSAATAIYCLMGSGQLLWDTVTGVDMAL

SEQ ID NO: 30361 - protein, 466 aa, synthetic construct; identical to SEQ ID NO: 28817
  REGION 1..466: note = neuraminidase__InfluenzaB__AIL95047

SEQ ID NO: 30362 - protein, 466 aa, synthetic construct; identical to SEQ ID NO: 28926
  REGION 1..466: note = neuraminidase__InfluenzaB__AIL95058

SEQ ID NO: 30363 - protein, 466 aa, synthetic construct; identical to SEQ ID NO: 28875
  REGION 1..466: note = neuraminidase__InfluenzaB__AIL95069

SEQ ID NO: 30364 - protein, 466 aa, synthetic construct
  REGION 1..466: note = neuraminidase__InfluenzaB__AIL95080
MLPSTIQTLTLFLTSGGVLLSLYVSASLSYLLYSDILLKFSPKEITAPTMPLDCANASNVQAVNHSATKGVTLLLPEPEWTYPRLSCPGSTFQKALLISPHRFGETKGNSAPLIIREPFIACGPNECKHFALTHYAAQPGGYYNGTRGDRNKLRHLISVKLGKIPTVENSIFHMAAWSGSACNDGKEWTYIGVDGPDNNALLKVKYGEAYTDTYHSYANKILRTQESACNCIGGNCYLMITDGSASGVSECRFLKIREGRIIKEIFPTGRVKHTEECTCGFASNKTIECACRDNSYTAKRPFVKLNVETDTAEIRLMCTDTYLDTPRPDDGSITGPCESNGDKGSGGIKGGFVHQRMESKIGRWYSRTMSKTERMGMGLYVKYDGDPWADSDALAFSGVMVSMKEPGWYSFGFEIKDKKCDVPCIGIEMVHDGGKETWHSAATAIYCLMGSGQLLWDTVTGVDMAL

SEQ ID NO: 30365 - protein, 466 aa, synthetic construct; identical to SEQ ID NO: 28875
  REGION 1..466: note = neuraminidase__InfluenzaB__AIL95091

SEQ ID NO: 30366 - protein, 466 aa, synthetic construct; identical to SEQ ID NO: 28817
  REGION 1..466: note = neuraminidase__InfluenzaB__AIL95102

SEQ ID NO: 30367 - protein, 466 aa, synthetic construct
  REGION 1..466: note = neuraminidase__InfluenzaB__AIL95113
MLPSTIQTLTLFLTSGGVLLSLYVSASLSYLLYSDILLKFSPTGITAPTMPLDCANASNVQAVNRSATKGVTLLPPEPEWTYPRLSCPGSTFQKALLISPHRFGETKGNSAPLIIREPFIACGPNECKHFALTHYAAQPGGYYNGTRGDRNKLRHLISVKLGKIPTVENSIFHMAAWSGSACHDGKEWTYIGVDGPDNNALLKVKYGEAYTDTYHSYANKILRTQESACNCIGGNCYLMITDGSASGVSECRFLKIREGRIIKEIFPTGRVKHTEECTCGFASNKTIECACRDNRYTAKRPFVKLNVETDTAEIRLMCTDTYLDTPRPNDGSITGPCESDGDKGSGGIKGGFVHQRMKSKIGRWYSRTMSKTERMGMGLYVKYDGDPWADSDALAFSGVMVSMKEPGWYSFGFEMKDKKCDVPCIGIEMVHDGGKETWHSAATAIYCLMGSGQLLWDTVTGVDMAL

SEQ ID NO: 30368 - protein, 466 aa, synthetic construct; identical to SEQ ID NO: 30314
  REGION 1..466: note = neuraminidase__InfluenzaB__AIL95124

SEQ ID NO: 30369 - protein, 466 aa, synthetic construct
  REGION 1..466: note = neuraminidase__InfluenzaB__AKA54777
MLPSTIQTLTLFLTSGGVLLSLYVSASLSYLLYSDILLKFSRTEVTAPIMPLDCANASNVQAVNRSATKGVTPLLPEPEWTYPRLSCPGSTFQKALLISPHRFGETKGNSAPLIIREPFIACGPKECKHFALTHYAAQPGGYYNGTREDRNKLRHLISVKLGKIPTVENSIFHMAAWSGSACHDGREWTYIGVDGPDSNALLKIKYGEAYTDTYHSYAKNILRTQESACNCIGGDCYLMITDGPASGISECRFLKIREGRIIKEIFPTGRVKHTEECTCGFASNKTIECACRDNSYTAKRPFVKLNVETDTAEIRLMCTKTYLDTPRPNDGSITGPCESDGDEGSGGIKGGFVHQRMASKTGRWYSRTMSKTKRMGMGLYVKYDGDPWTDSEALALSGVMVSMEEPGWYSFGFEIKDKKCDVPCIGIEMVHDGGKTTWHSAATAIYCLMGSGQLLWDTVTGVNMTL

SEQ ID NO: 30370 - protein, 466 aa, synthetic construct
  REGION 1..466: note = neuraminidase__InfluenzaB__AKA54781
MLPSTIQTLTLFLTSGGVLLSLYVSASLSYLLYLDILLKFPSTEITAPTMPLDCANASNVQAVNRSATKGVTFLLPEPEWTYPRLSCPGSTFQKALLISPHRFGETKGNSAPLIIREPFIACGPKECKHFALTHYAAQPGGYYNGTRGDRNKLRHLISVKLGKIPTVENSIFHMAAWSGSACHDGKEWTYIGVDGPDNNALLKIKYGEAYTDTYHSYANNILRTQESACNCIGGNCYLMITDGSASGVSECRFLKIREGRIMKEIFPTGRTQHTEECTCGFASNKTIECVCRDNSYTAKRPFVKLNVETDTAEIRLMCTKTYLDTPRPDDGSITGPCESNGGKGSGGIKGGFVHQRMASKIGRWYSRTMSKTERKGMGLYVKYNGDPWADSDALTFSGVMVSMEEPGWYSFGFEIKDKKCDVPCIGIEMVHDGGKETWHSAATAIYCLMGSGQLLWDTVTGVNMTL

SEQ ID NO: 30371 - protein, 466 aa, synthetic construct
  REGION 1..466: note = neuraminidase__InfluenzaB__AKA54783
MLPSTIQTLTLFLTSGGVLLSLYVSASLSYLLYSDILLKFSRTEVTAPIMPLDCANASNVQAVNRSATKGVTPLFPEPEWTYPRLSCPGSTFQKALLISPHRFGETKGNSAPLIIREPFIACGPKECKHFALTHYAAQPGGYYNGTREDRNKLRHLISVKLGKIPTVENSIFHMAAWSGSACHDGREWTYIGVDGPDSNALLKIKYGEAYTDTYHSYAKNILRTQESACNCIGGDCYLMITDGPASGISECRFLKIREGRIIKEIFPTGRVKHTEECTCGFASNKTIECACRDNSYTAKRPFVKLNVETDTAEIRLMCTKTYLDTPRPNDGSITGPCESDGDEGSGGIKGGFVHQRMASKIGRWYSRTMSKTKRMGMGLYVKYDGDPWTDSEALALSGVMVSMEEPGWYSFGFEIKDKKCDVPCIGIEMVHDGGKTTWHSAATAIYCLMGSGQLLWDTVTGVNMTL

SEQ ID NO: 30372 - protein, 466 aa, synthetic construct
  REGION 1..466: note = neuraminidase__InfluenzaB__AKA54785
MLPSTIQTLTLFLTSGGVLLSLYVSASLSYLLYSDILLKFSRTEVTAPIMPLDCANASNVQAVNRSATKGVTPLLPEPEWTYPRLSCPGSTFQKALLISPHRFGETKGNSAPLIIREPFIACGPKECKHFALTHYAAQPGGYYNGTREDRNKLRHLISVKLGKIPTVENSIFHMAAWSGSACHDGREWTYIGVDGPDSNALLKIKYGEAYTDTYHSYAKNILRTQESACNCIGGDCYLMITDGPASGISECRFLKIREGRIIKEIFPTGRVKHTEECTCGFASNKTIECACRDNSYTAKRPFVKLNVETDTAEIRLMCTKTYLDTPRPNDGSITGPCESDGNEGSGGIKGGFVHQRMASKIGRWYSRTMSKTKRMGMGLYVKYDGDPWTDSEALALSGVMVSMEEPGWYSFGFEIKDKKCDVPCIGIEMVHDGGKTTWHSAATAIYCLMGSGQLLWDTVTGVNMTL

SEQ ID NO: 30373 - protein, 466 aa, synthetic construct
  REGION 1..466: note = neuraminidase__InfluenzaB__AKA54787
MLPSTIQTLTLFLTSGGVLLSLYVSASLSYLLYSDILLKFSQTEITAPIMPLDCANASNVQAVNHSAAKGVTLLLPEPEWTYPRLSCPGSTFQKALLISPHRFGEIKGNSAPLIIREPFIACGPTECKHFALTHYAAQPGGYYNGTREDRNKLRHLISVKLGKIPTVENSIFHMAAWSGSACHDGKEWTYIGVDGPDSNALLKIKYGEAYTDTYHSYAKNILRTQESACNCIGGDCYLMITDGPASGVSECRFLKIREGRIIKEIFPTGRVKHTEECTCGFASNKTIECACRDNRYTAKRPFVKLNVETDTAEIRLMCTETYLDTPRPNDGSITGPCESDGDKGSGGIKGGFVHQRMASKIGRWYSRTMSKTKRMGMGLYVKYDGDPWTDSEALALSGVMVSMEEPGWYSFGFEIKDKKCDVPCIGIEMVHDGGKTTWHSAATAIYCLMGSGQLLWDTVTGVDMAL

SEQ ID NO: 30374 - protein, 466 aa, synthetic construct
  REGION 1..466: note = neuraminidase__InfluenzaB__AKA54789
MLPSTIQTLTLFLTSGGVLLSLYVSASLSYLLYSDILLKFSRTEVTAPIMPLDCANASNVQAVNRSATKGVTPLLPEPEWTYPRLSCPGSTFQKALLISPHRFGETKGNSAPLIIREPFIACGPKECKHFALTHYAAQPGGYYNGTREDRNKLRHLISVKLGKIPTVENSIFHMAAWSGSACHDGREWTYIGVDGPDSNALLKIKYGEAYTDTYHSYAKNILRTQESACNCIGGDCYLMITDGPASGISECRFLKIREGRIIKEIFPTGRVKHTEECTCGFASNKTIECACRDNSYTAKRPFVKLNVETDTAEIRLMCTKTYLDTPRPNDGSITGPCESDGDEGSGGIKGGFVHQRMASKIGRWYSRTMSKTKRMGMGLYVKYDGDPWTDSEALALSGVMVSMEEPGWYSFGFEIKDKKCDVPCIGIEMVHDGGKTTWHSAATAIYCLMGSGQLLWDTVTGVNMTL

SEQ ID NO: 30375 - protein, 466 aa, synthetic construct
  REGION 1..466: note = neuraminidase__InfluenzaB__AKA54791
MLPSTIQTLTLFLTSGGVLLSLYVSASLSYLLYSDILLKFSRTEVTAPIMPLDCANASNAQAVNRSATKGVTPLLPEPEWTYPRLSCPGSTFQKALLISPHRFGETKGNSAPLIIREPFIACGPKECKHFALTHYAAQPGGYYNGTREDRNKLRHLISVKLGKIPTVENSIFHMAAWSGSACHDGREWTYIGVDGPDSNALLKIKYGEAYTDTYHSYAKNILRTQESACNCIGGDCYLMITDGPASGISECRFLKIREGRIIKEIFPTGRVKHTEECTCGFASNKTIECACRDNSYTAKRPFVKLNVETDTAEIRLMCTKTYLDTPRPNDGSITGPCESDGDEGSGGIKGGFVHQRMASKIGRWYSRTMSKTKRMGMGLYVKYDGDPWTDSEALALSGVMVSMEEPGWYSFGFEIKDKKCDVPCIGIEMVHDGGKTTWHSAATAIYCLMGSGQLLWDTVTGVNITL

SEQ ID NO: 30376 - protein, 466 aa, synthetic construct; identical to SEQ ID NO: 30373
  REGION 1..466: note = neuraminidase__InfluenzaB__AKA54793

SEQ ID NO: 30377 - protein, 466 aa, synthetic construct; identical to SEQ ID NO: 30373
  REGION 1..466: note = neuraminidase__InfluenzaB__AKA54795

SEQ ID NO: 30378 - protein, 466 aa, synthetic construct; identical to SEQ ID NO: 30374
  REGION 1..466: note = neuraminidase__InfluenzaB__AKA54797

SEQ ID NO: 30379 - protein, 466 aa, synthetic construct
  REGION 1..466: note = neuraminidase__InfluenzaB__AKA54799
MLPSTIQTLTLFLTSGGVLLSLYVSASLSYLLYSDILLKFSQTEITAPIMPLDCANASNVQAVNHSAAKGVTLLLPEPEWTYPRLSCPGSTFQKALLISPHRFGEIKGNSAPLIIREPFIACGPTECKHFALTHYAAQPGGYYNGTREDRNKLRHLISVKLGKIPTVENSIFHMAAWSGSACHDGKEWTYIGVDGPDSNALLKIKYGEAYTDTYHSYEKNILRTQESACNCIGGDCYLMITDGPASGVSECRFLKIREGRIIKEIFPTGRVKHTEECTCGFASNKTIECACRDNRYTAKRPFVKLNVETDTAEIRLMCTETYLDTPRPNDGSITGPCESDGDKGSGGIKGGFVHQRMASKIGRWYSRTMSKTKRMGMGLYVKYDGDPWTDSEALALSGVMVSMEEPGWYSFGFEIKDKKCDVPCIGIEMVHDGGKTTWHSAATAIYCLMGSGQLLWDTVTGVDMAL

SEQ ID NO: 30380 - protein, 466 aa, synthetic construct; identical to SEQ ID NO: 30374
  REGION 1..466: note = neuraminidase__InfluenzaB__AKA54801

SEQ ID NO: 30381 - protein, 466 aa, synthetic construct
  REGION 1..466: note = neuraminidase__InfluenzaB__AKA54803
MLPSTIQTLTLFLTSGGVLLSLYVSASLSYLLYSDILLKFSRTEVTAPIMPLDCANASNVQAVNRSATNGVTPLLPEPEWTYPRLSCPGSTFQKALLISPHRFGETKGNSAPLIIREPFIACGPKECKHFALTHYAAQPGGYYNGTREDRNKLRHLISVKLGKIPTVENSIFHMAAWSGSACHDGREWTYIGVDGPDSNALLKIKYGEAYTDTYHSYAKNILRTQESACNCIGGDCYLMITDGPASGISECRFLKIREGRIIKEIFPTGRVKHTEECTCGFASNKTIECACRDNSYTAKRPFVKLNVETDTAEIRLMCTKTYLDTPRPNDGSITGPCESDGDEGSGGIKGGFVHQRMASKIGRWYSRTMSKTKRMGMGLYVKYDGDPWTDSEALALSGVMVSMEEPGWYSFGFEIKDKKCDVPCIGIEMVHDGGKTTWHSAATAIYCLMGSGQLLWDTVTGVNMTL

SEQ ID NO: 30382 - protein, 466 aa, synthetic construct; identical to SEQ ID NO: 30374
  REGION 1..466: note = neuraminidase__InfluenzaB__AKA54805

SEQ ID NO: 30383 - protein, 466 aa, synthetic construct
  REGION 1..466: note = neuraminidase__InfluenzaB__AKA54807
MLPSTIQTLTLFLTSGGVLLSLYVSASLSYLLYSDILLKFSRTEVTAPIMPLDCANASNVQAVNRSATKGVTPLLPEPEWTYPRLSCPGSTFQKALLISPHRFGETKGNSAPLIIREPFIACGPKECKHFALTHYAAQPGGYYNGTREDRNKLRHLISVKLGKIPTVENSIFHMAAWSGSACHDGREWTYIGVDGPDSNALLKIKYGEAYTDTYHSYAKNILRTQESACNCIGGDCYLMITDGPASGISECRFLKIREGRIIKEIFPTGRVKHTEECTCGFASNKTIECACRDNSYTAKRPFVKLNVETDTAEIRLMCTKTYLDTPRPNDGSITGPCESDGDEGSGGIKGGFVHQRMASKIGRWYSRTMSKTKRMGMGLYVKYDGDPWTDSEALALSGVMVSMEEPGWYSFGFEIKDKKCDVPCIGIEMVHDGGKTTWHSAATAIYCLMGSGQLLWDTVTGVNITL

SEQ ID NO: 30384 - protein, 466 aa, synthetic construct
  REGION 1..466: note = neuraminidase__InfluenzaB__AKA54809
MLPSTIQTLTLFLTSGGVLLSLYVSASLSYLLYSDILLKFSRTEVTAPIMPLDCANASNVQAVNRSATKGVTPLLPEPEWTYPRLSCPGSTFQKALLISPHRFGETKGNSAPLIIREPFIACGPKECKHFALTHYAAQPGGYYNGTREDRNKLRHLISVKLGKIPTVENSIFHMAAWSGSACHDGREWTYIGVDGPDSNALLKIKYGEAYTDTYHSYAKNILRTQESACNCIGGDCYLMITDGPASGISECRFLKIREGRIIKEIFPTGRVKHTEECTCGFASNKTIECACRDNSYTAKRPFVKLNVETDTAEIRLMCTKTYLDTPRPNDGSITGPCESDGDEGSGGIKGGFVHQRMAFKIGRWYSRTMSKTKRMGMGLYVKYDGDPWTDSEALALSGVMVSMEEPGWYSFGFEIKDKKCDVPCIGIEMVHDGGKTTWHSAATAIYCLMGSGQLLWDTVTGVNMTL

SEQ ID NO: 30385 - protein, 466 aa, synthetic construct; identical to SEQ ID NO: 30374
  REGION 1..466: note = neuraminidase__InfluenzaB__AKA54811

SEQ ID NO: 30386 - protein, 466 aa, synthetic construct
  REGION 1..466: note = neuraminidase__InfluenzaB__AKA54813
MLPSTIQTLTLFLTSGGVLLSLYVSASLSYLLYSDILLKFSRTEVTAPIMPLDCANASNVQAVNRSATKGVTPLLPEPEWTYPRLSCPGSTFQKALLISPHRFGETKGNSAPLIIREPFIACGPKECKHFALTHYAAQPGGYYNGTREDRNKLRHLISVKLGKIPTVENSIFHMAAWSGSACHDGREWTYIGVDGPDSNALLKIKYGEAYTDTYHSYAKNILRTQESACNCIGGDCYLMITDGPASGISECRFLKIREGRIIKEIFPTGRVKHTEECTCGFASNKTIECACRDNSYTAKRPFVKLNVETDTAEIRLMCTKTYLDTPRPNDGSITGPCESDGDEGSGGIKGGFVHQRMASKIGRWYSRTMSKTKRMGMGLYVKYDGDPWTDSEALALSGVMVSIEEPGWYSFGFEIKDKKCDVPCIGIEMVHDGGKTTWHSAATAIYCLMGSGQLLWDTVTGVNMTL

SEQ ID NO: 30387 - protein, 466 aa, synthetic construct; identical to SEQ ID NO: 30374
  REGION 1..466: note = neuraminidase__InfluenzaB__AKA54815

SEQ ID NO: 30388 - protein, 466 aa, synthetic construct
  REGION 1..466: note = neuraminidase__InfluenzaB__AKA54817
MLPSTIQTLTLFLTSGGVLLSLYVSASLSYLLYSDILLKFSRTEVTAPIMPLDCANASNVQAVNRSATKGVTPLLPEPEWTYPRLSCPGSTFQKALLISPHRFGETKGNSAPLIIREPFIACGPKECKHFALTHYAAQPGGYYNGTREDRNKLRHLISVKLGKIPTVENSIFHMAAWSGSACHDGREWTYIGVDGPDSNALLKIKYGEAYTDTYHSYAKNILRTQESACNCIGGDCYLMITDGPASGISECRFLKIREGRIIKEIFPTGRVKHTEECTCGFASNKTIECACRDNSYTAKRPFVKLNVETDTAEIRLMCTKTYLDTPRPNDGSITGPCESDGDEGSGGIKGGFVHQRMASKIGRWYSRTMSKTKRMGMGLYVKYDGDPWTDSEALALSGVMVSMEEPGWYSFGFEIKDKKCDVPCIGVEMVHDGGKTTWHSAATAIYCLMGSGQLLWDTVTGVNMTL

SEQ ID NO: 30389 - protein, 466 aa, synthetic construct; identical to SEQ ID NO: 30374
  REGION 1..466: note = neuraminidase__InfluenzaB__AKA54819

SEQ ID NO: 30390 - protein, 466 aa, synthetic construct; identical to SEQ ID NO: 30374
  REGION 1..466: note = neuraminidase__InfluenzaB__AKA54821

SEQ ID NO: 30391 - protein, 466 aa, synthetic construct; identical to SEQ ID NO: 30374
  REGION 1..466: note = neuraminidase__InfluenzaB__AKA54823

SEQ ID NO: 30392 - protein, 466 aa, synthetic construct; identical to SEQ ID NO: 30374
  REGION 1..466: note = neuraminidase__InfluenzaB__AKA54825

SEQ ID NO: 30393 - protein, 466 aa, synthetic construct; identical to SEQ ID NO: 30374
  REGION 1..466: note = neuraminidase__InfluenzaB__AKA54827

SEQ ID NO: 30394 - protein, 466 aa, synthetic construct
  REGION 1..466: note = neuraminidase__InfluenzaB__AKA54829
MLPSTIQTLTLFLTSGGVLLSLYVSASLSYLLYSDILLKLSRTEVTAPIMPLDCANASNVQAVNRSATKGVTPLLPEPEWTYPRLSCPGSTFQKTLLISPHRFGETKGNSAPLIIREPFIACGPKECKHFALTHYAAQPGGYYNGTREDRNKLRHLISVKLGKIPTVENSIFHMAAWSGSACHDGREWTYIGVDGPDSNALLKIKYGEAYTDTYHSYAKNILRTQESACNCIGGDCYLMITDGPASGISECRFLKIREGRIIKEIFPTGRVKHTEECTCGFASNKTIECACRDNSYTAKRPFVKLNVETDTAEIRLMCTKTYLDTPRPNDGSITGPCESDGDEGSGGIKGGFVHQRMASKIGRWYSRTMSKTKRMGMGLYVKYDGDPWTDSEALALSGVMVSMEEPGWYSFGFEIKDKKCDVPCIGIEMVHDGGKTTWHSAATAIYCLMGSGQLLWDTVTGVNMTL

SEQ ID NO: 30395 - protein, 466 aa, synthetic construct
  REGION 1..466: note = neuraminidase__InfluenzaB__AKA54831
MLPSTIQTLTLFLTSGGVLLSLYVSASLSYLLYSDILLKFSRTEVTAPIMPLDCANASNVQAVNRSATKGVTPLLPEPEWTYPRLSCPGSTFQKALLISPHRFGETKGNSAPLIIREPFIACGPKECKHFALTHYAAQPGGYYNGTREDRNKLRHLISVKLGKIPTVENSIFHMAAWSGSACHDGREWTYIGVDGQDSNALLKIKYGEAYTDTYHSYAKNILRTQESACNCIGGDCYLMITDGPASGISECRFLKIREGRIIKEIFPTGRVKHTEECTCGFASNKTIECACRDNSYTAKRPFVKLNVETDTAEIRLMCTKTYLDTPRPNDGSITGPCESDGDEGSGGIKGGFVHQRMASKIGRWYSRTMSKTKRMGMGLYVKYDGDPWTDSEALALSGVMVSMEEPGWYSFGFEIKDKKCDVPCIGIEMVHDGGKTTWHSAATAIYCLMGSGQLLWDTVTGVNMTL

SEQ ID NO: 30396 - protein, 466 aa, synthetic construct; identical to SEQ ID NO: 30374
  REGION 1..466: note = neuraminidase__InfluenzaB__AKA54833

SEQ ID NO: 30397 - protein, 466 aa, synthetic construct
  REGION 1..466: note = neuraminidase__InfluenzaB__AKA54837
MLPSTIQTLTLFLTSGGVLLSLYVSASLSYLLYSDILLKFSPTEITAPTMPLDCANASNVQAVNRSATKGVTLLLPEPEWTYPRLSCPGSTFQKALLISPHRFGETNGNSAPLIVREPFIACGPNECKHFALTHYAAQPGGYYNGTRGDRNKLRHLISVKLGKIPTVENSIFHMAAWSGSACHDGKEWTYIGVDGPDNNALLKVKYGEAYTDTYHSYANKILRTQESACNCIGGNCYLMITDGSASGVSECRFLKIREGRIIKEIFPTGRVKHTEECTCGFASNKTIECACRDNRYTAKRPFVKLNVETDTAEIRLMCTDTYLDTPRPNDGSITGPCESDGNEGSGGIKGGFVHQRMKSKIGRWYSRTMSKTERMGMGLYVKYDGDPWADSDALAFSGVMVSMKEPGWYSFGFEIKDKKCDVPCIGIEMVHDGGKETWHSAATAIYCLMGSGQLLWDTVTGVDMAL

SEQ ID NO: 30398 - protein, 466 aa, synthetic construct
  REGION 1..466: note = neuraminidase__InfluenzaB__AKA54839
MLPSTIQTLTLFLTSGGVLLSLYVSASLSYLLYSDILLKFSPTEITAPTMPLDCANASNVQAVNRSATKEVTLLLPEPEWTYPRLSCPGSTFQKALLISPHRFGETKGNSAPLIIREPFIACGPNECKHFALTHYAAQPGGYYNGTRGDRNKLRHLISVKLGKIPTVENSIFHMAAWSGSACHDGKEWTYIGVDGPDNNALLKVKYGEAYTDTYHSYANKILRTQESACNCIGGNCYLMITDGSASGVSECRFLKIREGRIIKEIFPTGRVKHTEECTCGFASNKTIECACRDNRYTAKRPFVKLNVETDTAEIRLMCTDTYLDTPRPNDGSITGPCESDGDKGSGGIKGGFVHQRMKSKIGRWYSRTMSKTERMGMGLYVKYDGDPWADSDALAFSGVMVSMKEPGWYSFGFEIKDKKCDVPCIGIEMVHDGGKETWHSAATAIYCLMGSGQLLWDTVTGVDMAL

SEQ ID NO: 30399 - protein, 466 aa, synthetic construct
  REGION 1..466: note = neuraminidase__InfluenzaB__AKA54841
MLPSTIQTLTLFLTSGGVLLSLYVSASLSYLLYSDILLKFSPTEITAPTMPLDCANASNVQAVNRSATKGVTLLLPEPEWTYPRLSCPGSTFQKALLISPHRFGETKGNSAPLIIREPFIACGPNECKHFALTHYAAQPGGYYNGTRGDRNKLRHLISVKLGKIPTVENSIFHMAAWSGSACHDGKEWTYIGVDGPDNNALLKVKYGEAYTDTYHSYANKILRTQESACNCIGGNCYLMITDGSASGVSECRFLKIREGRIIKEIFPTGRVKHTEECTCGFASNKTIECACRDNRYTAKRPFVKLNVETDTAEIRLMCTDTYLDTPRPNDGSITGPCESDGDEGSGGIKGGFVHQRMKSKIGRWYSRTMSKTERMGMGLYVKYDGDPWADSDALAFSGVMVSVKEPGWYSFGFEIKDKKCDVPCIGIEMVHDGGKETWHSAATAIYCLMGSGQLLWDTVTGVDIAL

SEQ ID NO: 30400 - protein, 466 aa, synthetic construct
  REGION 1..466: note = neuraminidase__InfluenzaB__AKA54843
MLPSTIQTLTLFLTSGGVLLSLYVSASLSYLLYSDILLKFSPTEITAPTMPLDCANASNVQAVNRSATKGVTLLLPEPEWTYPRLSCPGSTFQKALLISPHRFGETKGNSAPLIIREPFIACGPNECKHFALTHYAAQPGGYYNGTRGDRNKLRHLISVKLGKIPTVENSIFHMAAWSGSACHDGKEWTYIGVDGPDNNALLKVKYGEAYTDTYHSYANKILRTQESACNCIGGNCYLMITDGSASGVSECRFLKIREGRIIKEIFPTGRVKHTEECTCGFASNKTIECACRDNRYTAKRPFVKLNVETDTAEIRLMCTDTYLDTPRPNDGSITGPCESDGDEGSGGIKGGFVHQRMKSKIGRWYSRTMSKTERMGMGLYVKYDGDPWADSDALAFSGVMVSVKEPGWYSFGFEIKDKKCDVPCIGIEMVHDGGKETWHSAATAIYCLMGSGQLLWDTVTGVDMAL

SEQ ID NO: 30401 - protein, 466 aa, synthetic construct
  REGION 1..466: note = neuraminidase__InfluenzaB__AKA54845
MLPSTIQTLTLFLTSGGVLLSLYVSASLSYLLYSDILLKFSPTEITAPTMPLDCANASNVQAVNRSATKGVTLLLPEPEWTYPRLSCPGSTFQKALLISPHRFGETNGNSAPLIIREPFIACGPNECKHFALTHYAAQPGGYYNGTRGDRNKLRHLISVKLGKIPTVENSIFHMAAWSGSACHDGKEWTYIGVDGPDNNALLKVKYGEAYTDTYHSYANKILRTQESACNCIGGNCYLMITDGSASGVSECRFLKIREGRIIKEIFPTGRVKHTEECTCGFASNKTIECACRDNRYTAKRPFVKLNVETDTAEIRLMCTDTYLDTPRPNDGSITGPCESDGDEGSGGIKGGFVHQRMKSKIGRWYSRTMSKTERMGMGLYVKYDGDPWADSDALAFSGVMVSMKEPGWYSFGFEIKDKKCDVPCIGIEMVHDGGKETWHSAATAIYCLMGSGQLLWDTVTGVDMAL

SEQ ID NO: 30402 - protein, 466 aa, synthetic construct; identical to SEQ ID NO: 30206
  REGION 1..466: note = neuraminidase__InfluenzaB__AKA54847

SEQ ID NO: 30403 - protein, 466 aa, synthetic construct
  REGION 1..466: note = neuraminidase__InfluenzaB__AKA54849
MLPSTIQTLTLFLTSGGVLLSLYVSASLSYLLYSDILLKFSSTEITAPTMPLDCANASNVQAVNRSATKGVTLLLPEPEWTYPRLSCPGSTFQKALLISPHRFGETNGNSAPLIIREPFIACGPNECKHFALTHYAAQPGGYYNGTRGDRNKLRHLISVKLGKIPTVENSIFHMAAWSGSACHDGKEWTYIGVDGPDNNALLKVKYGEAYTDTYHSYANKILRTQESACNCIGGNCYLMITDGSASGVSECRFLKIREGRIIKEIFPTGRVKHTEECTCGFASNKTIECACRDNRYTAKRPFVKLNVETDTAEIRLMCTDTYLDTPRPNDGSITGPCESDGDEGGGGIKGGFVHQRMKSKIGRWYSRTMSKTERMGMGLYVKYDGDPWADSDALAFSGVMVSMKEPGWYSFGFEIKDKKCDVPCIGIEMVHDGGKETWHSAATAIYCLMGSGQLLWDTVTGVDMAL

SEQ ID NO: 30404 - protein, 466 aa, synthetic construct
  REGION 1..466: note = neuraminidase__InfluenzaB__AKA54851
MLPSTIQTLTLFLTSGGVLLSLYVSASLSYLLYSDILLKFSPTEITAPTMPLDCANASNVQAVNRSATKGVTLLLPEPEWTYPRLSCPGSTFQKALLISPHRFGETKGNSAPLIIREPFIACGPNECKHFALTHYAAQPGGYYNGTRGDRNKLRHLISVKLGKIPTVENSIFHMAAWSGSACHDGKEWTYIGVDGPDNNALLKVKYGEAYIDTYHSYANKILRTQESACNCIGGNCYLMITDGSASGVSECRFLKIREGRIIKEIFPTGRVKHTEECTCGFASNKTIECACRDNRYTAKRPFVKLNVETDTAEIRLMCTDTYLDTPRPNDGSITGPCESDGDKGSGGIKGGFVHQRMKSKIGRWYSRTMSKTERMGMGLYVKYDGDPWADSDALAFSGVMVSMKEPGWYSFGFEIKDKKCDVPCIGIEMVHDGGKETWHSAATAIYCLMGSGQLLWDTVTGVDMAL

SEQ ID NO: 30405 - protein, 466 aa, synthetic construct
  REGION 1..466: note = neuraminidase__InfluenzaB__AKA54853
MLPSTIQTLTLFLTSGGVLLSLYVSASLSYLLYSDILLKFSPTEITAPTMPLDCANASNVQAVNRSATKGVTLLLPEPEWTYPRLSCPGSTFQKALLISPHRFGETKGNSAPLIIREPFIACGPNECKHFALTHYAAQPGGYYNGTRGDRNKLRHLISVKLGKIPTVENSIFHMAAWSGSACHDGKEWTYIGVDGPDNNALLKVKYGEAYTDTYHSYANKILRTQESACNCIGGNCYLMITDGSASGVSECRFLKIREGRIIKEIFPTGRVKHTEECTCGFASNKTIECACRDNRYTAKRPFVKLNVETDTAEIRLMCTDTYLDTPRPNDGSITGPCESDGDEGSGGVKGGFVHQRMKSKIGRWYSRTMSKTERMGMGLYVKYDGDPWADSDALAFSGVMVSVKEPGWYSFGFEIKDKKCDVPCIGIEMVHDGGKETWHSAATAIYCLMGSGQLLWDTVTGVDMAL

SEQ ID NO: 30406 - protein, 466 aa, synthetic construct
  REGION 1..466: note = neuraminidase__InfluenzaB__AKA54855
MLPSTIQTLTLFLTSGGVLLSLYVSASLSYLLYSDILLKFSPTEITAPTMPLDCANASNVQAVNRSATKGVTLLLPEPEWTYPRLSCPGSTFQKALLISPHRFGETKGNSAPLIIREPFIACGPNECKHFALTHYAAQPGGYYNGTRGDRNKLRHLISVKLGKIPTVENSIFHMAAWSGSACHDGKEWTYIGVDGPDNNALLKVKYGEAYTDTYHSYANKILRTQESACNCIGGNCYLMITDGSASGVSECRFLKIREGRIIKEIFPTGRVKHTEECTCGFASNKTIECACRDNRYTAKRPFVKLDVETDTAEIRLMCTDTYLDTPRPNDGSITGPCESDGDKGSGGIKGGFVHQRMKSKIGRWYSRTMSKTERMGMGLYVKYDGDPWADSDALAFSGVMVSMKEPGWYSFGFEIKDKKCDVPCIGIEMVHDGGKETWHSAATAIYCLMGSGQLLWDTVTGVDMAL

SEQ ID NO: 30407 - protein, 466 aa, synthetic construct
  REGION 1..466: note = neuraminidase__InfluenzaB__AKT07927
MPPSTIQTLTLFLTSGGVLLSLYVSASLSYLLYSDILLKFSPTEITAPTMPLDCANASNVQAVNRSATKGVTLLLPEPEWTYPRLSCPGSTFQKALLISPHRFGETRGNSAPLIIREPFIACGPNECKHFALTHYAAQPGGYYNGTRGDRNKLRHLISVKLGKIPTVENSIFHMAAWSGSACHDGKEWTYIGVDGPDNNALLKVKYGEAYTDTYHSYANKILRTQESACNCIGGNCYLMITDGSASGVSECRFLKIREGRIIKEIFPTGRVKHTEECTCGFASNKTIECACRDNSYTAKRPFVKLNVETDTAEIRLMCTDTYLDTPRPNDGSITGPCESDGDKGSGGIKGGFVHQRMESKIGRWYSRTMSKTERMGMGLYVKYDGDPWTDSDALAFGGVMVSMKEPGWYSFGFEIKDKKCDVPCIGIEMVHDGGKETWHSAATAIYCLMGSGQLLWDTVTGVDMAL

SEQ ID NO: 30408 - protein, 466 aa, synthetic construct; identical to SEQ ID NO: 29119
  REGION 1..466: note = neuraminidase__InfluenzaB__AKT07931

SEQ ID NO: 30409 - protein, 466 aa, synthetic construct
  REGION 1..466: note = neuraminidase__InfluenzaB__AKT07933
MLPSTIQTLTLFLTSGGVLLSLYVSASLSYLLYSDILLKFSPTEITAPAMPLDCANASNVQAVNRSATKGVTFLLPEPEWTYPRLSCPGSTFQKALLISPHRFGETKGNSAPLIIREPFIACGPNECKHFALTHYAAQPGGYYNGTRGDRNKLRHLISVKLGKIPTVENSIFHMAAWSGSACHDGKEWTYIGVDGPDNNALLKVKYGEAYTDTYHSYANKILRTQESACNCIGGNCYLMITDGSASGVSECRFLKIREGRIIKEIFPTGRVKHTEECTCGFASNKTIECACRDNSYTAKRPFVKLNVETDTAEIRLMCTDTYLDTPRPNDGSITGPCESDGDKGSGGIKGGFVHQRMESKIGRWYSRTMSKTERMGMGLYVKYDGDPWADSDALAFSGVMVSMKEPGWYSFGFEIKDKKCDVPCIGIEMVHDGGKETWHSAATAIYCLMGSGQLLWDTVTGVDMAL

SEQ ID NO: 30410 - protein, 466 aa, synthetic construct; identical to SEQ ID NO: 29119
  REGION 1..466: note = neuraminidase__InfluenzaB__AKT07935

SEQ ID NO: 30411 - protein, 466 aa, synthetic construct; identical to SEQ ID NO: 29119
  REGION 1..466: note = neuraminidase__InfluenzaB__AKT07937

SEQ ID NO: 30412 - protein, 466 aa, synthetic construct; identical to SEQ ID NO: 28961
  REGION 1..466: note = neuraminidase__InfluenzaB__AKT07939

SEQ ID NO: 30413 - protein, 466 aa, synthetic construct; identical to SEQ ID NO: 29119
  REGION 1..466: note = neuraminidase__InfluenzaB__AKT07941

SEQ ID NO: 30414 - protein, 466 aa, synthetic construct; identical to SEQ ID NO: 29119
  REGION 1..466: note = neuraminidase__InfluenzaB__AKT07945

SEQ ID NO: 30415 - protein, 466 aa, synthetic construct
  REGION 1..466: note = neuraminidase__InfluenzaB__AKT07947
MLPSTIQTLTLFLTSGGVLLSLYVSASLSYLLYSDILLKFSPTEITAPAMPLDCANASNVQAVNRSATKGVTLLLPEPEWTYPRLSCPGSTFQKALLISPHRFGETKGNSAPLIIREPFIACGPNECKHFALTHYAAQPGGYYNGTRGDRNKLRHLISVKLGKIPTVENSIFHMAAWSGSACHDGKEWTYIGVDGPDNNALLKVKYGEAYTDTYHSYANKILRTQESACNCIGGNCYLMITDGSASGVSECRFLKIREGRIIKEIFPTGRVKHTEECTCGFASNKTIECACRDNSYTAKRPFVKLNVETDTAEIRLMCTDTYLDTPRPNDGSITGPCESDGDKGSGGIKGGFVHQRMESKIGRWYSRTMSKTERMGMGLYVKYDGDPWADSDALAFSGVMVSMKEPGWYSFGFEIKDKKCDVPCIGVDMVHDCGKETWHSAATAIYCLMGSGQLLWDTVTGVDMAL

SEQ ID NO: 30416 - protein, 466 aa, synthetic construct; identical to SEQ ID NO: 30374
  REGION 1..466: note = neuraminidase__InfluenzaB__AKU40585

SEQ ID NO: 30417 - protein, 466 aa, synthetic construct; identical to SEQ ID NO: 30374
  REGION 1..466: note = neuraminidase__InfluenzaB__AKU40596

SEQ ID NO: 30418 - protein, 466 aa, synthetic construct
  REGION 1..466: note = neuraminidase__InfluenzaB__AKU40607
MLPSTIQTLTLFLTSGGVLLSLYVSASLSYLLYSDILLKFSRTEVTAPITPLDCANASNAQAVNRSATKGVTPLLPEPEWTYPRLSCPGSTFQKALLISPHRFGETKGNSAPLIIREPFIACGPKECKHFALTHYAAQPGGYYNGTREDRNKLRHLISVKLGKIPTVENSIFHMAAWSGSACHDGREWTYIGVDGPDSNALLKIKYGEAYTDTYHSYAKNILRTQESACNCIGGDCYLMITDGPASGISECRFLKIREGRIIKEIFPTGRVKHTEECTCGFASNKTIECACRDNSYTAKRPFVKLNVETDTAEIRLMCTKTYLDTPRPNDGSITGPCESDGDEGSGGIKGGFVHQRMASKIGRWYSRTMSKTKRMGMGLYVKYDGDPWTDSEALALSGVMVSMEEPGWYSFGFEIKDKKCDVPCIGIEMVHDGGKTTWHSAATAIYCLMGSGQLLWDTVTGVNMTL

SEQ ID NO: 30419 - protein, 466 aa, synthetic construct
  REGION 1..466: note = neuraminidase__InfluenzaB__AKU40618
MLPSTIQTLTLFLTSGGVLLSLYVSASLSYLLYSDILLKFSRTEVTAPIMPLDCANASNVQAVNRSATKGVTPLLPEPEWTYPRLSCPGSTFQKALLISPHRFGETKGNSAPLIIREPFIACGPKECKHFALTHYAAQPGGYYNGTREDRNKLRHLISVKLGKIPTVENSIFHMAAWSGSACHDGREWTYIGVDGPDSNALLKIKYGEAYTDTYHSYAKNILRTQESACNCIGGDCYLMITDGPASGISECRFLKIREGRIIKEIFPTGRVKHTEECTCGFASNKTIECACRDNSYTAKRPFVKLNVETDTAEIRLMCTKTYLDTPRPNDGSITGPCESDGDEGSGGIKGGFVHQRMASKIGRWYSRTMSKTKRMGMGLYVKYDGDPWTDSEALALSGVMVSMEEPGWYSFGFEIKDNKCDVPCIGIEMVHDGGKTTWHSAATAIYCLMGSGQLLWDTVTGVNMTL

SEQ ID NO: 30420 - protein, 466 aa, synthetic construct
  REGION 1..466: note = neuraminidase__InfluenzaB__AKU40640
MLPSTIQTLTLFLTSGGVLLSLYVSASLSYLLYSDILLKFSRTEIAAPIMPLDCANASNVQAVNRSATKGVALLLPEPEWTYPRLSCPGSTFQKALLISPHRFGETKGNSAPLIIREPFIACGPKECKHFALTHYAAQPGGYYNGTREDRNKLRHLISVKLGKIPTVENSIFHMAAWSGSACHDGREWTYIGVDGPDNNALLKIKYGEAYTDTYHSYAKNILRTQESACNCIGGDCYLMITDGPASGISECRFLKIREGRIIKEIFPTGRVKHTEECTCGFASNKTIECACRDNSYTAKRPFVKLNVETDTAEIRLMCTETYLDTPRPNDGSITGPCESNGDKGSGGIKGGFVHQRMASKIGRWYSRTMSKTKRMGMGLYVKYDGDPWTDSEALALSGVMVSMEEPGWYSFGFEIKDKKCDVPCIGIEMVHDGGKTTWHSAATAIYCLMGSGQLLWDTVTGVNMTL

SEQ ID NO: 30421 - protein, 466 aa, synthetic construct; identical to SEQ ID NO: 30374
  REGION 1..466: note = neuraminidase__InfluenzaB__AKU40662

SEQ ID NO: 30422 - protein, 466 aa, synthetic construct
  REGION 1..466: note = neuraminidase__InfluenzaB__AKU40673
MLPSTIQTLTLFLTSGGVLLSLYVSASLSYLLYSDILLKFSRTEVTAPIMPLDCANASNVQAVNRSATKGVTPLLPESEWTYPRLSCPGSTFQKALLISPHRFGETKGNSAPLIIREPFIACGPKECKHFALTHYAAQPGGYYNGTREDRNKLRHLISVKLGKIPTVENSIFHMAAWSGSACHDGREWTYIGVDGPDSNALLKIKYGEAYTDTYHSYAKNILRTQESACNCIGGDCYLMITDGPASGISECRFLKIREGRIIKEIFPTGRVKHTEECTCGFASNKTIECACRDNSYTAKRPFVKLNVETDTAEIRLMCTKTYLDTPRPNDGSITGPCESDGDEGSGGIKGGFVHQRMASKIGRWYSRTMSKTKRMGMGLYVKYDGDPWTDSEALALSGVMVSMEEPGWYSFGFEIKDKKCDVPCIGIEMVHDGGKTTWHSAATAIYCLMGSGQLLWDTVTGVNMTL

SEQ ID NO: 30423 - protein, 466 aa, synthetic construct; identical to SEQ ID NO: 30374
  REGION 1..466: note = neuraminidase__InfluenzaB__AKU40684

SEQ ID NO: 30424 - protein, 466 aa, synthetic construct; identical to SEQ ID NO: 30374
  REGION 1..466: note = neuraminidase__InfluenzaB__AKU40695

SEQ ID NO: 30425 - protein, 466 aa, synthetic construct; identical to SEQ ID NO: 30374
  REGION 1..466: note = neuraminidase__InfluenzaB__AKU40706

SEQ ID NO: 30426 - protein, 466 aa, synthetic construct; identical to SEQ ID NO: 30374
  REGION 1..466: note = neuraminidase__InfluenzaB__AKU40717

SEQ ID NO: 30427 - protein, 466 aa, synthetic construct
  REGION 1..466: note = neuraminidase__InfluenzaB__AKU40728
MLPSTIQTLTLFLTSGGVLLSLYVSASLSYLLYSDILLKFSRTEVTAPIMPLDCANASNAQAVNRSATKGVTPLLPEPEWTYPRLSCPGSTFQKALLISPHRFGETKGNSAPLIIREPFIACGPKECKHFALTHYAAQPGGYYNGTREDRNKLRHLISVKLGKIPTVENSIFHMAAWSGSACHDGREWTYIGVDGPDSNALLKIKYGEAYTDTYHSYAKNILRTQESACNCIGGDCYLMITDGPASGISECRFLKIREGRIIKEIFPTGRVKHTEECTCGFASNKTIECACRDNSYTAKRPFVKLNVETDTAEIRLMCTKTYLDTPRPNDGSITGPCESDGDEGSGGIKGGFVHQRMASKIGRWYSRTMSKTKRMGMGLYVKYDGDPWTDSEALALSGVMVSMEEPGWYSFGFEIKDKKCDVPCIGIEMVHDGGKTTWHSAATAIYCLMGSGQLLWDTVTGVNMTL

SEQ ID NO: 30428 - protein, 466 aa, synthetic construct
  REGION 1..466: note = neuraminidase__InfluenzaB__AKU40739
MLPSTIQTLTLFLTSGGVLLSLYVSASLSYLLYSDILLKFSRTEVTAPIMPLDCANASNVQAVNRSATKGVTPLLPEPEWTYPRLSCPGSTFQKALLISPHRFGETKGNSAPLIIREPFIACGPKECKHFALTHYAAQPGGYYNGTREDRNKLRHLISVKLGKIPTVENSIFHMAAWSGSACHDGREWTYIGVDGPDSNALLKIKYGETYTDTYHSYAKNILRTQESACNCIGGDCYLMITDGPASGISECRFLKIREGRIIKEIFPTGRVKHTEECTCGFASNKTIECACRDNSYTAKRPFVKLNVETDTAEIRLMCTKTYLDTPRPNDGSITGPCESDGDEGSGGIKGGFVHQRMASKIGRWYSRTMSKTKRMGMGLYVKYDGDPWTDSEALALSGVMVSMEEPGWYSFGFEIKDKKCDVPCIGIEMVHDGGKTTWHSAATAIYCLMGSGQLLWDTVTGVNMTL

SEQ ID NO: 30429 - protein, 466 aa, synthetic construct
  REGION 1..466: note = neuraminidase__InfluenzaB__AKU40750
MLPSTIQTLTLFLTSGGVLLSLYVSASLSYLLYSDILLKFSRTEVTAPIMPLDCANASNVQAVNRSATKGVIPLLPEPEWTYPRLSCPGSTFQKALLISPHRFGETKGNSAPLIIREPFIACGPKECKHFALTHYAAQPGGYYNGTREDRNKLRHLISVKLGKIPTVENSIFHMAAWSGSACHDGREWTYIGVDGPDSNALLKIKYGEAYTDTYHSYAKNILRTQESACNCIGGDCYLMITDGPASGISECRFLKIREGRIIKEIFPTGRVKHTEECTCGFASNKTIECACRDNSYTAKRPFVKLNVETDTAEIRLMCTKTYLDTPRPNDGSITGPCESDGDEGSGGIKGGFVHQRMASKIGRWYSRTMSKTKRMGMGLYVKYDGDPWTDSEALALSGVMVSMEEPGWYSFGFEIKDKKCDVPCIGIEMVHDGGKTTWHSAATAIYCLMGSGQLLWDTVTGVNMTL

SEQ ID NO: 30430 - protein, 466 aa, synthetic construct; identical to SEQ ID NO: 30374
  REGION 1..466: note = neuraminidase__InfluenzaB__AKU40761

SEQ ID NO: 30431 - protein, 466 aa, synthetic construct; identical to SEQ ID NO: 30374
  REGION 1..466: note = neuraminidase__InfluenzaB__AKU40772

SEQ ID NO: 30432 - protein, 466 aa, synthetic construct; identical to SEQ ID NO: 30374
  REGION 1..466: note = neuraminidase__InfluenzaB__AKU40783

SEQ ID NO: 30433 - protein, 466 aa, synthetic construct
  REGION 1..466: note = neuraminidase__InfluenzaB__AKU40794
MLPSTIQTLTLFLTSGGVLLSLYVSASLSYLLYSDILLKFSRTEVTAPIMPLDCANTSNVQAVNRSATKGVTPLLPEPEWTYPRLSCPGSTFQKALLISPHRFGETKGKSAPLIIREPFIACGPKECKHFALTHYAAQPGGYYNGTREDRNKLRHLISVKLGKIPTVENSIFHMAAWSGSACHDGREWTYIGVDGPDSNALLKIKYGEAYTDTYHSYAKNILRTQESACNCIGGDCYLMITDGPASGISECRFLKIREGRIIKEIFPTGRVKHTEECTCGFASNKTIECACRDNSYTAKRPFVKLNVETDTAEIRLMCTKTYLDTPRPNDGSITGPCESDGDEGSGGIKGGFVHQRMASKIGRWYSRTMSKTKRMGMGLYVKYDGDPWTDSEALALSGVMVSMEEPGWYSFGFEIKDKKCDVPCIGIEMVHDGGKTTWHSAATAIYCLMGSGQLLWDTVTGVNMTL

SEQ ID NO: 30434 - protein, 466 aa, synthetic construct; identical to SEQ ID NO: 30374
  REGION 1..466: note = neuraminidase__InfluenzaB__AKU40805

SEQ ID NO: 30435 - protein, 466 aa, synthetic construct; identical to SEQ ID NO: 30374
  REGION 1..466: note = neuraminidase__InfluenzaB__AKU40816

SEQ ID NO: 30436 - protein, 466 aa, synthetic construct; identical to SEQ ID NO: 30374
  REGION 1..466: note = neuraminidase__InfluenzaB__AKU40827

SEQ ID NO: 30437 - protein, 466 aa, synthetic construct; identical to SEQ ID NO: 30374
  REGION 1..466: note = neuraminidase__InfluenzaB__AKU40838

SEQ ID NO: 30438 - protein, 466 aa, synthetic construct; identical to SEQ ID NO: 30374
  REGION 1..466: note = neuraminidase__InfluenzaB__AKU40849

SEQ ID NO: 30439 - protein, 466 aa, synthetic construct; identical to SEQ ID NO: 30374
  REGION 1..466: note = neuraminidase__InfluenzaB__AKU40860

SEQ ID NO: 30440 - protein, 466 aa, synthetic construct
  REGION 1..466: note = neuraminidase__InfluenzaB__AKU40871
MLPSTIQTLTLFLTSGGVLLSLYVSASLSYLLYSDILLKFSRTEVTAPIMPLDCANASNVQAVNRSATKGVAPLLPEPEWTYPRLSCPGSTFQKALLISPHRFGETKGNSAPLIIREPFIACGPKECKHFALTHYAAQPGGYYNGTREDRNKLRHLISVKLGKIPTVENSIFHMAAWSGSACHDGREWTYIGVDGPDSNALLKIKYGEAYTDTYHSYAKNILRTQESACNCIGGDCYLMITDGPASGISECRFLKIREGRIIKEIFPTGRVKHTEECTCGFASNKTIECACRDNSYTAKRPFVKLNVETDTAEIRLMCTKTYLDTPRPNDGSITGPCESDGDEGSGGIKGGFVHQRMASKIGRWYSRTMSKTKRMGMGLYVKYDGDPWTDSEALTLSGVMVSMEEPGWYSFGFEIKDKKCDVPCIGIEMVHDGGKTTWHSAATAIYCLMGSGQLLWDTVTGVNMTL

SEQ ID NO: 30441 - protein, 466 aa, synthetic construct; identical to SEQ ID NO: 30374
  REGION 1..466: note = neuraminidase__InfluenzaB__AKU40882

SEQ ID NO: 30442 - protein, 466 aa, synthetic construct
  REGION 1..466: note = neuraminidase__InfluenzaB__AKU40893
MLPSTIQTLTLFLTSGGVLLSLYVSASLSYLLYSDILLKFSPTEITAPTMPLDCANASNVQAVNRSATKGVTLLLPEPEWTYPRLSCPGSTFQKALLISPHRFGETKGNSAPLIIREPFIACGPNECKHFALTHYAAQPGGYYNGTRGDRNKLRHLISVKLGKIPTVENSIFHMAAWSGSACHDGKEWTYIGVDGPDNNALLKVKYGEAYTDTYHSYANKILRTQESACNCIGGNCYLMITDGSASGVSECRFLKIREGRIIKEIFPTGRVKHTEECTCGFASNKTIECACRDNRYTAKRPFVKLNVETDTAEIRLMCTDTYLDTPRPNDGSITGPCESDGDKGSGGIKGGFVHQRMKSKIGRWYSRTMSKTERMGMGLYVKYDGDPWADSGALAFSGVMVSMKEPGWYSFGFEIKDKKCDVPCIGIEMVHDGGKETWHSAATAIYCLMGSGQLLWDTVTGVDMAL

SEQ ID NO: 30443 - protein, 466 aa, synthetic construct; identical to SEQ ID NO: 30374
  REGION 1..466: note = neuraminidase__InfluenzaB__AKU40904

SEQ ID NO: 30444 - protein, 466 aa, synthetic construct
  REGION 1..466: note = neuraminidase__InfluenzaB__AKU40915
MLPSTIQTLTLFLTSGGVLLSLYVSASLSYLLYSDILLKFSRTEVTAPIMPLDCANASNVQAVNRSATKGVTPLLPEPEWTYPRLSCPGSTFQKALLISPHRFGETKGNSAPLIIREPFIACGPKECKHFALTHYAAQPGGYYNGTREDRNKLRHLISVKLGKIPTVENSIFHMAAWSGSACHDGREWTYIGVDGPDSNALLKIKYGEAYTDTYHSYAKNILRTQESACNCIGGDCYLMITDGPASGISECRFLKIREGRIIKEIFPTGRVKHTEECTCGFASNKTIECACRDNSYTAKRPFVKLNVETDTAEIRLMCTKTYLDTPRPNDGSITGPCESDGDEGSGGIKGGFVHQRMASKIGRWYSRTMSKTKRMGMGLYVKYDGDPWTDSEALALSGVMVPMEEPGWYSFGFEIKDKKCDVPCIGIEMVHDGGKTTWHSAATAIYCLMGSGQLLWDTVTGVNMTL

SEQ ID NO: 30445 - protein, 466 aa, synthetic construct; identical to SEQ ID NO: 30374
  REGION 1..466: note = neuraminidase__InfluenzaB__AKU40926

SEQ ID NO: 30446 - protein, 466 aa, synthetic construct; identical to SEQ ID NO: 30428
  REGION 1..466: note = neuraminidase__InfluenzaB__AKU40937

SEQ ID NO: 30447 - protein, 466 aa, synthetic construct; identical to SEQ ID NO: 30374
  REGION 1..466: note = neuraminidase__InfluenzaB__AKU40948

SEQ ID NO: 30448 - protein, 466 aa, synthetic construct; identical to SEQ ID NO: 30374
  REGION 1..466: note = neuraminidase__InfluenzaB__AKU40959

SEQ ID NO: 30449 - protein, 466 aa, synthetic construct; identical to SEQ ID NO: 30374
  REGION 1..466: note = neuraminidase__InfluenzaB__AKU40970

SEQ ID NO: 30450 - protein, 466 aa, synthetic construct; identical to SEQ ID NO: 30374
  REGION 1..466: note = neuraminidase__InfluenzaB__AKU40981

SEQ ID NO: 30451 - protein, 466 aa, synthetic construct; identical to SEQ ID NO: 30374
  REGION 1..466: note = neuraminidase__InfluenzaB__AKU40991

SEQ ID NO: 30452 - protein, 466 aa, synthetic construct; identical to SEQ ID NO: 30374
  REGION 1..466: note = neuraminidase__InfluenzaB__AKU41002

SEQ ID NO: 30453 - protein, 466 aa, synthetic construct; identical to SEQ ID NO: 30374
  REGION 1..466: note = neuraminidase__InfluenzaB__AKU41013

SEQ ID NO: 30454 - protein, 466 aa, synthetic construct; identical to SEQ ID NO: 30374
  REGION 1..466: note = neuraminidase__InfluenzaB__AKU41024

SEQ ID NO: 30455 - protein, 466 aa, synthetic construct; identical to SEQ ID NO: 28961
  REGION 1..466: note = neuraminidase__InfluenzaB__EPI173278

SEQ ID NO: 30456 - protein, 466 aa, synthetic construct; identical to SEQ ID NO: 28961
  REGION 1..466: note = neuraminidase__InfluenzaB__EPI498049

SEQ ID NO: 30457 - protein, 466 aa, synthetic construct; identical to SEQ ID NO: 28961
  REGION 1..466: note = neuraminidase__InfluenzaB__AFH57913

SEQ ID NO: 30458 - protein, 466 aa, synthetic construct; identical to SEQ ID NO: 28961
  REGION 1..466: note = neuraminidase__InfluenzaB__EPI827074

SEQ ID NO: 30459 - protein, 466 aa, synthetic construct; identical to SEQ ID NO: 28961
  REGION 1..466: note = neuraminidase__InfluenzaB__EPI244698

SEQ ID NO: 30460 - protein, 466 aa, synthetic construct; identical to SEQ ID NO: 28961
  REGION 1..466: note = neuraminidase__InfluenzaB__EPI244701

SEQ ID NO: 30461 - protein, 466 aa, synthetic construct; identical to SEQ ID NO: 30374
  REGION 1..466: note = neuraminidase__InfluenzaB__EPI540672

SEQ ID NO: 30462 - protein, 466 aa, synthetic construct; identical to SEQ ID NO: 30374
  REGION 1..466: note = neuraminidase__InfluenzaB__EPI829465

SEQ ID NO: 30463 - protein, 466 aa, synthetic construct
  REGION 1..466: note = neuraminidase__InfluenzaB__EPI684428
MLPSTIQTLTLFLTSGGVLLSLYVSASLSYLLYSDILLKFSRTEVTAPTMPLDCANASNVQAVNRSTTKGVTPLFPEPEWTYPRLSCPGSTFQKALLISPHRFGETKGNSAPLIIREPFIACGPKECKHFALTHYAAQPGGYYNGTREDRNKLRHLISVKLGKIPTVENSIFHMAAWSGSACHDGREWTYIGVDGPDSNALLKIKYGEAYTDTYHSYAKNILRTQESACNCIGGDCYLMITDGPASGVSECRFLKIREGRIIKEIFPTGRVKHTEECTCGFASNKTIECACRDNRYTAKRPFVKLNVETDTAEIRLMCTKTYLDTPRPNDGSITGPCESDGDEGSGGIKGGFVHQRMASKIGRWYSRTMSKTKRMGMGLYVKYDGDPWTDSEALALSGVMVSMEEPGWYSFGFEIKDKKCDVPCIGIEMVHDGGKTTWHSAATAIYCLMGSGQLLWDTVTGVNMTL

SEQ ID NO: 30464 - protein, 466 aa, synthetic construct; identical to SEQ ID NO: 28983
  REGION 1..466: note = neuraminidase__InfluenzaB__AFH58451

SEQ ID NO: 30465 - protein, 466 aa, synthetic construct; identical to SEQ ID NO: 28961
  REGION 1..466: note = neuraminidase__InfluenzaB__EPI173280

SEQ ID NO: 30466 - protein, 466 aa, synthetic construct; identical to SEQ ID NO: 28961
  REGION 1..466: note = neuraminidase__InfluenzaB__EPI186302

SEQ ID NO: 30467 - protein, 466 aa, synthetic construct
  REGION 1..466: note = neuraminidase__InfluenzaB__EPI636339
MLPSTIQTLTLFLTSGGVLLSLYVSASLSYLLYSDILLKFSPTEITAPTMPLDCANASNVQAVNRSATKGVTLLLPEPEWTYPRLSCPGSTFQKALLISPHRFGETKGNSAPLIIREPFVACGPNECKHFALTHYAAQPGGYYNGTRGDRNKLRHLISVKLGKIPTVENSIFHMAAWSGSACHDGKEWTYIGVDGPDNNALLKVKYGEAYTDTYHSYANNILRTQESACNCIGGNCYLMITDGSASGVSECRFLKIREGRIIKEIFPTGRVKHTEECTCGFASNKTIECACRDNRYTAKRPFVKLNVETDTAEIRLMCTDTYLDTPRPNDGSITGPCESDGDKGSGGIKGGFVHQRMKSKIGRWYSRTMSKTERMGMGLYVKYGGDPWADSDALAFSGVMVSMKEPGWYSFGFEIKDKKCDVPCIGIEMVHDGGKETWHSAATAIYCLMGSGQLLWDTVTGVDMAL

SEQ ID NO: 30468 - protein, 466 aa, synthetic construct; identical to SEQ ID NO: 30467
  REGION 1..466: note = neuraminidase__InfluenzaB__EPI645996

SEQ ID NO: 30469 - protein, 466 aa, synthetic construct
  REGION 1..466: note = neuraminidase__InfluenzaB__EPI539770
MLPSTIQTLTLFLTSGGVLLSLYVSASLSYLLYSDILLKFSRTEVTAPIMPLDCANASNAQAVNRSATKGVTPLLPEPEWTYPRLSCPGSTFQKALLISPHRFGETKGNSAPLIIREPFIACGPKECKHFALTHYAAQPGGYYNGTREDRNKLRHLISVKLGKIPTVENSIFHMAAWSGSACHDGREWTYIGVDGPDSNALLKIKYGEAYTDTYHSYAKNILRTQESACNCIGGDCYLMITDGPASGISECRFLKIREGRIIKEIFPTGRVKHTEECTCGFASNKTIECACRDNSYTAKRPFVKLNVETDTAEIRLMCTKTYLDTPRPNDGSITGPCESDGDEGSGGIKGGFVHQRMASKIGRWYSRTMSKTKRMGMGLYVKYDGDPWTDSEALALSGVMVSMEEPGWYSFGFEIKDKKCDVPCIGIEMVHDGGKTTWHSAATTIYCLMGSGQLLWDTVTGVNITL

SEQ ID NO: 30470 - protein, 466 aa, synthetic construct; identical to SEQ ID NO: 30469
  REGION 1..466: note = neuraminidase__InfluenzaB__EPI551248

SEQ ID NO: 30471 - protein, 466 aa, synthetic construct; identical to SEQ ID NO: 30469
  REGION 1..466: note = neuraminidase__InfluenzaB__EPI544258

SEQ ID NO: 30472 - protein, 466 aa, synthetic construct; identical to SEQ ID NO: 30374
  REGION 1..466: note = neuraminidase__InfluenzaB__EPI592698

SEQ ID NO: 30473 - protein, 466 aa, synthetic construct; identical to SEQ ID NO: 30374
  REGION 1..466: note = neuraminidase__InfluenzaB__EPI592706

SEQ ID NO: 30474 - protein, 466 aa, synthetic construct
  REGION 1..466: note = neuraminidase__InfluenzaB__EPI693093
MLPSTIQTLTLFLTSGGVLLSLYVSASLSYLLYSDILLKFSRTEVTAPIMPLDCANASNVQAVNRSATKGVTPLLPEPEWTYPRLSCPGSTFQKALLISPHRFGETKGNSAPLIIREPFIACGPKECKHFALTHYAAQPGGYYNGTREDRNKLRHLISVKLGKIPTVENSIFHMAAWSGSACHDGREWTYIGVDGPDSNALLKIKYGEAYTDTYHSYAKNILRTQESACNCIGGDCYLMITDGPASGISECRFLKIREGRIIKEIFPTGRVKHTEECTCGFASNKTIECACRDNSYTAKRPFVKLNVETDTAEIRLMCTKTYLDTPRPNDGSITGPCESDGDEGSGGIKGGFVHQRMESKIGRWYSRTMSKTKRMGMGLYVKYDGDPWTDSEALALSGVMVSMEEPGWYSFGFEIKDKKCDVPCIGIEMVHDGGKTTWHSAATAIYCLMGSGQLLWDTVTGVNMTL

SEQ ID NO: 30475 - protein, 466 aa, synthetic construct
  REGION 1..466: note = neuraminidase__InfluenzaB__EPI678795
MLPSTIQTLTLFLTSGGVLLSLYVSASLSYLLYSDILLKFSPTEITAPTMPLDCANASNVQAVNRSATKGVTFLLPEPEWTYPRLSCPGSTFQKALLISPHRFGETKGNSAPLIIREPFVACGPNECKHFALTHYAAQPGGYYNGTRGDRNKLRHLISVKLGKIPTVENSIFHMAAWSGSACHDGKEWTYIGVDGPDNNALLKVKYGEAYTDTYHSYANNILRTQESACNCIGGNCYLMITDGSASGVSECRFLKIREGRIIKEIFPTGRVKHTEECTCGFASNKTIECACRDNRYTAKRPFVKLNVETDTAEIRLMCTDTYLDTPRPNDGSITGPCESDGDKGSGGIKGGFVHQRMKSKIGRWYSRTMSKTERMGMGLYVKYGGNPWADSDALTFSGVMVSMKEPGWYSFGFEIKDKKCDVPCIGIEMVHDGGKETWHSAATAIYCLMGSGQLLWDTVTGVDMAL

SEQ ID NO: 30476 - protein, 466 aa, synthetic construct; identical to SEQ ID NO: 30475
  REGION 1..466: note = neuraminidase__InfluenzaB__EPI721063

SEQ ID NO: 30477 - protein, 466 aa, synthetic construct; identical to SEQ ID NO: 28895
  REGION 1..466: note = neuraminidase__InfluenzaB__EPI328903

SEQ ID NO: 30478 - protein, 466 aa, synthetic construct
  REGION 1..466: note = neuraminidase__InfluenzaB__EPI543192
MLPSTIQTLTLFLTSGGVLLSLYVSASLSYLLYLDILLKFPSTEITAPTMPLDCANASNVQAVNRSATKGVTLLLPEPEWTYPRLSCPGSTFQKALLISPHRFGETKGNSAPLIIREPFIACGPKECKHFALTHYAAQPGGYYNGTRGDRNKLRHLISVKLGKIPTVENSIFHMAAWSGSACHDGKEWTYIGVDGPDNNALLKIKYGEAYTDTYHSYANNILRTQESACNCIGGNCYLMITDGSASGVSECRFLKIREGRIMKEIFPTGRTQHTEECTCGFASNKTIECACRDNSYTAKRPFVKLNVETDTAEIRLMCTKTYLDTPRPDDGSITGPCESNGGKGSGGIKGGFVHQRMASKIGRWYSRTMSKTERKGMGLYIKYNGDPWADSDALTFSGVMVSMEEPGWYSFGFEIKDKKCDVPCIGIEMVHDGGKETWHSAATAIYCLMGSGQLLWDTVTGVNMTL

SEQ ID NO: 30479 - protein, 466 aa, synthetic construct; identical to SEQ ID NO: 30478
  REGION 1..466: note = neuraminidase__InfluenzaB__EPI500360

SEQ ID NO: 30480 - protein, 466 aa, synthetic construct
  REGION 1..466: note = neuraminidase__InfluenzaB__EPI543186
MLPSTIQTLTLFLTSGGVLLSLYVSASLSYLLYSDILLKFSRTEVTAPIMPLDCANASNVQAVNRSATKGVTPLLPEPEWTYPRLSCPGSTFQKALLISPHRFGETKGNSAPLIIREPFIACGPKECKHFALTHYAAQPGGYYNGTREDRNKLRHLISVKLGKIPTVENSIFHMAAWSGSACHDGREWTYIGVDGPDSNALLKIKYGEAYTDTYHSYAKNILRTQESACNCIGGDCYLMITDGPASGISECRFLKIREGRIIKEIFPTGRVKHTEECTCGFASNKTIECACRDNSYTAKRPFVKLNVETDTAEIRLMCTKTYLDTPRPNDGSITGPCESDGDEGSGGIKGGFVHQRMASKIGRWYSRTMSKTKRMGMGLYVKYDGDPWTDSEALALSGVMVSMEEPGWYSFGFEIKDKKCDVPCIGIEMVHDGGKTTWHSAATVIYCLMGSGQLLWDTVTGVNMTL

SEQ ID NO: 30481 - protein, 466 aa, synthetic construct; identical to SEQ ID NO: 30480
  REGION 1..466: note = neuraminidase__InfluenzaB__EPI536448

SEQ ID NO: 30482 - protein, 466 aa, synthetic construct
  REGION 1..466: note = neuraminidase__InfluenzaB__NP_056663
MLPSTVQTLTLLLTSGGVLLSLYVSASLSYLLYSDVLLKFSSTKTTAPTMSLECTNASNAQTVNHSATKEMTFPPPEPEWTYPRLSCQGSTFQKALLISPHRFGEIKGNSAPLIIREPFVACGPKECRHFALTHYAAQPGGYYNGTRKDRNKLRHLVSVKLGKIPTVENSIFHMAAWSGSACHDGREWTYIGVDGPDNDALVKIKYGEAYTDTYHSYAHNILRTQESACNCIGGDCYLMITDGSASGISKCRFLKIREGRIIKEILPTGRVEHTEECTCGFASNKTIECACRDNSYTAKRPFVKLNVETDTAEIRLMCTKTYLDTPRPDDGSIAGPCESNGDKWLGGIKGGFVHQRMASKIGRWYSRTMSKTNRMGMELYVKYDGDPWTDSDALTLSGVMVSIEEPGWYSFGFEIKDKKCDVPCIGIEMVHDGGKDTWHSAATAIYCLMGSGQLLWDTVTGVDMAL

SEQ ID NO: 30483 - protein, 466 aa, synthetic construct
  REGION 1..466: note = neuraminidase__InfluenzaB__ABG85180
MLPSTVQTLTLLLTSGGVLLSLYVSASLSYLLYSDVLLKFSSTKTTAPTMSLECTNASNAQTVNYSATKEMTFPPPEPEWTYPRLSCQGSTFQKALLISPHRFGEIKGNSAPLIIREPFVACGPKECRHFALTHYAAQPGGYYHGTRKDRNKLRHLVSVKLGKIPTVENSIFHMAAWSGSACHDGREWTYIGVDGPDNDALVKIKYGEAYTDTYHSYAHNILRTQESACNCIGGDCYLMITDGSASGISKCRFLKIREGRIIKEILPTGRVEHTEECTCGFASNKTIECACRDNSYTAKRPFVKLNVETDTAEIRLMCTKTYLDTPRPDDGSIAGPCESNGDKGLGGIKGGFVHQRMAFKIGRWYSRTMSKTNRMGMELYVKYDGDPWTDSDALTLSGVMVSIEEPGWYSFGFEIKDKKCDVPCIGIEMVHDGGEDTWHSAATAIYCLMGSGQLLWDTVTGIDMAL

SEQ ID NO: 30484 - protein, 466 aa, synthetic construct; identical to SEQ ID NO: 30373
  REGION 1..466: note = neuraminidase__InfluenzaB__EPI376345

SEQ ID NO: 30485 - protein, 466 aa, synthetic construct; identical to SEQ ID NO: 30373
  REGION 1..466: note = neuraminidase__InfluenzaB__EPI368424

SEQ ID NO: 30486 - protein, 466 aa, synthetic construct
  REGION 1..466: note = neuraminidase__InfluenzaB__EPI331150
MLPSTIQTLTLFLTSGGVLLSLYVSASLSYLLYSDILLKFSPTEITAPTMPLDCANASNVQAMNRSATKGVTLLLPEPEWTYPRLSCPGSTFQKALLISPHRFGETKGNSAPLIIREPFIACGPNECKHFALTHYAAQPGGYYNGTRGDRNKLRHLISVKLGKIPTVENSIFHMAAWSGSACHDGKEWTYIGVDGPDNNALLKVKYGEAYTDTYHSYANKILRTQESACNCIGGNCYLMITDGSASGVSECRFLKIREGRIIKEIFPTGRVKHTEECTCGFASNKTIECACRDNSYTAKRPFVKLNVETDTAEIRLMCTDTYLDTPRPNDGSITGPCESDGDKGSGGIKGGFVHQRMESKIGRWYSRTMSKTERMGMGLYVKYDGDPWADSDALAFSGVMVSMKEPGWYSFGFEIKDKKCDVPCIGIEMVHDGGKETWHSAATAIYCLMGSGQLLWDTVTGVDMAL

SEQ ID NO: 30487 - protein, 466 aa, synthetic construct; identical to SEQ ID NO: 30486
  REGION 1..466: note = neuraminidase__InfluenzaB__EPI358089

SEQ ID NO: 30488 - protein, 466 aa, synthetic construct; identical to SEQ ID NO: 28632
  REGION 1..466: note = neuraminidase__InfluenzaB__ABL76698

SEQ ID NO: 30489 - protein, 466 aa, synthetic construct
  REGION 1..466: note = neuraminidase__InfluenzaB__AAD42328
MLPSTIQTLTLFLTSGGVLLSLYVSASLSYLLYSDILLKFSPTEITAPTMPLDCANASNVQAVNRSATKGMTLLLPEPEWTYPRLSCPGSTFQKALLISPHRFGETRGNSAPLTIREPFIACGPKECKHFALTHYAAQPGGYYNGTREDRNKLRHLISVKLGKIPTVENSIFHMAAWSGSACHDGREWTYIGVDGPDSNALIKIKYGEAYTDTYHSYANNILRTQESACNCIGGDCYLMITDGSASGISKCRFLKIREGRIIKEIFPTGRVEHTEECTCGFASNKTIECACRDNSYTAKRPFVKLNVETDTAEIRLMCTETYLDTPRPDDGSITGPCESNGDKGRGGIKGGFVHQRMASKIGRWYSRTMSKTKRMGMELYVKYDGDPWIDSDALAPSGVMVSMEEPGWYSFGFEIKDKKCDVPCIGIEMVHDGGKKTWHSAATAIYCLMGSGQLLWDTVTGVDRSV

SEQ ID NO: 30490 - protein, 466 aa, synthetic construct; identical to SEQ ID NO: 30175
  REGION 1..466: note = neuraminidase__InfluenzaB__EPI541349

SEQ ID NO: 30491 - protein, 466 aa, synthetic construct; identical to SEQ ID NO: 30374
  REGION 1..466: note = neuraminidase__InfluenzaB__EPI541759

SEQ ID NO: 30492 - protein, 466 aa, synthetic construct; identical to SEQ ID NO: 30467
  REGION 1..466: note = neuraminidase__InfluenzaB__EPI826201

SEQ ID NO: 30493 - protein, 466 aa, synthetic construct; identical to SEQ ID NO: 30206
  REGION 1..466: note = neuraminidase__InfluenzaB__EPI477398

SEQ ID NO: 30494 - protein, 466 aa, synthetic construct; identical to SEQ ID NO: 30206
  REGION 1..466: note = neuraminidase__InfluenzaB__EPI492570

SEQ ID NO: 30495 - protein, 466 aa, synthetic construct; identical to SEQ ID NO: 30206
  REGION 1..466: note = neuraminidase__InfluenzaB__EPI498339

SEQ ID NO: 30496 - protein, 466 aa, synthetic construct; identical to SEQ ID NO: 30427
  REGION 1..466: note = neuraminidase__InfluenzaB__EPI538118

SEQ ID NO: 30497 - protein, 466 aa, synthetic construct; identical to SEQ ID NO: 30427
  REGION 1..466: note = neuraminidase__InfluenzaB__EPI538124

SEQ ID NO: 30498 - protein, 466 aa, synthetic construct; identical to SEQ ID NO: 30427
  REGION 1..466: note = neuraminidase__InfluenzaB__EPI556421

SEQ ID NO: 30499 - protein, 466 aa, synthetic construct; identical to SEQ ID NO: 30427
  REGION 1..466: note = neuraminidase__InfluenzaB__EPI614609

SEQ ID NO: 30500 - protein, 466 aa, synthetic construct; identical to SEQ ID NO: 28671
  REGION 1..466: note = neuraminidase__InfluenzaB__BAB32609

SEQ ID NO: 30501 - protein, 466 aa, synthetic construct; identical to SEQ ID NO: 28817
  REGION 1..466: note = neuraminidase__InfluenzaB__EPI271544

SEQ ID NO: 30502 - protein, 466 aa, synthetic construct; identical to SEQ ID NO: 28817
  REGION 1..466: note = neuraminidase__InfluenzaB__AFH57957

SEQ ID NO: 30503 - protein, 466 aa, synthetic construct; identical to SEQ ID NO: 28817
  REGION 1..466: note = neuraminidase__InfluenzaB__EPI294881

SEQ ID NO: 30504 - protein, 466 aa, synthetic construct; identical to SEQ ID NO: 28672
  REGION 1..466: note = neuraminidase__InfluenzaB__ABL77259

SEQ ID NO: 30505 - RNA, 1701 nt, synthetic construct
  misc_feature 1..1701: note = hemagglutinin__InfluenzaA__AAA16879
  source 1..1701: mol_type = other RNA
atggaagcaaaactatttgtactattctgtacattcactgtactgaaagctgacaccatctgtgtgggctaccatgcaaacaactctacagacactgttgacacagtactggaaaagaatgtgaccgtgactcactcagtgaatttgctcgaagacagccataatgggaaactctgcagcctgaacgggatagctcccctacaattggggaagtgcaatgtagcgggatggctccttggcaatccagaatgtgaccttctactcactgcaaactcatggtcctatataatagagacttccaattcagaaaacggaacatgctatcccggtgaattcatagattatgaagaattaagagagcagctaagttcagtttcttcatttgaaaagtttgaaattttcccgaaagcaagctcatggccaaatcatgagacaactaaaggtgtcacagccgcatgctcttactctggagccagcagtttttatcggaacttgctgtggataacaaagaagggaacttcatatcccaaactcagcaaatcatacacgaacaataaggggaaagaagtgcttgtgctctggggggtgcaccaccctccaactaccagtgagcaacaaagtctataccagaacgctgatgcatatgtctcagttggatcatcaaaatacaaccgaagatttactccggaaatagcagctagacctaaagttagaggacaggcaggcaggatgaactattattggacactattagaccaaggagataccataacatttgaagccactgggaatttgatagcaccatggtatgctttcgcactgaataaggggtctgactctggaattataacatcagatgctccagttcacaattgtgacacaaggtgccaaacccctcatggggctttgaacagtagccttccttttcagaatgtacatcctatcactattggagaatgtcccaaatacatcaagagcaccaagctaagaatggcaacaggactaagaaatgtcccatccattcagtccagaggactatttggagcaattgctggattcattgagggaggatggacaggcatgatagatggatggtacgggtaccatcaccagaatgagcagggatcaggatatgctgctgatcagaaaagcacacagaatgcgatcgacggaatcacaaataaggtgaattcggtaattgaaaagatgaacactcaattcactgcagtgggcaaggaattcaacaatttagaaaggagaattgaaaatctgaataagaaggtcgatgatggattcctggatgtttggacatacaatgccgagctgctcgttctacttgaaaatgaaaggactctggactttcatgattccaatgtgagaaatttatatgagaaggtcaaatcacaattgaggaataatgccaaagaacttgggaatggttgttttgagttctaccacaagtgtgatgatgagtgcatggaaagagagaagaacggcacatatgactatcccaaatattcagaagagtccaaattgaatcgagaggaaatagacggagtgaaactagagtcaatgggagtttaccaaattttggcgatctattccacagtcgccagttctctagtcttgttagtctccctgggggcaatcagcttctggatgtgctctaatgggtcattgcaatgcagaatatgcatttag

SEQ ID NO: 30506 - RNA, 1701 nt, synthetic construct
  misc_feature 1..1701: note = hemagglutinin__InfluenzaA__AAA16880
  source 1..1701: mol_type = other RNA
atggaagcaaaactatttgtgctattctgtacattcactgtactgaaagctgacaccatctgtgtgggctaccatgcaaacaactctacagacactgttgacacagtactagaaaagaatgtgaccgtgactcactcagtgaatttgctcgaagacagccataatgggaagctctgcagtctgaacggaatagctcccctacaactgggaaagtgcaatgtggcgggatggctccttggcaatccagagtgtgaccttctactcactgcaaactcatggtcctacataatagaaacttcaaattcagaaaacggaacatgctaccccggtgaatttatagattatgaagagttaagagagcagctaagttcagtttcttcatttgaaaagtttgaaattttcccgaaggcaagctcatggccaaatcatgagacaactaaaggtgttacagctgcatgctcttactctggagccagcagtttttatcggaatttgctgtggataacaaagaagggaacttcatatccaacactcagcaaatcatacacgaacaataaggggaaagaagtgcttgtgctctggggggtgcaccaccctccaactgtcaatgagcaacaaagtctataccagaacgctgatgcatatgtttcagttggatcatcaaaatacaaccgaagattcactccagaaatagcagctagacctaaagttagaggacaggcaggcagaatgaactatcattggacactattagaccaaggagacaccataacgtttgaagccaccgggaatttgatagcaccatggtatgctttcgcattgaataaggggtctgactctggaattataacatcagatgctccagttcataactgtgacacaaggtgtcaaacccctcatggggctttgaacagcagccttccttttcagaatgtacatcctatcactattggagaatgtcccaaatacgtcaaaagcaccaagctaagaatggcaacaggactaagaaatgttccatccattcaatccagaggactatttggagcaattgctggattcattgagggaggatggacaggcatgatagatgggtggtacgggtatcatcatcagaatgagcagggatcaggatatgctgccgatcagaaaagcacacagaatgcgatcgacgggatcacaaataaggtgaattcggtgattgagaagatgaacactaaattcactgcagtgggcaaggaattcaacaatttagaaaggagaattgaaaatttaaataagaaggtcgatgatggattcctggatgtttggacatacaatgccgaactgctcgtcctacttgaaaatgagaggactctggactttcatgactccaatgtgagaaatttatatgagaaggtcaaatcacaattgaggaataatgccaaagaacttgggaatggttgttttgagttctaccacaagtgtgatgatgagtgcatagaaagtgtgaagaacggcacatatgactatcccaaatattcagaagagtccaaattgaaccgagaagaaatagacggagtgaaactagaatcgatgggagtttatcaaattttggcgatctattccacagtcgccagttctctagtcttgttagtctccctgggggcaatcagcttctggatgtgctctaatgggtcattgcaatgcagaatatgcatttag

SEQ ID NO: 30507 - RNA, 1689 nt, synthetic construct
  misc_feature 1..1689: note = hemagglutinin__InfluenzaA__AAA64362
  source 1..1689: mol_type = other RNA
atggccatcatttatctcattctcctgttcacagcagtgagaggggaccagatatgcattggataccatgccaataattccacagagaaggtcgacacaattctagagcggaacgtcactgtgactcatgccaaggacattcttgagaagacccataacggaaagttatgcaaactaaacggaatccctccacttgaactaggggactgtagcattgccggatggctccttggaaatccagaatgtgataggcttctaagtgtgccagaatggtcctatataatggagaaagaaaacccgagagacggtttgtgttatccaggcagcttcaatgattatgaagaattgaaatatctcctcagcagcgtgaaacatttcgagaaagtaaagattctgcccaaagatagatggacacagcatacaacaactggaggttcacgggcctgcgcggtgtctggtaatccatcattcttcaggaacatggtctggctgacaaagaaaggatcagattatccggttgccaaaggatcgtacaacaatacaagcggagaacaaatgctaataatttggggggtgcaccatcccaatgatgagacagaacaaagaacattgtaccagaatgtgggaacctatgtttccgtaggcacatcaacattgaacaaaaggtcaaccccagaaatagcaacaaggcctaaagtgaatggactaggaagtagaatggaattctcttggaccctcttggatatgtgggacaccataaattttgagagtactggtaatctaattgcaccagagtatggattcaaaatatcgaaaagaggtagttcagggatcatgaaaacagaaggaacacttgagaactgtgagaccaaatgccaaactcctttgggagcaataaatacaacattgccttttcacaatgtccacccactgacaataggtgagtgccccagatatgtaaaatcggagaagttggtcttagcaacaggactaaggaatgttccccagattgaatcaagaggattgtttggggcaatagctggttttatagaaggaggatggcaaggaatggttgatggttggtatggataccatcacagcaatgaccagggatcagggtatgcagcagacaaagaatccactcaaaaggcatttgatggaatcaccaacaaggtaaattctgtgattgaaaagatgaacacccaatttgaagctgttgggaaagaattcagtaacttagagagaagactggagaacttgaacaaaaagatggaagacgggtttctagatgtgtggacatacaatgctgagcttctagttctgatggaaaatgagaggacacttgactttcatgattctaatgtcaagaatctgtatgataaagtcagaatgcagctgagagacaacgtcaaagaactaggaaatggatgttttgaattttatcacaaatgtgatgatgaatgcatgaatagtgtgaaaaacgggacgtatgattatcccaagtatgaagaagagtctaaactaaatagaaatgaaatcaaaggggtaaaattgagcagcatgggggtttatcaaatccttgccatttatgctacagtagcaggttctctgtcactggcaatcatgatggctgggatctctttctggatgtgctccaacgggtctctgcagtgcaggatctgcatatga

SEQ ID NO: 30508 - RNA, 1689 nt, synthetic construct
  misc_feature 1..1689: note = hemagglutinin__InfluenzaA__AAA64363
  source 1..1689: mol_type = other RNA
atggccatcatttatctcattctcctgttcacagcagtgagaggggaccagatatgcattggataccatgccaataattccacagagaaggtcgacacaattctagagcggaacgtcactgtgactcatgccaaggacattcttgagaagacccataacggaaagttatgcaaactaaacggaatccctccacttgaactaggggactgtagcattgccggatggctccttggaaatccagaatgtgataggcttctaagtgtgccagaatggtcctatataatggagaaagaaaacccgagagacggtttgtgttatccaggcagcttcaacgattatgaagaattgaaacatctcctcagcagcgtgaaacatttcgagaaagtaaagattctgcccaaagatagatggacacagcatacaacaactggaggttcacgggcctgcgcggtgtctggtaatccatcattcttcaggaacatggtctggctgacaaagaaaggatcaaattatccggttgccaaaggatcgtacaacaatacaagcggagaacaaatgctaataatttggggggtgcaccatcccaatgatgagacagaacaaagaacattgtaccagaatgtgggaacctatgtttccgtaggcacatcaacattgaacaaaaggtcaaccccagacatagcaacaaggcctaaagtgaatggacaaggaggtagaatggaattctcttggaccctattggatatgtgggacaccataaattttgagagtactggtaatctaattgcaccagagtatggattcaaaatatcgaaaagaggtagttcagggatcatgaaaacagaaggaacacttgggaactgtgagaccaaatgccaaactcctttgggagcaataaatacaacattgccttttcacaatgtccacccactgacaataggtgagtgccccaaatatgtaaaatcggagaagttggtcttagcaacaggactaaggaatgttccccagattgaatcaagaggattgtttggggcaatagctggttttatagaaggaggatggcaaggaatggttgatggttggtatggataccatcacagcaatgaccagggatcagggtatgcagcagacaaagaatccactcaaaaggcatttgatggaatcaccaacaaggtaaattctgtgattgaaaagataaacacccaatttgaagctgttgagaaagaattcagtaacttagagagaagactggagaacttgaacaaaaagatggaagacgggtttctagatgtgtggacatacaatgctgagcttctagttctgatggaaaatgagaggacacttgactttcatgattctagtgtcaagaatctgtatgataaagtcagaatgcagctgagagacaacgtcaaagaactaggaaatggatgttttgaattttatcacaaatgtgatgatgaatgcatgaatagtgtgaaaaacgggacgtatgattatcccaagtatgaagaagagtctaaactaaatagaaatgaaatcaaaggggtaaaattgagcagcatggggatttatcaaatccttgccatttatgctacagtagcaggttctctgtcactggcaatcatgatggctgggatctctttctggatgtgctccaacgggtctctgcagtgcaggatctgcatatga

SEQ ID NO: 30509 - RNA, 1689 nt, synthetic construct
  misc_feature 1..1689: note = hemagglutinin__InfluenzaA__AAA64365
  source 1..1689: mol_type = other RNA
atggccatcatttatctcattctcctgttcacagcagtgagaggggaccagatatgcattggataccatgccaataattccacagagaaggtcgacacaattctagagcggaacgtcactgtgactcatgccaaggacattcttgagaagacccataacggaaagttatgcaaactaaacggaatccctccacttgaactaggggactgtagcattgccggatggctccttggaaatccagaatgtgataggcttctaagtgtgccagaatggtcctatataatggagaaagaaaacccgagagacggtttgtgttatccaggcagcttcaacgattatgaagaattgaaacatctcctcagcagcgtgaaacatttcgagaaagtaaagattctgcccaaagatagatggacacagcatacaacaactggaggttcacgggcctgcgcggtgtctggtaatccatcattcttcaggaacatggtctggctgacaaagaaaggatcaaattatccggttgccaaaggatcgtacaacaatacaagcggagaacaaatgctaataatttggggggtgcaccatcccaatgatgagacagaacaaagaacattgtaccagaatgtgggaacctatgtttccgtaggcacatcaacattgaacaaaaggtcaaccccagacatagcaacaaggcctaaagtggatggactaggaagtagaatggaattctcttggaccctattggatatgtgggacaccataaattttgagagtactggtaatctaattgcaccagagtatggattcaaaatatcgaaaagaggtagttcagggatcatgaaaacagaaggaacacttgggaactgtgagaccaaatgccaaactcctttgggagcaataaatacaacattgccttttcacaatgtccacccactgacaataggtgagtgccccaaatatgtaaaatcggagaagttggtcttagcaacaggactaaggaatgttccccagattgaatcaagaggattgtttggggcaatagctggttttatagaaggaggatggcaaggaatggttgatggttggtatggataccatcacagcaatgaccagggatcagggtatgcagcagacaaagaatccactcaaaaggcatttgatggaatcaccaacaaggtaaattctgtgattgaaaagatgaacacccaatttgaagctgttgagaaagaattcagtaacttagagagaagactggagaacttgaacaaaaagatggaagacgggtttctagatgtgtggacatacaatgctgagcttctagttctgatggaaaatgagaggacacttgactttcatgattctaatgtcaagaatctgtataataaagtcagaatgcagctgagagacaacgtcaaagaactaggaaatggatgttttgaattttatcacaaatgtgatgatgaatgcatgaatagtgtgaaaaacgggacgtatgattatcccaagtatgaagaagagtctaaactaaatagaaatgaaatcaaaggggtaaaattgagcagcatggggatttatcaaatccttgccatttatgctacagtagcaggttctctgtcactggcaatcatgatggctgggatctctttctggatgtgctccaacgggtctctgcagtgcaggatctgcatatga

SEQ ID NO: 30510 - RNA, 1689 nt, synthetic construct
  misc_feature 1..1689: note = hemagglutinin__InfluenzaA__AAA64366
  source 1..1689: mol_type = other RNA
atggccatcatttatctaattctcctgttcacagcagtgagaggggaccaaatatgcattggataccatgccaataattccacagagaaggtcgacacaattctagagcggaacgtcactgtgactcatgccaaggacattcttgagaagacccataacggaaagttatgcaaactaaacggaatccctccacttgaactaggggactgtagcattgccggatggctccttggaaatccagaatgtgataggcttctaagtgtgccagaatggtcctatataatggagaaagaaaacccgagagacggtttgtgttatccaggcagcttcaatgattatgaagaattgaaacatctcctcagcagcgtgaaacatttcgagaaagtaaagattctgcccaaagatagatggacacagcatacaacaactggaggttcacgggcctgcgcggtgtctggtaatccatcattcttcaggaacatggtctggctgacaaagaaagaatcaaattatccggttgccaaaggatcgtacaacaatacaagcggagaacaaatgctaataatttggggggtgcaccatcccaatgatgagacagaacaaagaacattgtaccagaatgtgggaacctatgtttccgtaggcacatcaacattgaacaaaaggtcaaccccagacatagcaacaaggcctaaagtgaatggactaggaagtagaatggaattctcttggaccctattggatatgtgggacaccataaattttgagagtactggtaatctaattgcaccagagtatggattcaaaatatcgaaaagaggtagttcagggatcatgaaaacagaaggaacacttgagaactgtgagaccaaatgccaaactcctttgggagcaataaatacaacattgccttttcacaatgtccacccactgacaataggtgagtgccccaaatatgtaaaatcggagaagttggtcttagcaacaggactaaggaatgttccccagattgaatcaagaggattgtttggggcaatagctggttttatagaaggaggatggcaaggaatggttgatggttggtatggataccatcacagcaatgaccagggatcagggtatgcagcagacaaagaatccactcaaaaggcatttgatggaatcaccaacaaggtaaattctgtgattgaaaagatgaacacccaatttgaagctgttgggaaagaattcagtaacttagagagaagactggagaacttgaacaaaaagatggaagacgggtttctagatgtgtggacatacaatgctgagcttctagttctgatggaaaatgagaggacacttgactttcatgattctaatgtcaagaatctgtatgataaagtcagaatgcagctgagagacaacgtcaaagaactaggaaatggatgttttgaattttatcacaaatgtgatgatgaatgcatgaatagtgtgaaaaacgggacgtatgattatcccaagtatgaagaagagtctaaactaaatagaaatgaaatcaaaggggtaaaattgagcagcatgggggtttatcaaatccttgccatttatgctacagtagcaggttctctgtcactggcaatcatgatggctgggatctctttctggatgtgctccaacgggtctctgcagtgcaggatctgcatatga

SEQ ID NO: 30511 - RNA, 1701 nt, synthetic construct
  misc_feature 1..1701: note = hemagglutinin__InfluenzaA__AAA85781
  source 1..1701: mol_type = other RNA
atgaagactatcattgctttgagctacattttctgtctggttttcgcccaagaccttccaggaaatgacaacagcacagcaactctttgcctgggacatcatgcggtgccaaacggaacgctagtgaaaacaatcacgaatgatcagattgaagtgactaatgctactgaactggttcagagttcctcaacgggtaaaatatgcgacaatcctcatcgaatccttgatggaataaactgcacactgatagatgctctattgggggaccctcattgtgatggctttcaaaatgagaaatgggaccttttcgttgaacgcagcaaagctttcagcaactgttacccttatgatgtgccagattatgcctcccttaggtcactagttgcctcgtcaggcactctggagtttatcaatgaaggcttcaattggactggggtcactcagaatgggggaagcagtgcttgcaaaaggggacctgataacggttttttcagtagactgaactggttgtacaaatcaggaagcacatatccagtgcagaacgtgaccatgccaaacaatgacaactctgacaaactatacatttggggggttcaccacccgagcacggacaaagaacaaaccaacctatatgttcaagcatcagggaaagtcacagtctccaccaagagaagccagcaaactgtaatcccgaatgtcgggtctagaccctgggtaaggggtctatctagtagagtaagcatctattggacaatagttaaaccgggagacatactggtaattaatagtaatggaaacctaattgctcctcggggttactacaaaatgcgcactgggaaaagctcaataatgaggtcagatgcacctattggcacttgcagctctgaatgcatcactccaaatggaagcattcccaatgacaagccctttcaaaacgtaaacaagatcacatatggggcatgtcccaagtatgttaagcaaaacactctaaagttggcaacagggatgcggaatgtaccagagaaacaaatcagaggcatattcggcgcaatagcaggtttcatagaaaatggttgggagggaatgatagacggttggtacggtttcaggcatcaaaattctgagggcacaggacaagcagcagatcttaaaagcactcaagcagccatcgaccaaatcaatgggaaactgaatagggtaatcgagaagacgaacgagaaattccatcaaatcgaaaaggaattctcagaagtagaagggagaattcaggacctcgagaaatacgttgaagacactaaaatagatctctggtcttacaatgcggagcttcttgtcgctctggagaaccaacatacaattgatctgactgactcggaaatgaacaaactgtttgaaaaaacaaggaggcaactgagggaaaatgctgaggacatgggcaatggttgcttcaaaatataccacaaatgtgacaatccttgcatagggtcaatcagaaatgggacttatgaccatgatgtatacagagacgaagcattaaacaaccggtttcagatcaaaggtgttgaactgaagtcaggatacaaagactggatcctgtggatttcctttgccatatcatgctttttgctttgtgttgttttgctggggttcatcatgtgggcctgccagaaaggcaacattaggtgcaacatttgcatttga

SEQ ID NO: 30512 - RNA, 1707 nt, synthetic construct
  misc_feature 1..1707: note = hemagglutinin__InfluenzaA__AAC14418
  source 1..1707: mol_type = other RNA
atggagagaatagtgcttcttcttgcaacagtcagtcttgttaaaagtgaccagatttgcattggttaccatgcaaacaactcgacagagcaggttgacacaataatggaaaagaatgttactgttacacatgcccaagacatactggaaaggacacacaacgggaagctctgcgatctaaatggagtgaagcctctgattttgagggattgtagtgtagctggatggctcctcggaaaccctatgtgtgacgaattcatcaatgtgccggaatggtcttacatagtggagaaggccagtccagccaatgacctctgttatccagggaatttcaacgactatgaagaactgaaacacctattgagcagaataaaccattttgagaaaattcagatcatccccaaaagttcttggtccaatcatgatgcctcatcaggggtaagctcagcatgtccataccttgggaggtcctcctttttcagaaatgtggtatggcttatcaaaaagaacagtacatacccaacaataaagaggagctacaataataccaaccaagaagatcttttggtactgtgggggattcaccatcctaatgatgcggcagagcagacaaagctctatcaaaacccaaccacctacatttccgttggaacatcaacactgaaccagagattggttccagaaatagctactagacccaaagtaaacgggcaaagtggaagaatggagttcttctggacaattttaaagccgaatgatgccatcaatttcgagagtaatggaaatttcattgctccagaatatgcatacaaaattgtcaagaaaggggactcaacaattatgaaaagtgaattggaatatggtaactgcaacaccaagtgtcaaactccaatgggggcgataaactctagtatgccattccacaacatacaccccctcaccatcggggaatgccccaaatatgtgaaatcaaacagattagtccttgcgactggactcagaaatgcccctcaaagagagagaagaagaaaaaagagaggactatttggagctatagcaggttttatagagggaggatggcagggaatggtagatggttggtatgggtaccaccatagcaatgagcaggggagtggatacgctgcagaccaagaatccactcaaaaggcaatagatggagtcaccaataaggtcaactcgatcattaacaaaatgaacactcagtttgaggccgttggaagggaatttaataacttggaaaggaggatagagaatttaaacaagaagatggaagacggattcctagatgtctggacttacaatgccgaacttctggttctcatggaaaatgagagaactctagactttcatgactcaaatgtcaagaacctttacgacaaggtccgactacagcttagggataatgcaaaggagctgggtaatggttgtttcgaattctatcacaaatgtgataacgaatgtatggaaagtgtaaaaaacggaacgtatgactacccgcagtattcagaagaagcaagactaaacagagaggaaataagtggagtaaaattggaatcaatgggaacttaccaaatactgtcaatttattcaacagtggcgagttccctagcactggcaatcatggtagctggtctatctttatggatgtgctccaatggatcgttacaatgcagaatttgcatttaa

SEQ ID NO: 30513 - RNA, 1707 nt, synthetic construct
  misc_feature 1..1707: note = hemagglutinin__InfluenzaA__AAC40508
  source 1..1707: mol_type = other RNA
atggaaagaacagtgcttcttcttgcaacagtcagtcttgttaaaagtgatcagatttgcattggttaccatgcaaacaactcgacagagcaggttgacacaataatggaaaagaatgttactgttacacatgcccaagacatactggaaaggacacacaacgggaagctctgcgatctaaatggagtgaagcctctcattttgagggattgtagtgtagctggatggctcctcggaaaccctatgtgtgacgaattcatcaatgtgccggaatggtcttacatagtggagaaggccagtccagccaatgacctctgttatccagggaatttcaacgactatgaagaactgaaacacctattgagcagaataaaccattttgagaaaattcagatcatccccaaaagttcttggtccaatcatgatgcctcatcaggggtgagctcagcatgtccataccttgggaggtcctcctttttcagaaatgtggtatggcttatcaaaaagaacagtgcatacccaacaataaagaggagctacaataataccaaccaagaagatcttttggtactgtggggggttcaccatcctaatgatgcggcagagcagacaaagctctatcaaaatccaaccacctacatttccgttggaacatcaacactgaaccagagattggttccagaaatagctactagacccaaagtaaacgggcaaagtggaagaatggagttcttctggacaattttaaagccgaatgatgccatcaatttcgagagtaatggaaatttcattgctccagaatatgcatacaaaattgtcaagaaaggggactcaacaattatgaaaagtgaattggaatatggtaactgcaacaccaagtgtcaaactccaatgggggcgataaactctagtatgccattccacaacatacaccccctcaccatcggggaatgccccaaatatgtgaaatcaaacagattagtccttgcgactggactcagaaatacccctcaaagagagagaagaagaaaaaagagaggactatttggagctatagcaggttttatagagggaggatggcagggaatggtagatggttggtatgggtaccaccatagcaatgagcaggggagttgctactctgcagacaaagaatccactcaaaaggcaatagatggagtcaccaataaggtcaactcgatcattaacaaaatgaacactcagtttgaggccgttggaagggaatttaataacttggaaaggaggatagagaatttaaacaagaagatggaagacggattcctagatgtctggacttacaatgctgaacttctggttctcatggaaaatgagagaactctcgactttcatgactcaaatgtcaagaacctttacgacaaggtccgactacagcttagggataatgcaaaggagctgggtaatggttgtttcgaattctatcacaaatgtgataatgaatgtatggaaagtgtaaaaaacggaacgtatgactacccgcagtattcagaagaagcaagactaaacagagaggaaataagtggagtaaaattggaatcaatgggaacttaccaaatactgtcaatttattcaacagtggcgagttccctagcactggcaatcatggtagctggtctatctttatggatgtgctccaatggatcgttacaatgcagaatttgcatttaa

SEQ ID NO: 30514 - RNA, 1701 nt, synthetic construct
  misc_feature 1..1701: note = hemagglutinin__InfluenzaA__AAF87274
  source 1..1701: mol_type = other RNA
atgaaggcaatactagtagtcttgctatatacatttacaaccgcaaatgcagacacattatgtataggttaccatgcaaataattcaactgacactgttgacacagtactagaaaaaaatgtaacagtaacacactctgttaaccttctagaaaacagacataacgggaaactatgtaaactaaaaggggtagccccattgcatttgggtaaatgtaacattgctggatggctcctgggaaacccagagtgtgaattactattcacagcaagctcatggtcttacattgtggaaacttctaattcagacaatgggacatgttacccaggagatttcatcaattatgaagagctaagagagcagttgagctcagtgtcatcatttgaaagatttgagatattccccaaggcaaattcatggcccaatcatgaaacgaacagaggtgtgacatcagcgtgtccttatgctggagcaaacagcttctacagaaacttaatatggctggtaaaaaaaggaaattcatacccaaaactcagcaaatcctatattaacaataaggggaaggaagtcctcgtgctatggggcattcaccatccacctaccagtaatgatcaacaaagtctctaccagaatgcagatgcctatgtttttgtggggtcatcaaaatacaacaagaaattcatgccagaaatagcaacaagacccaaagtgagaggtcaagcagggagaatgaactattactggacactaatagagcctggagacacaataacattcgaagcaactggaaacctagtggcaccaagatatgccttcgcaatggaaagaggctctggatctggtattatcatttcagatacaccagtccacgattgtaatgcgacctgtcaaacacccaaaggtgctataaacaccaatcttccatttcaaaatatacatccagtcacgattggagaatgtccaaaatatgtcaaaagcacaagattgagaatggctacaggattaaggaatatcccgtctattcaatctagaggcctgtttggagccattgctggctttattgaggggggatggacaggaatgatagatggatggtatggttaccatcaccaaaatgagcagggatcaggatatgcagcagaccgaaagagcacacagaatgccatagacgggatcactaacaaagtaaactctgttattgaaaagatgaacacacaattcacagcagtgggtaaagaattcaatcacctggaaaaaagaataaagaatttaaacaaaaaggttgatgatggttttctggatgtttggacttacaatgccgaactgttggttctattggaaaatgaaagaactttggattatcacgattcaaatgtgaagaacctatatgagaaagtaagaagccaactaagaaacaatgccaaggaaattggaaatggctgctttgaattttaccacaaatgtgatgacacgtgcatggagagcatcaaaaatgggacttatgattatccaaaatactcagaagaagcaaaactaaccagagaagagatagatggagtaaagctggaatcaacaaggatttatcagattttggcgatctattcaactatcgccagttcattggtactgttagtctccctgggggcaatcagtttctggatgtgctccaatgggtctttacagtgcagaatatgtatttaa

SEQ ID NO: 30515 - RNA, 1701 nt, synthetic construct
  misc_feature 1..1701: note = hemagglutinin__InfluenzaA__AAF87275
  source 1..1701: mol_type = other RNA
atgaaggcaatactagtagtcttgctatatacatttacaaccgcaaatgcagacacattatgtataggttaccatgcaaataattcaactgacactgttgacacagtactagaaaaaaatgtaacagtaacacactctgttaaccttctagaaaacagacataacgggaaactatgtaaactaaaaggggtagccccattgcatttgggtaaatgtaacattgctggatggctcctgggaaacccagagtgtgaattactattcacagcaagctcatggtcttacattgtggaaacttctaattcagacaatgggacatgttacccaggagatttcatcaattatgaagagctaagagagcagttgagctcagtgtcatcatttgaaagatttgagatattccccaaggcaaattcatggcccaatcatgaaacgaacagaggtgtgacatcagcgtgtccttatgctggagcaaacagcttctacagaaacttaatatggctggtaaaaaaaggaaattcatacccaaaactcagcaaatcctatattaacaataaggggaaggaagtcctcgtgctatggggcattcaccatccacctaccagtaatgatcaacaaagtctctaccagaatgcagatgcctatgtttttgtggggtcatcaaaatacaacaagaaattcatgccagaaatagcaacaagacccaaagtgagaggtcaagcagggagaatgaactattactggacactaatagagcctggagacacaataacattcgaagcaactggaaacctagtggcaccaagatatgccttcgcaatggaaagaggctctggatctggtattatcatttcagatacaccagtccacgattgtaatgcgacctgtcaaacacccaaaggtgctataaacaccaatcttccatttcaaaatatacatccagtcacgattggagaatgtccaaaatatgtcaaaagcacaagattgagaatggctacaggattaaggaatatcccgtctattcaatctagaggcctgtttggagccattgctggctttattgaggggggatggacaggaatgatagatggatggtatggttaccatcaccaaaatgagcagggatcaggatatgcagcagaccgaaagagcacacagaatgccatagacgggatcactaacaaagtaaactctgttattgaaaagatgaacacacaattcacagcagtgggtaaagaattcaatcacctggaaaaaagaatagagaatttaaacaaaaaggttgatgatggttttctggatgtttggacttacaatgccgaactgttggttctattggaaaatgaaagaactttggattatcacgattcaaatgtgaagaacctatatgagaaagtaagaagccaactaagaaacaatgccaaggaaattggaaatggctgctttgaattttaccacaaatgtgatgacacgtgcatggagagcatcaaaaatgggacttatgattatccaaaatactcagaagaagcaaaactaaccagagaagagatagatggagtaaagctggaatcaacaaggatttatcagattttggcgatctattcaactatcgccagttcattggtactgttagtctccctgggggcaatcagtttctggatgtgctccaatgggtctttacagtgcagaatatgtatttaa

SEQ ID NO: 30516 - RNA, 1701 nt, synthetic construct
  misc_feature 1..1701: note = hemagglutinin__InfluenzaA__AAF87277
  source 1..1701: mol_type = other RNA
atgaaggcaatactattagtcttgctatatacattcacagccgcaaatgcagacacattatgtataggctatcatgcaaataattcaactgacactgttgatacagtactagaaaagaatgtaacagtaacacactctgttaaccttctagaagacagacataacggaaaactatgtaagctaagggggatagccccattgcatttgggtaaatgtaacattgctggatggctcctgggaaacccagaatgtgaattactattcacagcaagctcatggtcttacattgtggaaacatctaattcagacaatgggacatgttacccaggagatttcatcaattatgaagagctaagagagcagttgagctcagtgtcatcatttgaaaggtttgagatattccctaaggcaagttcatggcccgatcatgaaacgaacagaggtgtgacggcagcatgtccttatgcaggagcaaacagcttctacagaaatttaatatggctggtaaaaaaaggaaattcatacccaaagctcagcaaatcctatattaacaataaagagaaagaagtcctcgtgctatggggtatccaccatccacctaccagtactgaccaacaaagtctctaccagaatgcagatgcctatgtttttgtggggtcttcaaagtacaacaagaaattcaagccagaaatagcatcaagacccaaggtgagaggtcaagcagggaggatggactattactggacactagttgagcctggagacacaataacattcgaagcaactggaaatctagtggtgccaagatatgccttcgcaatgaaaagaggttctggatctggtattatcatttcagatacaccagtccacgattgtaatacgacttgtcaaacacccaaaggtgctataaacaccagcctcccatttcagaatatacatccagtcacaattggagaatgtccaaaatatgtcaaaagtacaaaattgagaatggctacaggattaaggaatatcccgtctattcagtctaggggtctatttggagccattgctggctttattgaggggggatggacaggaatgatagatggatggtacggttatcaccatcaaaatgagcagggatcaggatatgcagccgaccgaaagagcacacagaatgccattgacggggtcactaacaaagtaaactctgttattgaaaagatgaacacacaattcacagcagtgggtaaagaattcaatcacctggaaaaaagaatagaaaatttaaataaaaaggttgatgatggttttctggatgtttggacttacaatgccgaattgttggttctattggaaaatgagagaaccttggattaccatgattcaaatgtgaagaacctatatgagaaagtaagaagccagctaaaaaacaatgccaaggaaattggaaatggctgctttgaattttaccacaaatgtgatgacacgtgcatggagagcgtcaaaaatgggacttatgattaccccaaatactcagaagaatcaaaactaaacagagaggagatagatggagtaaagctggaatcaacaaggatttaccagattttggcgatatattcaactgtcgccagttcattgatactgttagtctccctgggggcaatcagtttctggatgtgctccaatgggtctttacagtgcagaatatgtatttaa

SEQ ID NO: 30517 - RNA, 1701 nt, synthetic construct
  misc_feature 1..1701: note = hemagglutinin__InfluenzaA__AAF87278
  source 1..1701: mol_type = other RNA
atgaaggcaatactattagtcttgctatatacattcacagccgcaaatgcagacacattatgtataggctatcatgcaaataattcaactgacactgttgatacagtactagaaaagaatgtaacagtaacacactctgttaaccttctagaagacagacataacggaaaactatgtaagctaagggggatagccccattgcatttgggtaaatgtaacattgctggatggctcctgggaaacccagaatgtgaattactattcacagcaagctcatggtcttacattgtggaaacatctaattcagacaatgggacatgttacccaggagatttcatcaattatgaagagctaagagagcagttgagctcagtgtcatcatttgaaaggtttgagatattccctaaggcaagttcatggcccaatcatgaaacgaacagaggtgtgacggcagcatgtccttatgcaggagcaaacagcttctacagaaatttaatatggctggtaaaaaaaggaaattcatacccaaagctcagcaaatcctatattaacaataaagagaaagaagtcctcgtgctatggggtatccaccatccacctaccagtactgaccaacaaagtctctaccagaatgcagatgcctatgtttttgtggggtcttcaaagtacaacaagaaattcaagccagaaatagcatcaagacccaaggtgagaggtcaagcagggaggatggactattactggacactagttgagcctggagacacaataacattcgaagcaactggaaatctagtggtgccaagatatgccttcgcaatgaaaagaggttctggatctggtattatcatttcagatacaccagtccacgattgtaatacgacttgtcaaacacccaaaggtgctataaacaccagcctcccatttcagaatatacatccagtcacaattggagaatgtccaaaatatgtcaaaagtacaaaattgagaatggctacaggattaaggaatatcccgtctattcagtctaggggtctatttggagccattgctggctttattgaggggggatggacaggaatgatagatggatggtacggttatcaccatcaaaatgagcagggatcaggatatgcagccgaccgaaagagcacacagaatgccattgacggggtcactaacaaagtaaactctgttattgaaaagatgaacacacaattcacagcagtgggtaaagaattcaatcacctggaaaaaagaatagaaaatttaaataaaaaggttgatgatggttttctggatgtttggacttacaatgccgaattgttggttctattggaaaatgagagagccttggattaccatgattcaaatgtgaagaacctatatgagaaagtaagaagccagctaaaaaacaatgccaaggaaattggaaatggctgctttgaattttaccacaaatgtgatgacacgtgcatggagagcgtcaaaaatgggacttatgattaccccaaatactcagaagaatcaaaactaaacagagaggagatagatggagtaaagctggaatcaacaaggatttaccagattttggcgatatattcaactgtcgccagttcattgatactgttagtctccctgggggcaatcagtttctggatgtgctccaatgggtctttacagtgcagaatatgtatttaa

SEQ ID NO: 30518 - RNA, 1701 nt, synthetic construct
  misc_feature 1..1701: note = hemagglutinin__InfluenzaA__AAF87279
  source 1..1701: mol_type = other RNA
atgaaggcaatactattagtcttgctatatacattcacagccgcaaatgcagacacattatgtataggctatcatgcaaataattcaactgacactgttgatacagtactagaaaagaatgtaacagtaacacactctgttaaccttctagaagacagacataacggaaaactatgtaagctaagggggatagccccattgcatttgggtaaatgtaacattgctggatggctcctgggaaacccagaatgtgaattactattcacagcaagctcatggtcttacattgtggaaacatctaattcagacaatgggacatgttacccaggagatttcatcaattatgaagagctaagagagcagttgagctcagtgtcatcatttgaaaggtttgagatattccctaaggcaagttcatggcccaatcatgaaacgaacagaggtgtgacggcagcatgtccttatgcaggagcaaacagcttctacagaaatttaatatggctggtaaaaaaaggaaattcatacccaaagctcagcaaatcctatattaacaataaagagaaagaagtcctcgtgctatggggtatccaccatccacctaccagtactgaccaacaaagtctctaccagaatgcagatgcctatgtttttgtggggtcttcaaagtacaacaagaaattcaagccagaaatagcatcaagacccaaggtgagaggtcaagcagggaggatggactattactggacactagttgagcctggagacacaataacattcgaagcaactggaaatctagtggtgccaagatatgccttcgcaatgaaaagaggttctggatctggtattatcatttcagatacaccagtccacgattgtaatacgacttgtcaaacacccaaaggtgctataaacaccagcctcccatttcagaatatacatccagtcacaattggagaatgtccaaaatatgtcaaaagtacaaaattgagaatggctacaggattaaggaatatcccgtctattcagtctaggggtctatttggagccattgctggctttattgaggggggatggacaggaatgatagatggatggtacggttatcaccatcaaaatgagcagggatcaggatatgcagccgaccgaaagagcacacagaatgccattgacggggtcactaacaaagtaaactctgttattgaaaagatgaacacacaattcacagcagtgggtaaagaattcaatcacctggaaaaaagaatagaaaatttaaataaaaaggttgatgatggttttctggatgtttggacttacaatgccgaattgttggttctattggaaaatgagagaaccttggattaccatgattcaaatgtgaagaacctatatgagaaagtaagaagccagctaaaaaacaatgccaaggaaattggaaatggctgctttgaattttaccacaaatgtgatgacacgtgcatggagagcgtcaaaaatgggacttatgattaccccaaatactcagaagaatcaaaactaaacagagaggagatagatggagtaaagctggaatcaacaaggatttaccagattttggcgatatattcaactgtcgccagttcattgatactgttagtctccctgggggcaatcagtttctggatgtgctccaatgggtctttacagtgcagaatatgtatttaa

SEQ ID NO: 30519 - RNA, 1701 nt, synthetic construct
  misc_feature 1..1701: note = hemagglutinin__InfluenzaA__AAF87281
  source 1..1701: mol_type = other RNA
atgaaggcaatactagtagtcttgctatatacatttacaaccgcaaatgcagacacattatgtataggttaccatgcaaataattcaactgacactgttgacacagtattagaaaagaatgtaacagtaacacactctgttaaccttctagaagacagacataacgggaaactatgtaaactaaaagggatagccccattgcatttgggtaaatgtaacattgctggatggctcctgggaaacccagagtgtgaattactattcacagcaagctcatggtcttatattgtggaaacttctaattcagacaatgggacatgttacccaggagatttcatcaattatgaagagctaagagagcagttgagctcagtgtcatcatttgaaagatttgagatattccccaaggcaagttcatggcccaatcatgaaacgaacagaggtgtgacatcagcgtgtccttatgctggagcaaacagcttctacagaaacttaatatggctggtaaaaaaaggaaattcatacccaaaactcagcaaatcctatattaacaataaggggaagaaagtcctcgtgctatggggcattcaccatccacctaccagtactgaccaacaaagtctctaccagaatgcagatgcctatgtttttgtggggtcatcaaaatacaacaagaaattcatgccagaaatagcaacaagacccaaagtgagaggtcaagcagggagaatgaactattactggacactaatagagcctggagacacaataacattcgaagcaactggaaatctagtggtaccaagatatgcctttgcaatggaaagaggctatggatctggtattatcatttcagatacaccagtccatgattgtaatacgacttgtcagacacccaaaggtgctataaacaccagccttccatttcaaaatatacatccagtcacaattggagaatgtccaaaatatgtcaaaagcacaaaattgagaatggctacagggttaaggaatatcccgtctatacaatctagaggcctgtttggagccattgctggctttattgaggggggatggacaggaatgattgatggatggtacggttatcatcaccaaaatgagcagggatcagggtatgcagcagaccgaaagagcacacagaatgccatagacgggatcactaacaaagtaaactctgttattgaaaagatgaacacacaattcacagcagtgggtaaagaattcaatcacctggagaaaagaatagagaatttaaacaaaaaggttgatgatggttttctggatgtttggacttacaatgccgaactgttagttctattggaaaatgaaagaactttggattatcacgattcgaatgtgaagaacctatatgagaaagtaaaaagccaactaaaaaacaatgccaaggaaattggaaatggctgctttgaattttaccacaaatgtgatgacacgtgcatggagagcgtcaaaaatgggacttatgattatccaaaatactcagaagaagcaaaactaaacagagaagagatagatggggtaaagctggaatcaacaaggatttaccagattttggcgatctattcaactatcgccagttcattggtactgttagtctccctgggggcaatcagtttttggatgtgctccaatgggtctttacagtgcagaatatgtatttaa

SEQ ID NO: 30520 - RNA, 1701 nt, synthetic construct; identical to SEQ ID NO: 30518
  misc_feature 1..1701: note = hemagglutinin__InfluenzaA__AAF87282
  source 1..1701: mol_type = other RNA

SEQ ID NO: 30521 - RNA, 1701 nt, synthetic construct
  misc_feature 1..1701: note = hemagglutinin__InfluenzaA__AAF87283
  source 1..1701: mol_type = other RNA
atgaaggcaatactagtagtcttgctatatgcatttacaaccgcaaatgcagacacattatgtataggttaccatgcaaataattcaactgacactgttgacacagtactagaaaagaatgtaacagtaacacactctgttaaccttttagaagacagacataacgggaaactatgtaaactaaaaggggtagccccattgcatttgggtaaatgtaacattgctggatggctactgggaaacccagagtgtgaattactattcacagcaagctcatggtcttacattgtggaaacttctaattcagacaatgggacatgttacccaggagatttcatcaattatgaagagctaagagagcagttgagctcagtgtcatcatttgaaagatttgagatattccccaaggcaagttcatggcccaatcatgaaacgaacagaggtgtgacatcagcatgtccttattctggagcaaacagcttctacagaaacttaatatggctggtaaaaaaaggaaattcatacccaaaactcagcaaatcctatattaacaataaggggaaggaagttcttgttctatggggcattcaccatccacctaccagtactgaccaacaaagtctctaccagaatgcagatgcctatgtttttgtggggtcatcaaaatacaacaagaaattcatgccagaaatagcaacaagacccaaagtgagaggtcaagcagggagaatgaactattactggacactaattgagcctggagacacaataacattcgaagcaactggaaatctagtggcaccaagatatgccttcgcaatggaaagaggctctggatctggtattataatttcagatacaccagtctacgattgtaatacggcttgtcaaacacccaaaggtgctataaacaccagtcttccatttcaaaatatacatccagtcacaattggagaatgtccaaaatatgtcaaaagcacaaaattgagaatggctacaggattaaggaacatcccgtctattcaatctagaggcctgtttggagccattgctggctttattgagggggggtggacaggaatgatagatggatggtatggttatcatcaccaaaatgagcaggggtcaggatatgcaccagaccgaaagagcacacagaatgccatagacgggatcactaacaaagtaaactctgttattgaaaagatgaacacacaattcacagcagtgggtaaagaattcaatcacttggagaaaagaatagagaatttaaacaaaaaggttgatgatggttttctgaatgtttggacttacaatgccgaactgttggttctattggaaaatgaaagaactttggattatcacgattcaaatgtgaagaacctatatgagaaagtaagaagccaactaaaaaacaatgccaaggaaattggaaatggctgctttgaattttaccacaaatgtgatgacacgtgcatggagagcgtcaaaaatgggacttatgattatccaaaatactcagaagaagcaagactaaacagagaagagatagatggggtaaagctggaatcaacaaggatttaccagattttggcgatctattcaactatcgccagttcattggtactgttagtctccctgggggcaatcagtttctggatgtgctccaatgggtctttacagtgcagaatatgtatttaa

SEQ ID NO: 30522 - RNA, 1701 nt, synthetic construct
  misc_feature 1..1701: note = hemagglutinin__InfluenzaA__AAF87284
  source 1..1701: mol_type = other RNA
atgaaggcaatactagtagtcttgctatatgcatttacaaccgcaaatgcagacacattatgtataggttaccatgcaaataattcaactgacactgttgacacagtactagaaaagaatgtaacagtaacacactctgttaaccttttagaagacagacataacgggaaactatgtaaactaaaaggggtagccccattgcatttgggtaaatgtaacattgctggatggctactgggaaacccagagtgtgaattactattcacagcaagctcatggtcttacattgtggaaacttctaattcagacaatgggacatgttacccaggagatttcatcaattatgaagagctaagagagcagttgagctcagtgtcatcatttgaaagatttgagatattccccaaggcaagttcatggcccaatcatgaaacgaacagaggtgtgacatcagcatgtctcttattctggagcaaacagcttctacagaaacttaatatggctggtaaaaaaggaaattcatacccaaaactcagcaaatcctatattaacaataaggggaaggaagttcttgttctatggggcattcaccatccacctaccagtactgaccaacaaagtctctaccagaatgcagatgcctatgtttttgtggggtcatcaaaatacaacaagaaattcatgccagaaatagcaacaagacccaaagtgagaggtcaagcagggagaatgaactattactggacactaattgagcctggagacacaataacattcgaagcaactggaaatctagtggcaccaagatatgccttcgcaatggaaagaggctctggatctggtattataatttcagatacaccagtctacgattgtaatacggcttgtcaaacacccaaaggtgctataaacaccagtcttccatttcaaaatatacatccagtcacaattggagaatgtccaaaatatgtcaaaagcacaaaattgagaatggctacaggattaaggaacatcccgtctattcaatctagaggcctgtttggagccattgctggctttattgagggggggtggacaggaatgatagatggatggtatggttatcatcaccaaaatgagcaggggtcaggatatgcagcagaccgaaagagcacacagaatgccatagacgggatcactaacaaagtaaactctgttattgaaaagatgaacacacaattcacagcagtgggtaaagaattcaatcacttggagaaaagaatagagaatttaaacaaaaaggttgatgatggttttctgaatgtttggacttacaatgccgaactgttggttctattggaaaatgaaagaactttggattatcacgattcaaatgtgaagaacctatatgagaaagtaagaagccaactaaaaaacaatgccaaggaaattggaaatggctgctttgaattttaccacaaatgtgatgacacgtgcatggagagcgtcaaaaatgggacttatgattatccaaaatactcagaagaagcaagactaaacagagaagagatagatggggtaaagctggaatcaacaaggatttaccagattttggcgatctattcaactatcgccagttcattggtactgttagtctccctgggggcaatcagtttctggatgtgctccaatgggtctttacagtgcagaatatgtatttaa

SEQ ID NO: 30523 - RNA, 1701 nt, synthetic construct
  misc_feature 1..1701: note = hemagglutinin__InfluenzaA__AAG01749
  source 1..1701: mol_type = other RNA
atgagcactatcattgctttgagctacattttatgtctggttttcgctcaaaaacttcccggaaatgacaacagcacggcaacgctgtgcctgggacaccatgcagtgccaaacggaacgctagtgaaaacaatcacaaatgaccaaattgaagtgactaatgctactgagctggttcagagttcctcaacaggtagaatatgcgacagtcctcaccgaatccttgatggaaaaaactgcacactgatagatgctctattgggagaccctcattgtgatggcttccaaaataaggaatgggacctttttgttgaacgcagcaaagcttacagcaactgttacccttatgatgtgccggattatgcctccctcaggtcactagttgcctcatccggcaccctggagtttaccaatgaaggcttcaattggactggagttgctcaggatggaacaagctatgcttgcaaaaggggatctgttaaaagtttctttagtagattgaattggttgcacaaattagaatacaaatatccagcactgaacgttactatgccaaacaatgacaaatttgacaaattgtacatttggggggttcaccacccgagtacggacagtgaccaaaccagcctatatgttcaagcatcagggagagtcacagtctctaccaaaagaagccaacaaactgtaatcccgaatatcgggtctagaccctgggttaggggtatctccagcagaataagcatctattggacaatagtaaaaccgggagacatacttttgattaacagcacagggaatctaattgctcctcggggttacttcaaaatacgaagtgggaaaagctcaataatgaggtcagatgcacccattgacaactgcaattctgaatgcatcactccaaatggaagcattcccaatgaaaaaccttttcaaaatgtaaacaggatcacatatggggcctgtcccagatatgttaagcaaaacactctgaaattggcaacagggatgcggaatgtaccagagaaacaaactagaggcatattcggcgcaatcgcaggtttcatagaaaatggttgggagggaatggtagacggttggtacggtttcaggcatcaaaattctgagggcacaggacaagcagcagatcttaaaagcactcaagcagcaatcaaccaaatcaacgggaaactgaataggttaatcgagaaaacgaacgagaaattccatcaaatcgaaaaagaattctcagaagtagaagggagaattcaggacctcgagaaatatgttgaagacactaaaatagatctctggtcttacaacgcggagcttcttgttgccctggagaaccaacatacaattgatctaactgactcagaaatgaacaaactgtttgaaagaacaaggaagcaactgagggaaaatgctgaggacatgggcaatggttgcttcaaaatataccacaaatgtgacaatgcctgcatagggtcaatcagaaatggaacttatgaccatgatgtatacagagacgaagcattaaacaaccggttccagatcaaaggtgttgagctgaagtcaggatacaaagattggatcctatggatttcctttgccatatcatgctttttgctttgtgttgttttgctggggttcatcatgtgggcctgccaaaaaggcaacattaggtgcaacatttgcatttga

SEQ ID NO: 30524 - RNA, 1701 nt, synthetic construct
  misc_feature 1..1701: note = hemagglutinin__InfluenzaA__AAG01767
  source 1..1701: mol_type = other RNA
atgaatactatcattgctttgagctacattttatgtctggttttcgctcaaaaacttcccggaaatgacaacagcacagcaacgctgtgcctgggacaccatgcagtgccaaacggaaccctagtgaaaacaatcacgaatgatcaaattgaagtgactaatgctactgagctggttcagagttcctcaacaggtagaatatgcgacagtcctcaccgaatccttgatggaaaaaactgcacattgatagatgctctactaggagaccctcattgcgatggctttcaaaataaggaatgggacctttttattgaacgcagcaaagcttacagcaactgttacccttatgatgtgccggattattcctcccttaggtcactagttgcctcatcaggcaccctggagtttaccaatgaagacttcaattggactggggtcgctcaggatgggggaagctattcttgcaaaagggaatctgttaaaagtttctttagtagattgaattggttgcacaaattagaatacaaatatccagcactgaacgtgactatgccaaacaatgacaaatttgacaaattgtacatttggggggttcaccatccgagcacggacagtgaacaaaccagcctatatgttcaagcaatagggagagtcacagtctctaccaaaagtagccaacaaactgtaatcccgaacatcgggtccagaccctgggtgaggggcatctccagtagaataagcatctattggacaatagtaaaaccgggagacatacttttgattagcagcacagggaatctaattgctcctcggggttacttcaaaatacgaaatgggaaaagctcaataatgaggtcagatgcacccattgacaactgctattctgaatgcatcactccaaatggaagcattcccaatgacaagccttttcaaaatgtaaacaggatcacatatggggcctgtcccaaatatgttaagcaaaaaactctgaaattggcaacagggatgcggaatgtaccagagaaacaaactagaggcatattcggcgcaatcgcaggtttcatagaaaatggttgggagggaatggtagacggttggtacggtttcaggcatcaaaattctgagggcacaggacaagcagcagatcttaaaagcactcaagcagcaatcgatcaagtcaacgggaaattgaataggttaatcgagaaaacgaacgagaaattccatcaaatcgaaaaagaattttcagaagtagaagggagaattcaggacctcgagaaatatgttgaagacactaaaatagatctctggtcttacaacgcggagctccttgttgccctggagaatcaacatacaattgatctaactgactcagaaatgaacaaactgtttgaaaaaacaaggaagcaactgagggaaaatgctgaggacatgggcaatggttgtttcaaaatataccacaaatgtgacaatgcctgcatagggtcaatcagaaatggaacttatgaccatgatgtatacagagacgaagcattaaacaaccggttccagatcaaaggtgttgagctgaaatcaggatacaaagattggatcctatggatttcctttgccatatcatgctttttgctttgtgttgttttgctgggtttcatcatgtgggcctgccaaaaaggcaacattaggtgcaacatttgcatttga

SEQ ID NO: 30525 - RNA, 1701 nt, synthetic construct
  misc_feature 1..1701: note = hemagglutinin__InfluenzaA__AAG01776
  source 1..1701: mol_type = other RNA
atgaatactatcattgctttgagctacattttatgtctggttttcgctcaaaaacttcccggaaatgacaacagcacagcaacgctgtgcctgggacaccatgcagtgccaaacggaaccctagtgaaaacaatcacgaatgatcaaattgaagtgactaatgctactgagctggttcagagttcctcaacaggtagaatatgcgacagtcctcaccgaatccttgatggaaaaaactgcacattgatagatgctctactaggagaccctcattgcgatggctttcaaaataaggaatgggacctttttattgaacgcagcaaagcttacagcaactgttacccttatgatgtgccggattattcctcccttaggtcactagttgcctcatcaggcaccctggagtttaccaatgaagacttcaattggactggggtcgctcaggatgggggaagctattcttgcaaaagggaatctgttaaaagtttctttagtagattgaattggttgcacaaattagaatacaaatatccagcactgaacgtgactatgccaaacaatgacaaatttgacaaattgtacatttggggggttcaccatccgagcacggacagtgaacaaaccagcctatatgttcaagcaatagggagagtcacagtctctaccaaaagtagccaacaaactgtaatcccgaacatcgggtccagaccctgggtgaggggcatctccagtagaataagcatctattggacaatagtaaaaccgggagacatacttttgattagcagcacagggaatctaattgctcctcggggttacttcaaaatacgaaatgggaaaagctcaataatgaggtcagatgcacccattgacaactgctattctgaatgcatcactccaaatggaagcattcccaatgacaagccttttcaaaatgtaaacaggatcacatatggggcctgtcccaaatatgttaagcaaaaaactctgaaattggcaacagggatgcggaatgtaccagagaaacaaactagaggcatattcggcgcaatcgcaggtttcatagaaaatggttgggagggaatggtagacggttggtacggtttcaggcatcaaaattctgagggcacaggacaagcagcagatcttaaaagcactcaagcagcaatcgatcaagtcaacgggaaattgaattggttaatcgagaaaacgaacgagaaattccatcaaatcgaaaaagaattttcagaagtagaagggagaattcaggacctcgagaaatatgttgaagacactaaaatagatctctggtcttacaacgcggagctccttgttgccctggagaatcaacatacaattgatctaactgactcagaaatgaacaaactgtttgaaaaaacaaggaagcaactgagggaaaatgctgaggacatgggcaatggttgtttcaaaatataccacaaatgtgacaatgcctgcatagggtcaatcagaaatggaacttatgaccatgatgtatacagagacgaagcattaaacaaccggttccagatcaaaggtgttgagctgaaatcaggatacaaagattggatcctatggatttcctttgccatatcatgctttttgctttgtgttgttttgctgggtttcatcatgtgggcctgccaaaaaggcaacattaggtgcaacatttgcatttga

SEQ ID NO: 30526 - RNA, 1701 nt, synthetic construct
  misc_feature 1..1701: note = hemagglutinin__InfluenzaA__AAG01785
  source 1..1701: mol_type = other RNA
atgaagactatcattgctttgagctacattttatgtctggttttcgctcaaaaacttcccggaaatgacaacagcacagcaacgctgtgcctgggacaccatgcagtgccaaacggaaccctagtgaaaacaatcacgaatgatcaaattgaagtgactaatgctactgagctggttcagagttcctcaacaggtagaatatgcgacagtcctcaccgaatccttgatggaaaaaactgcacattgatagatgctctactaggagaccctcattgcgatggctttcaaaataaggaatgggacctttttattgaacgcagcaaagcttacagcaactgttacccttatgatgtgccggattattcctcccttaggtcactagttgcctcatcaggcaccctggagtttaccaatgaagacttcaattggactggggtcgctcaggatgggggaagctattcttgcaaaagggaatctgttaaaagtttctttagtagattgaattggttgcacaaattagaatacaaatatccagcactgaacgtgactatgccaaacaatgacaaatttgacaaattgtacatttggggggttcaccatccgagcacggacagtgaacaaaccagcctatatgttcaagcaatagggagagtcacagtctctaccaaaagtagccaacaaactgtaatcccgaacatcgggtccagaccctgggtgaggggcatctccagtagaataagcatctattggacaatagtaaaaccgggagacatacttttgattagcagcacagggaatctaattgctcctcggggttacttcaaaatacgaaatgggaaaagctcaataatgaggtcagatgcacccattgacaactgctattctgaatgcatcactccaaatggaagcattcccaatgacaagccttttcaaaatgtaaacaggatcacatatggggcctgtcccaaatatgttaagcaaaaaactctgaaattggcaacagggatgcggaatgtaccagagaaacaaactagaggcatattcggcgcaatcgcaggtttcatagaaaatggttgggagggaatggtagacggttggtacggtttcaggcatcaaaattctgagggcacaggacaagcagcagatcttaaaagcactcaagcagcaatcgatcaagtcaacgggaaattgaataggttaatcgagaaaacgaacgagaaattccatcaaatcgaaaaagaattttcagaagtagaagggagaattcaggacctcgagaaatatgttgaagacactaaaatagatctctggtcttacaacgcggagctccttgttgccctggagaatcaacatacaattgatctaactgactcagaaatgaacaaactgtttgaaaaaacaaggaagcaactgagggaaaatgctgaggacatgggcaatggttgtttcaaaatataccacaaatgtgacaatgcctgcatagggtcaatcagaaatggaacttatgaccatgatgtatacagagacgaagcattaaacaaccggttccagatcaaaggtgttgagctgaaatcaggatacaaagattggatcctatggatttcctttgccatatcatgctttttgctttgtgttgttttgctgggtttcatcatgtgggcctgccaaaaaggcaacattaggtgcaacatttgcatttga

SEQ ID NO: 30527 - RNA, 1701 nt, synthetic construct
  misc_feature 1..1701: note = hemagglutinin__InfluenzaA__AAK52911
  source 1..1701: mol_type = other RNA
atgaagactatcattgctttgagctacattttatgtctggttttcgctcaaaaacttcccggaaatgacaacagcacggcaacgctgtgcctgggacaccatgcagtgccaaacggaacgctagtgaaaacaatcacgaatgaccaaattgaagtgactaatgctactgagctggttcagagttcctcaacaggtagaatatgcgacagtcctcaccaaatccttgatggaaaaaactgcacactgatagatgctctattgggagatcctcattgtgatggcttccaaaataaggaatgggacctttttgttgaacgcagcacagcttacagcaactgttacccttatgatgtgccggattatgcctcccttaggtcactagttgcctcatccggcaccctggagtttaccaaagaaggcttcaattggactggagtcgctcaggatggaacaagctatgcttgcaaaaggggatctgttaaaagtttctttagtagattgaattggttgcacaaattagaatacaaatatccagcactgaacgtgactatgccaaacaatgacaaatttgacaaattgtacatttggggggttcaccacccgagtacggacagtgaccaaaccagcctatatgttcaagcatcagggagagtcacagtctctaccaaaagaagccaacaaactgtaatcccgaatatcgggtctagaccctgggtaaggggtgtctccagcagaataagcatctattggacaatagtaaaaccgggagacatacttttgattaacagcacagggaatctaattgctcctcggggttacttcaaaatacgaagtgggaaaagctcaataatgaggtcggatgcacccattgacaactgcaattctgaatgcattactccaaatggaagcattcccaatgacaaaccttttcaaaatgtaaacaggatcacatatggggcctgtcccagatatgttaagcaaaacactctgaaattggcaacagggatgcggaatgtaccagagaaacaaactagaggcatattcggcgcaatcgcaggtttcatagaaaatggttgggagggaatggtagacggttggtacggtttcaggcatcaaaattctgaaggcacaggacaagcagcagatcttaaaagcactcaagcagcaatcaaccaaatcaacgggaaactgaataggttaatcgagaaaacgaacgagaaattccatcaaatcgaaaaagaattctcagaagtagaagggagaattcaggacctcgagaaatatgttgaagacactaaaatagatctctggtcttacaacgcggagcttcttgttgccctggagaaccaacatacaattgatctaactgactcagaaatgaacaaactgtttgaaagaacaagaaagcaactgagggaaaatgctgaggacatgggcaatggttgcttcaaaatataccacaaatgtgacaatgcctgcatagggtcaatcagaaatggaacttatgaccatgatgtatacagagatgaagcattaaacaaccggttccagatcaaaggtgttgagctgaagtcaggatacaaagattggatcctatggatttcctttgccatatcatgctttttgctttgtgttgttttgctggggttcattatgtgggcctgccaaaaaggcaacattaggtgcaacatttgcatttga

SEQ ID NO: 30528 - RNA, 1701 nt, synthetic construct
  misc_feature 1..1701: note = hemagglutinin__InfluenzaA__AAK52912
  source 1..1701: mol_type = other RNA
atgaagactatcattgctttgagctacattttatgtctggttttcgctcaaaaacttcccggaaatgacaacagcacggcaacgctgtgcctgggacaccatgcagtgccaaacggaacgctagtgaaaacaatcacgaatgaccaaattgaagtgactaatgctactgagctggttcagagttcctcaacaggtagaatatgcgacagtcctcaccgaatccttgatggaaaaaactgcacactgatagatgctctattgggagaccctcattgtgatggcttccaaaataaagaatgggacctttttgttgaacgcaccaaagcttacagcaactgttacccttatgatgtgccggattatgcctcccttaggtcactagttgcctcatccggcaccctggagtttaccaatgaaggcttcaattggactggagtcgcccagaatggaacaagctatgcttgcaaaaggggatctgttaaaagtttctttagtagattgaattggttgcacaaattagaatacaaatatccagcactgaacgtgactatgccaaacaatgacaaatttgacaaattgtacatttggggggttcaccacccgagtacggacagtgaccaaaccagcctatatgttcaagcatcagggagagtcacagtctctaccaaaagaagccaacaaactgtaatcccgaatatcgggtctagaccctgggtaaggggtgtctccagcagaataagcatctattggacaatagtaaaaccgggagacatacttttgattaacagcacagggaatctaattgctcctcggggttacttcaaaatacgaagtgggaaaagctcaataatgaggtcagatgcacccattggcaactgcaattctgaatgcatcactccaaatggaagcattcccaatgacaaaccttttcaaaatgtaaacaggatcacatatggggcctgtcccagatatgttaagcaaaacactctgaaattggcaacagggatgcggaatgtaccagagaaacaaactagaggcatattcggcgcaattgcaggtttcatagaaaatggttgggagggaatggtagacggttggtacggtttcaggcatcaaaattctgagggcacaggacaagcagcagatcttaaaagcactcaagcagcaatcaaccaaatcaacgggaaactgaataggttaatcgagaaaacgaacgagaaattccatcaaatcgaaaaagaattctcagaagtagaaggaagaattcaggacctcgagaaatatgttgaagacactaaaatagatctctggtcttacaacgcggagcttcttgttgccctggagaaccaacatacaattgatctaactgactcagaaatgaacaaactgtttgaaagaacaaggaagcaactgagggaaaatgctgaggacatgggcaatggttgcttcaaaatataccacaaatgtgacaatgcctgcatagggtcaatcagaaatggaacttatgaccatgatgtatacagagacgaagcattaaacaaccggttccagatcaaaggtgttgagctgaagtcaggatacaaagattggatcctatggatttcctttgccatatcatgctttttgctttgtgttgttttgctggggttcatcatgtgggcctgccaaaaaggcaacattaggtgcaacatttgcatttga

SEQ ID NO: 30529 - RNA, 1701 nt, synthetic construct
  misc_feature 1..1701: note = hemagglutinin__InfluenzaA__AAK71687
  source 1..1701: mol_type = other RNA
atgaaggcaatactagtagtcctgctatatacatttacaaccgcaaatgcagacacattatgtataggttatcatgcgaacaattcaactgacactgtagacacagtactagaaaagaatgtaacagtaacacactctgttaaccttctagaagacaggcataacgggaaactatgtaaactaagaggggtagccccattgcatttgggtaaatgtaacattgctggctggctcctgggaaatccagagtgtgaatcactcttcacagcaagctcatggtcctacattgtggaaacatctaattcagacaatgggacgtgttacccaggagatttcatcaattatgaagagctaagagagcaattgagctcagtgtcatcatttgaaagatttgagatattccccgagacaagttcatggcccaatcatgacacgaacagaggtgtgacggcagcatgtcctcatgctggagcaaatagcttctacagaaatttaatatggctggccaaaaaaggagattcatacccaaagctcagcaaatcctatattaacaataaggggaaggaagtcctcgtgctatggggcattcaccatccacctaccagtgccgaccaacaaagtctctaccagaatgcagatgcatatgtttttgtggggtcatcaagatacagcaagaagttcaagccagaaatagcaacaagacccaaggtgaggggccaagcagggagaatgaactattactggacactagtagagcctggagacaaaataacattcgaggcaactggaaatctagtggtaccgagatatgccttcgcaatgaaaagaaattctgaatctggtattatcatttcagatatatcagtccacgattgtaatacgacttgtcagacacccaagggtgctataaacaccagcctcccatttcagaatatacatccagtcacaattggagaatgtccaaaatatgtaaaaagcacaaaattgagaatggctacaggattaaggaatgtcccgtctattcaatctagaggcctgtttggggccattgccggctttattgaggggggatggacaggaatgatagatggatggtacggttatcaccatcaaaatgagcagggatcaggatatgcagccgacctgaagagcacacagaatgccattgacgggatcactaacaaagtaaattctgttatcgaaaagatgaacacacaattcacagtagtaggtaaagagttcaaccacctggaaaaaagaatagagaatttaaataaaaaggttgatgatggttttctggatatttggacttacaatgccgaactgttggttctgttggaaaatgaaagaaccttggattaccacgattcaaatgtgaagaacttatatgaaaaggtaagaagccagctaaaaaacaatgccaaggaaattggaaatggctgctttgaattttaccacaaatgtgatgacacgtgcatggaaagcgtcaaaaatgggacttatgattacccaaaatactcagaggaagcaaaactaaacagagaggaaatagatggggtaaagctggaatcaacaaggatttaccagattttggcgatctattcaactgtcgccagttcattggtactggtagtctccctggggacaatcagtttctggatgtgctctaatgggtctctacagtgtagaatatgtatttaa

SEQ ID NO: 30530 - RNA, 1707 nt, synthetic construct
  misc_feature 1..1707: note = hemagglutinin__InfluenzaA__AAS65618
  source 1..1707: mol_type = other RNA
atggagaaaatagtgcttctttttgcaatagtcagtcttgttaaaagtgatcagatttgcattggttaccatgcaaacaactcgacagagcaggttgacacaataatggaaaagaacgttactgttacacatgcccaagacatactggaaaagacacacaacgggaagctctgcgatctagatggagtgaagcctctaattttgagagattgtagtgtagctggatggctcctcggaaacccaatgtgtgacgaattcatcaatgtgccggaatggtcttacatagtggagaaggccaatccagtcaatgacctctgttacccaggggatttcaatgactatgaagaattgaaacacctattgagcagaataaaccattttgagaaaattcagatcatccccaaaagttcttggtccagtcatgaagtctcattaggggtgagctcagcatgtccataccagggaaagtcctcctttttcagaaatgtggtatggcttatcaaaaagaacagtacatacccaacaataaagaggagctacaataataccaaccaagaagatcttttggtactgtgggggattcaccatcctaatgatgcggcagagcagacaaagctctatcaaaacccaaccacctatatttccgttgggacatcaacactaaaccagagattggtaccaagaatagctactagatccaaagtaaacgggcaaagtggaaggatggagttcttctggacaattttaaaaccgaatgatgcaatcaacttcgagagtaatggaaatttcattgctccagaatatgcatacaaaattgtcaagaaaggggactcaacaattatgaaaagtgaattggaatatggtaactgcaacaccaagtgtcaaactccaatgggggcgataaactctagtatgccattccacaatatacaccctctcaccatcggggaatgccccaaatatgtgaaatcaaacagattagtccttgcgactgggctcagaaatagccctcaaagagagagaagaagaaaaaagagaggattatttggagctatagcaggttttatagagggaggatggcagggaatggtagatggttggtatgggtaccaccatagcaatgagcaggggagtgggtacgctgcagccaaagaatccactcaaaaggcaatagatggagtcaccaataaggtcaactcgatcattgacaaaatgaacactcagtttgaggccgttggaagggaatttaacaacttagaaaggagaatagagaatttaaacaagaagatggaagacgggttcctagatgtctggacttataatgctgaacttctggttctcatggaaaatgagagaactctagactttcacgactcaaatgtcaagaacctttacgacaaggtccgactacagcttaaggataatgcaaaggagctgggtaacggttgtttcgagttctatcataaatgtgataatgaatgtatggaaagtgtaagaaacggaacgtatgactacccgcagtattcagaagaagcaagactaaaaagagaggaaataagtggagtaaaattggaatcaataggaatttaccaaatactgtcaatttattctacagtggcgagttccctagcactggcaatcatggtagctggtctatccttatggatgtgctccaatgggtcgttacaatgcagaatttgcatttaa

SEQ ID NO: 30531 - RNA, 1704 nt, synthetic construct
  misc_feature 1..1704: note = hemagglutinin__InfluenzaA__AAT38819
  source 1..1704: mol_type = other RNA
atgaatactcaaattttggcattcattgcttgtatgctgattggaactaaaggagacaaaatatgtcttgggcaccatgctgtggcaaatgggacaaaagtgaacacactaacagagaggggaattgaagtagtcaatgccacggagacggtggaaactgtaaatattaagaaaatatgcactcaaggaaaaaggccaacagatctgggacaatgtggacttctaggaaccctaataggacctccccaatgcgatcaatttctggagtttgacgctaatttgataattgaacgaagagaaggaaccgatgtgtgctatcccgggaagttcacaaatgaagaatcactgaggcagatccttcgagggtcaggaggaattgataaagagtcaatgggtttcacctatagtggaataagaaccaatggggcgacgagtgcctgcagaagatcaggttcttctttctatgcggagatgaagtggttactgtcgaattcagacaatgcggcatttccccaaatgactaagtcgtataggaatcccaggaacaaaccagctctgataatctggggagtgcatcactctggatcagctactgagcagaccaaactctatggaagtggaaacaagttgataacagtaggaagctcgaaataccagcaatcattcactccaagtccgggagcacggccacaagtgaatggacaatcaggaaggattgattttcattggctactccttgaccccaatgacacagtgaccttcactttcaatggggcattcatagcccctgacagggcaagtttctttagaggagaatcgctaggagtccagagtgatgttcctttggattctggttgtgaaggggattgcttccacagtgggggtacgatagtcagttccctgccattccaaaacatcaaccctagaacagtggggaaatgccctcgatatgtcaaacagacaagcctccttttggctacaggaatgagaaacgtcccagagaaccccaagcaggcctaccagaaacagatgaccagaggcctttttggagcgattgctggattcatagagaatggatgggaaggtctcatcgatggatggtatggtttcagacatcaaaatgcacaaggagaaggaactgcagctgactacaaaagcacccaatctgcaatagatcagatcacaggcaaattgaatcgtctgattgacaaaacaaaccagcagtttgaactgatagacaatgaattcagtgagatagaacaacaaatcgggaatgtcattaactggacacgagactcaatgactgaggtatggtcgtataatgctgagctgttggtggcaatggagaatcagcatacaatagatcttgcagactcagaaatgaacaaactttacgaacgcgtcagaaaacaactaagggaaaatgctgaagaagatggaactggatgctttgagatattccataagtgtgatgatcagtgtatggagagcataaggaacaacacttatgaccatacccaatacaggacagagtcattgcagaatagaatacagatagacccagtgaaattgagtagtggatacaaagacataatcttatggtttagcttcggggcatcatgttttcttcttctagccattgcaatgggattggttttcatttgcataaagaatggaaacatgcggtgcactatttgtatatag

SEQ ID NO: 30532 - RNA, 1707 nt, synthetic construct
  misc_feature 1..1707: note = hemagglutinin__InfluenzaA__AAV32636
  source 1..1707: mol_type = other RNA
atggagaaaatagtgcttctttttgcaatagtcagtcttgttaaaagtgatcagatttgcattggttaccatgcaaacaactcgacagagcaggttgacacaataatggaaaagaacgttactgttacacatgcccaagacatactggaaaagacacacaacgggaagctctgcgatctagatggagtgaagcctctaattttgagagattgtagtgtagctggatggctcctcggaaacccaatgtgtgacgaattcatcaatgtgccggaatggtcttacatagtggagaaggccaatccagtcaatgacctctgttacccaggggatttcaatgactatgaagaattgaaacacctattgagcagaataaaccattttgagaaaattcagatcattcccaaaagttcttggtccagtcatgaagcctcattaggggtgagctcagcatgtccataccagggaaagtcctcctttttcagaaatgtggtatggcttatcaaaaagaacagtacatacccaacaataaagaggagctacaataataccaaccaagaagatcttttggtactgtgggggattcaccatcctaatgatgcggcagagcagacaaagctctatcaaaacccaaccacctatatttccgttgggacatcaacactaaaccagagattggtaccaagaatagctactagatccaaagtaaacgggcaaagtggaaggatggagttcttctggacaattttaaaaccgaatgatgcaatcaacttcgagagtaatggaaatttcattgctccagaatatgcatacaaaattgtcaagaaaggggactcaacaattatgaaaagtgaattggaatatggtaactgcaacaccaagtgtcaaactccaatgggggcgataaactctagtatgccattccacaatatacaccctctcaccatcggggaatgccccaaatatgtgaaatcaaacagattagtccttgcgactgggctcagaaatagccctcaaagagagagaagaagaaaaaagagaggattatttggagctatagcaggttttatagagggaggatggcagggaatggtagatggttggtatgggtaccaccatagcaatgagcaggggagtgggtacgctgcagacaaagaatccactcaaaaggcaatagatggagtcaccaataaggtcaactcgatcattgacaaaatgaacactcagtttgaggccgttggaagggaatttaacaacttagaaaggagaatagagaatttaaacaagaagatggaagacgggttcctagatgtctggacttataatgctgaacttctggttctcatggaaaatgagagaactctagactttcatgactcaaatgtcaagaacctttacgacaaggtccgactacagcttagggataatgcaaaggagctgggtaacggttgtttcgagttctatcataaatgtgataatgaatgtatggaaagtgtaagaaacggaacgtatgactacccgcagtattcagaagaagcaagactaaaaagagaggaaataagtggagtaaaattggaatcaataggaatttaccaaatactgtcaatttattctacagtggcgagttccctagcactggcaatcatggtagctggtctatccttatggatgtgctccaatgggtcgttacaatgcagaatttgcatttaa

SEQ ID NO: 30533 - RNA, 1707 nt, synthetic construct
  misc_feature 1..1707: note = hemagglutinin__InfluenzaA__AAV34704
  source 1..1707: mol_type = other RNA
atggagaaaatagtgcttctttttgcaatagtcagtcttgttaaaagtgatcagatttgcattggttaccatgcaaacaactcgacagagcaggttgacacaataatggaaaagaacgttactgttacacatgcccaagacatactggaaaagacacacaacgggaagctctgcgatctagatggagtgaagcctctaattttgagagattgtagtgtagctggatggctcctcggaaacccaatgtgtgacgaattcatcaatgtgccggaatggtcttacatagtggagaaggccaatccagtcaatgacctctgttacccaggggatttcaatgactatgaagaattgaaacacctattgagcagaataaaccattttgagaaaattcagatcatccccaaaagttcttggtccagtcatgaagcctcattaggggtgagctcagcatgcccataccagggaaagtcctcctttttcagaaatgtggtatggcttatcaaaaagaacagtacatacccaacaataaagaggagctacaataataccaaccaagaagatcttttggtactgtgggggattcaccatcctaatgatgcggcagagcagacaaagctctatcaaaacccaaccacctatatttccgttgggacatcaacactaaaccagagattggtaccaagaatagctactagatccaaagtaaacgggcaaagtggaaggatggagttcttctggacaattttaaagccgaatgatgcaatcaacttcgagagtaatggaaatttcattgctccagaatatgcatacaaaattgtcaagaaaggggactcaacaattatgaaaagtgaattggaatatggtaactgcaacaccaagtgtcaaactccaatgggggcgataaactctagtatgccattccacaatatacaccctctcaccatcggggaatgccccaaatatgtgaaatcaaacagattagtccttgccactgggctcagaaatagccctcaaagagagagaagaagaaaaaagagaggattatttggagctatagcaggttttatagagggaggatggcagggaatggtagatggttggtatgggtaccaccatagcaatgagcaggggagtgggtacgctgcagacaaagaatccactcaaaaggcaatagatggagtcaccaataaggtcaactcgatcattgacaaaatgaacactcagtttgaggccgttggaagggaatttaacaacttagaaaggagaatagagaatttaaacaagaagatggaagacgggttcctagatgtctggacttataatgctgaacttctggttctcatggaaaatgagagaactctagactttcatgactcaaatgtcaagaacctttacgacaaggtccgactacagcttagggataatgcaaaggagctgggtaacggttgtttcgagttctatcataaatgtgataatgaatgtatggaaagtgtaagaaacggaacgtatgactacccgcagtattcagaagaagcaagactaaaaagagaggaaataagtggagtaaaattggaatcaataggaatttaccaaatactgtcaatttattctacagtggcgagttccctagcactggcaatcatggtagctggtctatccttatggatgtgctccaatgggtcgttacaatgcagaatttgcatttaa

SEQ ID NO: 30534 - RNA, 1707 nt, synthetic construct
  misc_feature 1..1707: note = hemagglutinin__InfluenzaA__AAV65826
  source 1..1707: mol_type = other RNA
atggagaaaatagtgcttctttttgcaatagtcagtcttgttaaaagtgatcagatttgcattggttaccatgcgaacaactcgacagagcaggttgacacaataatggaaaagaacgttactgttacacatgcccaagacatactggaaaagacacacaacgggaagctctgcgatctagatggagtgaagcctctaattttgagagattgtagtgtagctggatggctcctcggaaacccaatgtgtgacgaattcatcaatgtgccggaatggtcttacatagtggagaaggccaatccagtcaatgacctctgttacccaggggatttcaatgactatgaagaattgaaacacctattgagcagaataaaccattttgagaaaattcagatcatccccaaaagttcttggtccagtcatgaagcctcattaggggtgagctcagcatgtccataccagggaaagtcctcctttttcagaaatgtggtatggcttatcaaaaagaacagtacatacccaacaataaagaggagctacaataataccaaccaagaagatcttttggtactgggggggattcaccatcctaatgatgcggcagagcagacaaagctctatcaaaacccaaccacctatatttccgttgggacatcaacactaaaccagagattggtaccaagaatagctactagatccaaagtaaacgggcaaagtggaaggatggagttcttctggacaattttaaaaccgaatgatgcaatcaacttcgagagtaatggaaatttcattgctccagaatatgcatacaaaattgtcaagaaaggggactcaacaattatgaaaagtgaattggaatatggtaactgcaacaccaagtgtcaaactccaatgggggcgataaactctagtatgccattccacaatatacaccctctcaccatcggggaatgccccaaatatgtgaaatcaaacagattagtccttgcgactgggctcagaaatagccctcaaagagagagaagaagaaaaaagagaggattatttggagctatagcaggttttatagagggaggatggcagggaatggtagatggttggtatgggtaccaccatagcaatgagcaggggagtggctacgctgcagacaaagaatccactcaaaaggcaatagatggagtcaccaataaggtcaactcgatcattgacaaaatgaacactcagtttgaggccgttggaagggaatttaacaacttagaaaggagaatagagaatttaaacaagaagatggaagacgggttcctagatgtctggacttataatgctgaacttctggttctcatggaaaatgagagaactctagactttcatgactcaaatgtcaagaacctttacgacaaggtccgactacagcttagggataatgcaaaggagctgggtaacggttgtttcgagttctatcataaatgtgataatgaatgtatggaaagtgtaagaaacggaacgtatgactacccgcagtattcagaagaagcaagactaaaaagagaggaaataagtggagtaaaattggaatcaataggaatttaccaaatactgtcaatttattctacagtggcgagttccctagcactggcaatcatggtagctggtctatccttatggatgtgctccaatgggtcgttacaatgcagaatttgcatttaa

SEQ ID NO: 30535 - RNA, 1701 nt, synthetic construct
  misc_feature 1..1701: note = hemagglutinin__InfluenzaA__AAX11505
  source 1..1701: mol_type = other RNA
atgaagactatcattgctttgagctacattctatgtctggttttcgctcaaaaacttcccggaaatgacaacagcacggcaacgctgtgccttgggcaccatgcagtaccaaacggaacgatagtgaaaacaatcacgaatgaccaaattgaagttactaatgctactgagctggttcagagttcctcaacaggtggaatatgcgacagtcctcatcagatccttgatggagaaaactgcacactaatagatgctctattgggagaccctcagtgtgatggcttccaaaataagaaatgggacctttttgttgaacgcagcaaagcctacagcaactgttacccttatgatgtgccggattatgcctcccttaggtcactagttgcctcatccggcacactggagtttaacaatgaaagcttcaattggactggagtcactcagaatggaacaagctctgcttgcgaaaggagatctaataaaagtttctttagtagattgaattggttgacccacttaaaatacaaatacccagcattgaacgtgactatgccaaacaatgaaaaatttgacaaattgtacatttggggggttcaccacccgggtacggacagtgaccaaatcagcctatatgctcaagcatcaggaagaatcacagtctctaccaaaagaagccaacaaactgtaatcccgaatatcggatctagacccagggtaagggatgtctccagccgaataagcatctattggacaatagtaaaaccgggagacatacttttgattaacagcacagggaatctaattgctcctcggggttacttcaaaatacgaagtgggaaaagctcaataatgagatcagatgcacccattggcaaatgcaattctgaatgcatcactccaaatggaagcattcccaatgacaaaccatttcaaaatgtaaacaggattacatatggggcctgtcccagatatgttaagcaaaacactctgaaattggcaacagggatgcgaaatgtaccagagaaacaaactagaggcatatttggcgcaatcgcgggtttcatagaaaatggttgggagggaatggtggacggttggtacggtttcaggcatcaaaattctgagggcacaggacaagcagcagatctcaaaagcactcaagcagcaatcaaccaaatcaatgggaaactgaataggttaatcgggaaaacaaacgagaaattccatcagattgaaaaagaattctcagaagtagaagggagaattcaggacctcgagaaatatgttgaggacactaaaatagatctctggtcatacaacgcggagcttcttgttgccctggagaaccaacatacaattgatctaactgactcagaaatgaacaaactgtttgaaagaacaaagaagcaactgagggaaaatgctgaggatatgggcaatggttgtttcaaaatataccacaaatgtgacaatgcctgcatagggtcaatcagaaatggaacttatgaccatgatgtgtacagagatgaagcattaaacaaccggttccagatcaaaggtgttgagctgaagtcaggatacaaagattggatcctatggatttcctttgccatatcatgttttttgctttgtgttgctttgttggggttcatcatgtgggcctgccaaaaaggcaacattaggtgcgacatttgcatttga

SEQ ID NO: 30536 - RNA, 1701 nt, synthetic construct
  misc_feature 1..1701: note = hemagglutinin__InfluenzaA__AAX11525
  source 1..1701: mol_type = other RNA
atgaagactatcattgctttgagctacattctatgtctggttttcgctcaaaaacttcccggaaatgacaacagcacggcaacgctgtgccttgggcaccatgcagtaccaaacggaacgatagtgaaaacaatcacgaatgaccaaattgaagttactaatgctactgagctggtacagagttcctcaacaggtggaatatgcgacagtcctcatcagatccttgatggagaaaactgcacactaatagatgctctattgggagaccctcagtgtgatggcttccaaaataagaaatgggacctttttgttgaacgcagcaaagcctacagcaactgttacccttatgatgtgccggattatgcctcccttaggtcactagttgcctcatccggcacactggagtttaacaatgaaagcttcgattggactggagtcactcagaatggaacaagctctgcttgcaaaaggagatctaataaaagtttctttagtagattgaattggttgacccacttaaaatacaaatacccagcattgaacgtgactatgccaaacaatgaaaaatttgacaaattgtacatttggggggttcaccacccgggtacggacagtgaccaaatcagcctatatgctcaagcatcaggaagaatcacagtctctaccaaaagaagccaacaaactgtaatcccgaatatcggatctagacccagggtaagggatgtctctagccgaataagcatctattggacaatagtaaaaccgggagacatacttttgattaacagcacagggaatctaattgctcctcggggttacttcaaaatacgaagtgggaaaagctcaataatgagatcagatgcacccattggcaaatgcaattccgaatgcatcactccaaatggaagcattcccaatgacaaaccatttcaaaatgtaaacaggatcacatatggggcctgtcccagatatgttaagcaaaacactttgaaattggcaacagggatgcgaaatgtaccagagaaacaaactagaggcatatttggcgcaatcgcgggcttcatagaaaatggttgggagggaatggtggacggttggtacggtttcaggcatcaaaattctgagggcacaggacaagcagcagatctcaaaagcactcaagcagcaatcaaccaaatcaatgggaaactgaataggttaatcgggaaaacaaacgagaaattccatcagattgaaaaagaattctcagaagtagaagggagaattcaggacctcgagaaatatgttgaggacactaaaatagatctctggtcatacaacgcggagcttcttgttgccctggagaaccaacatacaattgatctaactgactcagaaatgaacaaactgtttgaaagaacaaagaagcaactgagggaaaatgctgaggatatgggcaatggttgtttcaaaatataccacaaatgtgacaatgcctgcatagggtcaatcagaaatggaacttatgaccatgatgtgtacagagatgaagcattaaacaaccggttccagatcaaaggtgttgagctgaagtcaggatacaaagattggatcctatggatttcctttgccatatcatgttttttgctttgtgttgctttgttggggttcatcatgtgggcctgccaaaaaggcaacattaggtgcaacatttgcatttga

SEQ ID NO: 30537 - RNA, 1701 nt, synthetic construct
  misc_feature 1..1701: note = hemagglutinin__InfluenzaA__AAX11535
  source 1..1701: mol_type = other RNA
atgaagactatcattgctttgagctacattctatgtctggttttcgctcaaaaacttcccggaaatgacaacagcacggcaacgctgtgccttgggcaccatgcagtaccaaacggaacgatagtgaaaacaatcacgaatgaccaaattgaagttactaatgctactgagctggtacagagttcctcaacaggtggaatatgcgacagtcctcatcagatccttgatggagaaaactgcacactaatagatgctctattgggagaccctcagtgtgatggcttccaaaataagaaatgggacctttttgttgaacgcagcaaagcctacagcaactgttacccttatgatgtgccggattatgcctcccttaggtcactagttgcctcatccggcacactggagtttaacaatgaaagcttcgattggactggagtcactcagaatggaacaagctctgcttgcaaaaggagatctaataaaagtttctttagtagattgaattggttgacccacttaaaatacaaatacccagcattgaacgtgactatgccaaacaatgaaaaatttgacaaattgtacatttggggggttcaccacccgggtacggacagtgaccaaatcagcctatatgctcaagcatcaggaagaatcacagtctctaccaaaagaagccaacaaactgtaatcccgaatatcggatctagaccaagggtaagggatgtctccagccgaataagcatctattggacaatagtaaaaccgggagacatacttttgattaacagcacagggaatctaattgctcctcggggttacttcaaaatacgaagtgggaaaagctcaataatgagatcagatgcacccattggcaaatgcaattccgaatgcatcactccaaatggaagcattcccaatgacaaaccatttcaaaatgtaaacaggatcacatatggggcctgtcccagatatgttaagcaaaacactttgaaattggcaacagggatgcgaaatgtaccagagaaacaaactagaggcatatttggcgcaatcgcgggcttcatagaaaatggttgggagggaatggtggacggttggtacggtttcaggcatcaaaattctgagggcacaggacaagcagcagatctcaaaagcactcaagcagcaatcaaccaaatcaatgggaaactgaataggttaatcgggaaaacaaacgagaaattccatcagattgaaaaagaattctcagaagtagaagggagaattcaggacctcgagaaatatgttgaggacactaaaatagatctctggtcatacaacgcggagcttcttgttgccctggagaaccaacatacaattgatctaactgactcagaaatgaacaaactgtttgaaagaacaaagaagcaactgagggaaaatgctgaggatatgggcaatggttgtttcaaaatataccacaaatgtgacaatgcctgcatagggtcaatcagaaatggaacttatgaccatgatgtgtacagagatgaagcattaaacaaccggttccagatcaaaggtgttgagctgaagtcaggatacaaagattggatcctatggatttcctttgccatatcatgttttttgctttgtgttgctttgttggggttcatcatgtgggcctgccaaaaaggcaacattaggtgcaacatttgcatttga

SEQ ID NO: 30538 - RNA, 1701 nt, synthetic construct
  misc_feature 1..1701: note = hemagglutinin__InfluenzaA__AAX11545
  source 1..1701: mol_type = other RNA
atgaagactatcattgctttgagctacattctatgtctggttttcgctcaaaaacttcccggaaatgacaacagcacggcaacgctgtgccttgggcaccatgcagtaccaaacggaacgatagtgaaaacaatcacgaatgaccaaattgaagttactaatgctactgagctggtacagagttcctcaacaggtggaatatgcgacagtcctcatcagatccttgatggagaaaactgcacactaatagatgctctattgggagaccctcagtgtgatggcttccaaaataagaaatgggacctttttgttgaacgcagcaaagcctacagcaactgttacccttatgatgtgccggattatgcctcccttaggtcactagttgcctcatccggcacactggagtttaacaatgaaagcttcgattggactggagtcactcagaatggaacaagctctgcttgcaaaaggagatctaataaaagtttctttagtagattgaattggttgacccacttaaaatacaaatacccagcattgaacgtgactatgccaaacaatgaaaaatttgacaaattgtacatttggggggttcaccacccgggtacggacagtgaccaaatcagcctatatgctcaagcatcaggaagaatcacagtctctaccaaaagaagccaacaaactgtaatcccgaatatcggatctagacccagggtaagggatgtctctagccgaataagcatctattggacaatagtaaaaccgggagacatacttttgattaacagcacagggaatctaattgctcctcggggttacttcaaaatacgaagtgggaaaagctcaataatgagatcagatgcacccattggcaaatgcaattccgaatgcatcactccaaatggaagcattcccaatgacaaaccatttcaaaatgtaaacaggatcacatatggggcctgtcccagatatgttaagcaaaacactttgaaattggcaacagggatgcgaaatgtaccagagaaacaaactagaggcatatttggcgcaatcgcgggcttcatagaaaatggttgggagggaatggtggacggttggtacggtttcaggcatcaaaattctgagggcacagggcaagcagcagatctcaaaagcactcaagcagcaatcaaccaaatcaatgggaaactgaatagattaatcgggaaaacaaacgagaaattccatcagattgaaaaagaattctcagaagtagaagggagaattcaggacctcgagaaatatgttgaggacactaaaatagatctctggtcatacaacgcggagcttcttgttgccctggagaaccaacatacaattgatctaactgactcagaaatgaacaaactgtttgaaagaacaaagaagcaactgagggaaaatgctgaggatatgggcaatggttgtttcaaaatataccacaaatgtgacaatgcctgcatagggtcaatcagaaatggaacttatgaccatgatgtgtacagagatgaagcattaaacaaccggttccagatcaaaggtgttgagctgaagtcaggatacaaagattggatcctatggatttcctttgccatatcatgttttttgctttgtgttgctttgttggggttcatcatgtgggcctgccaaaaaggcaacattaggtgcaacatttgcatttga

SEQ ID NO: 30539 - RNA, 1701 nt, synthetic construct
  misc_feature 1..1701: note = hemagglutinin__InfluenzaA__AAX11555
  source 1..1701: mol_type = other RNA
atgaagactatcattgctttgagctacattctatgtctggttttcgctcaaaaacttcccggaaatgacaacagcacggcaacgctgtgccttgggcaccatgcagtaccaaacggaacgatagtgaaaacaatcacgaatgaccaaattgaagttactaatgctactgagctggttcagagttcctcaacaggtggaatatgcgacagtcctcatcagatccttgatggagaaaactgcacactaatagatgctctattgggagaccctcagtgtgatggcttccaaaataagaaatgggacctttttgttgaacgcagcaaagcctacagcaactgttacccttatgatgtgccggattatgcctcccttaggtcactagttgcctcatccggcacactggagtttaacaatgaaagcttcaattggactggagtcactcagaatggaacaagctctgcttgcgaaaggagatctaataaaagtttctttagtagattgaattggttgacccacttaaaatacaaatacccagcattgaacgtgactatgccaaacaatgaaaaatttgacaaattgtacatttggggggttcaccacccgggtacggacagtgaccaaatcagcctatatgctcaagcatcaggaagaatcacagtctctaccaaaagaagccaacaaactgtaatcccgaatatcggatctagacccagggtaagggatgtctccagccgaataagcatctattggacaatagtaaaaccaggagacatacttttgattaacagcacagggaatctaattgctcctcggggttacttcaaaatacgaagtgggaaaagctcaataatgagatcagatgcacccattggcaaatgcaattctgaatgcatcactccaaatggaagcattcccaatgacaaaccatttcaaaatgtaaacaggattacatatggggcctgtcccagatatgttaagcaaaacactctgaaattggcaacagggatgcgaaatgtaccagagaaacaaactagaggcatatttggcgcaatcgcgggtttcatagaaaatggttgggagggaatggtggacggttggtacggtttcaggcatcaaaattctgagggcacaggacaagcagcagatctcaaaagcactcaagcagcaatcaaccaaatcaatgggaaactgaataggttaatcgggaaaacaaacgagaaattccatcagattgaaaaagaattctcagaagtagaagggagaattcaggacctcgagaaatatgttgaggacactaaaatagatctctggtcatacaacgcggagcttcttgttgccctggagaaccaacatacaattgatctaactgactcagaaatgaacaaactgtttgaaagaacaaagaagcaactgagggaaaatgctgaggatatgggcaatggttgtttcaaaatataccacaaatgtgacaatgcctgcatagggtcaatcagaaatggaacttatgaccatgatgtgtacagagatgaagcattaaacaaccggttccagatcaaaggtgttgagctgaagtcaggatacaaagattggatcctatggatttcctttgccatatcatgttttttgctttgtgttgctttgttggggttcatcatgtgggcctgccaaaaaggcaacattaggtgcgacatttgcatttga

SEQ ID NO: 30540 - RNA, 1701 nt, synthetic construct
  misc_feature 1..1701: note = hemagglutinin__InfluenzaA__AAX11565
  source 1..1701: mol_type = other RNA
atgaagactatcattgctttgagctacattctatgtctggttttcgctcaaaaacttcccggaaatgacaacagcacggcaacgctgtgccttgggcaccatgcagtaccaaacggaacgatagtgaaaacaatcacgaatgaccaaattgaagttactaatgctactgagctggtacagagttcctcaacaggtggaatatgcgacagtcctcatcagatccttgatggagaaaactgcacactaatagatgctctattgggagaccctcagtgtgatggcttccaaaataagaaatgggacctttttgttgaacgcagcaaagcctacagcaactgttacccttatgatgtgccggattatgcctcccttaggtcactagttgcctcatccggcacactggagtttaacaatgaaagcttcgattggactggagtcactcagaatggaacaagctctgcttgcaaaaggagatctaataaaagtttctttagtagattgaattggttgacccacttaaaatacaaatacccagcattgaacgtgactatgccaaacaatgaaaaatttgacaaattgtacatttggggggttcaccacccgggtacggacagtgaccaaatcagcctatatgctcaagcatcaggaagaatcacagtctctaccaaaagaagccaacaaactgtaatcccgaatatcggatctagacccagggtaagggatgtctccagccgaataagcatctattggacaatagtaaaaccgggagacatacttttgattaacagcacagggaatctaattgctcctcggggttacttcaaaatacgaagtgggaaaagctcaataatgagatcagatgcacccattggcaaatgcaattctgaatgcatcactccaaatggaagcattcccaatgacaaaccatttcaaaatgtaaacaggatcacatatggggcctgtcccagatatgttaagcaaaacactctgaaattggcaacagggatgcgaaatgtaccagagaaacaaactagaggcatatttggcgcaatcgcgggtttcatagaaaatggttgggagggaatggtggacggttggtacggtttcaggcatcaaaattctgagggcacaggacaagcagcagatctcaaaagcactcaagcagcaatcaaccaaatcaatgggaaactgaataggttaatcgggaaaacaaacgagaaattccatcagattgaaaaagaattctcagaagtagaagggagaattcaggacctcgagaaatatgttgaggacactaaaatagatctctggtcatacaacgcggagcttcttgttgccctggagaaccaacatacaattgatctaactgactcagaaatgaacaaactgtttgaaagaacaaagaagcaactgagggaaaatgctgaggatatgggcaatggttgtttcaaaatataccacaaatgtgacaatgcctgcatagggtcaatcagaaatggaacttatgaccatgatgtgtacagagatgaagcattaaacaaccggttccagatcaaaggtgttgagctgaagtcaggatacaaagattggatcctatggatttcctttgccatatcatgttttttgctttgtgttgctttgttggggttcatcatgtgggcctgccaaaaaggcaacattaggtgcaacatttgcatttga

SEQ ID NO: 30541 - RNA, 1701 nt, synthetic construct
  misc_feature 1..1701: note = hemagglutinin__InfluenzaA__AAX11585
  source 1..1701: mol_type = other RNA
atgaagactatcattgctttgagctacattctatgtctggttttcgctcaaaaacttcccggaaatgacaacagcacggcaacgctgtgccttgggcaccatgcagtaccaaacggaacgatagtgaaaacaatcacgaatgaccaaattgaagttactaatgctactgagctggttcagatttcctcaacaggtggaatatgcgacagtcctcatcagatccttgatggagaaaactgcacactaatagatgctctattgggagaccctcagtgtgatggcttccaaaataagaaatgggacctttttgttgaacgcagcaaagcctacagcaactgttacccttatgatgtgccggattatgcctcccttaggtcactagttgcctcatccggcacactggagtttaacaatgaaagcttcgattggactggagtcactcagaatggaacaagctctgcttgcaaaaggagatctaataaaagtttctttagtagattgaattggttgacccacttaaaatacaaatacccagcattgaacgtgactatgccaaacaatgaaaaatttgacaaattgtacatttggggggttcaccacccgggtacggacaatgaccaaatcagcctatatgctcaagcatcaggaagaatcacagtctctaccaaaagaagccaacaaactgtaatcccgaatatcggatctagacccagggtaagggatgtctccagccaaataagcatctattggacaatagtaaaaccgggagacatacttttgattaacagcacagggaatctaattgctcctcggggttacttcaaaatacgaagtgggaaaagctcaataatgagatcagatgcacccattggcaaatgcaattctgaatgcatcactccaaatggaagcattcccaatgacaaaccatttcaaaatgtaaacaggatcacatatggggcctgtcccagatatgttaagcaaaacactctgaaattggcaacagggatgcgaaatgtaccagagaaacaaactagaggcatatttggcgcaatcgcgggtttcatagaaaatggttgggagggaatggtggacggttggtacggtttcaggcatcaaaattctgagggcacaggacaagcagcagatctcaaaagcactcaagcagcaatcaaccaaatcaatgggaaactgaataggttaatcgggaaaacaaacgagaaattccatcagattgaaaaagaattctcggaagtagaaggaagaattcaggacctcgagaagtatgttgaggacactaaaatagatctctggtcatacaacgcggagcttcttgttgccctggagaaccaacatacaattgatctaactgactcagaaatgaacaaactgtttgaaagaacaaagaagcaactgagggaaaatgctgaggatatgggcaatggttgtttcaaaatataccacaaatgtgacaatgcctgcatagggtcaatcagaaatggaacttatgaccatgatgtgtacagagatgaagcattaaacaaccggttccagatcaaaggtgttgagctgaagtcaggatacaaagattggatcctatggatttcctttgccatatcatgttttttgctttgtgttgctttgttggggttcatcatgtgggcctgccaaaaaggcaacattaggtgcaacatttgcatttga

SEQ ID NO: 30542 - RNA, 1701 nt, synthetic construct; identical to SEQ ID NO: 30536
  misc_feature 1..1701: note = hemagglutinin__InfluenzaA__AAX11605
  source 1..1701: mol_type = other RNA

SEQ ID NO: 30543 - RNA, 1701 nt, synthetic construct
  misc_feature 1..1701: note = hemagglutinin__InfluenzaA__AAX11615
  source 1..1701: mol_type = other RNA
atgaagactatcattgctttgagctacattctatgtctggttttcgctcaaaaacttcccggaaatgacaacagcacggcaacgctgtgccttgggcaccatgcagtaccaaacggaacgatagtgaaaacaatcacgaatgaccaaattgaagttactaatgctactgagctggtacagagttcctcaacaggtggaatatgcgacagtcctcatcagatccttgatggagaaaactgcacactaatagatgctctattgggagaccctcagtgtgatggcttccaaaataagaaatgggacctttttgttgaacgcagcaaagcctacagcaactgttacccttatgatgtgccggattatgcctcccttaggtcactagttgcctcatccggcacactggagtttaacaatgaaagcttcgattggactggagtcactcagaatggaacaagctctgcttgcaaaaggagatctaataaaagtttctttagtagattgaattggttgacccacttaaaatacaaatacccagcattgaacgtgactatgccaaacaatgaaaaatttgacaaattgtacatttggggggttcaccacccgggtacggacagtgaccaaatcagcctatatgctcaagcatcaggaagaatcacagtctctaccaaaagaagccaacaaactgtgatcccgaatatcggatctagacccagggtaagggatgtctccagccgaataagcatctattggacaatagtaaaaccgggagacatacttttgattaacagcacagggaatctaattgctcctcggggttacttcaaaatacgaagtgggaaaagctcaataatgagatcagatgcacccattggcaaatgcaattccgaatgcatcactccaaatggaagcattcccaatgacaaaccatttcaaaatgtaaacaggatcacatatggggcctgtcccagatatgttaagcaaaacactttgaaattggcaacagggatgcgaaatgtaccagagaaacaaactagaggcatatttggcgcaatcgcgggcttcatagaaaatggttgggagggaatggtggacggttggtacggtttcaggcatcaaaattctgagggcacaggacaagcagcagatctcaaaagcactcaagcagcaatcaaccaaatcaatgggaaactgaataggttaatcgggaaaacaaacgagaaattccatcagattgaaaaagaattctcagaagtagaagggagaattcaggacctcgagaaatatgttgaggacactaaaatagatctctggtcatacaacgcggagcttcttgttgccctggagaaccaacatacaattgatctaactgactcagaaatgaacaaactgtttgaaagaactaagaagcaactgagggaaaatgctgaggatatgggcaatggttgtttcaaaatataccacaaatgtgacaatgcctgcatagggtcaatcagaaatggaacttatgaccatgatgtgtacagagatgaagcattaaacaaccggttccagatcaaaggtgttgagctgaagtcaggatacaaagattggatcctatggatttcctttgccatatcatgttttttgctttgtgttgctttgttggggttcatcatgtgggcctgccaaaaaggcaacattaggtgcaacatttgcatttga

SEQ ID NO: 30544 - RNA, 1701 nt, synthetic construct
  misc_feature 1..1701: note = hemagglutinin__InfluenzaA__AAX11625
  source 1..1701: mol_type = other RNA
atgaagactatcattgctttgagctacattttatgcctggttttcgctcaaaaacttcccggaaatgacaacagcacggcaacgctgtgcctggggcaccatgcagtgccaaacggaacgctagtgaaaacaatcacgaatgaccaaattgaagtaactaatgctactgagctggttcagagttcctcaacaagtagaatatgcgacagtcctcaccaaatccttgatggagaaaactgcacactaatagatgctctattgggagaccctcattgtgatggcttccaaaataaggaatgggacctttttgttgaacgcagcaaagcctacagcaactgttacccttatgatgtgccggattatgtctcccttaggtcactagttgcctcatcaggcacgctggagtttaacaatgaaagcttcaattggactggagtcgctcagaatggaacaagctctgcttgcaaaaggagatctgataaaagtttctttagtagattgaattggttgcaccaattaaaatacaaatatccagcactgaacgtgactatgccaaacaatgaaaaatttgacaaattgtacatttggggggttcaccacccgggtacagacagtgaccaaatcagcctatatgctcaagcatcagggagagtcacagtctctaccaaaagaagccaacaaactgtaatcccgaatatcggatctggaccctgggtaaggggtgtctccagcagaataagcatctattggacaatagtaaaaccgggagacatacttttgattaacagcacagggaatctaattgctcctcggggttacttcaaaatacgaagtgggaaaagctcaataatgaggtcagatgcacccattggcaaatgcaattctgaatgcatcactccaaatggaagcattcccaatgacaaaccatttcaaaatgtaaacaggatcacatatggggcctgtcccagatatgttaagcaaaacactctgaaattggcaacagggatgcggaatgtaccagagaaacaagctagaggcatattcggtgcaatcgcgggcttcatagaaaatggttgggagggaatgatggacggttggtacggtttcaggcatcaaaattctgagggcacagggcaagcagcagatcttaaaagcactcaagcagcaatcaaccaaatcaacgggaaactgaataggttaatcgagaaaacgaacgagaaattccatcaaattgaaaaagaattctcagaagtagaagggagaattcaggacctcgagaaatatgttgaggacactaaaatagatctctggtcgtacaatgcggagcttcttgttgccctggagaaccaacatacaattgatctaactgactcagaaatgaacaaactgtttgaaagaacaaagaagcaactgagggaaaatgctgaggatatgggcaatggttgtttcaaaatataccacaaatgtgacaatgcctgcatagggtcaatcagaaatggaacttatgaccatgatgtatacagagacgaagcattgaacaaccggttccagatcaaaggtgttgagctgaagtcaggatacaaagattggatcctatggatttcctttgccatatcatgttttttgctttgtattgttttgctggggttcatcatgtgggcctgccaaaaaggcaacattaggtgcaacatttgcatttga

SEQ ID NO: 30545 - RNA, 1701 nt, synthetic construct
  misc_feature 1..1701: note = hemagglutinin__InfluenzaA__AAX12731
  source 1..1701: mol_type = other RNA
atgaagactatcattgctttgagctacattctatgtctggttttcgctcaaaaacttcccggaaatgacaacagcacggcaacgctgtgccttgggcaccatgcagtaccaaacggaacgatagtgaaaacaatcacgaatgaccaaattgaagttactaatgctactgagctggttcagagttcctcaacaggtggaatatgcgacagtcctcatcagatccttgatggagaaaactgcacactaatagatgctctattgggagatcctcagtgtgatggcttccaaaataagaaatgggacctttttgttgaacgcagcaaagcctacagcaactgttacccttatgatgtgccggattatgcctcccttaggtcactagttgcctcatccggcacactggagtttaacaatgaaagcttcgattggactggagtcactcagaatggaacaagctctgcttgcaaaaggagatctaataaaagtttctttagtagattgaattggttgacccacttaaaatacaaatacccagcattgaacgtgactatgccaaacaatgaaaaatttgacaaattgtacatttggggggttcaccacccgggtacggacagtgaccaaatcagcctatatgctcaagcatcaggaagaatcacagtctctaccaaaagaagccaacaaactgtaatcccgaatatcggatctagacccagggtaagggatgtctccagccgaataagcatctattggacaatagtaaaaccgggagacatacttttgattaacagcacagggaatctaattgctcctcggggttacttcaaaatacgaagtgggaaaagctcaataatgagatcagatgcacccattggcaaatgcaattctgaatgcatcactccaaatggaagcattcccaatgacaaaccatttcaaaatgtaaacaggatcacatatggggcctgtcccagatatgttaagcaaaacactctgaaattggcaacagggatgcgaaatgtaccagagaaacaaactagaggcatatttggcgcaatcgcgggtttcatagaaaatggttgggagggaatggtggacggttggtacggtttcaggcatcaaaattctgagggcacaggacaagcagcagatctcaaaagcactcaagcagcaatcaaccaaatcaatgggaaactgaataggttaatcgggaaaacaaacgagaaattccatcagattgaaaaagaattctcagaagtagaagggagaattcaggacctcgagaaatatgttgaggacactaaaatagatctctggtcatacaacgcggagcttcttgttgccctggagaaccaacatacaattgatctaactgactcagaaatgaacaaactgtttgaaagaacaaagaagcaactgagggaaaatgctgaggatatgggcaatggttgtttcaaaatataccacaaatgtgacaatgcctgcatagggtcaatcagaaatggaacttatgaccatgatgtgtacagagatgaagcattaaacaaccggttccagatcaaaggtgttgagctgaagtcagggtacaaagattggatcctatggatttcctttgccatatcatgttttttgctttgtgttgctttgttggggttcatcatgtgggcctgccaaaaaggcaacattaggtgcaacatttgcatttga

SEQ ID NO: 30546 - RNA, 1701 nt, synthetic construct
  misc_feature 1..1701: note = hemagglutinin__InfluenzaA__AAX12741
  source 1..1701: mol_type = other RNA
atgaagactatcattgctttgagctacattctatgtctggttttcgctcaaaaacttcccggaaatgacaacagcacggcaacgctgtgccttgggcaccatgcagtaccaaacggaacgatagtgaaaacaatcacgaatgaccaaattgaagttactaatgctactgagctggtacagagttcctcaacaggtggaatatgcgacagtcctcatcagatccttgatggagaaaactgcacactaatagatgctctattgggagaccctcagtgtgatggcttccaaaataagaaatgggacctttttgttgaacgcagcaaagcctacagcaactgttacccttatgatgtgccggattatgcctcccttaggtcactagttgcctcatccggcacactggagtttaacaatgaaagcttcgattggactggagtcactcagaatggaacaagctctgcttgcaaaaggagatctaataaaagtttctttagtagattgaattggttgacccacttaaaatacaaatacccagcattgaacgtgactatgccaaacaatgaaaaatttgacaaattgtacatttggggggttcaccacccgggtacggacagtgaccaaatcagcctatatgctcaagcatcaggaagaatcacagtctctaccaaaagaagccaacaaactgtaatcccgaatatcggatctagacccagggtaagggatgtctccagccgaataagcatctattggacaatagtaaaaccgggagacatacttttgattaacagcacagggaatctaattgctcctcggggttacttcaaaatacgaagtgggaaaagctcaataatgagatcagatgcacccattggcaaatgcaattctgaatgcatcactccaaatggaagcattcccaatgacaaaccatttcaaaatgtaaacaggatcacatatggggcctgtcccagatatgttaagcaaaacactctgaaattggcaacagggatgcgaaatgtaccagagaaacaaactagaggcatatttggcgcaatcgcgggtttcatagaaaatggttgggagggaatggtggacggttggtacggtttcaggcatcaaaattctgagggcacaggacaagcagcagatctcaaaagcactcaagcagcaatcaaccaaatcaatgggaaactgaataggttaatcgggaaaacaaacgagaaattccatcagattgaaaaagaattctcagaagtagaagggagaattcaggacctcgagaaatatgttgaggacactaaaatagatctctggtcatacaacgcggagcttcttgttgccctggagaaccaacatacaattgatctaactgactcagaaatgaacaaactgtttgaaagaacaaagaagcaactgagggaaaatgctgaggatatgggcaatggttgtttcaaaatataccacaaatgtgacaatgcctgcatagggtcaatcagaaatggaacttatgaccatgatgtgtacagagatgaagcattaaacaaccggttccagatcaaaggtgttgagctgaagtcaggatacaaagattggatcctatggatttcctttgccacatcatgttttttgctttgtgttgctttgttggggttcatcatgtgggcctgccaaaaaggcaacattaggtgcaacatttgcatttga

SEQ ID NO: 30547 - RNA, 1701 nt, synthetic construct
  misc_feature 1..1701: note = hemagglutinin__InfluenzaA__AAX12751
  source 1..1701: mol_type = other RNA
atgaagactatcattgctttgagctacattctatgtctggttttcgctcaaaaacttcccggaaatgacaacagcacggcaacgctgtgccttgggcaccatgcagtaccaaacggaacgatagtgaaaacaatcacgaatgaccaaattgaagttactaatgctactgagctggtacagagttcctcaacaggtggaatatgcgacagtcctcatcagatccttgatggagaaaactgcacactaatagatgctctattgggagaccctcagtgtgatggcttccaaaataagaaatgggacctttttgttgaacgcagcaaagcctacagcaactgttacccttatgatgtgccggattatgcctcccttaggtcactagttgcctcatccggcacactggagtttaacaatgaaagcttcgattggactggagtcactcagaatggaacaagctctgcttgcaaaaggagatctaataaaagtttctttagtagattgaattggttgacccacttaaaatacaaatacccagcattgaacgtgactatgccaaacaatgaaaaatttgacaaattgtacatttggggggttcaccacccgggtacggacagtgaccaaatcagcctatatgctcaagcatcaggaagaatcacagtctctaccaaaagaagccaacaaactgtaatcccgaatatcggatctagacccagggtaagggatgtctctagccgaataagcatctattggacaatagtaaaaccgggagacatacttttgattaacagcacagggaatctaattgctcctcggggttacttcaaaatacgaagtgggaaaagctcaataatgagatcagatgcacccattggcaaatgcaattccgaatgcatcactccaaatggaagcattcccaatgacaaaccatttcaaaatgtaaacaggatcacatatggggcctgtcccagatatgttaagcaaaacactttgaaattggcaacagggatgcgaaatgtaccagagaaacaaactagaggaatatttggcgcaatcgcgggcttcatagaaaatggttgggagggaatggtggacggttggtacggtttcaggcatcaaaattctgagggcacaggacaagcagcagatctcaaaagcactcaagcagcaatcaaccaaatcaatgggaaactgaataggttaatcgggaaaacaaacgagaaattccatcagattgaaaaagaattctcagaagtagaagggagaattcaggacctcgagaaatatgttgaggacactaaaatagatctctggtcatacaacgcggagcttcttgttgccctggagaaccaacatacaattgatctaactgactcagaaatgaacaaactgtttgaaagaacaaagaagcaactgagggaaaatgctgaggatatgggcaatggttgtttcaaaatataccacaaatgtgacaatgcctgcatagggtcaatcagaaatggaacttatgaccatgatgtgtacagagatgaagcattaaacaaccggttccagatcaaaggtgttgagctgaagtcaggatacaaagattggatcctatggatttcctttgccatatcatgttttttgctttgtgttgctttgttggggttcatcatgtgggcctgccaaaaaggcaacattaggtgcaacatttgcatttga

SEQ ID NO: 30548 - RNA, 1701 nt, synthetic construct
  misc_feature 1..1701: note = hemagglutinin__InfluenzaA__AAX12761
  source 1..1701: mol_type = other RNA
atgaagactatcattgctttgagctacattttatgtctggttttcgctcaaaaacttcccggaaatgacaacagcacggcaacgctgtgcctggggcaccatgcagtgccaaacggaacgctagtgaaaacaatcacgaatgaccaaattgaagtgactaatgctactgagctggttcagagttcctcaacaggtagaatatgcgacagtcctcaccaaatccttgatggagaaaactgcacactaatagatgctctattgggagaccctcattgtgatggcttccaaaataaggaatgggacctttttgttgaacgcagcaaagcctacagcaactgttacccttatgatgtgccggattatgtctcccttaggtcactagttgcctcatcaggcacgctggagtttaacaatgaaagcttcaattggactggagtcgctcagaatggaacaagctctgcttgcaaaaggagatctgataaaagtttctttagtagattgaattggttgcaccaattaaaatacaaatatccagcactgaacgtgactatgccaaacaatgaaaaatttgacaaattgtacatttggggggttcaccacccgggtacagacagtgaccaaatcagcctatatgctcaagcatcagggagagtcacagtctctaccaaaagaagccaacaaactgtaatcccgaatatcggatctagaccctgggtaaggggtgtctccagcagaataagcatctattggacaatagtaaaaccgggagacatacttttgattaacagcacagggaatctaattgctcctcggggttacttcaaaatacgaagtgggaaaagctcaataatgaggtcagatgcacccattggcaaatgcaattctgaatgcatcactccaaatggaagcattcccaatgacaaaccatttcaaaatgtaaacaggatcacatatgggccctgtcccagatatgttaagcaaaacactctgaaattggcaacagggatgcggaatgtgccagagaaacaaactagaggcatattcggtgcaatcgcgggcttcatagaaaatggttgggagggaatgatggacggttggtacggtttcaggcatcaaaattctgagggcacagggcaagcagcagatcttaaaagcactcaagcagcaatcaaccaaatcaacgggaaactgaataggttaatcgagaaaacgaacgagaaattccatcaaattgaaaaagaattctcagaagtagaagggagaattcaggacctcgagaaatatgttgaggacactaaaatagatctctggtcgtacaatgcggagcttcttgttgccctggagaaccaacatacaattgatctaactgactcagaaatgaacaaactgtttgaaagaacaaagaagcaactaagggaaaatgctgaggatatgggcaatggttgtttcaaaatataccacaaatgtgacaatgtctgcatagggtcaatcagaaatggaacttatgaccatgatgtatacagagacgaagcattgaacaaccggttccagatcaaaggtgttgagctgaagtcaggatacaaagattggatcctatggatttcctttgccatatcatgttttttgctttgtattgttttgctggggttcatcatgtgggcctgccaaaaaggcaacattaggtgcaacatttgcatttga

SEQ ID NO: 30549 - RNA, 1701 nt, synthetic construct
  misc_feature 1..1701: note = hemagglutinin__InfluenzaA__AAX12791
  source 1..1701: mol_type = other RNA
atgaagactatcattgctttgagctacattttatgtctggttttcgctcaaaaacttcccggaaatgacaacagcatggcaacgctgtgcctggggcaccatgcagtgccaaacggaacgctagtgaaaacaatcacgaatgaccaaattgaagtgactaatgctactgagctggttcagagttcctcaacaggtagaatatgcgacagtcctcaccaaatccttgatggagaaaactgcacactaatagatgctctattgggagaccctcattgtgatggcttccaaaataaggaatgggacctttttgttgaacgcagcaaagcctacagcaactgttacccttatgatgtgccggattatgtctcccttaggtcactagttgcctcatcaggcacgctggagtttaacaatgaaagcttcaattggactggagtcgctcagaatggaacaagctctgcttgcaaaaggagatctgataaaagtttctttagtagattgaattggttgcaccaattaaaatacaaatatccagcactgaacgtgactatgccaaacaatgaaaaatttgacaaattgtacatttggggggttcaccacccgggtacagacagtgaccaaatcagcctatatgctcaagcatcagggagagtcacagtctctaccaaaagaagccaacaaactgtaatcccgaatatcggatctggaccctgggtaaggggtgtctccagcagaataagcatctattggacaatagtaaaaccgggagacatacttttgattaacagcacagggaatctaattgctcctcggggttacttcaaaatacgaagtgggaaaagctcaataatgaggtcagatgcacccattgacaaatgcaattctgaatgcatcactccaaatggaagcattcccaatgacaaaccatttcaaaatgtaaacaggatcacatatgggctctgtcccagatatgttaagcaaaacactctgaaattggcaacagggatgcggaatgtgccagagaaacaaactagaggcatattcggtgcaatcgcgggcttcatagaaaatggttgggagggaatgatggacggttggtacggtttcaggcatcaaaattctgagggcacagggcaagcagcagatcttaaaagcactcaagcagcaatcaaccaaatcaacgggaaactgaataggttaatcgaaaaaacgaacgagaaattccatcaaattgaaaaagaattctcagaagtagaagggagaattcaggacctcgagaaatatgttgaggacactaaaatagatctctggtcgtacaatgcggagcttcttgttgccctggagaaccaacatacaattgatctaactgactcagaaatgaacaaactgtttgaaagaacaaagaagcaactgagggaaaatgctgaggatatgggcaatggttgtttcaaaatataccacaaatgtgacaatgcctgcatagggtcaatcagaaatggaacttatgaccatgatgtatacagagacgaagcattgaacaaccggttccagatcaaaggtgttgagctgaagtcaggatacaaagattggatcctatggatttcctttgccatatcatgttttttgctttgtattgttttgctggggttcatcatgtgggcctgccaaaaaggcaacattaggtgcaacatttgcatttga

SEQ ID NO: 30550 - RNA, 1701 nt, synthetic construct
  misc_feature 1..1701: note = hemagglutinin__InfluenzaA__AAX12801
  source 1..1701: mol_type = other RNA
atgaagactatcattgctttgagctacattttatgcctggttttcgctcaaaaatttcccggaaatgacaacagcacggcaacgctgtgcctggggcatcatgcagtgccaaacggaacgctagtgaaaacaatcacgaatgaccaaattgaagtaactaatgctactgagctggttcagagttcctcaacagatagaatatgcgacagtcctcaccaaatccttgatggagaaaactgcacactaatagatgctctattgggagaccctcattgtgatggcttccaaaataaggaatgggacctttttgttgaacgcagcaaagcctacagcaactgttacccttatgatgtgccggattatgtctcccttaggtcactagttgcctcatcaggcacgctggagtttaacaatgaaagcttcaattggactggagtcgctcagaatggaacaagctctgcttgcaaaaggagatctgataaaagtttctttagtagattgaattggttgcaccaattaaaatacaaatatccagcactgaacgtgactatgccaaacaatgaaaaatttgacaaattgtacatttggggggttcaccacccgggtacagacagtgaccaaatcagcctatatgctcaagcatcagggagagtcacagtctctaccaaaagaagccaacaaactgtaatcccgaatatcggatctagaccctgggtaaggggtgtctccagcagaataagcatctattggacaatagtaaaaccgggagacatacttttgattaacagcacagggaatctaattgctcctcggggttacttcaaaatacgaagtgggaaaagctcaataatgaggtcagatgcacccattggcaaatgcaattctgaatgcatcactccaaatggaagcattcccaatgacaaaccatttcaaaatgtaaacaggatcacatatggggcctgtcccagatatgttaagcaaaacactctgaaattggcaacagggatgcggaatgtgccagagaaacaaactagaggcatattcggtgcaatcgcgggcttcatagaaaatggttgggagggaatgatggacggttggtacggtttcaggcatcaaaattctgagggcacagggcaagcagcagatcttaaaagcactcaagcagcaatcaaccaaatcaacgggaaactgaataggttaatcgagaaaacgaacgagaaattccatcaaattgaaaaagaattctcagaagtagaagggagaattcaggacctcgagaaatatgttgaggacactaaaatagatctctggtcgtacaatgcggagcttcttgttgccctggagaaccaacatacaattgatctaactgactcagaaatgaacaaactgtttgaaagaacaaagaagcaactgagggaaaatgctgaggatatgggcaatggttgtttcaaaatataccacaaatgtgacaatgcctgcatagggtcaatcagaaatggaacttatgaccatgatgtatacagagacgaagcattgaacaaccggttccagatcaaaggtgttgagctgaagtcaggatacaaagattggatcctatggatttcctttgccatatcatgttttttgctttgtattgttttgctggggttcatcatgtgggcctgccaaaaaggcaacattaggtgcaacatttgcatttga

SEQ ID NO: 30551 - RNA, 1701 nt, synthetic construct
  misc_feature 1..1701: note = hemagglutinin__InfluenzaA__AAX12811
  source 1..1701: mol_type = other RNA
atgaagactatcattgctttgagctacattttatgcctggttttcgctcaaaaacttcccggaaatgacaacagcacggcaacgctgtgcctggggcaccatgcagtgccaaacggaacgctagtgaaaacaatcacgaatgaccaaattgaagtaactaatgctactgagctggttcagagttcctcaacaagtagaatatgcgacagtcctcaccaaatccttgatggagaaaactgcacactaatagatgctctattgggagaccctcattgtgatggcttccaaaataaggaatgggacctttttgttgaacgcagcaaagcctacagcaactgttacccttatgatgtgccggattatgtctcccttaggtcactagttgcctcatcaggcacgctggagtttaacaatgaaagcttcaattggactggagtcgctcagaatggaacaagctctgcttgcaaaaggagatctgataaaagtttctttagtagattgaattggttgcaccaattaaaatacaaatatccagcactgaacgtgactatgccaaacaatgaaaaatttgacaaattgtacatttggggggttcaccacccgggtacagacagtgaccaaatcagcctatatgctcaagcatcagggagagtcacagtctctaccaaaagaagccaacaaactgtaatcccgaatatcggatctagaccctgggtaaggggtgtctccagcagaataagcatctattggacaatagtaaaaccgggagacatacttttgattaacagcacagggaatctaattgctcctcggggttacttcaaaatacgaagtgggaaaagctcaataatgaggtcagatgcacccattggcaaatgcaattctgaatgcatcactccaaatggaagcattcccaatgacaaaccatttcaaaatgtaaacaggatcacatatggggcctgtcccagatatgttaagcaaaacactctgaaattggcaacagggatgcggaatgtaccagagaaacaaactagaggcatattcggtgcaatcgcgggcttcatagaaaatggttgggagggaatgatggacggttggtacggtttcaggcatcaaaattctgagggcacagggcaagcagcagatcttaaaagcactcaagcagcaatcaaccaaatcaacgggaaactgaataggttaatcgagaaaacgaacgagaaattccatcaaattgaaaaagaattctcagaagtagaagggagaattcaggacctcgagaaatatgttgaggacactaaaatagatctctggtcgtacaatgcggagcttcttgttgccctggagaaccaacatacaattgatctaactgactcagaaatgaacaaactgtttgaaagaacaaagaagcaactgagggaaaatgctgaggatatgggcaatggttgtttcaaaatataccacaaatgtgacaatgcctgcatagggtcaatcagaaatggaacttatgaccatgatgtatacagagacgaagcattgaacaaccggttccagatcaaaggtgttgagctgaagtcaggatacaaagattggatcctatggatttcctttgccatatcatgttttttgctttgtattgttttgctggggttcatcatgtgggcctgccaaaaaggcaacattaggtgcaacatttgcatttga

SEQ ID NO: 30552 - RNA, 1701 nt, synthetic construct
  misc_feature 1..1701: note = hemagglutinin__InfluenzaA__AAX34061
  source 1..1701: mol_type = other RNA
atgaagactatcattgctttgagctacattctatgtctggttttcgctcaaaaacttcccggaaatgacaacagcacggcaacgctgtgccttgggcaccatgcagtaccaaacggaacgatagtgaaaacaatcacgaatgaccaaattgaagttactaatgctactgagctggtacagagttcctcaacaggtgaaatatgcgacagtcctcatcagatccttgatggagaaaactgcacactaatagatgctctattgggagaccctcagtgtgatggcttccaaaataagaaatgggacctttttgttgaacgcagcaaagcctacagcaactgttacccttatgatgtgccggattatgcctcccttaggtcactagttgcctcatccggcacactagagtttaacaatgaaagcttcgattggactggagtcactcagaatggaacaagctctgcttgcaaaaggagatctaataaaagtttctttagtagattgaattggttgacccacttaaaatacaaatacccagcattgaacgtgactatgccaaacaatgaaaaatttgacaaattgtacatttggggggttcaccacccgggtacggacagtgaccaaatcagcctatatgctcaagcatcaggaagaatcacagtctctaccaaaagaagccaacaaactgtaatcccgaatatcggatctagacccagggtaagggatgtctccagccgaataagcatctattggacaatagtaaaaccgggagacatacttttgattaacagcacagggaatctaattgctcctcggggttacttcaaaatacgaagtgggaaaagctcaataatgagatcagatgcacccattggcaaatgcaattctgaatgcatcactccaaatggaagcattcccaatgacaaaccatttcaaaatgtaaacaggatcacatatggggcctgtcccagatatattaagcaaaacactctgaaattggcaacagggatgcgaaatgtaccagagaaacaaactagaggcatatttggcgcaatcgcgggtttcatagaaaatggttgggagggaatggtggacggttggtacggtttcaggcatcaaaattctgagggcacaggacaagcagcagatctcaaaagcactcaagcagcaatcaaccaaatcaatgggaaactgaataggttaatcgggaaaacaaacgagaaattccatcagattgaaaaagaattctcagaagtagaagggagaattcaggacctcgagaaatatgttgaggacactaaaatagatctctggtcatacaacgcggagcttcttgttgccctggagaaccaacatacaattgatctaactgactcagaaatgaacaaactgtttgaaagaacaaagaagcaactgagggaaaatgctgaggatatgggcaatggttgtttcaaaatataccacaaatgtgacaatgcctgcatagggtcaatcagaaatggaacttatgaccatgatgtgtacagagatgaagcattaaacaaccggttccagatcaaaggtgttgagctgaagtcaggatacaaagattggatcctatggatttcctttgccatatcatgttttttgctttgtgttgctttgttggggttcatcatgtgggcctgccaaaaaggcaacattaggtgcaacatttgcatttga

SEQ ID NO: 30553 - RNA, 1701 nt, synthetic construct
  misc_feature 1..1701: note = hemagglutinin__InfluenzaA__AAX35821
  source 1..1701: mol_type = other RNA
atgaagactatcattgctttgagctacattctatgtctggttttcgctcaaaaacttcccggaaatgacaacagcacggcaacgctgtgccttgggcaccatgcagtaccaaacggaacgatagtgaaaacaatcacgaatgaccaaattgaagttactaatgctactgagctggttcagagttcctcaacaggtggaatatgcgacagtcctcatcagatccttgatggagaaaactgcacactaatagatgctctattgggagaccctcagtgtgatggcttccaaaataagaaatgggacctttttgttgaacgcagcaaagcctacagcaactgttacccttatgatgtgccggattatgcctcccttaggtcactagttgcctcatccggcacactggagtttaacaatgaaagcttcaactggactggagtcactcagaatggaacaagctctgcttgcaaaaggaaatctaataaaagtttctttagtagattgaattggttgacccacttaaaatacaaatacccagcattgaacgtgactatgccaaacaatgaaaaatttgacaaattgtacatttggggggttcaccacccgggtacggacaatgaccaaatcagcctatatgctcaagcatcaggaagaatcacagtctctaccaaaagaagccaacaaactgtaatcccgaatatcggatctagacccagggtaagggacgtctccagcagaataagcatctattggacaatagtaaaaccgggagacatacttttgattaacagcacagggaatctaattgctcctcggggttacttcaaaatacgaagtgggaaaagctcaataatgagatcagatgcacccattggcaaatgcaattctgaatgcatcactccaaatggaagcattcccaatgacaaaccatttcaaaatgtaaacaggatcacatatggggcctgtcccagatatgttaagcaaaacactctgaaattggcaacagggatgcgaaatgtaccagagagacaaactagaggcatatttggcgcaatcgcgggtttcatagaaaatggttgggagggaatggtggacggttggtacggtttcaggcatcaaaattctgagggcacaggacaagcagcagatctcaaaagcactcaagcagcaatcaaccaaatcaatgggaaactgaataggttaatcgggaaaacaaacgagaaattccatcagattgaaaaagaattctcagaagtagaggggagaattcaggacctcgagaaatatgttgaggacactaaaatagatctctggtcatacaacgcggagcttcttgttgccctggagaaccaacatacaattgatctaactgactcagaaatgaacaaactgtttgaaagaacaaagaagcaactgagggaaaatgctgaggatatgggcaatggttgtttcaaaatataccacaaatgtgacaatgcctgcatagggtcaatcagaaatggaacttatgaccatgatgtatacagagatgaagcattaaacaaccggttccagatcaaaggtgttgagctgaagtcaggatacaaagattggatcctatggatttcctttgccatatcatgttttttgctttgtgttgctttgttggggttcatcatgtgggcctgccaaaaaggcaacattaggtgcaacatttgcatttga

SEQ ID NO: 30554 - RNA, 1701 nt, synthetic construct; identical to SEQ ID NO: 30535
  misc_feature 1..1701: note = hemagglutinin__InfluenzaA__AAX35831
  source 1..1701: mol_type = other RNA

SEQ ID NO: 30555 - RNA, 1701 nt, synthetic construct
  misc_feature 1..1701: note = hemagglutinin__InfluenzaA__AAX35851
  source 1..1701: mol_type = other RNA
atgaagactatcattgctttgagctacattttatgtctggttttcgctcaaaaacttcccggaaatgacaacagcacggcaacgctgtgcctggggcaccatgcagtgccaaacggaacgctagtgaaaacaatcacgaatgaccaaattgaagtgactaatgctactgagctggttcagagttcctcaacaggtagaatatgcgacagtcctcaccaaatccttgatggagaaaactgcacactaatagatgctctattgggagaccctcattgtgatggcttccaaaataaggaatgggacctttttgttgaacgcagcaaagcctacagcaactgttacccttatgatgtgccggattatgtctcccttaggtcactagttgcctcatcaggcacgctggagtttaacaatgaaagcttcaattggactggagtcgctcagaatggaacaagctctgcttgcaaaaggagatctgataaaagtttctttagtagattgaattggttgcaccaattaaaatacaaatatccagcactgaacgtgactatgccaaacaatgaaaaatttgacaaattgtacatttggggggttcaccacccgggtacagacagtgaccaaatcagcttatatgctcaagcatcagggagagtcacagtctctaccaaaagaagccaacaaactgtaatcccgaatatcggatctagaccctgggtaaggggtgtctccagcagaataagcatctattggacaatagtaaaaccgggagacatacttttgattaacagcacagggaatctaattgctcctcggggttacttcaaaatacgaagtgggaaaagctcaataatgaggtcagatgcacccattggcaaatgcaattctgaatgcatcactccaaatggaagcattcccaatgacaaaccatttcaaaatgtaaacaggatcacatatgggccctgtcccagatatgttaagcaaaacactctgaaattggcaacagggatgcggaatgtgccagagaaacaaactagaggcatattcggtgcaatcgcgggcttcatagaaaatggttgggagggaatgatggacggttggtacggtttcaggcatcaaaattctgagggcacagggcaagcagcagatcttaaaagcactcaagcagcaatcaaccaaatcaacgggaaactgaataggttaatcgagaaaacgaacgagaaattccatcaaattgaaaaagaattctcagaagtagaagggagaattcaggacctcgagaaatatgttgaggacactaaaatagatctctggtcgtacaatgcggagcttcttgttgccctggagaaccaacatacaattgatctaactgactcagaaatgaacaaactgtttgaaagaacaaagaagcaactgagggaaaatgctgaggatatgggcaatggttgtttcaaaatataccacaaatgtgacaatgcctgcatagggtcaatcagaaatggaacttatgaccatgatgtatacagagacgaagcattgaacaaccggttccagatcaaaggtgttgagctgaagtcaggatacaaagattggatcctatggatttcctttgccatatcatgttttttgctttgtattgttttgctggggttcatcatgtgggcctgccaaaaaggcaacattaggtgcaacatttgcatttga

SEQ ID NO: 30556 - RNA, 1701 nt, synthetic construct
  misc_feature 1..1701: note = hemagglutinin__InfluenzaA__AAX35861
  source 1..1701: mol_type = other RNA
atgaagactatcattgctttgagctacattttatgcctggttttcgctcaaaaacttcccggaaatgacaacagcacggcaacgctgtgcctggggcaccatgcagtgccaaacggaacgctagtgaaaacaatcacgaatgaccaaattgaagtaactaatgctactgagctggttcagagttcctcaacaagtagaatatgcgacagtcctcaccaaatccttgatggagaaaactgcacactaatagatgctctattgggagaccctcattgtgatggcttccaaaataaggaatgggacctttttgttgaacgcagcaaagcctacagcaactgttacccttatgatgtgccggattatgtctcccttaggtcactagttgcctcatcaggcacgctggaatttaacaatgaaagcttcaattggactggagtcgctcagaatggaacaagctctgcttgcaaaaggagatctgataaaagtttctttagtagattgaattggttgcaccaattaaaatacaaatatccagcactgaacgtgactatgccaaacaatgaaaaatttgacaaattgtacatttggggggttcaccacccgggtacagacagtgaccaaatcagcctatatgctcaagcatcagggagaatcacagtctctaccaaaagaagccaacaaactgtaatcccgaatatcggatctggaccctgggtaaggggtgtctccagcagaataagcatctattggacaatagtaaaaccgggagacatacttttgattaacagcacagggaatctaattgctcctcggggttacttcaaaatacgaagtgggaaaagctcaataatgaggtcagatgcacccattggcaaatgcaattctgaatgcatcactccaaatggaagcattcccaatgacaaaccatttcaaaatgtaaacaggatcacatatggggcctgtcccagatatgttaagcaaaacactctgaaattggcaacagggatgcggaatgtaccagagaaacaaactagaggcatattcggtgcaatcgcgggcttcatagaaaatggttgggagggaatgatggacggttggtacggtttcaggcatcaaaattctgagggcacagggcaagcagcagatcttaaaagcactcaagcagcaatcaaccaaatcaacgggaaactgaataggttaatcgagaaaacgaacgagaaattccatcaaattgaaaaagaattctcagaagtagaagggagaattcaggacctcgagaaatatgttgaggacactaaaatagatctctggtcgtacaatgcggagcttcttgttgccctggagaaccaacatacaattgatctaactgactcagaaatgaacaaactgtttgaaagaacaaagaagcaactgagggaaaatgctgaggatatgggcaatggttgtttcaaaatataccacaaatgtgacaatgcctgcatagggtcaatcagaaatggaacttatgaccatgatgtatacagagacgaagcattgaacaaccggttccagatcaaaggtgttgagctgaagtcaggatacaaagattggatcctatggatttcctttgccatatcatgttttttgctttgtattgttttgctggggttcatcatgtgggcctgccaaaaaggcaacattaggtgcaacatttgcatttga

SEQ ID NO: 30557 - RNA, 1701 nt, synthetic construct
  misc_feature 1..1701: note = hemagglutinin__InfluenzaA__AAX35871
  source 1..1701: mol_type = other RNA
atgaagactatcattgctctgagctacattttatgcctggttttcgctcaaaaacttcccggaaatgacaacagcacggcaacgctgtgcctggggcaccatgcagtgccaaacggaacgctagtgaaaacaatcacgaatgaccaaattgaagtaactaatgctactgagctggttcagagttcctcagcaagtagaatatgcgacagtcctcaccaaatccttgatggagaaaactgcacactaatagatgctctattgggagaccctcattgtgatggcttccaaaataaggaatgggacctttttgttgaacgcagcaaagcctacagcaactgttacccttatgatgtgccggattatgtctcccttaggtcactagttgcctcatcaggcacgctggagtttaacaatgaaagcttcaattggactggagtcgctcagaatggaacaagctttgcttgcaaaaggagatctgataaaagtttctttagtagattgaattggttgcaccaattaaaatacaaatatccagcactgaacgtgactatgccaaacaatgaaaaatttgacaaattgtacatttggggggttcaccacccgggtacagacagtgaccaaatcagcctatatgctcaagcatcagggagagtcacagtctctaccaaaagaagccaacaaactgtaatcccgaatatcggatctggaccctgggtaaggggtgtctccagcagaataagcatctattggacaatagtaaaaccgggagacatacttttgattaacagcacagggaatctaattgctcctcggggttacttcaaaatacgaagtgggaaaagctcaataatgaggtcagatgcacccattggcaaatgcaattctgaatgcatcactccaaatggaagcattcccaatgacaaaccatttcaaaatgtaaacaggatcacatatggggcctgtcccagatatgttaagcaaaacactctgaaattggcaacagggatgcggaatgtaccagagaaacaaactagaggcatattcggtgcaatcgcgggcttcatagaaaatggttgggagggaatgatggacggttggtacggtttcaggcatcaaaattctgagggcacagggcaagcagcagatcttaaaagcactcaagcagcaatcaaccaaatcaacgggaaactgaataggttaatcgagaaaacgaacgagaaattccatcaaattgaaaaagaattctcagaagtagaagggagaattcaggacctcgagaaatatgttgaggacactaaaatagatctctggtcgtacaatgcggagcttcttgttgccctggagaaccaacatacaattgatctaactgactcagaaatgaacaaactgtttgaaagaacaaagaagcaactgagggaaaatgctgaggatatgggcaatggttgtttcaaaatataccacaaatgtgacaatgcctgcatagggtcaatcagaaatggaacttatgaccatgatgtatacagagacgaagcattgaacaaccggttccagatcaaaggtgttgagctgaagtcaggatacaaagattggatcctatggatttcctttgccatatcatgttttttgctttgtattgttttgctggggttcatcatgtgggcctgccaaaaaggcaacattaggtgcaacatttgcatttga

SEQ ID NO: 30558 - RNA, 1701 nt, synthetic construct
  misc_feature 1..1701: note = hemagglutinin__InfluenzaA__AAX38237
  source 1..1701: mol_type = other RNA
atgaagactatcattgctttgagctacattttatgcctggttttcgctcaaaaacttcccggaaatgacaacagcacggcgacgctgtgcctggggcaccatgcagtgccaaacggaacgctagtgaaaacaatcacgaatgaccaaattgaagtaactaatgctactgagctggttcagagttcctcaacaagtagaatatgcgacagtcctcaccaaatccttgatggagaaaactgcacactaatagatgctctattgggagaccctcattgtgatggcttccaaaataaggaatgggacctttttgttgaacgcagcaaagcctacagcaactgttacccttatgatgtgccggattatgtctcccttaggtcactagttgcctcatcaggcacgctggagtttaacaatgaaagcttcaattggactggagtcgctcagaatggaacaagctctgcttgcaaaaggagatctgataaaagtttctttagtagattgaattggttgcaccaattaaaatacaaatatccagcactgaacgtgactatgccaaacaatgaaaaatttgacaaattgtacatttggggggttcaccacccgggtacagacagtgaccaaatcagcctatatgctcaagcatcagggagagtcacagtctctaccaaaagaagccaacaaactgtaatcccgaatatcggatctagaccctgggtaaggggtgtctccagcagaataagcatctattggacaatagtaaaaccgggagacatacttttgattaacagcacagggaatctaattgctcctcggggttacttcaaaatacgaagtgggaaaagctcaataatgaggtcagatgcacccattggcaaatgcaattctgaatgcatcactccaaatggaagcattcccaatgacaaaccatttcaaaatgtaaacaggatcacatatggggcctgtcccagatatgttaagcaaaacactctgaaattggcaacagggatgcggaatgtaccagagaaacaaactagaggcatattcggtgcaatcgcgggcttcatagaaaatggttgggaggggatgatggacggttggtacggtttcaggcatcaaaattctgagggcacagggcaagcagcagatcttaaaagcactcaagcagcaatcaaccaaatcaacgggaaactgaataggttaatcgagaaaacgaacgagaaattccatcaaattgaaaaagaattctcagaagtagaagggagaattcaggacctcgagaaatatgttgaggacactaaaatagatctctggtcgtacaatgcggagcttcttgttgccctggagaaccaacatacaattgatctaactgactcagaaatgaacaaactgtttgaaagaacaaagaagcaactgagggaaaatgctgaggatatgggcaatggttgtttcaaaatataccacaaatgtgacaatgcctgcatagggtcaatcagaaatggaacttatgaccatgatgtatacagagacgaagcattgaacaaccggttccagatcaaaggtgttgagctgaagtcaggatacaaagattggatcctatggatttcctttgccatatcatgttttttgctttgtattgttttgctggggttcatcatgtgggcctgccaaaaaggcaacattaggtgcaacatttgcatttga

SEQ ID NO: 30559 - RNA, 1701 nt, synthetic construct
  misc_feature 1..1701: note = hemagglutinin__InfluenzaA__AAX47515
  source 1..1701: mol_type = other RNA
atgaaggctatcattgctttgagctacattttatgcctggttttcgctcaaaaacttcccggaaatgacaacagcacggcaacgctgtgcctggggcatcatgcagtgccaaacggaacgctagtgaaaacaatcacgaatgaccaaattgaagtaactaatgctactgagctggttcagagttcctcaacaggtagaatatgcgacagtcctcaccaaatccttgatggagaaaactgcacactaatagatgctctattgggagaccctcattgtgatggcttccaaaataaggaatgggacctttttgttgaacgcagcaaagcctacagcaactgttacccttatgatgtgccggattatgtctcccttaggtcactagttgcctcatcaggcacgctggagtttaacaatgaaagcttcaattggactggagtcgctcagaatggaacaagctctgcttgcaaaaggagatctgataaaagtttctttagtagattgaattggttgcaccaattaaaatacaaatatccagcactgaacgtgactatgccaaacaatgaaaaatttgacaaattgtacatttggggggttcaccacccgggtacagacagtgaccaaatcagcctatatgctcaagcatcagggagagtcacagtctctaccaaaagaagccaacaaactgtaatcccgaatatcggatctagaccctgggtaaggggtgtctccagcagaataagcatctattggacaatagtaaaaccgggagacatacttttgattaacagcacagggaatctaattgctcctcggggttacttcaaaatacgaagtgggaaaagctcaataatgaggtcagatgcacccattggcaaatgcaattctgaatgcatcactccaaatggaagcattcccaatgacaaaccatttcaaaatgtaaacaggatcacatatggggcctgtcccagatatgttaagcaaaacactctgaaattggcaacagggatgcggaatgtgccagagaaacaaactagaggcatattcggtgcaatcgcgggcttcatagaaaatggttgggagggaatgatggacggttggtacggtttcaggcatcaaaattctgagggcacagggcaagcagcagatcttaaaagcactcaagcagcaatcaaccaaatcaacgggaaactgaataggttaatcgagaaaacgaacgagaaattccatcaaattgaaaaagaattctcagaagtagaagggagaattcaggacctcgagaaatatgttgaggacactaaaatagatctctggtcgtacaatgcggagcttcttgttgccctggagaaccaacatacaattgatctaactgactcagaaatgaacaaactgtttgaaagaacaaagaagcaactgagggaaaatgctgaggatatgggcaatggttgtttcaaaatataccacaaatgtgacaatgcctgcatagggtcaatcagaaatggaacttatgaccatgatgtatacagagacgaagcattgaacaaccggttccagatcaaaggtgttgagctgaagtcaggatacaaagattggatcctatggatttcctttgccatatcatgttttttgctttgtattgttttgctggggttcatcatgtgggcctgccaaaaaggcaacattaggtgcaacatttgcatttga

SEQ ID NO: 30560 - RNA, 1701 nt, synthetic construct
  misc_feature 1..1701: note = hemagglutinin__InfluenzaA__AAX47525
  source 1..1701: mol_type = other RNA
atgaagactatcattgctttgagctacattttatgtctggttttcgctcaaaaacttcccggaaatgacaacagcacggcaacgctgtgcatggggcaccatgcagtgccaaacggaacgctagtgaaaacaatcacgaatgaccaaattgaagtgactaatgctactgagctggttcagagttcctcaacaggtagaatatgcgacagtcctcaccaaatccttgatggagaaaactgcacactaatagatgctctattgggagaccctcattgtgatggcttccaaaataaggaatgggacctttttgttgaacgcagcaaagcctacagcaactgttacccttatgatgtgccggattatgtctcccttaggtcactagttgcctcatcaggcacgctggagtttaacaatgaaagcttcaattggactggagtcgctcagaatggaacaagctctgcttgcaaaaggagatctaataaaagtttctttagtagattgaattggttgcaccaattaaaatacaaatatccagcactgaacgtgactatgccaaacaatgaaaaatttgacaaattgtacatttggggggttcaccacccggatacagacagtaaccaaatcagcctatatgctcaagcatcagggagagtcacagtctctaccaaaagaagccaacaaactgtaatcccaaatatcggatctggaccctgggtaaggggtgtctccagcagaataagcatctattggacaatagtaaaaccgggagacatacttttaattaacagcacagggaatctaattgctcctcggggttacttcaaaatacgaagtgggaaaagctcaataatgaggtcagatgcacccattggcaaatgcaattctgaatgcatcactccaaatggaagcattcccaatgacaaaccatttcaaaatgtaaacaggatcacatatggggcctgtcccagatatgttaagcaaaacactctgaaattggcaacagggatgcggaatgtgccagagaaacaaactagaggcatattcggtgcaatcgcgggcttcatagaaaatggttgggagggaatgatggacggttggtacggtttcaggcatcaaaattctgaaggcacagggcaagcagcagatcttaaaagcactcaagcagcaatcaaccaaatcaacgggaaactaaataggttaatcgagaaaacgaacgagaaattccatcaaattgaaaaagaattctcagaagtagaagggagaattcaggacctcgagaaatatgttgaggacactaaaatagatctctggtcgtacaatgcggagcttcttgttgccctggagaaccaacacacaattgatctaactgactcagaaatgaacaaactgtttgaaagaacaaagaagcaactgagggaaaatgctgaggatatgggcaatggttgtttcaaaatataccacaaatgtgacaatgcctgcatagggtcaatcagaaatggaacttatgaccatgatgtatacagagacgaagcattgaacaaccggttccagatcaaaggtgttgagctgaagtcaggatacaaagattggatcctatggatttcctttgccatatcatgttttttgctttgtattgttttgctggggttcatcatgtgggcctgccaaaaaggcaacattaggtgcaacatttgcatttga

SEQ ID NO: 30561 - RNA, 1701 nt, synthetic construct; identical to SEQ ID NO: 30551
  misc_feature 1..1701: note = hemagglutinin__InfluenzaA__AAX47535
  source 1..1701: mol_type = other RNA

SEQ ID NO: 30562 - RNA, 1701 nt, synthetic construct
  misc_feature 1..1701: note = hemagglutinin__InfluenzaA__AAX56380
  source 1..1701: mol_type = other RNA
atgaagactatcattgctttgagctacattctatgtctggttttcgctcaaaaacttcccggaaatgacaacagcacggcaacgctgtgccttgggcaccatgcagtaccaaacggaacgatagtgaaaacaatcacgaatgaccaaattgaagttactaatgctactgagctggttcagagttcctcaacaggtggaatatgcgacagtcctcatcagatccttgatggagaaaactgcacactaatagatgctctattgggagaccctcagtgtgatggcttccaaaataagaaatgggacctttttgttgaacgcagcaaagcctacagcaactgttacccttatgatgtgccggattatgcctcccttaggtcactagttgcctcatccggcacactggagtttaacaatgaaagcttcaattggactggagtcactcagaatggaacaagctctgcttgcgaaaggagatctaataaaagtttctttagtagattgaattggttgacccacttaaaatacaaatacccagcattgaacgtgactatgccaaacaatgaaaaatttgacaaattgtacatttggggggttcaccacccgggtacggacagtgaccaaatcagcctatatgctcaagcatcaggaagaatcacagtctctaccaaaagaagccaacaaactgtaatcccgaatatcggatctagacccagggtaagggatgtctccagccgaataagcatctattggacaatagtaaaaccgggagacatacttttgattaacagcacagggaatctaattgctcctcggggttacttcaaaatacgaagtgggaaaagctcaataatgagatcagatgcacccattggcaaatgcaattctgaatgcatcactccaaatggaagcattcccaatgacaaaccatttcaaaatgtaaacaggatcacatatggggcctgtcccagatatgttaagcaaaacactctgaaattggcaacagggatgcgaaatgtaccagagaaacaaactagaggcatatttggcgcaatcgcgggtttcatagaaaatggttgggagggaatggtggacggttggtacggtttcaggcatcaaaattctgagggcacaggacaagcagcagatctcaaaagcactcaagcagcaatcaaccaaatcaatgggaaactgaataggttaatcgggaaaacaaacgagaaattccatcagattgaaaaagaattctcagaagtagaagggagaattcaggacctcgagaaatatgttgaggacactaaaatagatctctggtcatacaacgcggagcttcttgttgccctggagaaccaacatacaattgatctaactgactcagaaatgaacaaactgtttgaaagaacaaagaagcaactgagggaaaatgctgaggatatgggcaatggttgtttcaaaatataccacaaatgtgacaatgcctgcatagggtcaatcagaaatggaacttatgaccatgatgtgtacagagatgaagcattaaacaaccggttccagatcaaaggtgttgagctgaagtcaggatacaaagattggatcctatggatttcctttgccatatcatgttttttgctttgtgttgctttgttggggttcatcatgtgggcctgccaaaaaggcaacattaggtgcgacatttgcatttga

SEQ ID NO: 30563 - RNA, 1701 nt, synthetic construct; identical to SEQ ID NO: 30535
  misc_feature 1..1701: note = hemagglutinin__InfluenzaA__AAX56390
  source 1..1701: mol_type = other RNA

SEQ ID NO: 30564 - RNA, 1701 nt, synthetic construct
  misc_feature 1..1701: note = hemagglutinin__InfluenzaA__AAX56400
  source 1..1701: mol_type = other RNA
atgaagactatcattgctttgagctacattctatgtctggttttcgctcaaaaacttcccggaaatgacaacagcacggcaacgctgtgccttgggcaccatgcagtaccaaacggaacgatagtgaaaacaatcacgaatgaccaaattgaagttactaatgctactgagctggttcagagttcctcaacaggtggaatatgcgacagtcctcatcagatccttgatggagaaaactgcacactaatagatgctctattgggagaccctcagtgtgatggcttccaaaataagaaatgggacctttttgttgaacgcagcaaagcctacagcaactgttacccttatgatgtgccggattatgcctcccttaggtcactagttgcctcatccggcacactggagtttaacaatgaaagcttcaattggactggagtcactcagaatggaacaagctctgcttgcgaaaggagatctaataaaagtttctttagtagattgaattggttgacccacttaaaatacaaatacccagcattgaacgtgactatgccaaacaatgaaaaatttgacaaattgtacatttggggggttcaccacccgggtacggacagtgaccaaatcagcctatatgctcaagcatcaggaagaatcacagtctctaccaaaagaagccaacaaactgtaatcccgaatatcggatctagacccagggtaagggatatctccagccgaataagcatctattggacaatagtaaaaccgggagacatacttttgattaacagcacagggaatctaattgctcctcggggttacttcaaaatacgaagtgggaaaagctcaataatgagatcagatgcacccattggcaaatgcaattctgaatgcatcactccaaatggaagcattcccaatgacaaaccatttcaaaatgtaaacaggattacatatggggcctgtcccagatatgttaagcaaaacactctgaaattggcaacagggatgcgaaatgtaccagagaaacaaactagaggcatatttggcgcaatcgcgggtttcatagaaaatggttgggagggaatggtggacggttggtacggtttcaggcatcaaaattctgagggcacaggacaagcagcagatctcaaaagcactcaagcagcaatcaaccaaatcaatgggaaactgaataggttaatcgggaaaacaaacgagaaattccatcagattgaaaaagaattctcagaagtagaagggagaattcaggacctcgagaaatatgttgaggacactaaaatagatctctggtcatacaacgcggagcttcttgttgccctggagaaccaacatacaattgatctaactgactcagaaatgaacaaactgtttgaaagaacaaagaagcaactgagggaaaatgctgaggatatgggcaatggttgtttcaaaatataccacaaatgtgacaatgcctgcatagggtcaatcagaaatggaacttatgaccatgatgtgtacagagatgaagcattaaacaaccggttccagatcaaaggtgttgagctgaagtcaggatacaaagattggatcctatggatttcctttgccatatcatgttttttgctttgtgttgctttgttggggttcatcatgtgggcctgccaaaaaggcaacattaggtgcgacatttgcatttga

SEQ ID NO: 30565 - RNA, 1701 nt, synthetic construct; identical to SEQ ID NO: 30562
  misc_feature 1..1701: note = hemagglutinin__InfluenzaA__AAX56410
  source 1..1701: mol_type = other RNA

SEQ ID NO: 30566 - RNA, 1701 nt, synthetic construct
  misc_feature 1..1701: note = hemagglutinin__InfluenzaA__AAX56420
  source 1..1701: mol_type = other RNA
atgaagactatcattgctttgagctactttctatgtctggttttcgctcaaaaacttcccggaaatgacaacagcacggcaacgctgtgccttgggcaccatgcagtaccaaacggaacgatagtgaaaacaatcacgaatgaccaaattgaagttactaatgctactgagctggtacagagttcctcaacaggtggaatatgcgacagtcctcatcagatccttgatggagaaaactgcacactaatagatgctctattgggagaccctcagtgtgatggcttccaaaataagaaatgggacctttttgttgaacgcagcaaagcctacagcaactgttacccttatgatgtgccggattatgcctcccttaggtcactagttgcctcatccggcacactggagtttaacaatgaaagcttcgattggactggagtcactcagaatggaacaagctctgcttgcaaaaggagatctaataaaagtttctttagtagattgaattggttgacccacttaaaatacaaatacccagcattgaacgtgactatgccaaacaatgaaaaatttgacaaattgtacatttggggggttcaccacccgggtacggacagtgaccaaatcagcctatatgctcaagcatcaggaagaatcacagtctctaccaaaagaagccaacaaactgtaatcccgaatatcggatctagacccagggtaagggatgtctctagccgaataagcatctattggacaatagtaaaaccgggagacatacttttgattaacagcacagggaatctaattgctcctcggggttacttcaaaatacgaagtgggaaaagctcaataatgagatcagatgcacccattggcaaatgcaattccgaatgcatcactccaaatgggagcattcccaatgacaaaccatttcaaaatgtaaacaggatcacatatggggcctgtcccagatatgttaagcaaaacactttgaaattggcaacagggatgcgaaatgtaccagagaaacaaactagaggaatatttggcgcaatcgcgggcttcatagaaaatggttgggagggaatggtggacggttggtacggtttcaggcatcaaaattctgagggcacaggacaagcagcagatctcaaaagcactcaagcagcaatcaaccaaatcaatgggaaactgaataggttaatcgggaaaacaaacgagaaattccatcagattgaaaaagaattctcagaagtagaagggagaattcaggacctcgagaaatatgttgaggacactaaaatagatctctggtcatacaacgcggagcttcttgttgccctggagaaccaacatacaattgatctaactgactcagaaatgaacaaactgtttgaaagaacaaagaagcaactgagggaaaatgctgaggatatgggcaatggttgtttcaaaatataccacaaatgtgacaatgcctgcatagggtcaatcagaaatggaacttatgaccatgatgtgtacagagatgaagcattaaacaaccggttccagatcaaaggtgttgagctgaagtcaggatacaaagattggatcctatggatttcctttgccatatcatgttttttgctttgtgttgctttgttgggtttcatcatgtgggcctgccaaaaaggcaacattaggtgcaacatttgcatttga

SEQ ID NO: 30567 - RNA, 1701 nt, synthetic construct
  misc_feature 1..1701: note = hemagglutinin__InfluenzaA__AAX56430
  source 1..1701: mol_type = other RNA
atgaagactatcattgctttgagctacattctatgtctggttttcactcaaaaacttcccggaaatgacaacagcacggcaacgctgtgccttgggcaccatgcagtaccaaacggaacgatagtgaaaacaatcacgaatgaccaaattgaagttactaatgctactgagctggttcagagttcctcaacaggtggaatatgcgacagtcctcatcagatccttgatggagaaaactgcacactaatagatgctctattgggagaccctcagtgtgatggcttccaaaataagaaatgggacctttttgttgaacgcagcaaagcctacagcaactgttacccttatgatgtgccggattatgcctcccttaggtcactagttgcctcatccggcacactggagtttaacaatgaaagcttcaattggactggagtcactcagaatggaacaagctctgcttgcgaaaggagatctaataaaagtttctttagtagattgaattggttgacccacttaaaatacaaatacccagcattgaacgtgactatgccaaacaatgaaaaatttgacaaattgtacatttggggggttcaccacccgggtacggacagtgaccaaatcagcctatatgctcaagcatcaggaagaatcacagtctctaccaaaagaagccaacaaactgtaatcccgaatatcggatctagacccagggtaagggatgtctccagccgaataagcatctattggacaatagtaaaaccgggagacatacttttgattaacagcacagggaatctaattgctcctcggggttacttcaaaatacgaagtgggaaaagctcaataatgagatcagatgcacccattggcaaatgcaattctgaatgcatcactccaaatggaagcattcccaatgacaaaccatttcaaaatgtaaacaggattacatatggggcctgtcccagatatgttaagcaaaacactctgaaattggcaacagggatgcgaaatgtaccagagaaacaaactagaggcatatttggcgcaatcgcgggtttcatagaaaatggttgggagggaatggtggacggttggtacggtttcaggcatcaaaattctgagggcacaggacaagcagcagatctcaaaagcactcaagcagcaatcaaccaaatcaatgggaaactgaataggttaatcgggaaaacaaacgagaaattccatcagattgaaaaagaattctcagaagtagaagggagaattcaggacctcgagaaatatgttgaggacactaaaatagatctctggtcatacaacgcggagcttcttgttgccctggagaaccaacatacaattgatctaactgactcagaaatgaacaaactgtttgaaagaacaaagaagcaactgagggaaaatgctgaggatatgggcaatggttgtttcaaaatataccacaaatgtgacaatgcctgcatagggtcaatcagaaatggaacttatgaccatgatgtgtacagagatgaagcattaaacaaccggttccagatcaaaggtgttgagctgaagtcaggatacaaagattggatcctatggatttcctttgccatatcatgttttttgctttgtgttgctttgttggggttcatcatgtgggcctgccaaaaaggcaacattaggtgcgacatttgcatttga

SEQ ID NO: 30568 - RNA, 1701 nt, synthetic construct
  misc_feature 1..1701: note = hemagglutinin__InfluenzaA__AAX56440
  source 1..1701: mol_type = other RNA
atgaagactatcattgctttgagctacattttatgtctggttttcgctcaaaaacttcccggaaatgacaacagcacggcaacgctgtgcctggggcaccatgcagtgccaaacggaacgctagtgaaaacaatcacgaatgaccaaattgaagtgactaatgctactgagctggttcagaattcctcaacaggtagaatatgcgacagtcctcaccaaatccttgatggagaaaactgcacactaatagatgctctattgggagaccctcattgtgatggcttccaaaataaggaatgggacctttttgttgaacgcagcaaagcctacagcaactgttacccttatgatgtgccggattatgtctcccttaggtcactagttgcctcatcaggcacgctggagtttaacaatgaaagcttcaattggactggagtcgctcagaatgggacaagctctgcttgcaaaaggagatctgataaaagtttctttagtagattgaattggttgcaccaattaaaatacaaatatccagcactgaacgtgactatgccaaacaatgaaaaatttgacaaattgtacatttggggggttcaccacccgggtacagacaatgaccaaatcagcctatatgctcaagcatcagggagagtcacagtctctaccaaaagaagccaacaaactgtaatcccgaatattggatctggaccctgggtaaggggtgtctccagcagaataagcatctattggacaatagtaaaaccgggagacatacttttgattaacagcacagggaatctaattgctcctcggggttacttcaaaatacgaagtgggaaaagctcaataatgaggtcagatgcacccattggcaaatgcaattctgaatgcatcactccaaatggaagcattcccaatgacaaaccatttcaaaatgtaaacaggatcacatatgggccctgtcccagatatgttaagcaaaacactctgaaattggcaacagggatgcggaatgtgccagagaaacaaactagaggcatattcggtgcaatcgcgggcttcatagaaaatggttgggagggaatgatggacggttggtacggtttcaggcatcaaaattctgagggcacagggcaagcagcagatcttaaaagcactcaagcagcaatcaaccaaatcaacgggaaactgaataggttaatcgagaaaacgaacgagaaattccatcaaattgaaaaagaattctcagaagtagaagggagaattcaggacctcgagaaatatgttgaggacactaaaatagatctctggtcgtacaatgcggagcttcttgttgccctggagaaccaacatacaattgatctaactgactcagaaatgaacaaactgtttgaaagaacaaagaagcaactgagggaaaatgctgaggatatgggcaatggttgtttcaaaatataccacaaatgtgacaatgcctgcatagggtcaatcagaaatggaacttatgaccatgatgtatacagagacgaagcattgaacaaccgattccagatcaaaggtgttgagctgaagtcaggatacaaagattggatcctatggatttcctttgccatatcatgttttttgctttgtattgttttgctggggttcatcatgtgggcctgccaaaaaggcaacattaggtgcaacatttgcatttga

SEQ ID NO: 30569 - RNA, 1701 nt, synthetic construct
  misc_feature 1..1701: note = hemagglutinin__InfluenzaA__AAX56450
  source 1..1701: mol_type = other RNA
atgaagactatcattgctttgagctacattttatgcctggttttcgctcaaaaacttcccggaaatgacaacagcacggcaacgctgtgcctggggcaccatgcagtgccaaacggaacgctagtgaaaacaatcacgaatgaccaaattgaagtaactaatgctactgagctggttcagagttcctcaacaagtagaatatgcgacagtcctcatcaaatccttgatggagaaaactgcacactaatagatgctctattgggagaccctcattgtgatggcttccaaaataaggaatgggacctttttgttgaacgcagcaaagcctacagcaactgttacccttatgatgtgccggattatgtctcccttaggtcactagttgcctcatcaggcacgctggagtttaacaatgaaagcttcaattggactggagtcgctcagaatggaacaagctctgcttgcaaaaggagatctgataaaagtttctttagtagattgaattggttgcaccaattaaaatacaaatatccagcactgaacgtgactatgccaaacaatgaaaaatttgacaaattgtacatttggggggttcaccacccgggtacagacagtgaccaaatcagcctatatgctcaagcatcagggagagtcacagtctctaccaaaagaagccaacaaactgtaatcccgaatatcggatctagaccctgggtaaggggtgtctccagcagaataagcatctattggacaatagtaaaaccgggagacatacttttgattaacagcacagggaatctaattgctcctcggggttacttcaaaatacgaagtgggaaaagctcaataatgaggtcagatgcacccattggcaaatgcaattctgaatgcatcactccaaatggaagcattcccaatgacaaaccatttcaaaatgtaaacaggatcacatatggggcctgtcccagatatgttaagcaaaacactctgaaattggcaacagggatgcggaatgtaccagagaaacaaactagaggcatattcggtgcaatcgcgggcttcatagaaaatggttgggagggaatgatggacggttggtacggtttcaggcatcaaaattctgagggcacagggcaagcagcagatcttaaaagcactcaagcagcaatcaaccaaatcaacgggaaactgaataggttaatcgagaaaacgaacgagaaattccatcaaattgaaaaagaattctcagaagtagaagggagaattcaggacctcgagaaatatgttgaggacactaaaatagatctctggtcgtacaatgcggagcttcttgttgccctggagaaccaacatacaattgatctaactgactcagaaatgaacaaactgtttgaaagaacaaagaagcaactgagggaaaatgctgaggatatgggcaatggttgtttcaaaatataccacaaatgtgacaatgcctgcatagggtcaatcagaaatggaacttatgaccatgatgtatacagagacgaagcattgaacaaccggttccagatcaaaggtgttgagctgaagtcaggatacaaagattggatcctatggatttcctttgccatatcatgttttttgctttgtattgttttgctggggttcatcatgtgggcctgccaaaaaggcaacattaggtgcaacatttgcatttga

SEQ ID NO: 30570 - RNA, 1701 nt, synthetic construct
  misc_feature 1..1701: note = hemagglutinin__InfluenzaA__AAX56460
  source 1..1701: mol_type = other RNA
atgaagactatcattgctttgagctacattttatgtctggttttcgctcaaaaacttcccgaaaatgacaacagcacggcaacgctgtgcctggggcaccatgcagtgccaaacggaacgctagtgaaaacaatcacgaatgaccaaattgaagtgactaatgctactgagctggttcagagttcctcaacaggtagaatatgcgacagtcctcaccaaatccttgatggagaaaactgcacactaatagatgctctattgggagaccctcattgtgatggcttccaaaataaggaatgggacctttttgttgaacgcagcaaagcctacagcaactgttacccttatgatgtgccggattatgtctcccttaggtcactagttgcctcatcaggcacgctggagtttaacaatgaaagcttcaattggactggagtcgctcagaatggaacaagctctgcttgcaaaaggagatctgataaaagtttctttagtagattgaattggttgcaccaattaaaatacaaatatccagcactgaacgtgactatgccaaacaatgaaaaatttgacaaattgtacatttggggggttcaccacccgggtacagacagtgaccaaatcagcctatatgctcaagcatcagggagagtcacagtctctaccaaaagaagccaacaaactgtaatcccgaatatcggatctagaccctgggtaaggggtgtctccagcagaataagcatctattggacaatagtaaaaccgggagacatacttttgattaacagcacagggaatctaattgctcctcggggttacttcaaaatacgaagtgggaaaagctcaataatgaggtcagatgcacccattggcaaatgcaattctgaatgcatcactccaaatggaagcattcccaatgacaaaccatttcaaaatgtaaacaggatcacacatgggccctgtcccagatatgttaagcaaaacactctgaaattggcaacagggatgcggaatgtgccagagaaacaaactagaggcatattcggtgcaatcgcgggcttcatagaaaatggttgggagggaatgatggacggttggtacggtttcaggcatcaaaattctgagggcacagggcaagcagcagatcttaaaagcactcaagcagcaatcaaccaaatcaacgggaaactgaataggttaatcgagaaaacgaacgagaaattccatcaaattgaaaaggaattctcagaagtagaagggagaattcaggacctcgagaaatatgttgaggacactaaaatagatctctggtcgtacaatgcggagcttcttgttgccctggagaaccaacatacaattgatctaactgactcagaaatgaacaaactgtttgaaagaacaaagaagcaactgagggaaaatgctgaggatatgggcaatggttgtttcaaaatataccacaaatgtgacaatgcctgcatagggtcaatcagaaatggaacttatgaccatgatgtatacagagacgaagcattgaacaaccggttccagatcaaaggtgttgagctgaagtcaggatacaaagattggatcctatggatttcctttgccatatcatgttttttgctttgtattgttttgctggggttcatcatgtgggcctgccaaaaaggcaacattaggtgcaacatttgcatttga

SEQ ID NO: 30571 - RNA, 1701 nt, synthetic construct
  misc_feature 1..1701: note = hemagglutinin__InfluenzaA__AAX56470
  source 1..1701: mol_type = other RNA
atgaagactatcattgctttgagctacattttatgtctggttttcgctcaaaaacttcccggaaatgacaacagcacggcaacgctgtgcctggggcaccatgcagtgccaaacggaacgctagtgaaaacaatcacgaatgaccaaattgaagtgactaatgctactgagctggttcagagttcctcaacaggtagaatatgcgacagtcctcaccaaatccttgatggagaaaactgcacactaatagatgctctattgggagaccctcattgtgatggcttccaaaataaggaatgggacctttttgttgaacgcagcaaagcctacagcaactgttacccttatgatgtgccggattatgtctcccttaggtcactagttgcctcatcaggcacgctggagtttaacaatgaaagcttcaattggactggagtcgctcagaatggaacaagctctgcttgcaaaaggagatctgataaaagtttctttagtagattgaattggttgcaccaattaaaatacaaatatccagcactgaacgtgactatgccaaacaatgaaaaatttgacaaattgtacatttggggggttcaccacccgggtacagacagtgaccaaatcagcctatatgctcaagcatcagggagagtcacagtctctaccaaaagaagccaacaaactgtaatcccgaatatcggatctagaccctgggtaaggggtgtctccagcagaataagcatctattggacaatagtaaaaccgggagacatacttttgattaacagcacagggaatctaattgctcctcggggttacttcaaaatgcgaagtgggaaaagctcaataatgaggtcagatgcacccattggcaaatgcaattctgaatgcatcactccaaatggaagcattcccaatgacaaaccatttcaaaatgtaaacaggatcacatatgggccctgtcccagatatgttaagcaaaacactctgaaattggcaacagggatgcggaatgtgccagagaaacaaactagaggcatattcggtgcaatcgcgggcttcatagaaaatggttgggagggaatgatggacggttggtacggtttcaggcatcaaaattctgagggcacagggcaagcagcagatcttaaaagcactcaagcagcaatcaaccaaatcaacgggaagctgaataggttaatcgagaaaacgaacgagaaattccatcaaattgaaaaagaattctcagaagtagaagggagaattcaggacctcgagaaatatgttgaggacactaaaatagatctctggtcgtacaatgcggagcttcttgttgccctggagaaccaacatacaattgatctaactgactcagaaatgaacaaactgtttgaaagaacaaagaagcaactgagggaaaatgctgaggatatgggcaatggttgtttcaaaatataccacaaatgtgacaatgcctgcatagggtcaatcagaaacggaacctatgaccatgatgtatacagagacgaagcattgaacaaccggttccagatcaaaggtgttgagctgaagtcaggatacaaagattggatcctatggatttcctttgccatatcatgttttttgctttgtattgttttgctggggttcatcatgtgggcctgccaaaaaggcaacattaggtgcaacatttgcatttga

SEQ ID NO: 30572 - RNA, 1701 nt, synthetic construct
  misc_feature 1..1701: note = hemagglutinin__InfluenzaA__AAX56480
  source 1..1701: mol_type = other RNA
atgaagactatcattgctttgagctacattttatgtctggttttcgctcaaaaacttcccggaaatgacaacagcacggcaacgctgtgcctggggcaccatgcagtgccaaacggaacgctagtgaaaacaatcacgaatgaccaaattgaagtgactaatgctactgagctggttcagagttcctcaacaggtagaatatgcgacagtcctcaccaaatccttgatggagaaaactgcacactaatagatgctctattgggagaccctcattgtgatggcttccaaaataaggaatgggacctttttgttgaacgcagcaaagcctacagcaactgttacccttatgatgtgccggattatgtctcccttaggtcactagttgcctcatcaggcacgctggagtttaacaatgaaagcttcaattggactggagtcgctcagaatggaacaagctctgcttgcaaaaggagatctgataaaagtttctttagtagattgaattggttgcaccaattaaaatacaaatatccagcactgaacgtgactatgccaaacaatgaaaaatttgacaaattgtacatttggggggttcaccacccgggtacagacagtgaccaaatcagcctatatgctcaagcatcagggagagtcacagtctctaccaaaagaagccaacaaactgtaatcccgaatatcggatctagaccctgggtaaggggtgtctccagcagaataagcatctattggacaatagtaaaaccgggagacatacttttgattaacagcacagggaatctaattgctcctcggggttacttcaaaatacgaagtgggaaaagctcaataatgaggtcagatgcacccattggcaaatgcaattctgaatgcatcactccaaatggaagcattcccaatgacaaaccatttcaaaatgtaaacaggatcacatatgggccctgtcccagatatgttaagcaaaacactctgaaattggcaacagggatgcggaatgtgccagagaaacaaactagaggcatattcggtgcaatcgcgggcttcatagaaaatggttgggagggaatgatggacggttggtacggtttcaggcatcaaaattctgagggcacagggcaagcagcagatcttaaaagcactcaagcagcaatcaaccaaatcaacgggaaactgaataggttaatcgagaaaacgaacgagaaattccatcaaattgaaaaggaattctcagaagtagaagggagaattcaggacctcgagaaatatgttgaggacactaaaatagatctctggtcgtacaatgcggagcttcttgttgccctggagaaccaacatacaattgatctaactgactcagaaatgaacaaactgtttgaaagaacaaagaagcaactgagggaaaatgctgaggatatgggcaatggttgtttcaaaatataccacaaatgtgacaatgcctgcatagggtcaatcagaaatggaacttatgaccatgatgtatacagagacgaagcattgaacaaccggttccagatcaaaggtgttgagctgaagtcaggatacaaagattggatcctatggatttcctttgccatatcatgttttttgctttgtattgttttgctggggttcatcatgtgggcctgccaaaaaggcaacattaggtgcaacatttgcatttga

SEQ ID NO: 30573 - RNA, 1701 nt, synthetic construct
  misc_feature 1..1701: note = hemagglutinin__InfluenzaA__AAX56510
  source 1..1701: mol_type = other RNA
atgaagactatcattgctttgagctacattttatgcctggttttcgctcaaaaacttcccggaaatgacaacagcacggcaacgctgtgcctggggcatcatgcagtgccaaacggaacgctagtgaaaacaatcacgaatgaccaaattgaagtaactaatgctactgagctggttcagagttcctcaacaggtagaatatgcgacagtcctcaccaaatccttgatggagaaaactgcacactaatagatgctctattgggagaccctcattgtgatggcttccaaaataaggaatgggacctttttgttgaacgcagcaaagcctacagcaactgttacccttatgatgtgccggattatgtctcccttaggtcactagttgcctcatcaggcacgctggagtttaacaatgaaagcttcaattggactggagtcgctcagaatggaacaagctctgcttgcaaaaggagatctgataaaagtttctttagtagattgaattggttgcaccaattaaaatacaaatatccagcactgaacgtgactatgccaaacaatgaaaaatttgacaaattgtacatttggggggttcaccacccgggtacagacagtgaccaaatcagcctatatgctcaagcatcagggagagtcacagtctctaccaaaagaagccaacaaactgtaatcccgaatatcggatctagaccctgggtaaggggtgtctccagcaaaataagcatctattggacaatagtaaaaccgggagacatacttttgattaacagcacagggaatctaattgctcctcggggttacttcaaaatacgaagtgggaaaagctcaataatgaggtcagatgcacccattggcaaatgcaattctgaatgcatcactccaaatggaagcattcccaatgacaaaccatttcaaaatgtaaacaggatcacatatggggcctgtcccagatatgttaagcaaaacactctgaaattggcaacagggatgcggaatgtgccagagaaacaaactagaggcatattcggtgcaatcgcgggcttcatagaaaatggttgggagggaatgatggacggttggtacggtttcaggcatcaaaattctgagggcacagggcaagcagcagatcttaaaagcactcaagcagcaatcaaccaaatcaacgggaaactgaataggttaatcgagaaaacgaacgagaaattccatcaaattgaaaaagaattctcagaagtagaagggagaattcaggacctcgagaaatatgttgaggacactaaaatagatctctggtcgtacaatgcggagcttcttgttgccctggagaaccaacatacaattgatctaactgactcagaaatgaacaaactgtttgaaagaacaaagaagcaactgagggaaaatgctgaggatatgggcaatggttgtttcaaaatataccacaaatgtgacaatgcctgcatagggtcaatcagaaatggaacttatgaccatgatgtatacagagacgaagcattgaacaaccggttccagatcaaaggtgttgagctgaagtcaggatacaaagattggatcctatggatttcctttgccatatcatgttttttgctttgtattgttttgctggggttcatcatgtgggcctgccaaaaaggcaacattaggtgcaacatttgcatttga

SEQ ID NO: 30574 - RNA, 1701 nt, synthetic construct
  misc_feature 1..1701: note = hemagglutinin__InfluenzaA__AAX56520
  source 1..1701: mol_type = other RNA
atgaagactatcattgctttgagctacattttatgcctggttttcgctcaaaaacttcccggaaatgacaacagcacggcaacgctgtgcctggggcaccatgcagtgccaaacggaacgctagtgaaaacaatcacgaatgaccaaattgaagtaactaatgctactgagctggttcagagttcctcaacaagtagaatatgcgacagtcctcaccaaatccttgatggagaaaactgcacactaatagatgctctattgggagaccctcattgtgatggcttccaaaataaggaatgggacctttttgttgaacgcagcaaagcctacagcaactgttacccttatgatgtgccggattatgtctcccttaggtcactagttgcctcatcaggcacgctggagtttaacaatgaaagcttcaattggactggagtcgctcagaatggaacaagctctgcttgcaaaaggagatctgataaaagtttctttagtagattgaattggttgcaccaattaaaatacaaatatccagcactgaacgtgactatgccaaacaatgaaaaatttgacaaattgtacatttggggggttcaccacccgggtacagacagtgaccaaatcagcctatatgctcaagcatcagggagagtcacagtctctaccaagagaagccaacaaactgtaatcccgaatatcggatctagaccctgggtaaggggtgtctccagcagaataagcatctattggacaatagtaaaaccgggagacatacttttgattaacagcacagggaatctaattgctcctcggggttacttcaaaatacgaagtgggaaaagctcaataatgaggtccgatgcacccattggcaaatgcaattctgaatgcatcactccaaatggaagcattcccaatgacaaaccatttcaaaatgtaaacaggatcacatatggggcctgtcccagatatgttaagcaaaacactctgaaattggcaacagggatgcggaatgtaccagagaaacaaactagaggcatattcggtgcaatcgcgggcttcatagaaaatggttgggagggaatgatggacggttggtacggtttcaggcatcaaaattctgagggcacagggcaagcagcagatcttaaaagcactcaagcagcaatcaaccaaatcaacgggaaactgaataggttaatcgagaaaacgaacgagaaattccatcaaattgaaaaagaattctcagaagtagaagggagaattcaggacctcgagaaatatgttgaggacactaaaatagatctctggtcgtacaatgcggagcttcttgttgccctggagaaccaacatacaattgatctaactgactcagaaatgaacaaactgtttgaaagaacaaagaagcaactgagggaaaatgctgaggatatgggcaatggttgtttcaaaatataccacaaatgtgacaatgcctgcatagggtcaatcagaaatggaacttatgaccatgatgtatacagagacgaagcattgaacaaccggttccagatcaaaggtgttgagctgaagtcaggatacaaagattggatcctatggatttcctttgccatatcatgttttttgctttgtattgttttgctggggttcatcatgtgggcctgccaaaaaggcaacattaggtgcaacatttgcatttga

SEQ ID NO: 30575 - RNA, 1701 nt, synthetic construct
  misc_feature 1..1701: note = hemagglutinin__InfluenzaA__AAX56530
  source 1..1701: mol_type = other RNA
atgaaagcaaaactactagttctgttgtgtgcatttacagctacatatgcagacacaatatgtataggctaccatgcgaacaactcaactgacactgttgacacagtacttgagaagaacgtgacagtgacacactctgtcaacctacttgaggacagtcacaacggaaaactatgccgactaaaaggaacagccccactacaattgggtaattgcagcattgccggatggatcttaggaaatccagaatgcgaatcactgttttctaaggaatcatggtcttacattgcagaaacaccaaaccctaaaaatggaacatgttacccagggtatttcgccgactatgaggaactgagggagcaattgagctcagtatcatcattcgagagatttgaaatattccccaaggatagctcatggcccaaccacactgtaaccaaaggagtgacggcatcatgctcccataatgggaaaagcagcttttacaaaaatttgctatggctgacggagaagaatggcttgtacccaaatctgagcaagtcctatgtaaacaaaaagggaaaagaagtccttgtgctatggggtgttcatcacccgtctaacatgggggaccaacgggccatctatcataaagaaaatgcttatgtttctgtgttgtcttcacattatagcagaagattcaccccagaaatagcaaaaagaccaaaagtaagagatcaagaagggagaattaactactactggactctgctggaacccggggacacaataatatttgaggcaaatggaaatctaatagcgccgtggtacgctttcgcactgagtagaggctttgggtcaggaatcatcatctcaaacgcatcaatgggtgaatgtgacgctaagtgtcaaacaccccaaggagctataaacagtagtctccccttccagaatgtacacccagtcacaataggagagtgtccaaagtatgtcaggagtacaaaattaaggatggttacaggactaaggaacgtcccatccattcaatccagaggtttgtttggagccattgccggtttcattgaaggagggtggactggaatgatagatggatggtatggttatcatcatcaaaatgaacaaggatctggctatgctgcggaccaaaaaagcacacaaaatgccattaatgggattacaaacaaggtgaattctataatcgagaaaatgaacactcaattcacagctgtaggcaaagaattcaacaaattagaaaaaaggatggaaaacttaaataagaaagttgatgatggatttctggacatttggacatataatgcagaattgttagttctcctggaaaatgaaaggactttggattttcatgacttaaatgtgaagaacctgtatgagaaagtgaaaaaccaattgaagaataatgccaaagaaatagggaacgggtgttttgaattctatcacaagtgtaacaatgaatgcatggaaagtgtgaaaaatggaacttatgactatccaaaatattccaaagaatcaaagttaaacagggaaaaaattgatggagtgaaattggaatcaatgggagtctatcagattctggcgatctactcaactgtcgccagttcgctggtgcttttggtctccctgggggcaatcagcttctggatgtgttctaatgggtctttgcagtgtagaatatgcatctga

SEQ ID NO: 30576 - RNA, 1701 nt, synthetic construct
  misc_feature 1..1701: note = hemagglutinin__InfluenzaA__AAX56550
  source 1..1701: mol_type = other RNA
atgaagactatcattgctttgagctacattttatgtctggttttcgctcaaaaacttcccgtaaatgacaacagcacggcaacgctgtgcctgggacaccatgcagtgccaaacggaacgctagtgaaaacaatcacgaatgaccacattgaagtgactaatgctactgagctggttcagagttcctcaacaggtagaatatgcgacagtcctcaccaaatccttgatggagaaaactgcacactaatagatgctctattgggagaccctcattgtgatggcttccaaaataaggaatgggacctttttgttgaacgcagcacagcctacagcaactgttacccttatgatgtgccggattatgcctcccttaggtcactagttgcctcatccggcacactggagtttaacaatgaaagcttcaattggactggagtcgctcagaatggaacaagctctgcttgcaaaaggagatctattaaaagtttctttagtagattgaattggttgcaccaattaaaatacaaatatccagcactgaacgtgactatgccaaacaatgaaaaatttgacaaattgtacatttggggggttcaccacccgagtacggacagtgaccaaatcagcctatatgctcaagcatcagggagagtcacagtctctaccaaaagaagccaacaaactgtaatcccgaatatcggatctagaccctgggtaaggggtgtctccagcagaataagcatctattggacaatagtaaaaccgggagacatacttttgattaacagcacagggaatctaattgctcctcggggttactttaaaatacgaagtgggaaaagctcaataatgaggtcaaatgcacccattggcaaatgcaattctgaatgcatcactccaaatggaagcattcccaatgacaaaccatttcaaaatgtaaacaggatcacatatggggcctgtcccagatatgttaagcaaaacactctgaaattggcaacagggatgcggaatgtaccagagaaacaaactagaggcatattcggcgcaatcgcgggtttcatagaaaatggttgggagggaatggtggacggttggtacggtttcaggcatcaaaattctgagggcacaggacaagcagcagatcttaaaagcactcaagcagcaatcaaccaaatcaacgggaaactgaataggttaatcgagaaaacaaacgagaaattccatcaaattgaaaaagaattctcagaagtagaagggagaattcaggacctcgagaaatatgttgaggacactaaaatagatctctggtcgtacaacgcggagcttcttgttgccctggagaaccaacatacaattgatctaactgactcagaaatgaacaaactgtttgaaagaacaaggaagcaactgagggaaaatgctgaggatatgggcaatggttgtttcaaaatataccacaaatgtgacaatgcctgcatagggtcaatcagaaatggaacttatgaccatgatgtatacagagacgaagcattaaacaaccggttccagatcaaaggtgttgagctgaagtcaggatacaaagattggatcctatggatttcctttgccatatcatgttttttgctttgtgttgttttgctggggttcatcatgtgggcctgccaaaaaggcaacattaggtgcaacatttgcatttga

SEQ ID NO: 30577 - RNA, 1701 nt, synthetic construct
  misc_feature 1..1701: note = hemagglutinin__InfluenzaA__AAX56560
  source 1..1701: mol_type = other RNA
atgaagactatcattgctttgagctacattctatgtctggttttcgctcaaaaacttcccggaaatgacaacagcacggcaacgctgtgccttgggcaccatgcagtaccaaacggaacgatagtgaaaacaatcacgaatgaccaaattgaagttactaatgctactgagctggttcagatttcctcaacaggtggaatatgcgacagtcctcatcagatccttgatggagaaaactgcacactaatagatgctctattgggagaccctcagtgtgatggcttccaaaataagaaatgggacctttttgttgaacgcagcaaagcctacagcaactgttacccttatgatgtgccggattatgcctcccttaggtcactagttgcctcatccggcacactggagtttaacaatgaaagcttcgattggactggagtcactcagaatggaacaagctctgcttgcaaaaggagatctaataaaagtttctttagtagattgaattggttgacccacttaaaatacaaatacccagcattgaacgtgactatgccaaacaatgaaaaatttgacaaattgtacatttggggggttcaccacccgggtacggacagtgaccaaatcagcctatatgctcaagcatcaggaagaatcacagtctctaccaaaagaagccaacaaactgtgatcccgaatatcggatctagacccagggtaagggatgtctccagccgaataagcatctattggacaatagtaaaaccgggagacatacttttgatcaacagcacagggaatctaattgctcctcggggttacttcaaaatacgaagtgggaaaagctcaataatgagatcagatgcacccattggcaaatgcaattctgaatgcatcactccaaatggaagcattcccaatgacaaaccatttcaaaatgtaaacaggatcacatatggggcctgtcccagatatgttaagcaaaacactctgaaattggcaacagggatgcgaaatgtaccagagaaacaaactagaggcatatttggcgcaatcgcgggtttcatagaaaatggttgggagggaatggtggacggttggtacggtttcaggcatcaaaattctgagggcacaggacaagcagcagatctcaaaagcactcaagcagcaatcaaccaaatcaatgggaaactgaataggttaatcgggaaaacaaacgagaaattccatcagattgaaaaagaattctcggaagtagaaggaagaattcaggacctcgagaaatatgttgaggacactaaaatagatctctggtcatacaacgcggagcttcttgttgccctggagaaccaacatacaattgatctaactgactcagaaatgaacaaactgtttgaaagaacaaagaagcaactgagggaaaatgctgaggatatgggcaatggttgtttcaaaatataccacaaatgtgacaatgcctgcatagggtcaatcagaaatggaacttatgaccatgatgtgtacagagatgaagcattaaacaaccggttccagatcaaaggtgttgagctgaagtcaggatacaaagattggatcctatggatttcctttgccatatcatgttttttgctttgtgttgctttgttggggttcatcatgtgggcctgccaaaaaggcaacattaggtgcaacatttgcatttga

SEQ ID NO: 30578 - RNA, 1701 nt, synthetic construct
  misc_feature 1..1701: note = hemagglutinin__InfluenzaA__AAX56570
  source 1..1701: mol_type = other RNA
atgaagactatcattgctttgagctacattttatgcctggttttcgctcaaaaacttcccggaaatgacaacagcacggcaacgctgtgcctggggcaccatgcagtgccaaacggaacgctagtgaaaacaatcacgaatgaccaaattgaagtaactaatgctactgagctggttcagagttcttcaacaagtagaatatgcgacagtcctcaccaaatccttgatggagaaaattgcacactaatagatgctctattgggagaccctcattgtgatggcttccaaaataaggaatgggacctttttgttgaacgcagcaaagcctacagcaactgttacccttatgatgtgccggattatgtctcccttaggtcactagttgcctcatcaggcacgctggagtttaacaatgaaagcttcaattggactggagtcgctcagaatggaacaagctctgcttgcaaaaggagatctgataaaagtttctttagtagattgaattggttgcaccaattaaaatacaaatatccagcactgaacgtgactatgccaaacaatgaaaaatttgacaaattgtacatttggggggttcaccacccgggtacagacagtgaccaaatcagcctatatgctcaagcatcagggagagtcacagtctctaccaaaagaagccaacaaactgtaatcccgaatatcggatctagaccctgggtaaggggtgtctccagcggaataagcatctattggacaatagtaaaaccgggagacatacttttgattaacagcacagggaatctaattgctcctcggggttacttcaaaatacgaagtgggaaaagctcaataatgaggtcagatgcacccattggcaaatgcaattctgaatgcatcactccaaatggaagcattcccaatgacaaaccatttcaaaatgtaaacaggatcacatatggggcctgtcccagatatgttaagcaaaacactctgaaattggcaacagggatgcggaatgtaccagagaaacaaactagaggcatattcggtgcaatcgcgggcttcatagaaaatggttgggagggaatgatggacggttggtacggtttcaggcatcaaaattctgagggcacagggcaagcagcagatcttaaaagcactcaagcagcaatcaaccaaatcaacgggaaactgaataggttaatcgagaaaacgaacgagaaattccatcaaattgaaaaagaattctcagaagtagaagggagaattcaggacctcgagaaatatgttgaggacactaaaatagatctctggtcgtacaatgcggagcttcttgttgccctggagaaccaacatacaattgatctaactgactcagaaatgaacaaactgtttgaaagaacaaagaagcaactgagggaaaatgctgaggatatgggcaatggttgtttcaaaatataccacaaatgtgacaatgcctgcatagggtcaatcagaaatggaacttatgaccatgatgtatacagagacgaagcattgaacaaccggttccagatcaaaggtgttgagctgaagtcaggatacaaagattggatcctatggatttcctttgccatatcatgttttttgctttgtattgttttgctggggttcatcatgtgggcctgccaaaaaggcaacattaggtgcaacatttgcatttga

SEQ ID NO: 30579 - RNA, 1701 nt, synthetic construct
  misc_feature 1..1701: note = hemagglutinin__InfluenzaA__AAX56590
  source 1..1701: mol_type = other RNA
atgaagactatcattgctttgagctacattttatgcctggttttcgctcaaaaacttcccggaaatgacaacagcacggcaacgctgtgcctggggcaccatgcagtgccaaacggaacgctagtgaaaacaatcacgaatgaccaaattgaagtaactaatgctactgagctggttcagagttcctcaacaagtagaatatgcgacagtcctcaccaaatccttgatggagaaaactgcacactaatagatgctctattgggagaccctcattgtgatggcttccaaaataaggaatgggacctttttgttgaacgcagcaaagcctacagcaactgttacccttatgatgtgccggattatgtctcccttaggtcactagttgcctcatcaggcacgctggagtttaacaatgaaagcttcaattggactggagtcgctcagaatggaacaagctctgcttgcaaaaggagatctgataaaagtttctttagtagattgaattggttgcaccaattaaaatacaaatatccagcactgaacgtgactatgccaaacaatgaaaaatttgacaaattgtacatttggggggttcaccacccgagtacagacagtgaccaaatcagcctatatgctcaagcatcagggagagtcacagtctctaccaagagaagccaacaaactgtaatcccgaatatcggatctagaccctgggtaaggggtgtctccagcagaataagcatctattggacaatagtaaaaccgggagacatacttttgattaacagcacagggaatctaattgctcctcggggttacttcaaaatacgaagtgggaaaagctcaataatgaggtccgatgcacccattggcaaatgcaattctgaatgcatcactccaaatggaagcattcccaatgacaaaccatttcaaaatgtaaacaggatcacatatggggcctgtcccagatatgttaagcaaaacactctgaaattggcaacaggaatgcggaatgtaccagagaaacaaactagaggcatattcggtgcaatcgcgggcttcatagaaaatggttgggagggaatgatggacggttggtacggtttcaggcatcaaaattctgagggcacagggcaagcagcagatcttaaaagcactcaagcagcaatcaaccaaatcaacgggaaactgaataggttaatcgagaaaacgaacgagaaattccatcaaattgaaaaagaattctcagaagtagaagggagaattcaggacctcgagaaatatgttgaggacactaaaatagatctctggtcgtacaatgcggagcttcttgttgccctggagaaccaacatacaattgatctaactgactcagaaatgaacaaactgtttgaaagaacaaagaagcaactgagggaaaatgctgaggatatgggcaatggttgtttcaaaatataccacaaatgtgacaatgcctgcatagggtcaatcagaaatggaacttatgaccatgatgtatacagagacgaagcattgaacaaccggttccagatcaaaggtgttgagctgaagtcaggatacaaagattggatcctatggatttcctttgccatatcatgttttttgctttgtattgttttgctggggttcatcatgtgggcctgccaaaaaggcaacattaggtgcaacatttgcatttga

SEQ ID NO: 30580 - RNA, 1701 nt, synthetic construct
  misc_feature 1..1701: note = hemagglutinin__InfluenzaA__AAX56600
  source 1..1701: mol_type = other RNA
atgaagactatcattgctttgagctacattctatgtctggttttcgctcaaaaacttcccggaaatgacaacagcacggcaacgctgtgccttgggcaccatgcagtaccaaacggaacgatagtgaaaacaatcacgaatgaccaaattgaagttactaatgctactgagctggttcagatttcctcaacaggtggaatatgcgacagtcctcatcagatccttgatggagaaaactgcacactaatagatgctctattgggagaccctcagtgtgatggcttccaaaataagaaatgggacctttttgttgaacgcagcaaagcctacagcaactgttacccttatgatgtgccggattatgcctcccttaggtcactagttgcctcatccggcacactggagtttaacaatgaaagcttcgattggactggagtcactcagaatggaacaagctctgcttgcaaaaggagatctaataaaagtttctttagtagattgaattggttgacccacttaaaatacaaatacccagcattgaacgtgactatgccaaacaatgaaaaatttgacaaattgtacatttggggggttcaccacccgggtacggacagtgaccaaatcagcctatatgctcaagcatcaggaagaatcacagtctctaccaaaagaagccaacaaactgtaatcccgaatatcggatctagacccagggtaagggatgtctccagccgaataagcatctattggacaatagtaaaaccgggagacatacttttgatcaacagcacagggaatctaattgctcctcggggttacttcaaaatacgaagtgggaaaagctcaataatgagatcagatgcacccattggcaaatgcaattctgaatgcatcactccaaatggaagcattcccaatgacaaaccatttcaaaatgtaaacaggatcacatatggggcctgtcccagatatgttaagcaaaacactctgaaattggcaacagggatgcgaaatgtaccagagaaacaaactagaggcatatttggcgcaatcgcgggtttcatagaaaatggttgggagggaatggtggacggttggtacggtttcaggcatcaaaattctgagggcacaggacaagcagcagatctcaaaagcactcaagcagcaatcaaccaaatcaatgggaaactgaataggttaatcgggaaaacaaacgagaaattccatcagattgaaaaagaattctcggaagtagaaggaagaattcaggacctcgagaaatatgttgaggacactaaaatagatctctggtcatacaacgcggagcttcttgttgccctggagaaccaacatacaattgatctaactgactcagaaatgaacaaactgtttgaaagaacaaagaagcaactgagggaaaatgctgaggatatgggcaatggttgtttcaaaatataccacaaatgtgacaatgcctgcatagggtcaatcagaaatggaacttatgaccatgatgtgtacagagatgaagcattaaacaaccggttccagatcaaaggtgttgagctgaagtcaggatacaaagattggatcctatggatttcctttgccatatcatgttttttgctttgtgttgctttgttggggttcatcatgtgggcctgccaaaaaggcaacattaggtgcaacatttgcatttga

SEQ ID NO: 30581 - RNA, 1701 nt, synthetic construct
  misc_feature 1..1701: note = hemagglutinin__InfluenzaA__AAX57644
  source 1..1701: mol_type = other RNA
atgaagactatcattgctttgagctacattctatgtctggttttcgctcaaaaacttcccggaaatgacaacagcacggcaacgctgtgccttgggcaccatgcagtaccaaacggaacgatagtgaaaacaatcacgaatgaccaaattgaagttactaatgctactgaactggttcagagttcctcaacaggtggaatatgcgacagtcctcatcagatccttgatggagaaaactgcacactaatagatgctctattgggagaccctcagtgtgatggcttccaaaataagaaatgggacctttttgttgaacgcagcaaagcctacagcaactgttacccttatgatgtgccggattatgcctcccttaggtcactagttgcctcatccggcacactggagtttaacaatgaaagcttcgattggactggagtcactcagaatggaacaagctctgcttgcaaaaggagatctaataaaagtttctttagtagattgaattggttgacccacttaaaatacaaatacccagcattgaacgtgactatgccaaacaatgaaaaatttgacaaattgtacatttggggggttcaccacccgggtacggacagtgaccaaatcagcctatatgctcaagcatcaggaagaatcacagtctctaccaaaagaagccaacaaactgtaatcccgaatatcggatctagacccagggtaagggatgtctccagccgaataagcatctattggacagtagtaaaaccgggagacatacttttgattaacagcacagggaatctaattgctcctcggggttacttcaaaatgcgaagtgggaaaagctcaataatgagatcagatgcacccattggcaaatgcaattctgaatgcatcactccaaatggaagcattcccaatgacaaaccatttcaaaatgtaaacaggatcacatatggggcctgtcccagatatgttaagcaaaacactctgaaattggcaacagggatgcgaaatgtaccagagaaacaaactagaggcatatttggcgcaatcgcgggtttcatagaaaatggttgggagggaatggtggacggttggtacggcttcaggcatcaaaattctgagggcacaggacaagcagcagatctcaaaagcactcaagcagcaatcaaccaaatcaatgggaaactgaataggttaatcgggaaaacaaacgagaaattccatcagattgaaaaagaattctcagaagtagaagggagaattcaggacctcgagaaatatgttgaggacactaaaatagatctctggtcatacaacgcggagcttcttgttgccctggagaaccaacatacaattgatctaactgactcagaaatgaacaaactgtttgaaagaacaaagaagcaactgagggaaaatgctgaggatatgggcaatggttgtttcaaaatataccacaaatgtgacaatgcctgcatagggtcaatcagaaatggaacttatgaccatgatgtgtacagagatgaagcattaaacaaccggttccagatcaaaggtgttgagctgaagtcaggatacaaagattggatcctatggatttcctttgccatatcatgttttttgctttgtgttgctttgttggggttcatcatgtgggcctgccaaaaaggcaacattaggtgcaacatttgcatttga

SEQ ID NO: 30582 - RNA, 1701 nt, synthetic construct; identical to SEQ ID NO: 30535
  misc_feature 1..1701: note = hemagglutinin__InfluenzaA__AAX57654
  source 1..1701: mol_type = other RNA

SEQ ID NO: 30583 - RNA, 1701 nt, synthetic construct; identical to SEQ ID NO: 30574
  misc_feature 1..1701: note = hemagglutinin__InfluenzaA__AAX57664
  source 1..1701: mol_type = other RNA

SEQ ID NO: 30584 - RNA, 1701 nt, synthetic construct
  misc_feature 1..1701: note = hemagglutinin__InfluenzaA__AAX57684
  source 1..1701: mol_type = other RNA
atgaagactatcattgctttgagctacattttatgcctggttttcgctcaaaaacttcccggaaatgacaacagcacggcaacgctgtgcctggggcaccatgcagtgccaaacggaacgctagtgaaaacaatcacgaatgaccaaattgaagtaactaatgctactgagctggttcagagttcctcaacaagtagaatatgcgacagtcctcaccaaatccttgatggagaaaactgcacactaatagatgctctattgggagaccctcattgtgatggcttccaaaataaggaatgggacctttttgttgaacgcagcaaagcctacagcaactgttacccttatgatgtgccggattatgtctcccttaggtcactagttgcctcatcaggcacgctggagtttaacaatgaaagcttcaattggactggagtcgctcagaatggaacaagctctgcttgcaaaaggagatctgataaaagtttctttagtagattgaattggttgcaccaattaaaatacaaatatccagcactgaacgtgactatgccaaacaatgaaaaatttgacaaattgtacatttggggggttcaccacccgggtacagacagtgaccaaatcagcctatatgctcaagcatcagggagagtcacagtctctaccaaaagaagccaacaaactgtaatcccgaatatcggatctggaccctgggtaaggggtgtctccagcagaataagcatctattggacaatagtaaaaccgggagacatacttttgattaacagcacagggaatctaattgctcctcggggttacttcaaaatacgaagtgggaaaagctcaataatgaggtcagatgcacccattggcaaatgcaattctgaatgcatcactccaaatggaagcattcccaatgacaaaccatttcaaaatgtaaacaggatcacatatggggcctgtcccagatatgttaagcaaaacactctgaaattggcaacagggatgcggaatgtaccagagaaacaaactagaggcatattcggtgcaatcgcgggcttcatagaaaatggttgggagggaatgatggacggttggtacggtttcaggcatcaaaattctgagggcacagggcaagcagcagatcttaaaagcactcaagcagcaatcaaccaaatcaacgggaaactgaataggttaatcgagaaaacgaacgagaaattccatcaaattgaaaaagaattctcagaagtagaagggagaattcaggacctcgagaaatatgttgaggacactaaaatagatctctggtcgtacaatgcggagcttcttgttgccctggagaaccaacatacaattgatctaactgactcagaaatgaacaaactgtttgaaagaacaaagaagcaactgagggaaaatgctgaggatatgggcaatggttgtttcaaaatataccacaaatgtgacaatgcctgcatagggtcaatcagaaatggaacttatgaccatgatgtatacagagacgaagcattgaacaaccggttccagatcaaaggtgttgagctgaagtcaggatacaaagattggatcctatggatttcctttgccatatcatgttttttgctttgtattgttttgctggggttcatcatgtgggcctgccaaaaaggcaacattaggtgcaacatttgcatttga

SEQ ID NO: 30585 - RNA, 1701 nt, synthetic construct
  misc_feature 1..1701: note = hemagglutinin__InfluenzaA__AAX57694
  source 1..1701: mol_type = other RNA
atgaagactatcattgctttgagctacattttatgtctggttttcgctcaaaaacttcccggaaatgacaacagcacggcaacgctgtgcctggggcaccatgcagtgccaaacggaacgctagtgaaaacaatcacgaatgaccaaattgaagtgactaatgctactgagctggttcagagttcctcaacaggtagaatatgcgacagtcctcaccaaatccttgatggagaaaactgcacactaatagatgctctattgggagaccctcattgtgatggcttccaaaataaggaatgggacctttttgttgaacgcagcaaagcctacagcaactgttacccttatgatgtgccggattatgtctcccttaggtcactagttgcctcatcaggcacgctggagtttaacaatgaaagcttcaattggactggagtcgctcagaatggaacaagctctgcttgcaaaaggagatctgataaaagtttctttagtagattgaattggttgcaccaattaaaatacaaatatccagcactgaacgtgactatgccaaacaatgaaaaatttgacaaattgtacatttggggggttcaccacccgggtacagacagtgaccaaatcagcctatatgctcaagcatcagggagagtcacagtctctaccaaaagaagccaacaaactgtaatcccgaatatcggatctagaccctgggtaaggggtgtctccagcagaataagcatctattggacaatagtaaaaccgggagacatacttttgattaacagcacagggaatctaattgctcctcggggttacttcaaaatacgaagtgggaaaagctcaataatgaggtcagatgcacccattggcaaatgcaattctgaatgcatcactccaaatggaagcattcccaatgacaaaccatttcaaaatgtaaacaggatcacatatgggccctgtcctagatatgttaagcaaaacactctgaaattggcaacagggatgcggaatgtgccagagaaacaaactagaggcatattcggtgcaatcgcgggcttcatagaaaatggttgggagggaatgatggacggttggtacggtttcaggcatcagaattctgagggcacagggcaagcagcagatcttaaaagcactcaagcagcaatcaaccaaatcaacgggaaactgaataggttaatcgaaaaaacgaacgagaaattccatcaaattgaaaaagaattctcagaagtagaagggagaattcaggacctcgagaaatatgttgaggacactaaaatagatctctggtcgtacaatgcggagcttcttgttgccctggagaaccaacatacaattgatctaactgactcagaaatgaacaaactgtttgaaagaacaaagaagcaactgagggaaaatgctgaggatatgggcaatggttgtttcaaaatataccacaaatgtgacaatgcctgcatagggtcaatcagaaatggaacttatgaccatgatgtatacagagacgaagcattgaacaaccggttccagatcaaaggtgttgagctgaagtcaggatacaaagattggatcctatggatttcctttgccatatcatgttttttgctttgtattgttttgctggggttcatcatgtgggcctgccaaaaaggcaacattaggtgcaacatttgcatttga

SEQ ID NO: 30586 - RNA, 1701 nt, synthetic construct
  misc_feature 1..1701: note = hemagglutinin__InfluenzaA__AAX57704
  source 1..1701: mol_type = other RNA
atgaagactatcattgctttgagctacattctatgtctggttttcgctcaaaaacttcccggaaatgacaacagcacggcaacgctgtgccttgggcaccatgcagtaccaaacggaacgatagtgaaaacaatcacgaatgaccaaattgaagttactaatgctactgagctggttcagatttcctcaacaggtggaatatgcgacagtcctcatcagatccttgatggagaaaactgcacactaatagatgctctattgggagaccctcagtgtgatggcttccaaaataagaaatgggacctttttgttgaacgcagcaaagcctacagcaactgttacccttatgatgtgccggattatgcctcccttaggtcactagttgcctcatccggcacactggagtttaacaatgaaagcttcgattggactggagtcactcagaatggaacaagctctgcttgcaaaaggagatctaataaaagtttctttagtagattgaattggttgacccacttaaaatacaaatacccagcattgaacgtgactatgccaaacaatgaaaaatttgacaaattgtacatttggggggttcaccacccgggtactgacagtgaccaaatcagcctatatgctcaagcatcaggaagaatcacagtctctaccaaaagaagccaacaaactgtaatcccgaatatcggatctagacccagggtaagggatgtctccagccgaataagcatctattggacaatagtaaaaccgggagacatacttttgattaacagcacagggaatctaattgctcctcggggttacttcaaaatacgaagtgggaaaagctcaataatgagatcagatgcacccattggcaaatgcaattctgaatgcatcactccaaatggaagcattcccaatgacaaaccatttcaaaatgtaaacaggatcacatatggggcctgtcccagatatgttaagcaaaacactctgaaattggcaacagggatgcgaaatgtaccagagaaacaaactagaggcatatttggcgcaatcgcgggtttcatagaaaatggttgggagggaatggtggacggttggtacggtttcaggcatcaaaattctgagggcacaggacaagcagcagatctcaaaagcactcaagcagcaatcaaccaaatcaatgggaaactgaataggttaatcgggaaaacaaacgagaaattccatcagattgaaaaagaattctcggaagtagaaggaagaattcaggacctcgagaaatatgttgaggacactaaaatagatctctggtcatacaacgcggagcttcttgttgccctggagaaccaacatacaattgatctaactgactcagaaatgaacaaactgtttgaaaggacaaagaagcaactgagggaaaatgctgaggatatgggcaatggttgtttcaaaatataccacaaatgtgacaatgcctgcatagggtcaatcagaaatggaacttatgaccatgatgtgtacagagatgaagcattaaacaaccggttccagatcaaaggtgttgagctgaagtcaggatacaaagattggatcctatggatttcctttgccatatcatgttttttgctttgtgttgctttgttggggttcatcatgtgggcctgccaaaaaggcaacattaggtgcaacatttgcatttga

SEQ ID NO: 30587 - RNA, 1701 nt, synthetic construct
  misc_feature 1..1701: note = hemagglutinin__InfluenzaA__AAX57714
  source 1..1701: mol_type = other RNA
atgaagactatcattgctttgagctacattttatgcctggttttcgctcaaaaacttcccggaaatgacaacagcacggcaacgctttgcctggggcaccatgcagtgccaaacggaacgctagtgaaaacaatcacgaatgaccaaattgaagtgactaatgctactgagctggttcagagttcctcaacaggtagaatatgcgacagtcctcaccaaatccttgatggagaaaactgcacactaatagatgctctattgggagaccctcattgtgatggcttccaaaataaggaatgggacctttttgttgaacgcagcaaagcctacagcaactgttacccttatgatgtgccggattatgtctcccttaggtcactagttgcctcatcaggcacgctggagtttaacaatgaaagcttcaattggactggagtcgctcagaatggaacaagctctgcttgcaaaaggagatctgataaaagtttctttagtagattgaattggttgcaccaattaaaatacaaatatccagcattgaacgtgactatgccaaacaatgaaaaatttgacaaattgtacatttggggggttcaccacccgggtacagacagtgaccaaatcagcctatatgctcaagcatcagggagagtcacagtctctaccaaaagaagccaacaaactgtaatcccgaatatcggatctagaccctgggtaaggggtgtctccagcagaataagcatctattggacaatagtaaaaccgggagacatacttttgattaacagcacagggaatctaattgctcctcggggttacttcaaaatacgaagtgggaaaagctcaataatgaggtcagatgcacccattggcaaatgcaattctgaatgcatcactccaaatggaagcattcccaatgacaaaccatttcaaaatgtaaacaggatcacatatgggccctgtcccagatatgttaagcaaaacactctgaaattggcaacagggatgcgaaatgtgccagagaaacaaactagaggcatattcggtgcaatcgcgggcttcatagaaaatggttgggagggaatgatggacggttggtacggtttcaggcatcaaaattctgagggcacagggcaagcagcagatcttaaaagcactcaagcagcaatcaaccaaatcaacgggaaactgaataggttaatcgagaaaacgaacgagaaattccatcaaattgaaaaagaattctcagaagtagaagggagaattcaggacctcgagaaatatgttgaggacactaaaatagatctctggtcgtacaatgcggagcttcttgttgccctggagaaccaacatacaattgatctaactgactcagaaatgaacaaactgtttgaaagaacaaagaagcaactgagggaaaatgctgaggatatgggcaatggttgtttcaaaatataccacaaatgtgacaatgcctgcatagggtcaatcagaaatggaacttatgaccatgatgtatacagagacgaagcattgaacaaccggttccagatcaaaggtgttgagctgaagtcaggatacaaagattggatcctatggatttcctttgccatatcatgttttttgctttgtattgttttgctggggttcatcatgtgggcctgccaaaaaggcaacattaggtgcaacatttgcatttga

SEQ ID NO: 30588 - RNA, 1701 nt, synthetic construct
  misc_feature 1..1701: note = hemagglutinin__InfluenzaA__AAX57733
  source 1..1701: mol_type = other RNA
atgaagactatcattgctttgagctacattttatgcctggttttcgctcaaaaacttcccggaaatgacaacagcacggcaacgctgtgcctggggcaccatgcagtgccaaacggaacgctagtgaaaacaatcacgaatgaccaaattgaagtaactaatgctactgagctggttcagagttcctcaacaagtagaatatgcgacagtcctcaccaaatccttgatggagaaaactgcacactaatagatgctctattgggagaccctcattgtgatggcttccaaaataaggaatgggacctttttgttgaacgcagcaaagcctacagcaactgttacccttatgatgtgccggattatgtctcccttaggtcactagttgcctcatcaggcacgctggagtttaacaatgaaagcttcaattggactggagtcgctcagaatggaacaagctctgcttgcaaaaggagatctgataaaagtttctttagtagattgaattggttgcaccaattaaaatacaaatatccagcactgaacgtgactatgccaaacaatgaaaaatttgacaaattgtacatttggggggttcaccacccgggtacagacagtgaccaaatcagcctatatgctcaagcatcagggagagtcacagtctctaccaagagaagccaacaaactgtaatcccgaatatcggatctggaccctgggtaaggggtgtctccagcagaataagcatctattggacaatagtaaaaccgggagacatacttttgattaacagcacagggaatctaattgctcctcggggttacttcaaaatacgaagtgggaaaagctcaataatgaggtccgatgcacccattggcaaatgcaattctgaatgcatcactccaaatggaagcattcccaatgacaaaccatttcaaaatgtaaacaggatcacatatggggcctgtcccagatatgttaagcaaaacactctgaaattggcaacagggatgcggaatgtaccagagaaacaaactagaggcatattcggtgcaatcgcgggcttcatagaaaatggttgggagggaatgatggacggttggtacggtttcaggcatcaaaattctgagggcacagggcaagcagcagatcttaaaagcactcaagcagcaatcaaccaaatcaacgggaaactgaataggttaatcgagaaaacgaacgagaaattccatcaaattgaaaaagaattctcagaagtagaagggagaattcaggacctcgagaaatatgttgaggacactaaaatagatctctggtcgtacaatgcggagcttcttgttgccctggagaaccaacatacaattgatctaactgactcagaaatgaacaaactgtttgaaagaacaaagaagcaactgagggaaaatgctgaggatatgggcaatggttgtttcaaaatataccacaaatgtgacaatgcctgcatagggtcaatcagaaatggaacttatgaccatgatgtatacagagacgaagcattgaacaaccggttccagatcaaaggtgttgagctgaagtcaggatacaaagattggatcctatggatttcctttgccatatcatgttttttgctttgtattgttttgctggggttcatcatgtgggcctgccaaaaaggcaacattaggtgcaacatttgcatttga

SEQ ID NO: 30589 - RNA, 1701 nt, synthetic construct
  misc_feature 1..1701: note = hemagglutinin__InfluenzaA__AAX57734
  source 1..1701: mol_type = other RNA
atgaagactatcattgctttgagctacattttatgcctggttttcgctcaaaaacttcccggaaatgacaacagcacggcaacgctgtgcctggggcaccatgcagtgccaaacggaacgctagtgaaaacaatcacgaatgaccaaattgaagtaactaatgctactgagctggttcagagttcctcaacaagtagaatatgcaacagtcctcaccaaatccttgatggagaaaactgcacactaatagatgctctattgggagaccctcattgtgatggcttccaaaataaggaatgggacctttttgttgaacgcagcaaagcctacagcaactgttacccttatgatgtgccggattatgtctcccttaggtcactagttgcctcgtcaggcacgctggagtttaacaatgaaagcttcaattggactggagtcgctcagaatggaacaagctctgcttgcaaaaggagatctgataaaagtttctttagtagattgaattggttgcaccaattaaaatacaaatatccagcactgaacgtgactatgccaaacaatgaaaaatttgacaaattgtacatttggggggttcaccacccgggtacagacagtgaccaaatcagcctatatgctcaagcatcagggagagtcacagtctctaccaagagaagccaacaaactgtaatcccgaatatcggatctggaccctgggtaaggggtgtctccagcagaataagcatctattggacaatagtaaaaccgggagacatacttttgattaacagcacagggaatctaattgctcctcggggttacttcaaaatacgaagtgggaaaagctcaataatgaggtccgatgcacccattggcaaatgcaattctgaatgcatcactccaaatggaagcattcccaatgacaaaccatttcaaaatgtaaacaggatcacatatggggcctgtcccagatatgttaagcaaaacactctgaaattggcaacagggatgcggaatgtaccagagaaacaaactagaggcatattcggtgcaatcgcgggcttcatagaaaatggttgggagggaatgatggacggttggtacggtttcaggcatcaaaattctgagggcacagggcaagcagcagatcttaaaagcactcaagcagcaatcaaccaaatcaacgggaaactgaataggttaatcgagaaaacgaacgagaaattccatcaaattgaaaaagaattctcagaagtagaagggagaattcaggacctcgagaaatatgttgaggacactaaaatagatctctggtcgtacaatgcggagcttcttgttgccctggagaaccaacatacaattgatctaactgactcagaaatgaacaaactgtttgaaagaacaaagaagcaactgagggaaaatgctgaggatatgggcaatggttgtttcaaaatataccacaaatgtgacaatgcctgcatagggtcaatcagaaatggaacttatgaccatgatgtgtacagagacgaagcattgaacaaccggttccagatcaaaggtgttgagctgaagtcaggatacaaagattggatcctatggatttcctttgccatatcatgttttttgctttgtattgttttgctggggttcatcatgtgggcctgccaaaaaggcaacattaggtgcaacatttgcatttga

SEQ ID NO: 30590 - RNA, 1701 nt, synthetic construct
  misc_feature 1..1701: note = hemagglutinin__InfluenzaA__AAX57744
  source 1..1701: mol_type = other RNA
atgaagactatcattgctttgagctacattttatgtctggttttcgctcaaaaacttcccgtaaatgacaacagcacggcaacgctgtgcctgggacaccatgcagtgccaaacggaacgctagtgaaaacaatcacgaatgaccacattgaagtgactaatgctactgagctggttcagagttcctcaacaggtagaatatgcgacagtcctcaccaaatccttgatggagaaaactgcacactaatagatgctctattgggagaccctcattgtgatggcttccaaaataaggaatgggacctttttgttgaacgcagcacagcctacagcaactgttacccttatgatgtgccggattatgcctcccttaggtcactagttgcctcatccggcacactggagtttaacaatgaaagcttcaattggactggagtcgctcagaatggaacaagctctgcttgcaaaaggagatctattaaaagtttctttagtagattgaattggttgcaccaattaaaatacaaatatccagcactgaacgtgactatgccaaacaatgaaaaatttgacaaattgtacatttggggggttcaccacccgagtacggacagtgaccaaatcagcctatatgctcaagcatcagggagagtcacagtctctaccaaaagaagccaacaaactgtaatcccgaatatcggatctagaccctgggtaaggggtgtctccagcagaataagcatctattggacaatagtaaaaccgggagacatacttttgattaacagcacagggaatctaattgctcctcggggttactttaaaatacgaagtgggaaaagctcaataatgaggtcaaatgcacccattggcaaatgcaattctgaatgcatcactccaaatggaagcattcccaatgacaaaccatttcaaaatgtaaacaggatcacatatggggcctgtcccagatatgttaagcaaaacactctgaaattggcaacagggatgcggaatgtaccagagaaacaaactagaggcatattcggcgcaatcgcgggtttcatagaaaatggttgggagggaatggtggacggttggtacggtttcaggcatcaaaattctgagggcacaggacaagcagcagatcttaaaagcactcaagcagcaatcaaccaaatcaacgggaaactgaataggttaatcgagaaaacaaacgagaaattccatcaaattgaaaaagaattctcagaagtagaagggagaattcaggacctcgagaaatatgttgaggacactaaaatagatctctggtcgtacaacgcggagcttcttgttgccctggagaaccaacatacaattgatctaactgactcagaaatgaacaaactgtttgaaagaacaaggaagcaactgagagaaaatgctgaggatatgggcaatggttgtttcaaaatataccacaaatgtgacaatgcctgcatagggtcaatcagaaatggaacttatgaccatgatgtatacagagacgaagcattaaacaaccggttccagatcaaaggtgttgagctgaagtcaggatacaaagattggatcctatggatttcctttgccatatcatgttttttgctttgtgttgttttgctggggttcatcatgtgggcctgccaaaaaggcaacattaggtgcaacatttgcatttga

SEQ ID NO: 30591 - RNA, 1701 nt, synthetic construct
  misc_feature 1..1701: note = hemagglutinin__InfluenzaA__AAX57764
  source 1..1701: mol_type = other RNA
atgaagactatcattgctttgagctacattttatgtctggttttcgctcaaaaacttcccgtaaatgacaacagcacggcaacgctgtgcctgggacaccatgcagtgccaaacggaacgctagtgaaaacaatcacgaatgaccacattgaagtgactaatgctactgagctggttcagagttcctcaacaggtagaatatgcgacagtcctcaccaaatccttgatggagaaaactgcacactaatagatgctctattgggagaccctcattgtgatggcttccaaaataaggaatgggacctttttgttgaacgcagcacagcctacagcaactgttacccttatgatgtgccggattatgcctcccttaggtcactagttgcctcatccggcacactggagtttaacaatgaaagcttcaattggactggagtcgctcagaatggaacaagctctgcttgcaaaaggagatctattaaaagtttctttagtagattgaattggttgcaccaattaaaatacaaatatccagcactgaacgtgactatgccaaacaatgaaaaatttgacaaattgtacatttggggggttcaccacccgagtacggacagtgaccaaatcagcctatatgctcaagcatcagggagagtcacagtctctaccaaaagaagccaacaaactgtaatcccgaatatcggatctagaccctgggtaaggggtgtctccagcagaataagcatctattggacaatagtaaaaccgggagacatacttttgattaacagcacagggaatctaattgctcctcggggttactttaaaatacgaagtgggaaaagctcaataatgaggtcaaatgcacccattggcaaatgcaattctgaatgcatcactccaaatggaagcattcccaatgacaaaccatttcaaaatgtaaacaggatcacatatggggcctgtcccagatatgttaagcaaaacactctgaaattggcaacagggatgcggaatgtaccagagaaacaaactagaggcatattcggcgcaatcgcgggtttcatagaaaatggttgggagggaatggtggacggttggtacggtttcaggcatcaaaattctgagggcacgggacaagcagcagatcttaaaagcactcaagcagcaatcaaccaaatcaacgggaaactgaataggttaatcgagaaaacaaacgagaaattccatcaaattgaaaaagaattctcagaagtagaagggagaattcaggacctcgagaaatatgttgaggacactaaaatagatctctggtcgtacaacgcggagcttcttgttgccctggagaaccaacatacaattgatctaactgactcagaaatgaacaaactgtttgaaagaacaaggaagcaactgagggaaaatgctgaggatatgggcaatggttgtttcaaaatataccacaaatgtgacaatgcctgcatagggtcaatcagaaatggaacttatgaccatgatgtatacagagacgaagcattaaacaaccggttccagatcaaaggtgttgagctgaagtcaggatacaaagattggatcctatggatttcctttgccatatcatgttttttgctttgtgttgttttgctggggttcatcatgtgggcctgccaaaaaggcaacattaggtgcaacatttgcatttga

SEQ ID NO: 30592 - RNA, 1701 nt, synthetic construct
  misc_feature 1..1701: note = hemagglutinin__InfluenzaA__AAX57774
  source 1..1701: mol_type = other RNA
atgaagactatcattgctttgagctacattttatgtctggttttcgctcaaaaacttcccgtaaatgacaacagcacggcaacgctgtgcctgggacaccatgcagtgccaaacggaacgctagtgaaaacaatcacgaatgaccacattgaagtgactaatgctactgagctggttcagagttcctcaacaggtagaatatgcgacagtcctcaccaaatccttgatggagaaaactgcacactaatagatgctctattgggagaccctcattgtgatggcttccaaaataaggaatgggacctttttgttgaacgcagcacagcctacagcaactgttacccttatgatgtgccggattatgcctcccttaggtcactagttgcctcatccggcacactggagtttaacaatgaaagcttcaattggactggagtcgctcagaatggaacaagctctgcttgcaaaaggagatctattaaaagtttctttagtagattgaattggttgcaccaattaaaatacaaatatccagcactgaacgtgactatgccaaacaatgaaaaatttgacaaattgtacatttggggggttcaccacccgagtacggacagtgaccaaatcagcctatatgctcaagcatcagggagagtcacagtctctaccaaaagaagccaacaaactgtaatcccgaatatcggatctagaccctgggtaaggggtgtctccagcagaataagcatctattggacaatagtaaaaccgggagacatacttttgattaacagcacagggaatctaattgctcctcggggttacttcaaaatacgaagtgggaaaagctcaataatgaggtcaaatgcacccattggcaaatgcaattctgaatgcatcactccaaatggaagcattcccaatgacaaaccatttcaaaatgtaaacaggatcacatatggggcctgtcccagatatgttaagcaaaacactctgaaattggcaacagggatgcggaatgtaccagagaaacaaactagaggcatattcggcgcaatcgcgggtttcatagaaaatggttgggaaggaatggtggacggttggtacggtttcaggcatcaaaactctgagggcacaggacaagcagcagatcttaaaagcactcaagcagcaatcaaccaaatcaacgggaaactgaataggttaatcgagaaaacaaacgagaaattccatcaaattgaaaaagaattctcagaagtagaagggagaattcaggacctcgagaaatatgttgaggacactaaaatagatctctggtcgtacaacgcggagcttcttgttgccctggagaaccaacatacaattgatctaactgactcagaaatgaacaaactgtttgaaagaacaaggaagcaactgagggaaaatgctgaggatatgggcaatggttgtttcaaaatataccacaaatgtgacaatgcctgcatagggtcaatcagaaatggaacttatgaccatgatgtatacagagacgaagcattaaacaaccggttccagatcaaaggtgttgagctgaagtcaggatacaaagattggatcctatggatttcctttgccatatcatgttttttgctttgtgttgttttgctggggttcatcatgtgggcctgccaaaaaggcaacattaggtgcaacatttgcatttga

SEQ ID NO: 30593 - RNA, 1701 nt, synthetic construct
  misc_feature 1..1701: note = hemagglutinin__InfluenzaA__AAX57784
  source 1..1701: mol_type = other RNA
atgaagactatcattgctttgagctacattttatgcctggttttcgctcaaaaacttcccggaaatgacaacagcacggcaacgctgtgcctggggcaccatgcagtgccaaacggaacgctagtgaaaacaatcacgaatgaccaaattgaagtaactaatgctactgagctggttcagaattcctcaacaagtagaatatgcgacagtcctcaccaaatccttgatggagaaaactgcacactaatagatgctctattgggagaccctcattgtgatggcttccaaaataaggaatgggacctttttgttgaacgcagcaaagcctacagcaactgttacccttatgatgtgccggattatgtctcccttaggtcactagttgcctcatcaggcacgctggagtttaacaatgaaagcttcaattggactggagtcgctcagaatggaacaagctctgcttgcaaaaggagatctgataaaagtttctttagtagattgaattggttgcaccaattaaaatacaaatatccagcactgaacgtgactatgccaaacaatgaaaaatttgacaaattgtacatttggggggttcaccacccgggtacagacagtgaccaaatcagcctatatgctcaagcatcagggagagtcacagtctctaccaagagaagccaacaaactgtaatcccgaatatcggatctagaccctgggtaaggggtgtctccagcagaataagcatctattggacaatagtaaaaccgggagacatacttttgattaacagcacagggaatctaattgctcctcggggttacttcaaaatacgaagtgggaaaagctcaataatgaggtccgatgcacccattggcaaatgcaattctgaatgcatcactccaaatggaagcatccccaatgacaaaccatttcaaaatgtaaacaggatcacatatggggcctgtcccagatatgttaagcaaaacactctgaaattggcaacagggatgcggaatgtaccagagaaacaaactagaggcatattcggtgcaatcgcgggcttcatagaaaatggttgggagggaatgatggacggttggtacggtttcaggcatcaaaattctgagggcacagggcaagcagcagatcttaaaagcactcaagcagcaatcaaccaaatcaacgggaaactgaataggttaatcgagaaaacgaacgagaaattccatcaaattgaaaaagaattctcagaagtagaagggagaattcaggacctcgagaaatatgttgaggacactaaaatagatctctggtcgtacaatgcggagcttcttgttgccctggagaaccaacatacaattgatctaactgactcagaaatgaacaaactgtttgaaagaacaaagaagcaactgagggaaaatgctgaggatatgggcaatggttgtttcaaaatataccacaaatgtgacaatgcctgcatagggtcaatcagaaatggaacttatgaccatgatgtatacagagacgaagcattgaacaaccggttccagatcaaaggtgttgagctgaagtcaggatacaaagattggatcctatggatttcctttgccatatcatgttttttgctttgtattgttttgctggggttcatcatgtgggcctgccaaaaaggcaacattaggtgcaacatttgcatttga

SEQ ID NO: 30594 - RNA, 1701 nt, synthetic construct
  misc_feature 1..1701: note = hemagglutinin__InfluenzaA__AAX57794
  source 1..1701: mol_type = other RNA
atgaagactatcattgctttgagctacattttatgtctggttttcgctcaaaaacttcccgtaaatgacaacagcacggcaacgctgtgcctgggacaccatgcagtgccaaacggaacgctagtgaaaacaatcacgaatgaccacattgaagtgactaatgctactgagctggttcagagttcctcaacaggtagaatatgcgacagtcctcaccaaatccttgatggagaaaactgcacactaatagatgctctattgggagaccctcattgtgatggcttccaaaataaggaatgggacctttttgttgaacgcagcacagcctacagcaactgttacccttatgatgtgccggattatgcctcccttaggtcactagttgcctcatccggcacactggagtttaacaatgaaagcttcaattggactggagtcgctcagaatggaacaagctctgcttgcaaaaggagatctattaaaagtttctttagtagattgaattggttgcaccaattaaaatacaaatatccagcactgaacgtgactatgccaaacaatgaaaaatttgacaaattgtacatttggggggttcaccacccgagtacggacagtgaccaaatcagcctatatgctcaagcatcagggagagtcacagtctctaccaaaagaagccaacaaactgtaatcccgaatatcggatctagaccctgggtaaggggtgtctccagcagaataagcatccattggacaatagtaaaaccgggagacatacttttgattaacagcacagggaatctaattgctcctcggggttactttaaaatacgaagtgggaaaagctcaataatgaggtcaaatgcacccattggcaaatgcaattctgaatgcatcactccaaatggaagcattcccaatgacaaaccatttcaaaatgtaaacaggatcacatatggggcctgtcccagatatgttaagcaaaacactctgaaattggcaacagggatgcggaatgtaccagagaaacaaactagaggcatattcggcgcaatcgcgggtttcatagaaaatggttgggagggaatggtggacggttggtacggtttcaggcatcaaaattctgagggcacaggacaagcagcagatcttaaaagcactcaagcagcaatcaaccaaatcaacgggaaactgaataggttaatcgagaaaacaaacgagaaattccatcaaattgaaaaagaattctcagaagtagaagggagaattcaggacctcgagaaatatgttgaggacactaaaatagatctctggtcgtacaacgcggagcttcttgttgccctggagaaccaacatacaattgatctaactgactcagaaatgaacaaactgtttgaaagaacaaggaagcaactgagggaaaatgctgaggatatgggcaatggttgtttcaaaatataccacaaatgtgacaatgcctgcatagggtcaatcagaaatggaacttatgaccatgatgtatacagagacgaagcattaaacaaccggttccagatcaaaggtgttgagctgaagtcaggatacaaagattggatcctatggatttcctttgccatatcatgttttttgctttgtgttgttttgctggggttcatcatgtgggcctgccaaaaaggcaacattaggtgcaacatttgcatttga

SEQ ID NO: 30595 - RNA, 1701 nt, synthetic construct
  misc_feature 1..1701: note = hemagglutinin__InfluenzaA__AAX57814
  source 1..1701: mol_type = other RNA
atgaagactatcattgctttgagctacattttatgtctggttttcgctcaaaaacttcccgtaaatgacaacagcacggcaacgctgtgcctgggacaccatgcagtgccaaacggaacgctagtgaaaacaatcacgaatgaccacattgaagtgactaatgctactgagctggttcagagttcctcaacaggtagaatatgcgacagtcctcaccaaatccttgatggagaaaactgcacactaatagatgctctattgggagaccctcattgtgatggcttccaaaataaggaatgggacctttttgttgaacgcagcacagcctacagcaactgttacccttatgatgtgccggattatgcctcccttaggtcactagttgcctcatccggcacactggagtttaacaatgaaagcttcaattggactggagtcgctcagaatggaacaagctctgcttgcaaaaggagatctattaaaagtttctttagtagattgaattggttgcaccaattaaaatacaaatatccagcactgaacgtgaccatgccaaacaatgagaaatttgacaaattgtacatttggggggttcaccacccgagtacggacagtgaccaaatcagcctatatgctcaagcatcagggagagtcacagtctctaccaaaagaagccaacaaactgtaatcccgaatatcggatctagaccctgggtaaggggtgtctccagcagaataagcatctattggacaatagtaaaaccgggagacatacttttgattaacagcacagggaatctaattgctcctcggggttacttcaaaatacgaagtgggaaaagctcaataatgaggtcaaatgcacccattggcaaatgcaattctgaatgcatcactccaaatggaagcattcccaatgacaaaccatttcaaaatgtaaacaggatcacatatggggcctgtcccagatatgttaagcaaaacactctgaaattggcaacagggatgcggaatgtaccagagaaacaaactagaggcatattcggcgcaatcgcgggtttcatagaaaatggttgggaaggaatggtggacggttggtacggtttcaggcatcaaaattctgagggcacaggacaagcagcagatcttaaaagcactcaagcagcaatcaaccaaatcaacgggaaactgaataggttaatcgagaaaacaaacgagaaattccatcaaattgaaaaagaattctcagaagtagaagggagaattcaggacctcgagaaatatgttgaggacactaaaatagatctctggtcgtacaacgcggagcttcttgttgccctggagaaccaacatacaattgatctaactgactcagaaatgaacaaactgtttgaaagaacaaggaagcaactgagggaaaatgctgaggatatgggcaatggttgtttcaaaatataccacaaatgtgacaatgcctgcatagggtcaatcagaaatggaacttatgaccatgatgtatacagagacgaagcattaaacaaccggttccagatcaaaggtgttgagctgaagtcaggatacaaagattggatcctatggatttcctttgccatatcatgttttttgctttgtgttgttttgctggggttcatcatgtgggcctgccaaaaaggcaacattaggtgcaacatttgcatttga

SEQ ID NO: 30596 - RNA, 1701 nt, synthetic construct
  misc_feature 1..1701: note = hemagglutinin__InfluenzaA__AAX57824
  source 1..1701: mol_type = other RNA
atgaagactatcattgctttgagctacattttatgtatggttttcgctcaaaaacttcccgtaaatgacaacagcacggcaacgctgtgcctgggacaccatgcagtgccaaacggaacgctagtgaaaacaatcacgaatgaccacattgaagtgactaatgctactgagctggttcagagttcctcaacaggtagaatatgcgacagtcctcaccaaatccttgatggagaaaactgcacactaatagatgctctattgggagaccctcattgtgatggcttccaaaataaggaatgggacctttttgttgaacgcagcacagcctacagcaactgttacccttatgatgtgccggattatgcctcccttaggtcactagttgcctcatccggcacactggagtttaacaatgaaagcttcaattggactggagtcgctcagaatggaacaagctctgcttgcaaaaggagatctattaaaagtttctttagtagattgaattggttgcaccaattaaaatacaaatatccagcactgaacgtgaccatgccaaacaatgaaaaatttgacaaattgtacatttggggggttcaccacccgagtacggacagtgaccaaatcagcctatatgctcaagcatcagggagagtcacagtctctaccaaaagaagccaacaaactgtaatcccgaatatcggatctagaccctgggtaaggggtgtctccagcagaataagcatctattggacaatagtaaaaccgggagacatacttttgattaacagcacagggaatctaattgctcctcggggttacttcaaaatacgaagtgggaaaagctcaataatgaggtcaaatgcacccattggcaaatgcaattctgaatgcatcactccaaatggaagcattcccaatgacaaaccatttcaaaatgtaaacaggatcacatatggggcctgtcccagatatgttaagcaaaacactctgaaattggcaacagggatgcggaatgtaccagagaaacaaactagaggcatattcggcgcaatcgcgggtttcatagaaaatggttgggaaggaatggtggacggttggtacggtttcaggcatcaaaattctgagggcacaggacaagcagcagatcttaaaagcactcaagcagcaatcaaccaaatcaacgggaaactgaataggttaatcgagaaaacaaacgagaaattccatcaaattgaaaaagaattctcagaagtagaagggagaattcaggacctcgagaaatatgttgaggacactaaaatagatctctggtcgtacaacgcggagcttcttgttgccctggagaaccaacatacaattgatctaactgactcagaaatgaacaaactgtttgaaagaacaaggaagcaactgagggaaaatgctgaggatatgggcaatggttgtttcaaaatataccacaaatgtgacaatgcctgcatagggtcaatcagaaatggaacttatgaccatgatgtatacagagacgaagcattaaacaaccggttccagatcaaaggtgttgagctgaagtcaggatacaaagattggatcctatggatttcctttgccatatcatgttttttgctttgtgttgttttgctggggttcatcatgtgggcctgccaaaaaggcaacattaggtgcaacatttgcatttga

SEQ ID NO: 30597 - RNA, 1701 nt, synthetic construct
  misc_feature 1..1701: note = hemagglutinin__InfluenzaA__AAX57834
  source 1..1701: mol_type = other RNA
atgaagactatcattgctttgagctacattttatgtctggttttcgctcaaaaacttcccgtaaatgacaacagcacggcaacgctgtgcctgggacaccatgcagtgccaaacggaacgctagtgaaaacaatcacgaatgaccacattgaagtgactaatgctactgagctagttcagagttcctcaacaggtagaatatgcgacagtcctcaccagatccttgatggagaaaactgcacactaatagatgctctattgggagaccctcattgtgatggcttccaaaataaggaatgggacctttttgttgaacgcagcacagcctacagcaactgttacccttatgatgtgccggattatgcctcccttaggtcactagttgcctcatccggcacactggagtttaacaatgaaagcttcaattggactggagtcgctcagaatggaacaagctctgcttgcaaaaggagatctattaaaagtttctttagtagattgaattggttgcaccaattaaaatacaaatatccagcactgaacgtgactatgccaaacaatgaaaaatttgacaaattgtacatttggggggttcaccacccgagtacggacagtgaccaaatcagcctatatgctcaagcatcagggagagtcacagtctctaccaaaagaagccaacaaactgtaatcccgaatatcggatctagaccctgggtaaggggtgtctccagcagaataagcatctattggacaatagtaaaaccgggagacatacttttgattaacagcacagggaatctaattgctcctcggggttactttaaaatacgaagtgggaaaagctcaataatgaggtcaaatgcacccattggcaaatgcaattctgaatgcatcactccaaatggaagcattcccaatgacaaaccatttcaaaatgtaaacaggatcacatatggggcctgtcccagatacgttaagcaaaacactctgaaattggcaacagggatgcggaatgtaccagagaaacaaactagaggcatattcggcgcaatcgcgggtttcatagaaaatggttgggagggaatggtggacggttggtacggtttcaggcatcaaaattctgagggcacaggacaagcagcagatcttaaaagcactcaagcagcaatcaaccaaatcaacgggaaactgaataggttaatcgagaaaacaaacgagaaattccatcaaattgaaaaagaattctcagaagtagaagggagaattcaggacctcgagaaatatgttgaggacactaaaatagatctctggtcgtacaacgcggagcttcttgttgccctggagaaccaacatacaattgatctaactgactcagaaatgaacaaactgtttgaaagaacaaggaagcaactgagggaaaatgctgaggatatgggcaatggttgtttcaaaatataccacaaatgtgacaatgcctgcatagggtcaatcagaaatggaacttatgaccatgatgtatacagagacgaagcattaaacaaccggttccagatcaaaggtgttgagctgaagtcaggatacaaagattggatcctatggatttcctttgccatatcatgttttttgctttgtgttgttttgctggggttcatcatgtgggcctgccaaaaaggcaacattaggtgcaacatttgcatttga

SEQ ID NO: 30598 - RNA, 1701 nt, synthetic construct
  misc_feature 1..1701: note = hemagglutinin__InfluenzaA__AAX57844
  source 1..1701: mol_type = other RNA
atgaagactatcattgctttgagctacattttatgtctggttttcgctcaaaaacttcccgtaaatgacaacagcacggcaacgctgtgcctgggacaccatgcagtgccaaacggaacgctagtgaaaacaatcacgaatgaccacattgaagtgactaatgctactgagctggttcagagttcctcaacaggtagaatatgcgacagtcctcaccaaatccttgatggagaaaactgcacactaatagatgctctattgggagaccctcattgtgatggcttccaaaataaggaatgggacctttttgttgaacgcagcacagcctacagcaactgttacccttatgatgtgccggattatgcctcccttaggtcactagttgcctcatccggcacactggagtttaacaatgaaagcttcaattggactggagtcgctcagaatggaacaagctctgcttgcaaaaggagatctattaaaagtttctttagtagattgaattggttgcaccaattaaaatacaaatatccagcactgaacgtgactatgccaaacaatgaaaaatttgacaaattgtacatttggggggttcaccatccgagtacggacagtgaccaaatcagcctatatgctcaagcatcagggagagtcacagtctctaccaaaagaagccaacaaactgtaatcccgaatatcggatctagaccctgggtaaggggtgtctccagcagaataagcatctattggacaatagtaaaaccgggagacatacttttgattaacagcacagggaatctaattgctcctcggggttactttaaaatacgaagtgggaaaagctcaataatgaggtcaaatgcacccattggcaaatgcaattctgaatgcatcactccaaatggaagcattcccaatgacaaaccatttcaaaatgtaaacaggatcacatatggggcatgtcccagatatgttaagcaaaacactctgaaattggcaacagggatgcggaatgtaccagagaaacaaactagaggcatattcggcgcaatcgcgggtttcatagaaaatggttgggagggaatggtggacggttggtacggtttcaggcatcaaaattctgagggcacaggacaagcagcagatcttaaaagcactcaagcagcaatcaaccaaatcaacgggaaactgaataggttaatcgagaaaacaaacgagaaattccatcaaattgaaaaagaattctcagaagtagaagggagaattcaggacctcgagaaatatgttgaggacactaaaatagatctctggtcgtacaacgcggagcttcttgttgccctggagaaccaacatacaattgatctaactgactcagaaatgaacaaactgtttgaaagaacaaggaagcaactgagggaaaatgctgaggatatgggcaatggttgtttcaaaatataccacaaatgtgacaatgcctgcatagggtcaatcagaaatggaacttatgaccatgatgtatacagagacgaagcattaaacaaccggttccagatcaaaggtgttgagctgaagtcaggatacaaagattggatcctatggatttcctttgccatatcatgttttttgctttgtgttgttttgctggggttcatcatgtgggcctgccaaaaaggcaacattaggtgcaacatttgcatttga

SEQ ID NO: 30599 - RNA, 1701 nt, synthetic construct
  misc_feature 1..1701: note = hemagglutinin__InfluenzaA__AAX57864
  source 1..1701: mol_type = other RNA
atgaagactatcattgctttgagctactttctatgtctggttttcgctcaaaaacttcccgtaaatgacaacagcacggcaacgctgtgcctgggacaccatgcagtgccaaacggaacgctagtgaaaacaatcacgaatgaccacattgaagtgactaatgctactgagctggttcagagttcctcaacaggtagaatatgcgacagtcctcaccaaatccttgatggagaaaactgcacactaatagatgctctattgggagaccctcattgtgatggcttccagaataaggaatgggacctttttgttgaacgcagcacagcctacagcaactgttacccttatgatgtgccggattatgcctcccttaggtcactagttgcctcatccggcacactggagtttaacaatgaaagcttcaattggactggagtcgctcagaatggaacaagctctgcttgcaaaaggagatctattaaaagtttctttagtagattgaattggttgcaccaattaaaatacaaatatccagcactgaacgtgactatgccaaacaatgaaaaatttgacaaattgtacatttggggggttcaccacccgagtacggacagtgaccaaatcagcctatatgctcaagcatcagggagagtcacagtctctaccaaaagaagccaacaaactgtaatcccgaatatcggatctagaccctgggtaaggggtgtctccagcagaataagcatctattggacaatagtaaaaccgggagacatacttttgattaacagcacagggaatctaattgctcctcggggttactttaaaatacgaagtgggaaaagctcaataatgaggtcaaatgcacccattggcaaatgcaattctgaatgcatcactccaaatggaagcattcccaatgacaaaccatttcaaaatgtaaacaggatcacatatggggcctgtcccagatatgttaagcaaaacactctgaaattggcaacagggatgcggaatgtaccagagaaacaaactagaggcatattcggcgcaatcgcgggtttcatagaaaatggttgggagggaatggtggacggttggtacggtttcaggcatcaaaattctgagggcacaggacaagcagcagatcttaaaagcactcaagcagcaatcaaccaaatcaacgggaaactgaataggttaatcgagaaaacaaacgagaaattccatcaaattgaaaaagaattctcagaagtagaagggagaattcaggacctcgagaaatatgttgaggacactaaaatagatctctggtcgtacaacgcggagcttcttgttgccctggagaaccaacatacaattgatctaactgactcagaaatgaacaaactgtttgaaagaacaaggaagcaactgagggaaaatgctgaggatatgggcaatggttgtttcaaaatataccacaaatgtgacaatgcctgcatagggtcaatcagaaatggaacttatgaccatgatgtatacagagacgaagcattaaacaaccggttccagatcaaaggtgttgagctgaagtcaggatacaaagattggatcctatggatttcctttgccatatcatgttttttgctttgtgttgttttgctggggttcatcatgtgggcctgccaaaaaggcaacattaggtgcaacatttgcatttga

SEQ ID NO: 30600 - RNA, 1701 nt, synthetic construct
  misc_feature 1..1701: note = hemagglutinin__InfluenzaA__AAX57874
  source 1..1701: mol_type = other RNA
atgaagactatcattgctttgagctacattttatgtctggttttcgctcaaaaacttcccgtaaatgacaacagcacggcaacgctgtgcctgggacaccatgcagtgccaaatggaacgctagtgaaaacaatcacgaatgaccacattgaagtgactaatgctactgagctggttcagagttcctcaacaggtagaatatgcgacagtcctcaccaaatccttgatggagaaaactgcacactaatagatgctctattgggagaccctcattgtgatggcttccaaaataaggaatgggacctttttgttgaacgcagcacagcctacagcaactgttacccttatgatgtgccggattatgcctcccttaggtcactagttgcctcatccggcacactggagtttaacaatgaaagcttcaattggactggagtcgctcagaatggaacaagctctgcttgcaaaaggagatctattaaaagtttctttagtagattgaattggttgcaccaattaaaatacaaatatccagcactgaacgtgactatgccaaacaatgaaaaatttgacaaattgtacatttggggggttcaccacccgagtacggacagtgaccaaatcagcctatatgctcaagcatcagggagagtcacagtctctaccaaaagaagccaacaaactgtaatcccgaatatcggatctagaccctgggtaaggggtgtctccagcagaataagcatctattggacaatagtaaaaccgggagacatacttttgattaacagcacagggaatctaattgctcctcggggttacttcaaaatacgaagtgggaaaagctcaataatgaggtcaaatgcacccattggcaaatgcaattctgaatgcatcactccaaatggaagcattcccaatgacaaaccatttcaaaatgtaaacaggatcacatatggggcctgtcccagatatgttaagcaaaacactctgaaattggcaacagggatgcggaatgtaccagagaaacaaactagaggcatattcggcgcaatcgcgggtttcatagaaaatggttgggaaggaatggtggacggttggtacggtttcaggcatcaaaattctgagggcacaggacaagcagcagatcttaaaagcactcaagcagcaatcaaccaaatcaacgggaaactgaataggttaatcgagaaaacaaacgagaaattccatcaaattgaaaaagaattctcagaagtagaagggagaattcaggacctcgagaaatatgttgaggacactaaaatagatctctggtcgtacaacgcggagcttcttgttgccctggagaaccaacatacaattgatctaactgactcagaaatgaacaaactgtttgaaagaacaaggaagcaactgagggaaaatgctgaggatatgggcaatggttgtttcaaaatataccacaaatgtgacaatgcctgcatagggtcaatcagaaatggaacttatgaccatgatgtatacagagacgaagcattaaacaaccggttccagatcaaaggtgttgagctgaagtcaggatacaaagattggatcctatggatttcctttgccatatcatgttttttgctttgtgttgttttgctggggttcatcatgtgggcctgccaaaaaggcaacattaggtgcaacatttgcatttga

SEQ ID NO: 30601 - RNA, 1701 nt, synthetic construct
  misc_feature 1..1701: note = hemagglutinin__InfluenzaA__AAX57884
  source 1..1701: mol_type = other RNA
atgaagactatcattgctttgagctacattttatgtctggttttcgctcaaaaacttcccgtaaatgacaacagcacggcaacgctgtgcctgggacaccatgcagtgccaaacggaacgctagtgaaaacaatcacgaatgaccacattgaagtgactaatgctactgagctggttcagagttcctcaacaggtagaatatgcgacagtcctcaccaaatccttgatggagaaaactgcacactaatagatgctctattgggagaccctcattgtgatggcttccaaaataaggaatgggacctttttgttgaacgcagcacagcctacagcaactgttacccttatgatgtgccggattatgcctcccttaggtcactagttgcctcatccggcacactggagtttaacaatgaaagcttcaattggactggagtcgctcagaatggaacaagctctgcttgcaaaaggagatctattaaaagtttctttagtagattgaattggttgcaccaattaaaatacaaatatccagcactgaacgtgactatgccaaacaatgaaaaatttgacaaattgtacatttggggggttcaccacccgagtacggacagtgaccaaatcagcctatatgctcaagcatcaggaagagtcacagtctctaccaaaagaagccaacaaactgtaatcccgaatatcggatctagaccctgggtaaggggtgtctccagcagaataagcatctattggacaatagtaaaaccgggagacatacttttgattaacagcacagggaatctaattgctcctcggggttactttaaaatacgaagtgggaaaagctcaataatgaggtcaaatgcacccattggcaaatgcaattctgaatgcatcactccaaatggaagcattcccaatgacaaaccatttcaaaatgtaaacaggatcacatatggggcctgtcccagatatgttaagcaaaacactctgaaattggcaacagggatgcggaatgtaccagagaaacaaactagaggcatattcggcgcaatcgcgggtttcatagaaaatggttgggagggaatggtggacggttggtacggtttcaggcatcaaaattctgagggcacaggacaagcagcagatcttaaaagcactcaagcagcaatcaaccaaatcaacgggaaactgaataggttaatcgagaaaacaaacgagaagttccatcaaattgaaaaagaattctcagaagtagaagggagaattcaggacctcgagaaatatgttgaggacactaaaatagatctctggtcgtacaacgcggagcttcttgttgccctggagaaccaacatacaattgatctaactgactcagaaatgaacaaactgtttgaaagaacaaggaagcaactgagggaaaatgctgaggatatgggcaatggttgtttcaaaatataccacaaatgtgacaatgcctgcatagggtcaatcagaaatggaacttatgaccatgatgtatacagagacgaagcattaaacaaccggttccagatcaaaggtgttgagctgaagtcaggatacaaagattggatcctatggatttcctttgccatatcatgttttttgctttgtgttgttttgctggggttcatcatgtgggcctgccaaaaaggcaacattaggtgcaacatttgcatttga

SEQ ID NO: 30602 - RNA, 1701 nt, synthetic construct
  misc_feature 1..1701: note = hemagglutinin__InfluenzaA__AAX57894
  source 1..1701: mol_type = other RNA
atgaagactatcattgctttgagctacattttatgtctggttttcgctcaaaaacttcccgtaaatgacaacagcacggcaacgctgtgcctgggacaccatgcagtgccaaacggaacgctagtgaaaacaatcacgaatgaccacattgaagtgactaatgctactgagctggttcagagttcctcaacaggtagaatatgcgacagtcctcaccaagtccttgatggagaaaactgcacactaatagatgctctattgggagaccctcattgtgatggcttccaaaataaggaatgggacctttttgttgaacgcagcacagcctacagcaactgttacccttatgatgtgccggattatgcctcccttaggtcactagttgcctcatccggcacactggagtttaacaatgaaagcttcaattggactggagtcgctcagaatggaacaagctctgcttgcaaaaggagatctattaaaagtttctttagtagattgaattggttgcaccaattaaaatacaaatatccagcactgaacgtgactatgccaaacaatgaaaaatttgacaaattgtacatttggggggttcaccacccgagtacggacagtgaccaaatcagcctatatgctcaagcatcagggagagtcacagtctctaccaaaagaagccaacaaactgtaatcccgaatatcggatctagaccctgggtaaggggtgtctccagcagaataagcatctattggacaatagtaaaaccgggagacatacttttgattaacagcacagggaatctaattgctcctcggggttacttcaaaatacgaagtgggaaaagctcaataatgaggtcaaatgcacccattggcaaatgcaattctgaatgcatcactccaaatggaagcattcccaatgacaaaccatttcaaaatgtaaacaggatcacatatggggcctgtcccagatatgttaagcaaaacactctgaaattggcaacagggatgcggaatgtaccagagaaacaaactagaggcatattcggcgcaatcgcgggtttcatagaaaatggttgggaaggaatggtggacggttggtacggtttcaggcatcaaaattctgagggcacaggacaagcagcagatcttaaaagcactcaagcagcaatcaaccaaatcaacgggaaactgaataggttaatcgagaaaacaaacgagaaattccatcaaattgaaaaagaattctcagaagtagaagggagaattcaggacctcgagaaatatgttgaggacactaaaatagatctctggtcgtacaacgcggagcttcttgttgccctggagaaccaacatacaattgatctaactgactcagaaatgaacaaactgtttgaaagaacaaggaagcaactgagggaaaatgctgaggatatgggcaatggttgtttcaaaatataccacaaatgtgacaatgcctgcatagggtcaatcagaaatggaacttatgaccatgatgtatacagagacgaagcattaaacaaccggttccagatcaaaggtgttgagctgaagtcaggatacaaagattggatcctatggatttcctttgccatatcatgttttttgctttgtgttgttttgctggggttcatcatgtgggcctgccaaaaaggcaacattaggtgcaacatttgcatttga

SEQ ID NO: 30603 - RNA, 1701 nt, synthetic construct
  misc_feature 1..1701: note = hemagglutinin__InfluenzaA__AAX57924
  source 1..1701: mol_type = other RNA
atgaagactatcattgctttgagctacattttatgtctggttttcgctcaaaaacttcccgtaaatgacaacagcacggcaacgctgtgcctgggacaccatgcagtgccaaacggaacgctagtgaaaacaatcacgaatgaccacattgaagtgactaatgctactgagctggttcagagttcctcaacaggtagaatatgcgacagtcctcaccaaatccttgatggagaaaactgcacactaatagatgctctattgggagaccctcattgtgatggcttccaaaataaggaatgggacctttttgttgaacgcagcacagcctacagcaactgttacccttatgatgtgccggattatgcctcccttaggtcactagttgcctcatccggcacactggagtttaacaatgaaagcttcaattggactggagtcgctcagaatggaacaagctttgcttgcaaaaggagatctattaaaagtttctttagtagattgaattggttgcaccaattaaaatacaaatatccagcactgaacgtgactatgccaaacaatgaaaaatttgacaaattgtacatctggggggttcaccacccgagtacggacagtgaccaaatcagcctatatgctcaagcatcagggagagtcacagtctctaccaaaagaagccaacaaactgtaatcccgaatatcggatctagaccctgggtaaggggtgtctccagcagaataagcatctattggacaatagtaaaaccgggagacatacttttgattaacagcacagggaatctaattgctcctcggggttactttaaaatacgaagtgggaaaagctcaataatgaggtcaaatgcacccattggcaaatgcaattctgaatgcatcactccaaatggaagcattcccaatgacaaaccatttcaaaatgtaaacaggatcacatatggggcctgtcccagatatgttaagcaaaacactctgaaattggcaacagggatgcggaatgtaccagagaaacaaactagaggcatattcggcgcaatcgcgggtttcatagaaaatggttgggagggaatggtggacggttggtacggtttcaggcatcaaaattctgagggcacaggacaagcagcagatcttaaaagcactcaagcagcaatcaaccaaatcaacgggaaactgaataggttaatcgagaaaacaaacgagaaattccatcaaattgaaaaagaattctcagaagtagaagggagaattcaggacctcgagaaatatgttgaggacactaaaatagatctctggtcgtacaacgcggagcttcttgttgccctggagaaccaacatacaattgatctaactgactcagaaatgaacaaactgtttgaaagaacaaggaagcaactgagggaaaatgctgaggatatgggcaatggttgtttcaaaatataccacaaatgtgacaatgcctgcatagggtcaatcagaaatggaacttatgaccatgatgtatacagagacgaagcattaaacaaccggttccagatcaaaggtgttgagctgaagtcaggatacaaagattggatcctatggatttcctttgccatatcatgttttttgctttgtgttgttttgctggggttcatcatgtgggcctgccaaaaaggcaacattaggtgcaacatttgcatttga

SEQ ID NO: 30604 - RNA, 1701 nt, synthetic construct; identical to SEQ ID NO: 30576
  misc_feature 1..1701: note = hemagglutinin__InfluenzaA__AAX57934
  source 1..1701: mol_type = other RNA

SEQ ID NO: 30605 - RNA, 1701 nt, synthetic construct
  misc_feature 1..1701: note = hemagglutinin__InfluenzaA__AAX57944
  source 1..1701: mol_type = other RNA
atgaagactatcattgctttgagctacattttatgcctggttttcgctcaaaaacttcccggaaatgacaacagcacggcaacgctgtgcctggggcaccatgcagtgccaaacggaacgctagtgaaaacaatcacgaatgaccaaattgaagtgactaatgctactgagctggttcagagttcctcaacaggtagaatatgcgacagtcctcaccaaatccttgatggagaaaactgcacactaatagatgctctattgggagaccctcattgtgatggcttccaaaataaggaatgggacctttttgttgaacgcagcaaagcctacagcaattgttacccttatgatgtgccggattatgtctcccttaggtcactagttgcctcatcaggcacgctggagtttaacaatgaaagcttcaattggactggagtcgctcagaatggaacaagctctgcttgcaaaaggagatctgataaaagtttctttagtagattgaattggttgcaccaattaaaatacaaatatccagcactgaacgtgactatgccaaacaatgaaaaatttgacaaattgtacatttggggggttcaccacccgggtacagacagtgaccaaatcagcctatatgctcaagcatcagggagagtcacagtctctaccaaaagaagccaacaaactgtaatcccgaatatcggatctggaccctgggtaaggggtgtctccagcagaataagcatctattggacaatagtaaaacctggagacatacttttgattaacagcacagggaatctaattgctcctcggggttacttcaaaatacgaagtgggaaaagctcaataatgcggtcagatgcacccattggcaaatgtaattctgaatgcatcactccaaatggaagcattcccaatggcaaaccatttcaaaatgtaaacaggatcacatatggggcctgtcccagatatgttaagcaaaacactctgaaattggcaacagggatgcggaatgtgccagagaaacaaactagaggcatattcggtgcaatcgcgggcttcatagaaaatggttgggagggaatgatggacggttggtacggtttcaggcatcagaattctgagggcacagggcaagcagcagatcttaaaagcactcaagcagcaatcaaccaaatcaacgggaaactgaataggttaatcgagaaaacgaacgagaaattccatcaaattgaaaaagaattctcagaagtagaagggagaattcaggacctcgagaaatatgtcgaggacactaaaatagatctctggtcgtacaatgcggagcttcttgttgccctggagaaccaacatacaattgatctaactgactcagaaatgaacaaactgtttgaaagaacaaagaagcaactgagggaaaatgctgaggatatgggcaatggttgtttcaaaatataccacaaatgtgacaatgcctgcatagggtcaatcagaaatgggacttatgaccatgatgtatacagagacgaagcattgaacaaccggttccagatcaaaagtgttgagctgaagtcaggatacaaagattggatcctatggatttcctttgccatatcatgttttttgctttgtattgttttactggggttcatcatgtgggcctgccaaaaaggcaacattaggtgcaacatttgcatttga

SEQ ID NO: 30606 - RNA, 1701 nt, synthetic construct
  misc_feature 1..1701: note = hemagglutinin__InfluenzaA__AAX76623
  source 1..1701: mol_type = other RNA
atgaagactatcattgctttgagctacattctatgtctggttttcgctcaaaaacttcccggaaatgacaaaagcacggcaacgctgtgccttgggcaccatgcagtaccaaacggaacgatagtgaaaacaatcacgaatgaccaaattgaagttactaatgctactgagctggtacagagttcctcaacaggtggaatatgcgacagtcctcatcagatccttgatggagaaaactgcacactaatagatgctctattgggagaccctcagtgtgatggcttccaaaataagaaatgggacctttttgttgaacgcagcaaagcctacagcaactgttacccttatgatgtgccggattatgcctcccttaggtcactagttgcctcatccggcacactggagtttaacaatgaaagcttcgattggactggagtcactcagaatggaacaagctctgcttgcaaaaggagatctaataaaagtttctttagtagattgaattggttgacccacttaaaatacaaatacccagcattgaacgtgactatgccaaacaatgaaaaatttgacaaattgtacatttggggggttcaccacccgggtacggacagtgaccaaatcagcctatatgctcaagcatcaggaagaatcacagtctctaccaaaagaagccaacaaactgtaatcccgaatatcggatctagacccagggtaagggatatctccagccgaataagcatctattggacaatagtaaaaccgggagacatacttttgattaacagcacagggaatctaattgctcctcggggttacttcaaaatacgaagtgggaaaagctcaataatgagatcagatgcacccattggcaaatgcaattctgaatgcatcactccaaatggaagcattcccaatgacaaaccatttcaaaatgtaaacaggatcacatatggggcctgtcccagatatgttaagcaaaacactctgaaattggcaacagggatgcgaaatgtaccagagaaacaaactagaggcatatttggcgcaatcgcgggtttcatagaaaatggttgggagggaatggtggacggttggtacggtttcaggcatcaaaattctgagggcacaggacaagcagcagatctcaaaagcactcaagcagcaatcaaccaaatcaatgggaaactgaataggttaatcgggaaaacaaacgagaaattccatcagattgaaaaagaattctcagaagtagaagggagaattcaggacctcgagaaatatgttgaggacactaaaatagatctctggtcatacaacgcggagcttcttgttgccctggagaaccaacatacaattgatctaactgactcagaaatgaacaaactgtttgaaagaacaaagaagcaactgagggaaaatgctgaggatatgggcaatggttgtttcaaaatataccacaaatgtgacaatgcctgcatagggtcaatcagaaatggaacttatgaccatgatgtgtacagagatgaagcattaaacaaccggttccagatcaaaggtgttgagctgaggtcaggatacaaagattggatcctatggatttcctttgccatatcatgttttttgctttgtgttgcttcgttggggttcatcatgtgggcctgccaaaaaggcaacattaggtgcaacatttgcatttga

SEQ ID NO: 30607 - RNA, 1701 nt, synthetic construct
  misc_feature 1..1701: note = hemagglutinin__InfluenzaA__AAX76643
  source 1..1701: mol_type = other RNA
atgaagactatcattgctttgagctactttctatgtctggttttcgctcaaaaacttcccggaaatgacaacagcacggcaacgctgtgccttgggcaccatgcagtaccaaacggaacgatagtgaaaacaatcacgaatgaccaaattgaagttactaatgctactgagctggttcagagttcctcaacaggtggaatatgcgacagtcctcatcagatccttgatggagaaaactgcacactaatagatgctctattgggagaccctcagtgtgatggcttccaaaataagaaatgggacctttttgttgaacgcagcaaagcctacagcaactgttacccttatgatgtgccggattatgcctcccttaggtcactagttgcctcatccggcacactggagtttaacaatgaaagcttcaattggactggagtcactcagaatggaacaagctctgcttgcgaaaggagatctaataaaagtttctttagtagattgaattggttgacccacttaaaatacaaatacccagcattgaacgtgactatgccaaacaatgaaaaatttgacaaattgtacatttggggggttcaccacccgggtacggacagtgaccaaatcagcctatatgctcaagcatcaggaagaatcacagtctctaccaaaagaagccaacaaactgtaatcccgaatatcggatctagacccagggtaagggatgtctccagccgaataagcatctattggacaatagtaaaaccgggagacatacttttgattaacagcacagggaatctaattgctcctcggggttacttcaaaatacgaagtgggaaaagctcaataatgagatcagatgcacccattggcaaatgcaattctgaatgcatcactccaaatggaagcattcccaatgacaaaccatttcaaaatgtaaacaggatcacatatggggcctgtcccagatatgttaagcaaaacactctgaaattggcaacagggatgcgaaatgtaccagagaaacaaactagaggcatatttggcgcaatcgcgggtttcatagaaaatggttgggagggaatggtggacggttggtacggtttcaggcatcaaaattctgagggcacaggacaagcagcagatctcaaaagcactcaagcagcaatcaaccaaatcaatgggaaactgaataggttaatcgggaaaacaaacgagaaattccatcagattgaaaaagaattctcagaagtagaagggagaattcaggacctcgagaaatatgttgaggacactaaaatagatctctggtcatacaacgcggagcttcttgttgccctggagaaccaacatacaattgatctaactgactcagaaatgaacaaactgtttgaaagaacaaagaagcaactgagggaaaatgctgaggatatgggcaatggttgtttcaaaatataccacaaatgtgacaatgcctgcatagggtcaatcagaaatggaacttatgaccatgatgtgtacagagatgaagcattaaacaaccggttccagatcaaaggtgttgagctgaagtcaggatacaaagattggatcctatggatttcctttgccatatcatgttttttgctttgtgttgctttgttggggttcatcatgtgggcctgccaaaaaggcaacattaggtgcgacatttgcatttga

SEQ ID NO: 30608 - RNA, 1701 nt, synthetic construct
  misc_feature 1..1701: note = hemagglutinin__InfluenzaA__AAX76653
  source 1..1701: mol_type = other RNA
atgaagacaatcattgctttgagctactttctatgtctggttttcgctcaaaaacttcccggaaatgacaacagcacggcaacgctgtgccttgggcaccatgcagtaccaaacggaacgatagtgaaaacaatcacgaatgaccaaattgaagttactaatgctactgagctggttcagagttcctcaacaggtggaatatgcgacagtcctcatcagatccttgatggagaaaactgcacactaatagatgctctattgggagaccctcagtgtgatggcttccaaaataagaaatgggacctttttgttgaacgcagcaaagcctacagcaactgttacccttatgatgtgccggattatgcctcccttaggtcactagttgcctcatccggcacactggagtttaacaatgaaagcttcaattggactggagtcactcagaatggaacaagctctgcttgcgaaaggagatctaataaaagtttctttagtagattgaattggttgacccacttaaaatacaaatacccagcattgaacgtgactatgccaaacaatgaaaaatttgacaaattgtacatttggggggttcaccacccgggtacggacagtgaccaaatcagcctatttgctcaagcatcaggaagaatcacagtctctaccaaaagaagccaacaaactgtaatcccgaatatcggatctggacccagggtaagggatgtctccagccgaataagcatctattggacaatagtaaaaccgggagacatacttttgattaacagcacagggaatctaattgctcctcggggttacttcaaaatacgaagtgggaaaagctcaataatgagatcagatgcacccattggcaaatgcaattctgaatgcatcactccaaatggaagcattcccaatgacaaaccatttcaaaatgtaaacaggatcacatatggggcctgtcccagatatgttaagcaaaacactctgaaattggcaacagggatgcgaaatgtaccagagaaacaaactagaggcatatttggcgcaatcgcgggtttcatagaaaatggttgggagggaatggtggacggttggtacggtttcaggcatcaaaattctgagggcacaggacaagcagcagatctcaaaagcactcaagcagcaatcaaccaaatcaatgggaaactgaataggttaatcgggaaaacaaacgagaaattccatcagattgaaaaagaattctcagaagtagaagggagaattcaggacctcgagaaatatgttgaggacactaaaatagatctctggtcatacaacgcggagcttcttgttgccctggagaaccaacatacaattgatctaactgactcagaaatgaacaaactgtttgaaagaacaaagaagcaactgagggaaaatgctgaggatatgggcaatggttgtttcaaaatataccacaaatgtgacaatgcctgcatagggtcaatcagaaatggaacttatgaccatgatgtgtacagagatgaagcattaaacaaccggttccagatcaaaggtgttgagctgaagtcaggatacaaagattggatcctatggatttcctttgccatatcatgttttttgctttgtgttgctttgttggggttcatcatgtgggcctgccaaaaaggcaacattaggtgcgacatttgcatttga

SEQ ID NO: 30609 - RNA, 1701 nt, synthetic construct
  misc_feature 1..1701: note = hemagglutinin__InfluenzaA__AAX76663
  source 1..1701: mol_type = other RNA
atgaagactatcattgctttgagctacattttatgtctggttttcgctcaaaaacttcccggaaatgacaacagcacggcaacgctgtgcctggggcaccatgcagtgccaaacggaacgctagtgaaaacaatcacgaatgaccaaattgaagtgactaatgctactgagctggttcagagttcctcaacaggtagaatatgcgacagtcctcaccaaatccttgatggagaaaactgcacactaatagatgctctattgggagaccctcattgtgatggcttccaaaataaggaatgggacctttttgttgaacgcagcaaagcctacagcaactgttacccttatgatgtgccggattatgtctcccttaggtcactagttgcctcatcaggcacgctggagtttaacaatgaaagcttcaattggactggagtcgctcagaatggaacaagctctgcttgcaaaaggagatctgataaaagtttctttagtagattgaattggttgcaccaattaaaatacaaatatccagcactgaacgtgactatgccaaacaatgaaaaatttgacaaattgtacatttggggggttcaccacccgggtacagacagtgaccaaatcagcctatatgctcaagcatcagggagagtcacagtctctaccaaaagaagccaacaaactgtaatcccgaatatcggatctggaccctgggtaaggggtgtctccagcagaataagcatctattggacaatagtaaaaccgggagacatacttttgattaacagcacagggaatctaattgctcctcggggttacttcaaaatacgaagtgggaaaagctcaataatgaggtcagatgcacccattggcaaatgcaattctgaatgcatcactccaaatggaagcattcccaatgacaaaccatttcaaaatgtaaacaggatcacatatgggccctgtcctagatatgttaagcaaaacactctgaaattggcaacagggatgcggaatgtgccagagaaacaaactagaggcatattcggtgcaatcgcgggcttcatagaaaatggttgggagggaatgatggacggttggtacggtttcaggcatcagaattctgagggcacagggcaagcagcagatcttaaaagcactcaagcagcaatcaaccaaatcaacgggaaactgaataggttaatcgaaaaaacgaacgagaaattccatcaaattgaaaaagaattctcagaagtagaagggagaattcaggacctcgagaaatatgttgaggacactaaaatagatctctggtcgtacaatgcggagcttcttgttgccctggagaaccaacatacaattgatctaactgactcagaaatgaacaaactgtttgaaagaacaaagaagcaactgagggaaaatgctgaggatatgggcaatggttgtttcaaaatataccacaaatgtgacaatgcctgcatagggtcaatcagaaatggaacttatgaccatgatgtatacagagacgaagcattgaacaaccggttccagatcaaaggtgttgagctgaagtcaggatacaaagattggatcctatggatttcctttgccatatcatgttttttgctttgtattgttttgctggggttcatcatgtgggcctgccaaaaaggcaacattaggtgcaacatttgcatttga

SEQ ID NO: 30610 - RNA, 1701 nt, synthetic construct
  misc_feature 1..1701: note = hemagglutinin__InfluenzaA__AAX76673
  source 1..1701: mol_type = other RNA
atgaagactatcattgctttgagctacattttatgtctggttttcgctcaaaaacttcccgtaaatgacaacagcacggcaacgctgtgcctgggacaccatgcagtgccaaacggaacgctagtgaaaacaatcacgaatgaccacattgaagtgactaatgctactgagctggttcagagttcctcaacaggtagaatatgcgacagtcctcaccaaatccttgatggagaaaactgcacactaatagatgctctattgggagaccctcattgtgatggcttccagaataaggaatgggacctttttgttgaacgcagcacagcctacagcaactgttacccttatgatgtgccggattatgcctcccttaggtcactagttgcctcatccggcacactggagtttaacaatgaaagcttcaattggactggagtcgctcagaatggaacaagctctgcttgcaaaaggagatctattaaaagtttctttagtagattgaattggttgcaccaattaaaatacaaatatccagcactgaacgtgactatgccaaacaatgaaaaatttgacaaattgtacatttggggggttcaccacccgagtacggacagtgaccaaatcagcctatatgctcaagcatcagggagagtcacagtctctaccaaaagaagccaacaaactgtaatcccgaatatcggatctagaccctgggtaaggggtgtctccagcagaataagcatctattggacaatagtaaaaccgggagacatacttttgattaacagcacagggaatctaattgctcctcggggttactttaaaatacgaagtgggaaaagctcaataatgaggtcaaatgcacccattggcaaatgcaattctgaatgcatcactccaaatggaagcattcccaatgacaaaccatttcaaaatgtaaacaggatcacatatggggcctgtcccagatatgttaagcaaaacactctgaaattggcaacagggatgcggaatgtaccagagaaacaaactagaggcatattcggcgcaatcgcgggtttcatagaaaatggttgggagggaatggtggacggttggtacggtttcaggcatcaaaattctgagggcacaggacaagcagcagatcttaaaagcactcaagcagcaatcaaccaaatcaacgggaaactgaataggttaatcgagaaaacaaacgagaaattccatcaaattgaaaaagaattctcagaagtagaagggagaattcaggacctcgagagatatgttgaggacactaaaatagatctctggtcgtacaacgcggagcttcttgttgccctggagaaccaacatacaattgatctaactgactcagaaatgaacaaactgtttgaaagaacaaggaagcaactgagggaaaatgctgaggatatgggcaatggttgtttcaaaatataccacaaatgtgacaatgcctgcatagggtcaatcagaaatggaacttatgaccatgatgtatacagagacgaagcattaaacaaccggtttcagatcaaaggtgttgagctgaagtcaggatacaaagattggatcctatggatttcctttgccatatcatgttttttgctttgtgttgttttgctggggttcatcatgtgggcctgccaaaaaggcaacattaggtgcaacatttgcatttga

SEQ ID NO: 30611 - RNA, 1701 nt, synthetic construct
  misc_feature 1..1701: note = hemagglutinin__InfluenzaA__AAX76683
  source 1..1701: mol_type = other RNA
atgaagactatcattgctttgagctacattttatgtctggttttcgctcaaaaacttcccgtaaatgacaacagcacggcaacgctgtgcctgggacaccatgcagtgccaaacggaacgctagtgaaaacaatcacgaatgaccacattgaagtgactaatgctactgagctggttcagagttcctcaacaggtagaatatgcgacagtcctcaccaaatccttgatggagaaaactgcacactaatagatgctctattgggagaccctcattgtgatggcttccaaaataaggaatgggacctttttgttgaacgcagcacagcctacagcaactgttacccttatgatgtgccggattatgcctcccttaggtcactagttgcctcatccggcacactggagtttaacaatgaaagcttcaattggactggagtcgctcagaatggaacaagctctgcttgcaaaaggagatctattaaaagtttctttagtagattgaattggttgcaccaattaaaatacaaatatccagcactgaacgtgactatgccaaacaatgaaaaatttgacaaattgtacatttggggggttcaccacccgagtacggacagtgaccaaatcagcctatatgctcaagcatcagggagagtcacagtctctaccaaaagaagccaacaaactgtaatcccgaatatcggatctagaccctgggtaaggggtgtctccagcagaataagcatctattggacaatagtaaaaccgggagacatacttttgattaacagcacagggaatctaattgctcctcggggttactttaaaatacgaagtgggaaaagctcagtaatgaggtcaaatgcacccattggcaaatgcaattctgaatgcatcactccaaatggaagcattcccaatgacaaaccatttcaaaatgtaaacaggatcacatatggggcctgtcccagatatgttaagcaaaacactctgaaattggcaacagggatgcggaatgtaccagagaaacaaactagaggcatattcggcgcaatcgcgggtttcatagaaaatggttgggagggaatggtggacggttggtacggtttcaggcatcaaaattctgagggcacaggacaagcagcagatcttaaaagcactcaagcagcaatcaaccaaatcaacgggaaactgaataggttaatcgagaaaacaaacgagaaattccatcaaattgaaaaagaattctcagaagtagaagggagaattcaggacctcgagaaatatgttgaggacactaaaatagatctctggtcgtacaacgcggagcttcttgttgccctggagaaccaacatacaattgatctaactgactcagaaatgaacaaactgtttgaaagaacaaggaagcaactgagggaaaatgctgaggatatgggcaatggttgtttcaaaatataccacaaatgtgacaatgcctgcatagggtcaatcagaaatggaacttatgaccatgatgtatacagagacgaagcattaaacaaccggttccagatcaaaggtgttgagctgaagtcaggatacaaagattggatcctatggatttcctttgccatatcatgttttttgctttgtgttgttttgctggggttcatcatgtgggcctgccaaaaaggcaacattaggtgcaacatttgcatttga

SEQ ID NO: 30612 - RNA, 1701 nt, synthetic construct
  misc_feature 1..1701: note = hemagglutinin__InfluenzaA__AAX76713
  source 1..1701: mol_type = other RNA
atgaagactatcattgctttgagctacattttatgtctggttttcgctcaaaaacttcccgtaaatgacaacagcacggcaacgctgtgcctgggacaccatgcagtgccaaacggaacgctagtgaaaacaatcacgaatgaccacattgaagtgactaatgctactgagctggttcagagttcctcaacaggtagaatatgcgacagtcctcaccaaatccttgatggagaaaactgcacactaatagatgctctattgggagaccctcattgtgatggcttccaaaataaggaatgggacctttttgttgaacgcagcacagcctacagcaactgttacccttatgatgtgccggattatgcctcccttaggtcactagttgcctcatccggcacactggagtttaacaatgaaagcttcaattggactggagtcgctcagaatggaacaagctctgcttgcaaaaggagatctattaaaagtttctttagtagattgaattggttgcaccaattaaaatacaaatatccagcactgaacgtgaccatgccaaacaatgaaaaatttgacaaattgtacatttggggggttcaccacccgagtacggacagtgaccaaatcagcctatatgctcaagcatcagggagagtcacagtctctaccaaaagaagccaacaaactgtaatcccgaatatcggatctagaccctgggtaaggggtgtctccagcagaataagcatctattggacaatagtaaaaccgggagacatacttttgattaacagcacagggaatctaattgctcctcggggttacttcaaaatacgaagtgggaaaagctcaataatgaggtcaaatgcacccattggcaaatgcaattctgaatgcatcactccaaatggaagcattcccaatgacaaaccatttcaaaatgtaaacaggatcacatatggggcctgtcccagatatgttaagcaaaacactctgaaattggcaacagggatgcggaatgtaccagagaaacaaactagaggcatattcggcgcaatcgcgggtttcatagaaaatggttgggaaggaatggtggacggttggtacggtttcaggcatcaaaattctgagggcacaggacaagcagcagatcttaaaagcactcaagcagcaatcaaccaaatcaacgggaaactgaataggttaatcgagaaaacaaacgagaaattccatcaaattgaaaaagaattctcagaagtagaagggagaattcaggacctcgagaaatatgttgaggacactaaaatagatctctggtcgtacaacgcggagcttcttgttgccctggagaaccaacatacaattgatctaactgactcagaaatgaacaaattgtttgaaagaacaaggaagcaactgagggaaaatgctgaggatatgggcaatggttgtttcaaaatataccacaaatgtgacaatgcctgcatagggtcaatcagaaatggaacttatgaccatgatgtatacagagacgaagcattaaacaaccggttccagatcaaaggtgttgagctgaagtcaggatacaaagattggatcctatggatttcctttgccatatcatgttttttgctttgtgttgttttgctggggttcatcatgtgggcctgccaaaaaggcaacattaggtgcaacatttgcatttga

SEQ ID NO: 30613 - RNA, 1701 nt, synthetic construct
  misc_feature 1..1701: note = hemagglutinin__InfluenzaA__AAX76723
  source 1..1701: mol_type = other RNA
atgaagactatcattgctttgagctacattttatgtctggttttcgctcaaaaacttcccgtaaatgacaacagcacggcaacgctgtgcctgggacaccatgcagtgccaaacggaacgctagtgaaaacaatcacgaatgaccacattgaagtgactaatgctactgagctggttcagagttcctcaacaggtagaatatgcgacagtcctcaccaaatccttgatggagaaaactgcacactaatagatgctctattgggagaccctcattgtgatggcttccaaaataaggaatgggacctttttgttgaacgcagcacagcctacagcaactgttacccttatgatgtgccggattatgcctcccttaggtcactagttgcctcatccggcacactggagtttaacaatgaaagcttcaattggactggagtcgctcagaatggaacaagctctgcttgcaaaaggagatctattaaaagtttctttagtagattgaattggttgcaccaattaaaatacaaatatccagcactgaacgtgactatgccaaacaatgaagaatttgacaaattgtacatttggggggttcaccacccgagtacggacagtgaccaaatcagcctatatgctcaagcatcagggagagtcacagtctctaccaaaagaagccaacaaactgtaatcccgaatatcggatctagaccctgggtaaggggtgtctccagcataataagcatctattggacaatagtaaaaccgggagacatacttttgattaacagcacagggaatctaattgctcctcggggttacttcaaaatacgaagtgggaaaagctcaataatgaggtcaaatgcacccattggcaaatgcaattctgaatgcatcactccaaatggaagcattcccaatgacaaaccatttcaaaatgtaaacaggatcacatatggggcctgtcccagatatgttaagcaaaacactctgaaattggcaacagggatgcggaatgtaccagagaaacaaactagaggcatattcggcgcaatcgcgggtttcatagaaaatggttgggaaggaatggtggacggttggtacggtttcaggcatcaaaattctgagggcacaggacaagcagcagatcttaaaagcactcaagcagcaatcaaccaaatcaacgggaaactgaataggttaatcgagaaaacaaacgagaaattccatcaaattgaaaaagaattctcagaagtagaagggagaattcaggacctcgagaaatatgttgaggacactaaaatagatctctggtcgtacaacgcggagcttcttgttgccctggagaaccaacatacaattgatctaactgactcagaaatgaacaaactgtttgaaagaacaaggaagcaactgagggaaaatgctgaggatatgggcaatggttgtttcaaaatataccacaaatgtgacaatgcctgcatagggtcaatcagaaatggaacttatgaccatgatgtatacagagacgaagcattaaacaaccggttccagatcaaaggtgttgagctgaagtcaggatacaaagattggatcctatggatttcctttgccatatcatgttttttgctttgtgttgttttgctggggttcatcatgtgggcctgccaaaaaggcaacattaggtgcaacatttgcatttga

SEQ ID NO: 30614 - RNA, 1701 nt, synthetic construct
  misc_feature 1..1701: note = hemagglutinin__InfluenzaA__AAX76733
  source 1..1701: mol_type = other RNA
atgaagactatcatagctttgagctacattttatgtctggttttcgctcaaaaacttcccggaaatgacaacagcacggcaacgctgtgcctggggcaccatgcagtgccaaacggaacgctagtgaaaacaatcacgaatgaccaaattgaagtgactaatgctactgagctggttcagagttcctcaacagatagaatatgcgacagtcctcaccaaatccttgatggaggaaactgcacactaatagatgctctattgggagaccctcattgtgatggcttccaaaataaggaatgggacctttttgttgaacgcagcaaagcctacagcaactgttacccttatgatgtgccggattatgtctcccttaggtcactagttgcctcatcaggcacgctggagtttaacaatgaaagcttcaattggactggagtcgctcagaatggaacaagctctgcttgcaaaaggagatctgataaaagtttctttagtagattgaattggttgcaccaattaaaaaacaaatatccagcactgaacgtggctatgccaaacaatgaaaaatttgacaaattgtacatttggggggttcaccacccgggtacagacagtgaccaaatcagcctatatgctcaagcatcagggagagtcacagtctctaccaaaagaagccaacaaactgtaattccgaatatcggatctagacccagggtaagggatatatccagcagaataagcatctattggacaatagtaaaaccgggagacatacttttgattaacagcacagggaatctaattgctcctcgaggttacttcaaaatacgaagtgggaaaagctcaataatgaggtcagatgcacccattggcaaatgcaattctgaatgcatcactccaaatggaagcattcctaatgacaaaccatttcaaaatgtaaacaggatcacatatggggcctgtcccagatatgttaagcaaaacactctgaaattggcaacagggatgcggaatgtgccggagaaacaaactagaggcatattcggtgcaatcgcgggcttcatagaaaatggttgggagggaatggtggacggttggtacggtttcaggcatcaaaattatgagggcacaggacaagcagcagatcttaaaagcactcaagcagcaatcaaccaaatcaacgggaaactgaataggttaatcgagaaaacgaacgagaaattccaccaaattgaaaaagaattctcagaagtagaagggagaattcaggacctcgagaaatatgttgaggacactaaaatagatctctggtcgtacaatgcggagcttcttgttgccctagagaaccaacatacaattgatctaactgactcagaaatgaacaaactgtttgaaagaacaaagaagcaactgagggaaaatgctgaggatatgggcaatggttgtttcaaaatataccacaaatgtgacaatgcctgcatagggtcaatcagaaatggaacttatgaccatgatgtatacagagacgaagcattaaacaaccggttccagatcaaaggtgttgagctgaaatcaggatacaaagattggatcctatggatttcctttgccatatcatgttttttgctttgtattgttttgctggggttcatcatgtgggcctgccaaaaaggcaacattaggtgcaacatttgcatttga

SEQ ID NO: 30615 - RNA, 1701 nt, synthetic construct
  misc_feature 1..1701: note = hemagglutinin__InfluenzaA__AAX76743
  source 1..1701: mol_type = other RNA
atgaagactatcatagctttgagctacattttatgtctggttttcgctcaaaaacttcccggaaatgacaacagcacggcaacgctgtgcctgggacaccatgcagtgccaaacggaacgctagtgaaaacaatcacgaatgaccaaattgaagtgactaatgctactgagctggttcagagttcctcaacaggtagaatatgcgacagtcctcaccaaatccttgatggagaaaactgcacactaatagatgctctattgggagaccctcattgtgatggcttccaaaataaggaatgggacctttttgttgaacgcagcaaagcctacagcaactgttacccttatgatgtgccggattatgtctcccttaggtcactagttgcctcatcaggcacgctggagtttaacaatgaaagcttcaattggactggagtcgctcagaatggaacaagctctgcttgcaaaaggagatctaataaaagtttctttagtagattgaattggttgcaccaattaaaaaacaaatatccagcgctgaacgtggctatgccaaacaatgaaaaatttgacaaattgtacatttggggggttcaccacccgggcacagacagtgaccaaatcagcctatatgctcaagcatcagggagagtcacagtctctaccaaaagaagccaacaaactgtaatcccgaatatcggatctagacccagggtaagggatatctccagcagaataagcatctattggacaatagtaaaaccgggagacatacttttgattaacagcacagggaatctaattgctcctcggggttacttcaaaatacgaagtgggaaaagctcaataatgaggtcagatgcacccattggcaaatgcaattctgaatgcatcactccaaatggaagcattcctaatgacaaaccatttcaaaatgtaaacaggatcacatatggggcctgtcccagatatgttaagcaaaacactctgaaattggcaacagggatgcgaaatgtgccagagaaacaaactagaggcatattcggtgcaatcgcgggcttcatagaaaatggttgggagggaatgatggacggttggtacggtttcaggcatcaaaattctgagggcacaggacaagcagcagatcttaaaagcactcaagcagcaatcaaccaaatcaacgggaaactgaataggttaatcgagaaaacgaacgagaaattccaccaaattgaaaaagaattctcagaagtagaagggagaattcaggacctcgagaaatatgttgaggacactaaaatagatctctggtcgtacaatgcggagcttcttgttgccctggagaaccaacatacaattgatctaactgactcagaaatgaacaaactgtttgaaagaacaaagaagcaactgagggaaaatgctgaggatatgggcaatggttgtttcaaaatataccacaaatgtgacaatgcctgcatagggtcaatcagaaatggaacttatgaccatgatgtatacagagacgaagcattaaacaaccggttccagatcaaaggtgttgagctgaagtcaggatacaaagattggatcctatggatttcctttgccatatcatgttttttgctttgtattgttttgctggggttcatcatgtgggcctgccaaaaaggcaacatcaggtgcaacatttgcatttga

SEQ ID NO: 30616 - RNA, 1701 nt, synthetic construct
  misc_feature 1..1701: note = hemagglutinin__InfluenzaA__AAX76763
  source 1..1701: mol_type = other RNA
atgaagactatcattgctttgagctacattctatgtctggttttcgctcaaaaacttcccggaaatgacaacagcacggcaacgctgtgccttgggcaccatgcagtaccaaacggaacgatagtgaaaacaatcacgaatgaccaaattgaagttactaatgctactgagctggtacagagttcctcaacaggtggaatatgcgacagtcctcatcagatccttgatggagaaaactgcacactaatagatgctctattgggagaccctcagtgtgatggcttccaaaataagaaatgggacctttttgttgaacgcagcaaagcctacagcaactgttacccttatgatgtgccggattatgcctcccttaggtcactagttgcctcatccggcacactggagtttaacaatgaaagcttcgattggactggagtcactcagaatggaacaagctctgcttgcaaaaggagatctaataaaagtttctttagtagattgaattggttgacccacttaaaatacaaatacccagcattgaacgtgactatgccaaacaatgaaaaatttgacaaattgtacatttggggggttcaccacccgggtacggacagtgaccaaatcagcctatatgctcaagcatcaggaagaatcacagtctctaccaaaagaagccaacaaactgtaatcccgaatatcggatctagacccagggtaagggatatctccagccgaataagcatctattggacaatagtaaaaccgggagacatacttttgattaacagcacagggaatctaattgctcctcggggttacttcaaaatacgaagtgggaaaagctcaataatgagatcagatgcacccattggcaaatgcaattctgaatgcatcactccaaatggaagcattcccaatgacaaaccatttcaaaatgtaaacaggatcacatatggggcctgtcccagatatgttaagcaaaacactctgaaattggcaacagggatgcgaaatgtaccagagaaacaaactagaggcatatttggcgcaatcgcgggtttcatagaaaatggttgggagggaatggtggacggttggtacggtttcaggcatcaaaattctgagggcacaggacaagcagcagatctcaaaagcactcaagcagcaatcaaccaaatcaatgggaaactgaataggttaatcgggaaaacaaacgagaaattccatcagattgaaaaagaattctcagaagtagaagggagaattcaggacctcgagaaatatgttgaggacactaaaatagatctctggtcatacaacgcggagcttcttattgccctggagaaccaacatacaattgatctaactgactcagaaatgaacaaactgtttgaaagaacaaagaagcaactgagggaaaatgctgaggatatgggcaatggttgtttcaaaatataccacaaatgtgacaatgcctgcatagggtcaatcagaaatggaacttatgaccatgatgtgtacagagatgaagcattaaacaaccggttccagatcaaaggtgttgagctgaagtcaggatacaaagattggatcctatggatttcctttgccatatcatgttttttgctttgtgttgctttgttggggttcatcatgtgggcctgccaaaaaggcaacattaggtgcaacatttgcatttga

SEQ ID NO: 30617 - RNA, 1701 nt, synthetic construct
  misc_feature 1..1701: note = hemagglutinin__InfluenzaA__AAY18086
  source 1..1701: mol_type = other RNA
atgaagactatcattgctttgagctacattctatgtctggttttcgctcaaaaacttcccggaaatgacaacagcacggcaacgctgtgccttgggcaccatgcagtaccaaacggaacgatagtgaaaacaatcacgaatgaccaaattgaagttactaatgctactgagctggtacagagttcctcaacaggtggaatatgcgacagtcctcatcagatccttgatggagaaaactgcacactaatagatgctctattgggagaccctcagtgtgatggcttccaaaataagaaatgggacctttttgttgaacgcagcaaagcctacagcaactgttacccttatgatgtgccggattatgcctcccttaggtcactagttgcctcatccggcacactggagtttaacaatgaaagcttcgattggactggagtcactcagaatggaacaagctctgcttgcaaaagaagatccaataaaagtttctttagtagattgaattggttgacccacttaaaatacaaatacccagcattgaacgtgactatgccaaacaatgaaaaatttgacaaattgtacatttggggggttcaccacccgggtacggacagtgaccaaatcagcctatatgctcaagcatcaggaagaatcacagtctctaccaaaagaagccaacaaactgtaatcccgaatatcggatctagacccagggtaagggatgtctctagccgaataagcatctattggacaatagtaaaaccgggagacatacttttgattaacagcacagggaatctaattgctcctcggggttacttcaaaatacgaagtgggaaaagctcaataatgagatcagatgcacccattggcaaatgcaattccgaatgcatcactccaaatggaagcattcccaatgacaaaccatttcaaaatgtaaacaggatcacatatggggcctgtcccagatatgttaagcaaaacactttgaaattggcaacagggatgcgaaatgtaccagagaaacaaactagaggcatatttggcgcaatcgcgggcttcatagaaaatggttgggagggaatggtggacggttggtacggtttcaggcatcaaaattctgagggcacaggacaagcagcagatctcaaaagcactcaagcagcaatcaaccaaatcaatgggaaactgaataggttaatcgggaaaacaaacgagaaattccatcagattgaaaaagaattctcagaagtagaagggagaattcaggacctcgagaaatatgttgaggacactaaaatagatctctggtcatacaacgcggagcttcttgttgccctggagaaccaacatacaattgatctaactgactcagaaatgaacaaactgtttgaaagaacaaagaagcaactgagggaaaatgctgaggatatgggcaatggttgtttcaaaatataccacaaatgtgacaatgcctgcatagggtcaatcagaaatggaacttatgaccatgatgtgtacagagatgaagcattaaacaaccggttccagatcaaaggtgttgagctgaagtcaggatacaaagattggatcctatggatttcctttgccatatcatgttttttgctttgtgttgctttgttggggttcatcatgtgggcctgccaaaaaggcaacattaggtgcaacatttgcatttga

SEQ ID NO: 30618 - RNA, 1701 nt, synthetic construct
  misc_feature 1..1701: note = hemagglutinin__InfluenzaA__AAY18096
  source 1..1701: mol_type = other RNA
atgaagactatcattgctttgagctgcattctatgtctggttttcgctcaaaaacttcccggaaatgacaacagcacggcaacgctgtgccttgggcaccatgcagtaccaaacggaacgatagtgaaaacaatcacgaatgaccaaattgaagtcactaatgctactgagctggttcagagttcctcaacaggtggaatatgcgacagtcctcatcagatccttgatggagaaaactgcacactaatagatgctctattgggagaccctcagtgtgatggcttccaaaataagaaatgggacctttttgttgaacgcagcaaagcctacagcaactgttacccttatgatgtgccggattatgcctcccttaggtcactagttgcctcatccggcacactggagtttaacaatgaaagcttcaattggactggagtcactcagaatggaacaagctctgcttgcgaaaggagatctaataaaagtttctttagtagattgaattggttgacccacttaaaatacaaatacccagcattgaacgtgactatgccaaacaatgaaaaatttgacaaattgtacatttggggggttcaccacccgggtacggacagtgaccaaatcagcctatatgctcaagcatcaggaagaatcacagtctctaccaaaagaagccaacaaactgtaatcccgaatatcggatctagacccagggtaagggatgtctccagccgaataagcatctattggacaatagtaaaaccgggagacatacttttgattaacagcacagggaatctaattgctcctcggggttacttcaaaatacgaagtgggaaaagctcaataatgagatcagatgcacccattggcaaatgcaattctgaatgcatcactccaaatggaagcattcccaatgacaaaccatttcaaaatgtaaacaggattacatatggggcctgtcccagatatgttaagcaaaacactctgaaattggcaacagggatgcgaaatgtaccagagaaacaaactagaggcatatttggcgcaatcgcgggtttcatagaaaatggttgggagggaatggtggacggttggtacggtttcaggcatcaaaattctgagggcacaggacaagcagcagatctcaaaagcactcaagcagcaatcaaccaaatcaatgggaaactgaataggttaatcgggaaaacaaacgagaaattccatcagattgaaaaagaattctcagaagtagaagggagaattcaggacctcgagaaatatgttgaggacactaaaatagatctctggtcatacaacgcggagcttcttgttgccctggagaaccaacatacaattgatctaactgactcagaaatgaacaaactgtttgaaagaacaaagaagcaactgagggaaaatgctgaggatatgggcaatggttgtttcaaaatataccacaaatgtgacaatgcctgcatagggtcaatcagaaatggaacttatgaccatgatgtgtacagagatgaagcattaaacaaccggttccagatcaaaggtgttgagctgaagtcaggatacaaagattggatcctatggatttcctttgccatatcatgttttttgctttgtgttgctttgttggggttcatcatgtgggcctgccaaaaaggcaacattaggtgcgacatttgcatttga

SEQ ID NO: 30619 - RNA, 1701 nt, synthetic construct
  misc_feature 1..1701: note = hemagglutinin__InfluenzaA__AAY18106
  source 1..1701: mol_type = other RNA
atgaagactatcattgctttgagctacattttatgcctggttttcgctcaaaaacttcccggaaatgacaacagcacggcaacgctgtgcctggggcaccatgcagtgccaaacggaacgctagtgaaaacaatcacgaatgaccaaattgaagtaactaatgctactgagctggttcagagttcctcaacaagtagaatatgcgacagtcctcaccaaatccttgatggagaaaactgcacactaatagatgctctattgggagaccctcattgtgatggcttccaaaataaggaatgggacctttttgttgaacgcagcaaagcctacagcaactgttacccttatgatgtgccggattatgtctcccttaggtcactagttgcctcatcaggcacgctggagtttaacaatgaaagcttcaattggactggagtcgctcagaatggaacaagctctgcttgcaaaaggagatctgataaaagtttctttagtagattgaattggttgcaccaattaaaatacaaatatccagcactgaacgtgactatgccaaacaatgaaaaatttgacaaattgtacatttggggggttcaccacccgggcacagacagtgaccaaatcagcctatatgctcaagcatcagggagagtcacagtctctaccaaaagaagccaacaaactgtaatcccgaatatcggatctagaccctgggtaaggggtgtctccagcagaataagcatctattggacaatagtaaaaccgggagacatacttttgattaacagcacagggaatctaattgctcctcggggttacttcaaaatacgaagtgggaaaagctcaataatgaggtcagatgcacccattggcaaatgcaattctgaatgcatcactccaaatggaagcattcccaatgacaaaccatttcaaaatgtaaacaggatcacatatggggcctgtcccagatatgttaagcaaaacactctgaaattggcaacagggatgcggaatgtaccagagaaacaaactagaggcatattcggtgcaatcgcgggcttcatagaaaatggttgggagggaatgatggacggttggtacggtttcaggcatcaaaattctgagggcacagggcaagcagcagatcttaaaagcactcaagcagcaatcaaccaaatcaacgggaaactgaatagattaatcgagaaaacgaacgagaaattccatcaaattgaaaaagaattctcagaagtagaagggagaattcaggacctcgagaaatatgttgaggacactaaaatagatctctggtcgtacaatgcggagcttcttgttgccctggagaaccaacatacaattgatctaactgactcagaaatgaacaaactgtttgaaagaacaaagaagcaactgagggaaaatgctgaggatatgggcaatggttgtttcaaaatataccacaaatgtgacaatgcctgcatagggtcaatcagaaatggaacttatgaccatgatgtatacagagacgaagcattgaacaaccggttccagatcaaaggtgttgagctgaagtcaggatacaaagattggatcctatggatttcctttgccatatcatgttttttgctttgtattgttttgctggggttcatcatgtgggcctgccaaaaaggcaacattaggtgcaacatttgcatttga

SEQ ID NO: 30620 - RNA, 1701 nt, synthetic construct
  misc_feature 1..1701: note = hemagglutinin__InfluenzaA__AAY18116
  source 1..1701: mol_type = other RNA
atgaagactatcattgctttgagctacattttatgcctggttttcgctcaaaaacttcccggaaatgacaacagcacggcaacgctgtgcctggggcaccatgcagtgccaaacggaacgctagtgaaaacaatcacgaatgaccaaattgaagtaactaatgctactgagctggttcagagttcctcaacaagtagaatatgcgacagtcctcaccaaatccttgatggagaaaactgcacactaatagatgctctattgggagaccctcattgtgatggcttccaaaataaggaatgggacctttttgttgaacgcagcaaagcctacagcaactgttacccttatgatgtgccggattatgtctcccttaggtcactagttgcctcatcaggcacgctggagtttaacaatgaaagcttcaattggactggagtcgctcagaatggaacaagctctgcttgcaaaaggagatctgataaaagtttctttagtagattgaattggttgcaccaattaaaatacaaatatccagcactgaacgtgactatgccaaacaatgaaaaatttgacaaattgtacatttggggggttcaccacccgggtacagacagtgaccaaatcagcctatatgctcaagcatcagggagagtcacagtctctaccaagagaagccaacaaactgtaatcccgaatatcggatctagaccctgggtaaggggtgtctccagcagaataagcatctattggacaatagtaaaaccgggagacatacttttgattaacagcacagggaatctaattgctcctcggggttacttcaaaatacgaagtgggaaaagctcaataatgaggtccgatgcacccattggcaaatgcaattctgaatgcatcactccaaatggaagcattcccaatgacaaaccatttcaaaatgtaaacaggatcacatatggggcctgtcccagatatgttaagcaaaacactctgaaattggcaacagggatgcggaatgtaccagagaaacaaactagaggcatattcggtgcaatcgcgggcttcatagaaaatggttgggagggaatgatggacggttggtacggtttcaggcatcaaaattctgagggcacagggcaagcagcagatcttaaaagcactcaagcagcaatcaaccaaatcaacgggaaactgaataggttaatcgagaaaacgaacgagaaattccatcaaattgaaaaagaattctcagaagtagaagggagaattcaggacctcgagaaatatgttgaggacactaaaatagatctctggtcgtacaatgcggagcttcttgttgccctggagaaccaacatacaattgatctaactgactcagaaatgaacaaactgtttgaaagaacaaagaagcaactgagggaaaatgctgaggatatgggcaatggttgtttcaaaatataccacaaatgtgacaatgcctgcatagggtcaatcagaaatggaacttatgaccatgatgtatacagagacgaagcattgaacaaccgattccagatcaaaggtgttgagctgaagtcaggatacaaagattggatcctatggatttcctttgccatatcatgttttttgctttgtattgttttgctggggttcatcatgtgggcctgccaaaaaggcaacattaggtgcaacatttgcatttga

SEQ ID NO: 30621 - RNA, 1701 nt, synthetic construct
  misc_feature 1..1701: note = hemagglutinin__InfluenzaA__AAY18126
  source 1..1701: mol_type = other RNA
atgaagactatcattgctttgagctacattctatgtctggttttcgctcaaaaacttcccggaaatgacaacagcacggcaacgctgtgccttgggcaccatgcagtaccaaacggaacgatagtgaaaacaatcacgaatgaccaaattgaagttactaatgctactgagctggtccagagttcctcaacaggtggaatatgcgacagtcctcatcagatccttgatggagaaaactgcacactaatagatgctctattgggagaccctcagtgtgatggcttccaaaataagaaatgggacctttttgttgaacgcagcaaagcctacagcaactgttacccttatgatgtgccggattatgcctcccttaggtcactagttgcctcatccggcacactggagtttaacaatgaaggcttcaactggactggagtcactcagaatggaacaagctctgcttgcaaaaggaaatctaataaaagtttctttagtagattgaattggttgacccacttaaaatacaaatacccagcattgaacgtgactatgccaaacaatgaaaaatttgacaaattgtacatttggggggttcaccacccgggtacggacaatgaccaaatcagcctgtatgctcaagcatcaggaagaatcacagtctctaccaaaagaagccaacaaactgtaatcccgaatatcggatctagacccagggtaagggacgtctccagcagaataagcatctattggacaatagtaaaaccgggagacatacttttgattaacagcacagggaatctaattgctcctcggggttacttcaaaatacgaagtgggaaaagctcaataatgagatcagatgcacccattggaaaatgcaattctgaatgcatcactccaaatggaagcattcccaatgacaaaccatttcaaaatgtaaacaggatcacatatggggcctgtcccagatatgttaagcaaaacactctgaaattggcaacagggatgcgaaatgtaccagagaaacaaactagaggcatatttggcgcaatcgcgggtttcatagaaaatggttgggagggaatggtggacggttggtacggtttcaggcatcaaaattctgagggcacaggacaagcagcagatctcaaaagcactcaagcagcaatcaaccaaatcaatgggaaactgaataggttaatcgggaaaacaaacgagaaattccatcagattgaaaaagaattctcagaagtagaggggagaattcaggacctcgagaaatatgttgaggacactaaaatagatctctggtcatacaacgcggagcttcttgttgccctggagaaccaacatacaattgatctaactgactcagaaatgaacaaactgtttgaaagaacaaagaagcaactgagggaaaatgctgaggatatgggcaatggttgtttcaaaatataccacaaatgtgacaatgcctgcatagggtcaatcagaaatggaacttatgaccatgatgtatacagagatgaagcattaaacaaccggttccagatcaaaggtgttgagctgaagtcaggatacaaagattggatcctatggatttcctttgccatatcatgttttttgctttgtgttgctttgttggggttcatcatgtgggcctgccaaaaaggcaacattaggtgcaacatttgcatttga

SEQ ID NO: 30622 - RNA, 1701 nt, synthetic construct
  misc_feature 1..1701: note = hemagglutinin__InfluenzaA__AAY18136
  source 1..1701: mol_type = other RNA
atgaagactatcattgctttgagctacattctatgtctggttttcgctcaaaaacttcccggaaatgacaacagcacggcaacgctgtgccttgggcaccatgcagtaccaaacggaacgatagtgaaaacaatcacgaatgaccaaattgaagttactaatgctactgagctggtacagagttcctcaacaggtggaatatgcgacagtcctcatcagatccttgatggagaaaactgcacactaatagatgctctattgggagaccctcagtgtgatggcttccaaaataagaaatgggacctttttgttgaacgcagcaaagcctacagcaactgttacccttatgatgtgccggattatgcctcccttaggtcactagttgcctcatccggcacactagagtttaacaatgaaagcttcgattggactggagtcactcagaatggaacaagctctgcttgcaaaaggagatctaataaaagtttctttagtagattgaattggttgacccacttaaaatacaaatacccagcattgaacgtgactatgccaaacaatgaaaaatttgacaaattgtacatttggggggttcaccacccgggtacggacagtgaccaaatcagcctatatgctcaagcatcaggaagaatcacagtctctaccaaaagaagccaacaaactgtaatcccgaatatcggatctagacccagggtaagggatgtctccagccgaataagcatctattggacaatagtaaaaccgggagacatacttttgattaacagcacagggaatctaattgctcctcggggttacttcaaaatacgaagtgggaaaagctcaataatgagatcagatgcacccattggcaaatgcaattctgagtgcatcactccaaatggaagcattcccaatgacaaaccatttcaaaatgtaaacaggatcacatatggggcctgtcccagatatattaagcaaaacactctgaaattggcaacagggatgcgaaatgtaccagagaaacaaactagaggcatatttggcgcaatcgcgggtttcatagaaaatggttgggagggaatggtggacggttggtacggtttcaggcatcaaaattctgagggcacagggcaagcagcagatctcaaaagcactcaagcagcaatcaaccaaatcaatgggaaactgaataggttaatcgggaaaacaaacgagaaattccatcagattgaaaaagaattctcagaagtagaagggagaattcaggacctcgagaaatatgttgaggacactaaaatagatctctggtcatacaacgcggagcttcttgttgccctggagaaccaacatacaattgatctaactgactcagaaatgaacaaactgtttgaaagaacaaagaagcaactgagggaaaatgctgaggatatgggcaatggttgtttcaaaatataccacaaatgtgacaatgcctgcatagggtcaatcagaaatggaacttatgaccatgatgtgtacagagatgaagcattaaacaaccggttccagatcaaaggtgttgagctgaagtcaggatacaaagattggatcctatggatttcctttgccatatcatgttttttgctttgtgttgctttgttggggttcatcatgtgggcctgccaaaaaggcaacattaggtgcaacatttgcatttga

SEQ ID NO: 30623 - RNA, 1701 nt, synthetic construct; identical to SEQ ID NO: 30592
  misc_feature 1..1701: note = hemagglutinin__InfluenzaA__AAY18156
  source 1..1701: mol_type = other RNA

SEQ ID NO: 30624 - RNA, 1701 nt, synthetic construct
  misc_feature 1..1701: note = hemagglutinin__InfluenzaA__AAY18176
  source 1..1701: mol_type = other RNA
atgaagactatcattgctttgagctacattttatgtctggttttcgctcaaaaacttcccgtaaatgacaacagcacggcaacgctgtgcctgggacaccatgcagtgccaaacggaacgctagtgaaaacaatcacgaatgaccacattgaagtgactaatgctactgagctggttcagagttcctcaacaggtagaatatgcgacagtcctcaccaaatccttgatggagaaaactgcacactaatagatgctctattgggagaccctcattgtgatggcttccaaaataaggaatgggacctttttgttgaacgcagcacagcctacagcaactgttacccttatgatgtgccggattatgcctcccttaggtcactagttgcctcatccggcacactggagtttaacaatgaaagcttcaattggactggagtcgctcagaatggaacaagctctgcttgcaaaaggagatctattaaaagtttctttagtagattgaattggttgcaccaattaaaatacaaatatccagcactgaacgtgactatgccaaacaatgaaaaatttgacaaattgtacatttggggggttcaccacccgagtacggacagtgaccaaatcagcctatatgctcaagcatcagggagagtcacagtctctaccaaaagaagccaacaaactgtaatcccgaatatcggatctagaccctgggtaaggggtgtctccagcagaataagcatctattggacaatagtaaaaccgggagacatacttttgattaacagcacagggaatctaattgctcctcggggttactttaaaatacgaagtgggaaaagctcaataatgaggtcaaatgcacccattggcaaatgcaattctgaatgcatcactccaaatggaagcattcccaatgacaaaccatttcaaaatgtaaacaggatcacatatggggcctgtcccagatatgttaagcaaaacactctgaaattggcaacagggatgcggaatgtaccagagaaacaaactagaggcatattcggcgcaatcgcgggtttcatagaaaatggttgggagggaatggtggacggttggtacggtttcaggcatcaaaattctgagggcacaggacaagcagcagatcttaaaagcactcaagcagcaatcaaccaaatcaacgggaaactgaataggttaatcgagaaaacaaatgagaaattccatcaaattgaaaaagaattctcagaagtagaagggagaattcaggacctcgagaaatatgttgaggacactaaaatagatctctggtcgtacaacgcggagcttcttgttgccctggagaaccaacatacaattgatctaactgactcagaaatgaacaaactgtttgaaagaacaaggaagcaactgagggaaaatgctgaggatatgggcaatggttgtttcaaaatataccacaaatgtgacaatgcctgcatagggtcaatcagaaatggaacttatgaccatgatgtatacagagacgaagcattaaacaaccggttccagatcaaaggtgttgagctgaagtcaggatacaaagattggatcctatggatttcctttgccatatcatgttttttgctttgtgttgttttgctggggttcatcatgtgggcctgccaaaaaggcaacattaggtgcaacatttgcatttga

SEQ ID NO: 30625 - RNA, 1701 nt, synthetic construct; identical to SEQ ID NO: 30576
  misc_feature 1..1701: note = hemagglutinin__InfluenzaA__AAY18186
  source 1..1701: mol_type = other RNA

SEQ ID NO: 30626 - RNA, 1701 nt, synthetic construct
  misc_feature 1..1701: note = hemagglutinin__InfluenzaA__AAY18564
  source 1..1701: mol_type = other RNA
atgaagactatcattgctttgagctacattctatgtctggttttcgctcaaaaacttcccggaaatgacaacagcacggcaacgctatgcctcgggcaccatgcagtaccaaacggaacgatagtgaaaacaatcacgaatgaccaaattgaagttactaatgctactgagctggttcagatttcctcaacaggtggaatatgcgacagtcctcatcagatccttgatggagaaaactgcacactaatagatgctctattgggagaccctcagtgtgatggcttccaaaataagaaatgggacctttttgttgaacgcagcaaagcctacagcaactgttacccttatgatgtgccggattatgcctcccttaggtcactagttgcctcatccggcacactggagtttaacaatgaaagcttcgattggactggagtcactcagaatggaacaagctctgcttgcaaaaggagatctaataaaagtttctttagtagattgaattggttgacccacttaaaatacaaatacccagcattgaacgtgactatgccaaacaatgaaaaatttgacaaattgtacatttggggggttcaccacccgggtacggacagtgaccaaatcagcctatatgctcaagcatcaggaagaatcacagtctctaccaaaagaagccaacaaactgtaatcccgaatatcggatctagacccagggtaagggatgtctccagccgaataagcatctattggacaatagtaaaaccgggagacatacttttgattaacagcacagggaatctaattgctcctcggggttacttcaaaatacgaagtgggaaaagctcaataatgagatcagatgcacccattggcaaatgcaattctgaatgcatcactccaaatggaagcattcccaatgacaaaccatttcaaaatgtaaacaggatcacatatggggcctgtcccagatatgttaagcaaaacactctgaaattggcaacagggatgcgaaatgtaccagagaaacaaactagaggcatatttggcgcaatcgcgggtttcatagaaaatggttgggagggaatggtggacggttggtacggtttcaggcatcaaaattctgagggcacaggacaagcagcagatctcaaaagcactcaagcagcaatcaaccaaatcaatgggaaactgaataggttaatcgggaaaacaaacgagaaattccatcagattgaaaaagaattctcggaagtagaaggaagaattcaggacctcgagaaatatgttgaggacactaaaatagatctctggtcatacaacgcggagcttcttgttgccctggagaaccaacatacaattgatctaactgactcagaaatgaacaaactgtttgaaagaacaaagaagcaactgagggaaaatgctgaggatatgggcaatggttgtttcaaaatataccacaaatgtgacaatgcctgcatagggtcaatcagaaatggaacttatgaccatgatgtgtacagagatgaagcattaaacaaccggttccagatcaaaggtgttgagctgaagtcaggatacaaagattggatcctatggatttcctttgccatatcatgttttttgctttgtgttgctttgttggggttcatcatgtgggcctgccaaaaaggcaacattaggtgcaacatttgcatttga

SEQ ID NO: 30627 - RNA, 1701 nt, synthetic construct
  misc_feature 1..1701: note = hemagglutinin__InfluenzaA__AAY18585
  source 1..1701: mol_type = other RNA
atgaagactatcattgctttgagctacattttatgtctggttttcgctcaaaaacttcccgaaaatgacaacagcacggcaacgctgtgcctggggcaccatgcagtgccaaacggaacgctagtgaaaacaatcacgaatgaccaaattgaagtgactaatgctactgagctggttcagagttcctcaacaggtagaatatgcgacagtcctcaccaaatccttgatggagaaaactgcacactaatagatgctctattgggagaccctcattgtgatggcttccaaaataaggaatgggacctttttgttgaacgcagcaaagcctacagcaactgttacccttatgatgtgccggattatgtctcccttaggtcactagttgcctcatcaggcacgctggagtttaacaatgaaagcttcaattggactggagtcgctcagaatggaacaagctctgcttgcaaaaggagatctgataaaagtttctttagtagattgaattggttgcaccaattaaaatacaaatatccagcactgaacgtgactatgccaaacaatgaaaaatttgacaaattgtacatttggggggttcaccacccgggtacagacagtgaccaaatcagcctatatgctcaagcatcagggagagtcacagtctctaccaaaagaagccaacaaactgtaatcccgaatatcggatctagaccctgggtaaggggtgtctccagcagaataagcatctattggacaatagtaaaaccgggagacatacttttgattaacagcacagggaatctaattgctcctcggggttacttcaaaatacgaagtgggaaaagctcaataatgaggtcagatgcacccattggcaaatgcaattctgaatgcatcactccaaatggaagcattcccaatgacaaaccatttcaaaatgtaaacaggatcacatatgggccctgtcccagatatgttaagcaaaacactctgaaattggcaacagggatgcggaatgtgccagagaaacaaactagaggcatattcggtgcaatcgcgggcttcatagaaaatggttgggagggaatgatggacggttggtacggtttcaggcatcaaaattctgagggcacagggcaagcagcagatcttaaaagcactcaagcagcaatcaaccaaatcaacgggaaactgaataggttaatcgagaaaacgaacgagaaattccatcaaattgaaaaggaattctcagaagtagaagggagaattcaggacctcgagaaatatgttgaggacactaaaatagatctctggtcgtacaatgcggagcttcttgttgccctggagaaccaacatacaattgatctaactgactcagaaatgaacaaactgtttgaaagaacaaagaagcaactgagggaaaatgctgaggatatgggcaatggttgtttcaaaatataccacaaatgtgacaatgcctgcatagggtcaatcagaaatggaacttatgaccatgatgtatacagagacgaagcattgaacaaccggttccagatcaaaggtgttgagctgaagtcaggatacaaagattggatcctatggatttcctttgccatatcatgttttttgctttgtattgttttgctggggttcatcatgtgggcctgccaaaaaggcaacattaggtgcaacatttgcatttga

SEQ ID NO: 30628 - RNA, 1701 nt, synthetic construct; identical to SEQ ID NO: 30540
  misc_feature 1..1701: note = hemagglutinin__InfluenzaA__AAY18611
  source 1..1701: mol_type = other RNA

SEQ ID NO: 30629 - RNA, 1701 nt, synthetic construct; identical to SEQ ID NO: 30580
  misc_feature 1..1701: note = hemagglutinin__InfluenzaA__AAY27843
  source 1..1701: mol_type = other RNA

SEQ ID NO: 30630 - RNA, 1701 nt, synthetic construct
  misc_feature 1..1701: note = hemagglutinin__InfluenzaA__AAY27853
  source 1..1701: mol_type = other RNA
atgaagactatcattgctttgagctacattctatgtctggttttcgctcaaaaacttcccggaaatgacaacagcacggcaacgctgtgccttgggcaccatgcagtgccaaacggaacgatagtgaaaacaatcacgaatgaccaaattgaagttactaatgctactgagctggtacagagttcctcaacaggtggaatatgcgacagtcctcatcagatccttgatggagaaaactgcacactaatagatgctctattgggagaccctcagtgtgatggcttccaaaataagaaatgggacctttttgttgaacgcagcaaagcctacagcaactgttacccttatgatgtgccggattatgcctcccttaggtcactagttgcctcatccggcacactggagtttaacaatgaaagcttcgattggactggagtcactcagaatggaacaagctctgcttgcaaaaggagatctaataaaagtttctttagtagattgaattggttgacccacttaaaatacaaatacccagcattgaacgtgactatgccaaacaatgaaaaatttgacaaattgtacatttggggggttcaccacccgggtacggacagtgaccaaatcagcctatatgctcaagcatcaggaagaatcacagtctctaccaaaagaagccaacaaactgtaatcccgaatatcggatctagacccagggtaagggatgtctccagccgaataagcatctattggacaatagtaaaaccgggagacatacttttgattaacagcacagggaatctaattgctcctcggggttacttcaaaatacgaagtgggaaaagctcaataatgagatcagatgcacccattggcaaatgcaattccgaatgcatcactccaaatggaagcattcccaatgacaaaccatttcaaaatgtaaacaggatcacatatggggcctgtcccagatatgttaagcaaaacactttgaaattggcaacagggatgcgaaatgtaccagagaaacaaactagaggcatatttggcgcaatcgcgggcttcatagaaaatggttgggagggaatggtggacggttggtacggtttcaggcatcaaaattctgagggcacaggacaagcagcagatctcaaaagcactcaagcagcaatcaaccaaatcaatgggaaactgaataggttaatcgggaaaacaaacgagaaattccatcagattgaaaaagaattctcagaagtagaagggagaattcaggacctcgagaaatatgttgaggacactaaaatagatctctggtcatacaacgcggagcttcttgttgccctggagaaccaacatacaattgatctaactgactcagaaatgaacaaactgtttgaaagaacaaagaagcaactgagggaaaatgctgaggatatgggcaatggttgtttcaaaatataccacaaatgtgacaatgcctgcatagggtcaatcagaaatggaacttatgaccatgatgtgtacagagatgaagcattaaacaaccggttccagatcaaaggtgttgagctgaagtcaggatacaaagattggatcctatggatttcctttgccatatcatgttttttgctttgtgttgctttgttggggttcatcatgtgggcctgccaaaaaggcaacattaggtgcaacatttgcatttga

SEQ ID NO: 30631 - RNA, 1701 nt, synthetic construct
  misc_feature 1..1701: note = hemagglutinin__InfluenzaA__AAY27863
  source 1..1701: mol_type = other RNA
atgaagactatcattgctttgagctacattctatgtctggttttcgctcaaaaacttcccggaaatgacaacagcacggcaacgctgtgccttgggcaccatgcagtaccaaacggaacgatagtgaaaacaatcacgaatgaccaaattgaagttactaatgctactgagctggtacagagttcctcaacaggtggaatatgcgacagtcctcatcagatcattgatggagaaaactgcacactaatagatgctctattgggagaccctcagtgtgatggcttccaaaataagaaatgggacctttttgttgaacgcagcaaagcctacagcaactgttacccttatgatgtgccggattatgcctcccttaggtcactagttgcctcatccggcacactggagtttaacaatgaaagcttcgattggactggagtcactcagaatggaacaagctctgcttgcaaaaggagatctaataaaagtttctttagtagattgaattggttgacccacttaaaatacaaatacccagcattgaacgtgactatgccaaacaatgaaaaatttgacaaattgtacatttggggggttcaccacccgggtacggacagtgaccaaatcagcctatatgctcaagcatcaggaagaatcacagtctctaccaaaagaagccaacaaactgtaatcccgaatatcggatctagacccagggtaagggatgtctccagccgaataagcatctattggacaatagtaaaaccgggagacatacttttgattaacagcacagggaatctaattgctcctcggggttacttcaaaatacgaagtgggaaaagctcaataatgatatcagatgcacccattggcaaatgcaattccgaatgcatcactccaaatggaagcattcccaatgacaaaccatttcaaaatgtaaacaggatcacatatggggcctgtcccagatatgttaagcaaaacactctgaaattggcaacagggatgcgaaatgtaccagagaaacaaactagaggcatatttggcgcaatcgcgggtttcatagaaaatggttgggagggaatggtggacggttggtacggtttcaggcatcaaaattctgagggcacaggacaagcagcagatctcaaaagcactcaagcagcaatcaaccaaatcaatgggaaactgaataggttaatcgggaaaacaaacgagaaattccatcagattgaaaaagaattctcagaagtagaagggagaattcaggacctcgagaaatatgttgaggacactaaaatagatctctggtcatacaacgcggagcttcttgttgccctggagaaccaacatacaattgatctaactgactcagaaatgaacaaactgtttgaaagaacaaagaagcaactgagggaaaatgctgaggatatgggcaatggttgtttcaaaatataccacaaatgtgacaatgcctgcatagggtcaatcagaaatggaacttatgaccatgatgtgtacagagatgaagcattaaacaaccggttccagatcaaaggtgttgagctgaagtcaggatacaaagattggatcctatggatttcctttgccatatcatgttttttgctttgtgttgctttgttggggttcatcatgtgggcctgccaaaaaggcaacattaggtgcaacatttgcatttga

SEQ ID NO: 30632 - RNA, 1701 nt, synthetic construct
  misc_feature 1..1701: note = hemagglutinin__InfluenzaA__AAY27959
  source 1..1701: mol_type = other RNA
atgaagactatcattgctttgagctacattttatgcctggttttcgctcaaaaacttcccggaaatgacaacagcacggcaacgctgtgcctggggcatcatgcagtgccaaacggaacgctagtgaaaacaatcacgaatgaccaaattgaagtaactaatgctactgagctggttcagagttcctcaacaggtagaatatgcgacagtcctcaccaaatccttgatggagaaaactgcacactaatagatgctctattgggagaccctcattgtgatggcttccaaaataaggaatgggacctttttgttgaacgcagcaaagcctacagcaactgttacccttatgatgtaccggattatgtctcccttaggtcactagttgcctcatcaggcacgctggagtttaacaatgaaagcttcaattggactggagtcgctcagaatggaacaagctctgcttgcaaaaggagatctgataaaagtttctttagtagattgaattggttgcaccaattaaaatacaaatatccagcactgaacgtgactatgccaaacaatgaaaaatttgacaaattgtacatttggggggttcaccacccgggtacagacagtgaccaaatcagcctatatgctcaagcatcagggagagtcacagtctctaccaaaagaagccaacaaactgtaatcccgaatatcggatctagaccctgggtaaggggtgtctccagcagaataagcatctattggacaatagtaaaaccgggagacatacttttgattaacagcacagggaatctaattgctcctcggggttacttcaaaatacgaagtgggaaaagctcaataatgaggtcagatgcacccattggcaaatgcaattctgaatgcatcactccaaatggaagcattcccaatgacaaaccatttcaaaatgtaaacaggatcacatatgggccttgtcccagatatgttaagcaaaacactctgaaattggcaacagggatgcggaatgtgccagagaaacaaactagaggcatattcggtgcaatcgcgggcttcatagaaaatggttgggagggaatgatggacggttggtacggtttcaggcatcaaaattctgagggcacagggcaagcagcagatcttaaaagcactcaagcagcaatcaaccaaatcaacgggaaactgaataggttaatcgagaaaacgaacgagaaattccatcaaattgaaaaagaattctcagaagtagaagggagaattcaggacctcgagaaatatgttgaggacactaaaatagatctctggtcgtacaatgcggagcttcttgttgccctggagaaccaacatacaattgatctaactgactcagaaatgaacaaactgtttgaaagaacaaagaagcaactgagggaaaatgctgaggatatgggcaatggttgtttcaaaatataccacaaatgtgacaatgcctgcatagggtcaatcagaaatggaacttatgaccatgatgtatacagagacgaagcattgaacaaccggttccagatcaaaggtgttgagctgaagtcaggatacaaagattggatcctatggatttcctttgccatatcatgttttttgctttgcattgttttgctggggttcatcatgtgggcctgccaaaaaggcaacattaggtgcaacatttgcatttga

SEQ ID NO: 30633 - RNA, 1701 nt, synthetic construct; identical to SEQ ID NO: 30535
  misc_feature 1..1701: note = hemagglutinin__InfluenzaA__AAY27994
  source 1..1701: mol_type = other RNA

SEQ ID NO: 30634 - RNA, 1701 nt, synthetic construct; identical to SEQ ID NO: 30535
  misc_feature 1..1701: note = hemagglutinin__InfluenzaA__AAY28004
  source 1..1701: mol_type = other RNA

SEQ ID NO: 30635 - RNA, 1701 nt, synthetic construct; identical to SEQ ID NO: 30535
  misc_feature 1..1701: note = hemagglutinin__InfluenzaA__AAY28265
  source 1..1701: mol_type = other RNA

SEQ ID NO: 30636 - RNA, 1701 nt, synthetic construct
  misc_feature 1..1701: note = hemagglutinin__InfluenzaA__AAY28275
  source 1..1701: mol_type = other RNA
atgaagactatcattgctttgagctacattttatgtctggttttcgctcaaaaacttcccggaaatgacaacagcacggcaacgctgtgcctggggcaccatgcagtgccaaacggaacgctagtgaaaacaatcacgaatgaccaaattgaagtgactaatgctactgagctggttcagagttcctcaacaggtagaatatgcgacagtcctcaccaaatccttgatggagaaaactgcacactaatagatgctctattgggagaccctcattgtgatggcttccaaaataaggaatgggaccttttcgttgaacgcagcaaagcctacagcaactgttacccttatgatgtgccggattatgcctcccttaggtcactagttgcctcatccggcacactggagtttaacaatgaaagcttcaattggactggagtcgctcagaatggaacaagctctgcttgcaaaaggaggtctaataaaagtttctttagtagattgaattggttgcaccaattgaaatacaaatacccagcactgaacgtgactatgccaaacaatgaaaaatttgacaaattgtacatttggggggttcaccacccgagtacggacagtgaccaaatcagcctatatgctcaagcatcagggagagtcacagtctctaccaaaagaagccaacagactgtaatcccgaatatcggatctagaccctgggtaaggggtgtctccagcagaataagcatctattggacaatagtaaaaccgggagacatacttttgattaacagcacagggaatctaattgctcctcggggttacttcaaaatacgaagtgggaaaagctcagtaatgaggtcagatgcatccattggcaaatgcaattctgaatgcatcactccaaatggaagcattcccaatgacaaaccatttcaaaatgtaaacaggatcacatatggggcctgtcccagatatgttaagcaaaacactctgaaattggcaacagggatgcggaatgtaccagagaaacaaactagaggcatattcggtgcaatcgcgggtttcatagaaaatggttgggagggaatggtggacggttggtacggtttcaggcatcaaaattctgagggcacaggacaagcagcagatcttaaaagcactcaagcagcaatcaaccaaatcaacgggaaactgaataggttaatcgagaaaacgaacgagaaattccatcaaattgaaaaagaattctcagaagtagaagggagaattcaggacctcgagaaatatgttgaggacactaaaatagatctctggtcgtacaacgcggagcttcttgttgccctggagaaccaacatacaattgatctaactgactcagaaatgaacaaactgtttgaaagaacaaagaagcaactgagggaaaatgctgaggatatgggcaatggctgtttcaaaatataccacaaatgtgacaatgcctgcatagggtcaatcagaaatggaacttatgaccatgatgtatacagagacgaagcattaaacaaccggttccagatcaaaggtgttgagctgaagtcaggatacaaagattggatcctatggatttcctttgccatatcatgttttttgctttgtgttgttttgctggggttcatcatgtgggcctgccaaaaaggcaacattaggtgcaacatttgcatttga

SEQ ID NO: 30637 - RNA, 1701 nt, synthetic construct
  misc_feature 1..1701: note = hemagglutinin__InfluenzaA__AAY28285
  source 1..1701: mol_type = other RNA
atgaagactatcattgctttgagctacattttatgtctggttttcgctcaaaaacttcccggaaatgacaacagcacggcaacgctgtgcctggggcaccatgcagtgccaaacggaacgctagtgaaaacaatcacgaatgaccaaattgaagtgactaatgctactgagctggttcagaattcctcaacaggtagaatatgcgacagtcctcaccaaatccttgatggagaaaactgcacactaatagatgctctattgggagaccctcattgtgatggcttccaaaataaggaatgggacctttttgttgaacgcagcaaagcctacagcaactgttacccttatgatgtgccggattatgtctcccttaggtcactagttgcctcatcaggcacgctggagtttaacaatgaaagcttcaattggactggagtcgctcagaatgggacaagctctgcttgcaaaaggagatctgataaaagtttctttagtagattgaattggttgcaccaattaaaatacaaatatccagcactgaacgtgactatgccaaacaatgaaaaatttgacaaattgtacatttggggggttcaccacccgggtacagacaatgaccaaatcagcctatatgctcaagcatcagggagagtcacagtctctaccaaaagaagccaacaaactgtaatcccgaatattggatctagaccctgggtaaggggtgtctccagcagaataagcatctattggacaatagtaaaaccgggagacatacttttgattaacagcacagggaatctaattgctcctcggggttacttcaaaatacgaagtgggaaaagctcaataatgaggtcagatgcacccattggcaaatgcaattctgaatgcatcactccaaatggaagcattcccaatgacaaaccatttcaaaatgtaaacaggatcacatatgggccctgtcccagatatgttaagcaaaacactctgaaattggcaacagggatgcggaatgtgccagagaaacaaactagaggcatattcggtgcaatcgcgggcttcatagaaaatggttgggagggaatgatggacggttggtacggtttcaggcatcaaaattctgagggcacagggcaagcagcagatcttaaaagcactcaagcagcaatcaaccaaatcaacgggaaactgaataggttaatcgagaaaacgaacgagaaattccatcaaattgaaaaagaattctcagaagtagaagggagaattcaggacctcgagaaatatgttgaggacactaaaatagatctctggtcgtacaatgcggagcttcttgttgccctggagaaccaacatacaattgatctaactgactcagaaatgaacaaactgtttgaaagaacaaagaagcaactgagggaaaatgctgaggatatgggcaatggttgtttcaaaatataccacaaatgtgacaatgcctgcatagggtcaatcagaaatggaacttatgaccatgatgtatacagagacgaagcattgaacaaccgattccagatcaaaggtgttgagctgaagtcaggatacaaagattggatcctatggatttcctttgccatatcatgttttttgctttgtattgttttgctggggttcatcatgtgggcctgccaaaaaggcaacattaggtgcaacatttgcatttga

SEQ ID NO: 30638 - RNA, 1701 nt, synthetic construct
  misc_feature 1..1701: note = hemagglutinin__InfluenzaA__AAY28295
  source 1..1701: mol_type = other RNA
atgaagactatcattgctttgagctacattctatgtctggttttcgctcaaaaacttcccggaaatgacaacagcacggcaacgctgtgccttgggcaccatgcagtaccaaacggaacgatagtgaaaacaatcacgaatgaccaaattgaagttactaatgctactgagctggtacagagttcctcaacaggtggaatatgcgacagtcctcatcagatccttgatggagaaaactgcacactaatagatgctctattgggagaccctcagtgtgatggcttccaaaataagaaatgggacctttttgttgaacgcagcaaagcctacagcaactgttacccttatgatgtgccggattatgcctcccttaggtcactagttgcctcatccggcacactggagtttaacaatgaaagcttcgattggactggagtcactcagaatggaacaagctctgcttgcaaaaggagatctaataaaagtttctttagtagattgaattggttgacccacttaaaatacaaatacccagcattgaacgtgactatgccaaacaatgaaaaatttgacaaattgtacatttggggggttcaccacccgggtacggacagtgaccaaatcagcctatatgctcaagcatcaggaaaaatcacagtctctaccaaaagaagccaacaaactgtaatcccgaatatcggatctagacccagggtaagggatgtctccagccgaataagcatctattggacaatagtaaaaccgggagacatacttttgattaacagcacagggaatctaattgctcctcggggttacttcaaaatacaaagtgggaaaagctcaataatgagatcagatgcacccattggcaaatgcaattccgaatgcatcactccaaatggaagcattcccaatgacaaaccatttcaaaatgtaaacaggatcacatatggggcctgtcccagatatgttaagcaaaaaactctgaaattggcaacagggatgcgaaatgtaccagagaaacaaactagaggcatatttggcgcaatcgcgggtttcatagaaaatggttgggagggaatggtggacggttggtacggtttcaggcatcaaaattctgagggcacaggacaagcagcagatctcaaaagcactcaagcagcaatcaaccaaatcaatgggaaactgaataggttaatcgggaaaacaaacgagaaattccatcagattgaaaaagaattctcagaagtagaagggagaattcaggacctcgagaaatatgttgaggacactaaaatagatctctggtcatacaacgcggagcttcttgttgccctggagaaccaacatacaattgatctaactgactcagaaatgaacaaactgtttgaaagaacaaagaagcaactgagggaaaatgctgaggatatgggcaatggttgtttcaaaatataccacaaatgtgacaatgcctgcatagggtcaatcagaaatggaacttatgaccatgatgtgtacagagatgaagcattaaacaaccggttccagatcaaaggtgttgagctgaagtcaggatacaaagattggatcctatggatttcctttgccatatcatgttttttgctttgtgttgctttgttggggttcatcatgtgggcctgccaaaaaggcaacattaggtgcaacatttgcatttga

SEQ ID NO: 30639 - RNA, 1701 nt, synthetic construct
  misc_feature 1..1701: note = hemagglutinin__InfluenzaA__AAY28305
  source 1..1701: mol_type = other RNA
atgaaggctatcattgctttgagctacattttatgcctggttttcgctcaaaaacttcccggaaatgacaacagcacggcaacgctgtgcctggggcatcatgcagtgccaaacggaacgctagtgaaaacaatcacgaatgaccaaattgaagtaactaatgctactgagctggttcagagttcctcaacaggtagaatatgcgacagtcctcaccaaatccttgatggagaaaactgcacactaatagatgctctattgggagaccctcattgtgatggcttccaaaataaggaatgggacctttttgttgaacgcagcaaagcctacagcaactgttacccttatgatgtgccggattatgtctcccttaggtcactagttgcctcatcaggcacgctggagtttaacaatgaaagcttcaattggactggagtcgctcagaatggaacaagctctgcttgcaaaaggagatctgataaaagtttctttagtagattgaattggttgcaccaattaaaatacaaatatccagcactgaacgtgactatgccaaacaatgaaaaatttgacaaattgtacatttggggggttcaccacccgggtacagacagtgaccaaatcagcctatatgctcaagcatcagggagagtcacagtctctaccaaaagaagccaacaaactgtaatcccgaatatcggatctggaccctgggtaaggggtgtctccagcagaataagcatctattggacaatagtaaaaccgggagacatacttttgattaacagcacagggaatctaattgctcctcggggttacttcaaaatacgaagtgggaaaagctcaataatgaggtcagatgcacccattggcaaatgcaattctgaatgcatcactccaaatggaagcattcccaatgacaaaccatttcaaaatgtaaacaggatcacatatggggcctgtcccagatatgttaagcaaaacactctgaaattggcaacagggatgcggaatgtgccagagaaacaaactagaggcatattcggtgcaatcgcgggcttcatagaaaatggttgggagggaatgatggacggttggtacggtttcaggcatcaaaattctgagggcacagggcaagcagcagatcttaaaagcactcaagcagcaatcaaccaaatcaacgggaaactgaataggttaatcgagaaaacgaacgagaaattccatcaaattgaaaaagaattctcagaagtagaagggagaattcaggacctcgagaaatatgttgaggacactaaaatagatctctggtcgtacaatgcggagcttcttgttgccctggagaaccaacatacaattgatctaactgactcagaaatgaacaaactgtttgaaagaacaaagaagcaactgagggaaaatgctgaggatatgggcaatggttgtttcaaaatataccacaaatgtgacaatgcctgcatagggtcaatcagaaatggaacttatgaccatgatgtatacagagacgaagcattgaacaaccggttccagatcaaaggtgttgagctgaagtcaggatacaaagattggatcctatggatttcctttgccatatcatgttttttgctttgtattgttttgctggggttcatcatgtgggcctgccaaaaaggcaacattaggtgcaacatttgcatttga

SEQ ID NO: 30640 - RNA, 1701 nt, synthetic construct
  misc_feature 1..1701: note = hemagglutinin__InfluenzaA__AAY28325
  source 1..1701: mol_type = other RNA
atgaagactatcattgctttgagctacattttatgcctggttttcgctcaaaaacttcccggaaatgacaacagcacggcgacgctgtgcctggggcaccatgcagtgccaaacggaacgctagtgaaaacaatcacgaatgaccaaattgaagtaactaatgctactgagctggttcagagttcctcaacaagtagaatatgcgacagtcctcaccaaatccttgatggagaaaactgcacactaatagatgctctattgggagaccctcattgtgatggcttccaaaataaggaatgggacctttttgttgaacgcagcaaagcctacagcaactgttacccttatgatgtgccggattatgtctcccttaggtcactagttgcctcatcaggcacgctggagtttaacaatgaaagcttcaattggactggagtcgctcagaatggaacaagctctgcttgcaaaaggagatctgataaaagtttctttagtagattgaattggttgcaccaattaaaatacaaatatccagcactgaacgtgactatgccaaacaatgaaaaatttgacaaattgtacatttggggggttcaccacccgggtacagacagtgaccaaatcagcctatatgctcaagcatcagggagagtcatagtctctaccaagagaagccaacaaactgtaatcccgaatatcggatctggaccctgggtaaggggtgtctccagcagaataagcatctattggacaatagtaaaaccgggagacatacttttgattaacagcacagggaatctaattgctcctcggggttacttcaaaatacgaagtgggaaaagctcaataatgaggtccgatgcacccattggcaaatgcaattctgaatgcatcactccaaatggaagcattcccaatgacaaaccatttcaaaatgtaaacaggatcacatatggggcctgtcccagatatgttaagcaaaacactctgaaattggcaacagggatgcggaatgtaccagagaaacaaactagaggcatattcggtgcaatcgcgggcttcatagaaaatggttgggagggaatgatggacggttggtacggtttcaggcatcaaaattctgagggcacagggcaagcagcagatcttaaaagcactcaagcagcaatcaaccaaatcaacgggaaactgaataggttaatcgagaaaacgaacgagaaattccatcaaattgaaaaagaattcgcagaagtagaagggagaattcaggacctcgagaaatatgttgaggacactaaaatagatctctggtcgtacaatgcggagcttcttgttgccctggagaaccaacatacaattgatctaactgactcagaaatgaacaaactgtttgaaagaacaaagaagcaactaagggaaaatgctgaggatatgggcaatggttgtttcaaaatataccacaaatgtgacaatgcctgcatagggtcaatcagaaatggaacttatgaccatgatgtatacagagacgaagcattgaacaaccggttccagatcaaaggtgttgagctgaagtcaggatacaaagattggatcctatggatttcctttgccatatcatgttttttgctttgtattgttttgctggggttcatcatgtgggcctgccaaaaaggcaacattaggtgcaacatttgcatttga

SEQ ID NO: 30641 - RNA, 1701 nt, synthetic construct
  misc_feature 1..1701: note = hemagglutinin__InfluenzaA__AAY28335
  source 1..1701: mol_type = other RNA
atgaagactatcattgctttgagctacattttatgcctggtttccgctcaaaaacttcccggaaatgacaacagcacggcaacgctgtgcctggggcaccatgcagtgccaaacggaacgctagtgaaaacaatcacgaatgaccaaattgaagtaactaatgctactgagctggttcagagttcctcaacaagtagaatatgcgacagtcctcaccaaatccttgatggagaaaactgcacactaatagatgctctattaggagaccctcattgtgatggcttccaaaataaggaatgggacctttttgttgaacgcagcaaagcctacagcaactgttacccttatgatgtgccggattatgtctcccttaggtcactagttgcctcatcaggcacgctggagtttaacaatgaaagcttcaattggactggagtcgctcagaatggaacaagctctgcttgcaaaaggagatctgataaaagtttctttagtagattgaattggttgcaccaattaaaatacaaatatccagcactgaacgtgactatgccaaacaatgaaaaatttgacaaattgtacatttggggggttcaccacccgggtacagacagtgaccaaatcagcctatatgctcaagcatcagggagagtcacagtctctaccaaaagaagccaacaaactgtaatcccgaatatcggatctagaccctgggtaaggggtgtctccagcagaataagcatctattggacaatagtaaaaccgggagacatacttttgattaacagcacagggaatctaattgctcctcggggttacttcaaaatacgaagtgggaaaagctcaataatgaggtcagatgcacccattggcaaatgcaattctgaatgcatcactccaaatggaagcattcccaatgacaaaccatttcaaaatgtaaacaggatcacatatggggcctgtcccagatatgttaagcaaaacactctgaaattggcaacagggatgcggaatgtaccagagaaacaaactagaggcatattcggtgcaatcgcgggcttcatagaaaatggttgggagggaatgatggacggttggtacggtttcaggcatcaaaattctgagggcacagggcaagcagcagatcttaaaagcactcaagcagcaatcaaccaaatcaacgggaaactgaataggttaatcgagaaaacgaacgagaaattccatcaaattgaaaaagaattctcagaagtagaagggagaattcaggacctcgagaaatatgttgaggacactaaagtagatctctggtcgtacaatgcggagcttcttgttgccctggagaaccaacatacaattgatctaactgactcagaaatgaacaaactgtttgaaagaacaaagaagcaactgagggaaaatgctgaggatatgggcaatggttgtttcaaaatataccacaaatgtgacaatgcctgcatagggtcaatcagaaatggaacttatgaccatgatgtatacagagatgaagcattgaacaaccggttccagatcaaaggtgttgagctgaagtcaggatacaaagattggatcctatggatttcctttgccatatcatgttttttgctttgtattgttttgctggggttcatcatgtgggcctgccaaaaaggcaacattaggtgcaacatttgcatttga

SEQ ID NO: 30642 - RNA, 1701 nt, synthetic construct; identical to SEQ ID NO: 30540
  misc_feature 1..1701: note = hemagglutinin__InfluenzaA__AAY28345
  source 1..1701: mol_type = other RNA

SEQ ID NO: 30643 - RNA, 1701 nt, synthetic construct
  misc_feature 1..1701: note = hemagglutinin__InfluenzaA__AAY28355
  source 1..1701: mol_type = other RNA
atgaagactatcattgctttgagctacattttatgtctggttttcgctcaaaaacttcccgtaaatgacaacagcacggcaacgctgtgcctgggacaccatgcagtgccaaacggaacgctagtgaaaacaatcacgaatgaccacattgaagtgactaatgctactgagctggttcagagttcctcaacaggtagaatatgcgacagtcctcaccaaatccttgatggagaaaactgcacactaatagatgctctattgggagaccctcattgtgatggcttccaaaataaggaatgggacctttttgttgaacgcagcacagcctacagcaactgttacccttatgatgtgccggattatgcctcccttaggtcactagttgcctcatccggcacactggagtttaacaatgaaagcttcaattggactggagtcgctcagaatggaacaagctctgcttgcaaaaggagatctattaaaagtttctttagtagattgaattggttgcaccaattaaaatacaaatatccagcactgaacgtgactatgccaaacaatgaaaaatttgacaaattgtacatttggggggttcaccacccgagtacggacagtgaccaaatcagcctatatgctcaagcatcagggagagtcacagtctctaccaaaagaagccaacaaactgtaatcccgaatatcggatctagaccctgggtaaggggtgtctccagcagaataagcatctattggacaatagtaaaaccgggagacatacttttgattaacagcacagggaatctaattgctcctcggggttactttaaaatacgaagtgggaaaagctcaataatgaggtcaaatgcacccattggcaaatgcaattctgaatgcatcactccaaatggaagcattcccaatgacaaaccatttcaaaatgtaaacaggatcacatatggggcctgtcccagatatgttaagcaaaacactctgaaattggcaacagggatgcggaatgtaccagagaaacaaactagaggcatattcggcgcaatcgcgggtttcatagaaaatggttgggagggaatggtggacggttggtatggtttcaggcatcaaaattctgagggcacaggacaagcagcagatcttaaaagcactcaagcagcaatcaaccaaatcaacgggaaactgaataggttaatcgagaaaacaaacgagaaattccatcaaattgaaaaagaattctcagaagtagaagggagaattcaggacctcgagaaatatgttgaggacactaaaatagatctctggtcgtacaacgcggagcttcttgttgccctggagaaccaacatacaattgatctaactgactcagaaatgaacaaactgtttgaaagaacaaggaagcaactgagggaaaatgctgaggatatgggcaatggttgtttcaaaatataccacaaatgtgacaatgcctgcatagggtcaatcagaaatggaacttatgaccatgatgtatacagagacgaagcattaaacaaccggttccagatcaaaggtgttgagctgaagtcaggatacaaagattggatcctatggatttcctttgccatatcatgttttttgctttgtgttgttttgctggggttcatcatgtgggcctgccaaaaaggcaacattaggtgcaacatttgcatttga

SEQ ID NO: 30644 - RNA, 1701 nt, synthetic construct
  misc_feature 1..1701: note = hemagglutinin__InfluenzaA__AAY28363
  source 1..1701: mol_type = other RNA
atgaagactatcattgctttgagctacattttatgtatggttttcgctcaaaaacttcccgtaaatgacaacagcacggcaacgctgtgcctgggacaccatgcagtgccaaacggaacgctagtgaaaacaatcacgaatgaccacattgaagtgactaatgctactgagctggttcagagttcctcaacaggtagaatatgcgacagtcctcaccaaatccttgatggagaaaactgcacactaatagatgctctattgggagaccctcattgtgatggcttccaaaataaggaatgggacctttttgttgaacgcagcacagcctacagcaactgttacccttatgatgtgccggattatgcctcccttaggtcactagttgcctcatccggcacactggagtttaacaatgaaagcttcaattggactggagtcgctcagaatggaacaagctctgcttgcaaaaggagatctattaaaagtttctttagtagattgaattggttgcaccaattaaaatacaaatatccatcattgaacgtgactatgccaaacaatgaaaaatttgacaaattgtacatttggggggttcaccacccgagtacggacagtgaccaaatcagcctatatgctcaagcatcagggagagtcacagtctctaccaaaagaagccaacaaactgtaatcccgaatatcggatctagaccctgggtaaggggtgtctccagcagaataagcatctattggacaatagtaaaaccgggagacatacttttgattaacagcacagggaatctaattgctcctcggggttactttaaaatacgaagtgggaaaagctcaataatgaggtcaaatgcacccattggcaaatgcaattctgaatgcatcactccaaatggaagcattcccaatgacaaaccatttcaaaatgtaaacaggatcacatatggggcctgtcccagatatgttaagcaaaacactctgaaattggcaacagggatgcggaatgtaccagagaaacaaactagaggcatattcggcgcaatcgcgggtttcatagaaaatggttgggagggaatggtggacggttggtacggtttcaggcatcaaaattctgagggcacaggacaagcagcagatcttaaaagcactcaagcagcaatcaaccaaatcaacgggaaactgaataggttaatcgagaaaacaaacgagaaattccatcaaattgaaaaagaattctcagaagtagaagggagaattcaggacctcgagaaatatgttgaggacactaaaatagatctctggtcgtacaacgcggagcttcttgttgccctggagaaccaacatacaattgatctaactgactcagaaatgaacaaactgtttgaaagaacaaggaagcaactgagggaaaatgctgaggatatgggcaatggttgtttcaaaatataccacaaatgtgacaatgcctgcatagggtcaatcagaaatggaacttatgaccatgatgtatacagagatgaagcattaaacaaccggttccagatcaaaggtgttgagctgaagtcaggatacaaagattggatcctatggatttcctttgccatatcatgttttttgctttgtgttgttttgctggggttcatcatgtgggcctgccaaaaaggcaacattaggtgcaacatttgcatttga

SEQ ID NO: 30645 - RNA, 1701 nt, synthetic construct
  misc_feature 1..1701: note = hemagglutinin__InfluenzaA__AAY28375
  source 1..1701: mol_type = other RNA
atgaagactatcattgctttgagctacattttatgtctggttttcgctcaaaaacttcccgtaaatgacaacagcacggcaacgctgtgcctgggacaccatgcagtgccaaacggaacgctagtgaaaacaatcacgaatgaccacattgaagtgactaatgctactgagctagttcagagttcctcaacaggtagaatatgcgacagtcctcaccaaatccttgatggagaaaactgcacactaatagatgctctattgggagaccctcattgtgatggcttccaaaataaggaatgggacctttttgttgaacgcagcacagcctacagcaactgttacccttatgatgtgccggattatgcctcccttaggtcactagttgcctcatccggcacactggagtttaacaatgaaagcttcaattggactggagtcgctcagaatggaacaagctctgcttgcaaaaggagatctattaaaagtttctttagtagattgaattggttgcaccaattaaaatacaaatatccagcactgaacgtgactatgccaaacaatgaaaaatttgacaaattgtacatttggggggttcaccacccgagtacggacagtgaccaaatcagcctatatgctcaagcatcagggagagtcacagtctctaccaaaagaagccaacaaactgtaatcccgaatatcggatctagaccctgggtaaggggtgtctccagcagaataagcatctattggacaatagtaaaaccgggagacatacttttgattaacagcacagggaatctaattgctcctcggggttacttcaaaatacgaagtgggaaaagctcaataatgaggtcaaatgcacccattggcaaatgcaattctgaatgcatcactccaaatggaagcattcccaatgacaaaccatttcaaaatgtaaacaggatcacatatggggcatgtcccagatatgttaagcaaaacactctgaaattggcaacagggatgcggaatgtaccagagaaacaaactagaggcatattcggcgcaatcgcgggtttcatagaaaatggttgggaaggaatggtggacggttggtacggtttcaggcatcaaaattctgagggcacaggacaagcagcagatcttaaaagcactcaagcagcaatcaaccaaatcaacgggaaactgaataggttaatcgagaaaacaaacgagaaattccatcaaattgaaaaagaattctcagaagtagaagggagaattcaggacctcgagaaatatgttgaggacactaaaatagatctctggtcgtacaacgcggagcttcttgttgccctggagaaccaacatacaattgatctaactgactcagaaatgaacaaactgtttgaaagaacaaggaagcaactgagggaaaatgctgaggatatgggcaatggttgtttcaaaatataccacaaatgtgacaatgcctgcatagggtcaatcagaaatggaacttatgaccatgatgtatacagagacgaagcattaaacaaccggttccagatcaaaggtgttgagctgaagtcaggatacaaagattggatcctatggatttcctttgccatatcatgttttttgctttgtgttgttttgttggggttcatcatgtgggcctgccaaaaaggcaacattaggtgcaacatttgcatttga

SEQ ID NO: 30646 - RNA, 1701 nt, synthetic construct; identical to SEQ ID NO: 30540
  misc_feature 1..1701: note = hemagglutinin__InfluenzaA__AAY28385
  source 1..1701: mol_type = other RNA

SEQ ID NO: 30647 - RNA, 1701 nt, synthetic construct
  misc_feature 1..1701: note = hemagglutinin__InfluenzaA__AAY28395
  source 1..1701: mol_type = other RNA
atgaagactatcattgctttgagctacattctatgtctggttttcgctcaaaaacttcccggaaatgacaacagcacggcaacgctgtgccttgggcaccatgcagtaccaaacggaacgatagtgaaaacaatcacgaatgaccaaattgaagttactaatgctactgagctggtacagagttcctcaacaggtggaatatgcgacagtcctcatcagatccttgatggagaaaactgcacactaatagatgctctattgggagaccctcagtgtgatggcttccaaaataagaaatgggacctttttgttgaacgcagcaaagcctacagcaactgttacccttatgatgtgccggattatgcctcccttaggtcactagttgcctcatccggcacactagagtttaacaatgaaagcttcgattggactggagtcactcagaatggaacaagctctgcttgcaaaaggagatctaataaaagtttctttagtagattgaattggttgacccacttaaaatacaaatacccagcattgaacgtgactatgccaaacaatgaaaaatttgacaaattgtacatttggggggttcaccacccgggtacggacagtgaccaaatcaacctatatgctcaagcatcaggaagaatcacagtctctaccaaaagaagccaacaaactgtaatcccgaatatcggatctagacccagggtaagggatgtctccagccgaataagcatctattggacaatagtaaaaccgggagacatacttttgattaacagcacagggaatctaattgctcctcggggttacttcaaaatacgaagtgggaaaagctcaataatgagatcagatgcacccattggcaaatgcaattctgaatgcatcactccaaatggaagcattcccaatgacaaaccatttcaaaatgtaaacaggatcacatatggggcctgtcccagatatattaagcaaaacactctgaaattggcaacagggatgcgaaatgtaccagagaaacaaactagaggcatatttggcgcaatcgcgggtttcatagaaaatggttgggagggaatggtggacggttggtacggtttcaggcatcaaaattctgagggcacaggacaagcagcagatctcaaaagcactcaagcagcaatcaaccaaatcaatgggaaactgaataggttaatcgggaaaacaaacgagaaattccatcagattgaaaaagaattctcagaagtagaagggagaattcaggacctcgagaaatatgttgaggacactaaaatagatctctggtcatacaacgcggagcttcttgttgccctggagaaccaacatacaattgatctaactgactcagaaatgaacaaactgtttgaaagaacaaagaagcaactgagggaaaatgctgaggatatgggcaatggttgtttcaaaatataccacaaatgtgacaatgcctgcatagggtcaatcagaaatggaacttatgaccatgatgtgtacagagatgaagcattaaacaaccggttccagatcaaaggtgttgagctgaagtcaggatacaaagattggatcctatggatttcctttgccatatcatgttttttgctttgtgttgctttgttggggttcatcatgtgggcctgccaaaaaggcaacattaggtgcaacatttgcatttga

SEQ ID NO: 30648 - RNA, 1701 nt, synthetic construct
  misc_feature 1..1701: note = hemagglutinin__InfluenzaA__AAY28405
  source 1..1701: mol_type = other RNA
atgaagactatcattgctttgagctacattttatgtctggttttcgctcaaaaacttcccggaaatgacaacagcacggcaacgctgtgcctggggcaccatgcagtgccaaacggaacgctagtgaaaacaatcacgaatgaccaaattgaagtgactaatgctactgagctggttcagatttcctcaacaggtagaatatgcgacaatcctcaccaaatccttgatggagaaaactgcacactaatagatgctctattgggagaccctcattgtgatggcttccaaaataaggaatgggacctttttgttgaacgcagcaaagcctacagcaactgttacccttatgatgtgccggattatgtctcccttaggtcactagttgcctcatcaggcacgctggagtttaacaatgaaagcttcaattggactggagtcgctcagaatggaacaagctctgcttgcaaaaggagatctgataaaagtttctttagtagattgaattggttgcaccaattaaaatacaaatatccagcactgaacgtgactatgccaaacaatgaaaaatttgacaaattgtacatttggggggttcaccacccgggtacagacagtgaccaaatcagcctatatgctcaagcatcagggagagtcacagtctctaccaaaagaagtcaacaaactgtaatcccgaatatcggatctagaccctgggtaaggggtgtctccagcagaataagcatctattggacaatagtaaaaccgggagacatacttttgattaacagcacagggaatctaattgctcctcggggttacttcaaaatacgaagtgggaaaagctcaataatgaggtcagatgcacccattggcaaatgcaattctgaatgcatcactccaaatggaagcattcccaatgacaaaccatttcaaaatgtaaacaggatcacatatgggccctgtcccagatatgttaagcaaaacactctgaaattggcaacagggatgcggaatgtgccagagaaacaaactagaggcatattcggtgcaatcgcgggcttcatagaaaatggttgggagggaatgatggacggttggtacggtttcaggcatcaaaattctgagggcacagggcaagcagcagatcttaaaagcactcaagcagcaatcaaccaaatcaacgggaaactgaataggttaatcgagaaaacgaacgagaaattccatcaaattgaaaaggaattctcagaagtagaagggagaattcaggacctcgagaaatatgttgaggacactaaaatagatctctggtcgtacaatgcggagcttcttgttgccctggagaaccaacatacaattgatctaactgactcagaaatgaacaaactgtttgaaagaacaaagaagcaactgagggaaaatgctgaggatatgggcaatggttgtttcaaaatataccacaaatgtgacaatgcctgcatagggtcaatcagaaatggaacttatgaccatgatgtatacagagacgaagcattgaacaaccggttccagatcaaaggtgttgagctgaagtcaggatacaaagattggatcctatggatttcctttgccatatcatgttttttgctttgtattgttttgctggggttcatcatgtgggcctgccaaaaaggcaacattaggtgcaacatttgcgtttga

SEQ ID NO: 30649 - RNA, 1701 nt, synthetic construct; identical to SEQ ID NO: 30536
  misc_feature 1..1701: note = hemagglutinin__InfluenzaA__AAY28486
  source 1..1701: mol_type = other RNA

SEQ ID NO: 30650 - RNA, 1701 nt, synthetic construct; identical to SEQ ID NO: 30536
  misc_feature 1..1701: note = hemagglutinin__InfluenzaA__AAY28521
  source 1..1701: mol_type = other RNA

SEQ ID NO: 30651 - RNA, 1701 nt, synthetic construct
  misc_feature 1..1701: note = hemagglutinin__InfluenzaA__AAY28531
  source 1..1701: mol_type = other RNA
atgaagactatcattgctttgagctacattctatgtctggttttcgctcaaaaacttcccggaaatgacaacagcacggcaacgctgtgccttgggcaccatgcagtaccaaacggaacgatcgtgaaaacaatcacgaatgaccaaattgaagttactaatgctactgagctggttcagagttcctcaacaggtggaatatgcgacagtcctcatcagatccttgatggagaaaactgcacactaatagatgctctattgggagaccctcagtgtgatggcttccaaaataagaaatgggacctttttgttgaacgcagcaaagcctacagcaactgttacccttatgatgtgccggattatgcctcccttaggtcactagttgcctcatccggcacactggagtttaacaatgaaagcttcaattggactggagtcactcagaatggaacaagctctgcttgcgaaaggagatctaataaaagtttctttagtagattgaattggttgacccacttaaaatacaaatacccagcattgaacgtgactatgccaaacaatgaaaaatttgacaaattgtacatttggggggttcaccacccgggtacggacagtgaccaaatcagcctatatgctcaagcatcaggaagaatcacagtctctaccaaaagaagccaacaaactgtaatcccgaatatcggatctagacccagggtaagggatgtctccagccgaataagcatctattggacaatagtaaaaccgggagacatacttttgattaacagcacagggaatctaattgctcctcggggttacttcaaaatacgaagtgggaaaagctcaataatgagatcagatgcacccattggcaaatgcaattctgaatgcatcactccaaatggaagcattcccaatgacaaaccatttcaaaatgtaaacaggattacatatggggcctgtcccagatatgttaagcaaaacactctgaaattggcaacagggatgcgaaatgtaccagagaaacaaactagaggcatatttggcgcaatcgcgggtttcatagaaaatggttgggagggaatggtggacggttggtacggtttcaggcatcaaaattctgagggcacaggacaagcagcagatctcaaaagcactcaagcagcaatcaaccaaatcaatgggaaactgaataggttaatcgggaaaacaaacgagaaattccatcagattgaaaaagaattctcagaagtagaagggagaattcaggacctcgagaaatatgttgaggacactaaaatagatctctggtcatacaacgcggagcttcttgttgccctggagaaccaacatacaattgatctaactgactcagaaatgaacaaactgtttgaaagaacaaagaagcaactgagggaaaatgctgaggatatgggcaatggttgtttcaaaatataccacaaatgtgacaatgcctgcatagggtcaatcagaaatggaacttatgaccatgatgtgtacagagatgaagcattaaacaaccggttccagatcaaaggtgttgagctgaagtcaggatacaaagattggatcctatggatttcctttgccatatcatgttttttgctttgtgttgctttgttggggttcatcatgtgggcctgccaaaaaggcaacattaggtgcgacatttgcatttga

SEQ ID NO: 30652 - RNA, 1701 nt, synthetic construct
  misc_feature 1..1701: note = hemagglutinin__InfluenzaA__AAY28541
  source 1..1701: mol_type = other RNA
atgaagactatcattgctttgagctacattctatgtctggttttcgctcaaaaacttcccggaaatgacaacagcacggcaacgctgtgccttgggcaccatgcagtaccaaacggaacgatagtgaaaacaatcacgaatgaccaaattgaagttactaatgctactgagctggtacagagttcctcaacaggtggaatatgcgacagtcctcatcagatccttgatggagaaaactgcacactaatagatgctctattgggagaccctcagtgtgatggcttccaaaataagaaatgggacctttttgttgaacgcagcaaagcctacagcaactgttacccttatgatgtgccggattatgcctcccttaggtcactagttgcctcatccggcacactggagtttaacaatgaaagcttcgattggactggagtcactcagaatggaacaagctctgcttgcaaaaggagatctaataaaagtttctttagtagattgaattggttgacccacttaaaatacaaatacccagcattgaacgtgactatgccaaacaatgaaaaatttgacaaattgtacatttggggggttcaccacccgggtacggacagtgaccaaatcagcctatatgctcaagcatcaggaagaatcacagtctctaccaaaagaagccaacaaactgtaatcccgaatatcggatctagacccagggtaagggatgtctccagccgaataagcatctattggacaatagtaaaaccgggagacatacttttgattaacagcacagggaatctaattgctcctcggggttacttcaaaatacgaagtgggaaaagctcaataatgagatcagatgcacccattggcaaatgcaattctgaatgcatcactccaaatggaagcattcccaatgacaaaccatttcaaaatgtaaacaggatcacatatggggcctgtcccagatatgttaagcaaaacactctgaaattggcaacagggatgcgaaatgtaccagagaaacaaactagaggcatatttggcgcaatcgcgggtttcatagaaaatggttgggagggaatggtggacggttggtacggtttcaggcatcaaaattctgagggcacaggacaagcagcagatctcaagagcactcaagcagcaatcaaccaaatcaatgggaaactgaataggttaatcgggaaaacaaacgagaaattccatcagattgaaaaagaattctcagaagtagaagggagaattcaggacctcgagaaatatgttgaggacactaaaatagatctctggtcatacaacgcggagcttcttgttgccctggagaaccaacatacaattgatctaactgactcagaaatgaacaaactgtttgaaagaacaaagaagcaactgagggaaaatgctgaggatatgggcaatggttgtttcaaaatataccacaaatgtgacaatgcctgcatagggtcaatcagaaatggaacttatgaccatgatgtgtacagagatgaagcattaaacaaccggttccagatcaaaggtgttgagctgaagtcaggatacaaagattggatcctatggatttcctttgccatatcatgttttttgctttgtgttgctttgttggggttcatcatgtgggcctgccaaaaaggcaacattaggtgcaacatttgcatttga

SEQ ID NO: 30653 - RNA, 1701 nt, synthetic construct
  misc_feature 1..1701: note = hemagglutinin__InfluenzaA__AAY28551
  source 1..1701: mol_type = other RNA
atgaagactatcattgctttgagctacattttatgtctggttttcgctcaaaaacttcccgtaaatgacaacagcacggcaacgctgtgcctgggacaccatgcagtgccaaacggaacgctagtgaaaacaatcacgaatgaccacattgaagtgactaatgctactgagctggttcagagttcctcaacaggtagaatatgcgacagtcctcaccaaatccttgatggagaaaactgcacactaatagatgctctattgggagaccctcattgtgatggcttccaaaataaggaatgggacctttttgttgaacgcagcacagcctacagcaactgttacccttatgatgtgccggattatgcctcccttaggtcactagttgcctcatccggcacactggagtttaacaatgaaagcttcaattggactggagtcgctcagaatggaacaagctctgcttgcaaaaggagatctattaaaagtttctttagtagattgaattggttgcaccaattaaaatacaaatatccagcactgaacgtgactatgccaaacaatgaaaaatttgacaaattgtacatttggggggttcaccacccgagtacggacagtgaccaaatcagcctatatgctcaagcatcagggagagtcacagtctctaccaaaagaagccaacaaactgtaatcccgaatatcggatctggaccctgggtaaggggtgtctccagcagaataagcatctattggacaatagtaaaaccgggagacatacttttgattaacagcacagggaatctaattgctcctcggggttactttaaaatacgaagtgggaaaagctcaataatgaggtcaaatgcacccattggcaaatgcaattctgaatgcatcactccaaatggaagcattcccaatgacaaaccatttcaaaatgtaaacaggatcacatatggggcctgtcccagatatgttaagcaaaacactctgaaattggcaacagggatgcggaatgtaccagagaaacaaactagaggcatattcggcgcaatcgcgggtttcatagaaaatggttgggagggaatggtggacggttggtacggtttcaggcatcaaaattctgagggcacaggacaagcagcagatcttaaaagcactcaagcagcaatcaaccaaatcaacgggaaactgaataggttaatcgagaaaacaaacgagaaattccatcaaattgaaaaagaattctcagaagtagaagggagaattcaggacctcgagaaatatgttgaggacactaaaatagatctctggtcgtacaacgcggagcttcttgttgccctggagaaccaacatacaattgatctaactgactcagaaatgaacaaactgtttgaaagaacaaggaagcaactgagggaaaatgctgaggatatgggcaatggttgtttcaaaatataccacaaatgtgacaatgcctgcatagggtcaatcagaaatggaacttatgaccatgatgtatacagagacgaagcattaaacaaccggttccagatcaaaggtgttgagctgaagtcaggatacaaagattggatcctatggatttcctttgccatatcatgttttttgctttgtgttgttttgctggggttcatcatgtgggcctgccaaaaaggcaacattaggtgcaacatttgcatttga

SEQ ID NO: 30654 - RNA, 1701 nt, synthetic construct
  misc_feature 1..1701: note = hemagglutinin__InfluenzaA__AAY28561
  source 1..1701: mol_type = other RNA
atgaagactatcattgctttgagctatattctatgtctggttttcgctcaaaaacttcccggaaatgacaacagcacggcaacgctgtgccttgggcaccatgcagtaccaaacggaacgatagtgaaaacaatcacgaatgaccaaattgaagttactaatgctactgagctggtacagagttcctcaacaggtggaatatgcgacagtcctcatcagatccttgatggagaaaactgcacactaatagatgctctattgggagaccctcagtgtgatggcttccaaaataagaaatgggacctttttgttgaacgcagcaaagcctacagcaactgttacccttatgatgtgccggattatgcctcccttaggtcactagttgcctcatccggcacactggagtttaacaatgaaagcttcgattggactggagtcactcagaatggaacaagctctgcttgcaaaaggagatctaataaaagtttctttagtagattgaattggttgacccacttaaaatacaaatacccagcattgaacgtgactatgccaaacaatgaaaaatttgacaaattgtacatttggggggttcaccacccgggtacggacagtgaccaaatcagcctatatgctcaagcatcaggaagaatcacagtctctaccaaaagaagccaacaaactgtaatcccgaatatcggatctagacccagggtaagggatgtctccagccgaataagcatctattggacaatagtaaaaccgggagacatacttttgattaacagcacagggaatctaattgctcctcggggttacttcaaaatacgaagtgggaaaagctcaataatgagatcagatgcacccattggcaaatgcaattccgaatgcatcactccaaatggaagcattcccaatgacaaaccatttcaaaatgtaaacaggatcacatatggggcctgtcccagatatgttaagcaaaacactctgaaattggcaacagggatgcgaaatgtaccagagaaacaaactagaggcatatttggcgcaatcgcgggtttcatagaaaatggttgggagggaatggtggacggttggtacggtttcaggcatcaaaattctgagggcacaggacaagcagcagatctcaaaagcactcaagcagcaatcaaccaaatcaatgggaaactgaataggttaatcgggaaaacaaacgagaaattccatcagattgaaaaagaattctcagaagtagaagggagaattcaggacctcgagaaatatgttgaggacactaaaatagatctctggtcatacaacgcggagcttcttgttgccctggagaaccaacatacaattgatctaactgactcagaaatgaacaaactgtttgaaagaacaaagaagcaactgagggaaaatgctgaggatatgggcaatggttgtttcaaaatataccacaaatgtgacaatgcctgcatagggtcaatcagaaatggaacttatgaccatgatgtgtacagagatgaagcattaaacaaccggttccagatcaaaggtgttgagctgaagtcaggatacaaagattggatcctatggatttcctttgccatatcatgttttttgctttgtgttgctttgttggggttcatcatgtgggcctgccaaaaaggcaacattaggtgcaacatttgcatttga

SEQ ID NO: 30655 - RNA, 1701 nt, synthetic construct
  misc_feature 1..1701: note = hemagglutinin__InfluenzaA__AAY28581
  source 1..1701: mol_type = other RNA
atgaagactatcattgctttgagctacattttatgcctggttttcgctcaaaaacttcccggaaatgacaacagcacggcaacgctgtgcctggggcaccatgcagtgccaaacggaacgctagtgaaaacaatcacgaatgaccaaattgaagtaactaatgctactgagctggttcagagttcctcaacaagtagaatatgcgacagtcctcaccaaatccttgatggagaaaactgcacactaatagatgctctattgggagaccctcattgtgatggcttccaaaataaggaatgggacctttttgttgaacgcagcaaagcctacagcaactgttacccttatgatgtgccggattatgtctcccttaggtcactagttgcctcatcaggcacgctggagtttaacaatgaaagcttcaattggactggagtcgctcagaatggaacaagctctgcttgcaaaaggagatctgataaaagtttctttagtagattgaattggttgcaccaattaaaatacaaatatccagcactgaacgtgactatgccaaacaatgaaaaatttgacaaattgtacatttggggggttcaccacccgggtacagacagtgaccaaatcagcctatatgctcaagcatcagggagagtcacagtctctaccaaaagaagccaacaaactgtaatcccgaatatcggatctagaccctgggtaaggggtgtctccagcagaataagcatctattggacaatagtaaaaccgggagacatacttttgattaacagcacagggaatctaattgctcctcggggttacttcaaaatacgaagtgggaaaagctcaataatgaggtcagatgcacccattggcaaatgcaattctgaatgcatcactccaaatggaagcattcccaatgacaaaccatttcaaaatgtaaacaggatcacatatggggcctgtcccagatatgttaagcaaaacactctgaaattggcaacagggatgcggaatgtaccagagaaacaaactagaggcatattcggtgcaatcgcgggcttcatagaaaatggttgggagggaatgatggacggttggtacggtttcaggcatcaaaattctgagggcacagggcaagcagcagatcttaaaagcactcaagcagcaatcaaccaaatcaacgggaaactgaataggttgatcgagaaaacgaacgagaaattccatcaaattgaaaaagaattctcagaagtagaagggagaattcaggacctcgagaaatatgttgaggacactaagatagatctctggtcgtacaatgcggagcttcttgttgccctggagaaccaacatacaattgatctaactgactcagaaatgaacaaactgtttgaaagaacaaagaagcaactgagggaaaatgctgaggatatgggcaatggttgtttcaaaatataccacaaatgtgacaatgcctgcatagggtcaatcagaaatggaacttatgaccatgatgtatacagagacgaagcattgaacaaccggttccagatcaaaggtgttgagctgaagtcaggatacaaagattggatcctatggatttcctttgccatatcatgttttttgctttgtattgttttgctggggttcatcatgtgggcctgccaaaaaggcaacattaggtgcaacatttgcatttga

SEQ ID NO: 30656 - RNA, 1701 nt, synthetic construct
  misc_feature 1..1701: note = hemagglutinin__InfluenzaA__AAY28591
  source 1..1701: mol_type = other RNA
atgaagactatcattgctttgagctacattttatgtctggttttcgctcaaaaacttcccgtaaatgacaacagcacggcaacgctgtgcctgggacaccatgcagtgccaaacggaacgctagtgaaaacaatcacgaatgaccacattgaagtgactaatgctactgagctggttcagagttcctcaacaggtagaatatgcgacagtcctcaccaaatccttgatggagaaaactgcacactaatagatgctctattgggagaccctcattgtgatggcttccaaaataaggaatgggacctttttgttgaacgcagcacagcctacagcaactgttacccttatgatgtgccggattatgcctcccttaggtcactagttgcctcatccggcacactggagtttaacaatgaaagcttcaattggactggagtcgctcagaatggaacaagctctgcttgcaaaaggagatctattaaaagtttctttagtagattgaattggttgcaccaattaaaatacaaatatccagcactggacgtgactatgccaaacaatgaaaaatttgacaaattgtacatttggggggttcaccacccgagtacggacagtgaccaaatcagcctatatgctcaagcatcagggagagtcacagtctctaccaaaagaagccaacaaactgtaatcccgaatatcggatctagaccctgggtaaggggtgtctccagcagaataagcatctattggacaatagtaaaaccgggagacatacttttgattaacagcacagggaatctaattgctcctcggggttactttaaaatacgaagtgggaaaagctcaataatgaggtcaaatgcacccattggcaaatgcaattctgaatgcatcactccaaatggaagcattcccaatgacaaaccatttcaaaatgtaaacaggatcacatatggggcctgtcccagatatgttaagcaaaacactctgaaattggcaacagggatgcggaatgtaccagagaaacaaactagaggcatattcggcgcaatcgcgggtttcatagaaaatggttgggagggaatggtggacggttggtacggtttcaggcatcaaaattctgagggcacaggacaagcagcagatcttaaaagcactcaagcagcaatcaaccaaatcaacgggaaactgaataggttaatcgagaaaacaaacgagaaattccatcaaattgaaaaagaattctcagaagtagaagggagaattcaggacctcgagaaatatgttgaggacactaaaatagatctctggtcgtacaacgcggagcttcttgttgccctggagaaccaacatacaattgatctaactgactcagaaatgaacaaactgtttgaaagaacaaggaagcaactgagggaaaatgctgaggatatgggcaatggttgtttcaaaatataccacaaatgtgacaatgcctgcatagggtcaatcagaaatggaacttatgaccatgatgtatacagagacgaagcattaaacaaccggttccagatcaaaggtgttgagctgaagtcaggatacaaagattggatcctatggatttcctttgccatatcatgttttttgctttgtgttgttttgctggggttcatcatgtgggcctgccaaaaaggcaacattaggtgcaacatttgcatttga

SEQ ID NO: 30657 - RNA, 1701 nt, synthetic construct
  misc_feature 1..1701: note = hemagglutinin__InfluenzaA__AAY28608
  source 1..1701: mol_type = other RNA
atgaagactatcattgctttgagctacattttatgtctggttttcgctcaaaaacttcccgtaaatgacaacagcacggcaacgctgtgcctgggacaccatgcagtgccaaacggaacgctagtgaaaacaatcacgaatgaccacattgaagtgactaatgctactgagctggttcagagttcctcaacaggtagaatatgcgacagtcctcaccaaatccttgatggagaaaactgtacactaatagatgctctattgggagaccctcattgtgatggcttccaaaataaggaatgggacctttttgttgaacgcagcacagcctacagcaactgttacccttatgatgtgccggattatgcctcccttaggtcactagttgcctcatccggcacactggagtttaacaatgaaagcttcaattggactggagtcgctcagaatggaacaagctctgcttgcaaaaggagatctattaaaagtttctttagtagattgaattggttgcaccaattaaaatacaaatatccagcactgaacgtgactatgccaaacaatgaaaaatttgacaaattgtacatttggggggttcaccacccgagtacggacagtgaccaaatcagcctatatgctcaagcatcagggagagtcacagtctctaccaaaagaagccaacaaactgtaatcccgaatatcggatctagaccctgggtaaggggtgtctccagcagaataagcatctattggacaatagtaaaaccgggagacatacttttgattaacagcacagggaacctaattgctcctcggggttacttcaaaatacgaagtgggaaaagctcaataatgaggtcaaatgcacccattggcaaatgcaattctgaatgcatcactccaaatggaagcattcccaatgacaaaccatttcaaaatgtaaacaggatcacatatggggcctgtcccagatatgttaagcaaaacactctgaaattggcaacagggatgcggaatgtaccagagaaacaaactagaggcatattcggcgcaatcgcgggtttcatagaaaatggttgggaaggaatggtggacggttggtacggtttcaggcatcaaaattctgagggcacaggacaagcagcagatcttaaaagcactcaagcagcaatcaaccaaatcaacgggaaactgaataggttaatcgagaaaacaaacgagaaattccatcaaattgaaaaagaattctcagaagtagaagggagaattcaggacctcgagaaatatgttgaggacactaaaatagatctctggtcgtacaacgcggagcttcttgttgccctggagaaccaacatacaattgatctaactgactcagaaatgaacaaactgtttgaaagaacaaggaagcaactgagggaaaatgctgaggatatgggcaatggttgtttcaaaatataccacaaatgtgacaatgcctgcatagggtcaatcagaaatggaacttatgaccatgatgtatacagagacgaagcattaaacaaccggttccagatcaaaggtgttgagctgaagtcaggatacaaagattggatcctatggatttcctttgccatatcatgttttttgctttgtgttgttttgctggggttcatcatgtgggcctgccaaaaaggcaacattaggtgcaacatttgcatttga

SEQ ID NO: 30658 - RNA, 1701 nt, synthetic construct
  misc_feature 1..1701: note = hemagglutinin__InfluenzaA__AAY28618
  source 1..1701: mol_type = other RNA
atgaagactatcattgctttgagctacattctatgtctggttttcgctcaaaagcttcccggaaatgacaacagcacggcaacgctgtgccttgggcaccatgcagtaccaaacggaacgatagtgaaaacaatcacgaatgaccaaattgaagttactaatgctactgagctggttcagagttcctcaacaggtggaatatgcgacagtcctcatcagatccttgatggagaaaactgcacactaatagatgctctattgggagaccctcagtgtgatggcttccaaaataagaaatgggacctttttgttgaacgcagcaaagcctacagcaactgttacccttatgatgtgccggattatgcctcccttaggtcactagttgcctcatccggcacactggagtttaacaatgaaagcttcaattggactggagtcactcagaatggaacaagctctgcttgcaaaaggagatctaataaaagtttctttagtagattgaattggttgacccacttaaaatacaaatacccagcattgaacgtgactatgccaaacaatgaaaaatttgacaaattgtacatttggggggttcaccacccgggtacggacagtgaccaaatcagcctatatgctcaagcatcaggaagaatcacagtctctaccaaaagaagccaacaaactgtaatcccgaatatcggatctagacccagggtaagggatgtctccagcagaatgagcatctattggacaatagtaaaaccgggagacatacttttgattaacagcacagggaatctaattgctcctcggggttacttcaaaatacgaagtgggaaaagctcaataatgagatcagatgcacccattggcaaatgcaattctgaatgcatcactccaaatggaagcattcccaatgacaaaccatttcaaaatgtaaacaggatcacatatggggcctgtcccagatatgttaagcaaaacactctgaaattggcaacagggatgcgaaatgtaccagagaaacaaactagaggcatatttggcgcaatcgcgggtttcatagaaaatggttgggagggaatggtggacggttggtacggtttcaggcatcaaaattctgagggcacaggacaagcagcagatctcaaaagcactcaagcagcaatcaaccaaatcaatgggaaactgaataggttaatcgggaaaacaaacgagaaattccatcagattgaaaaagaattctcagaagtagaagggagaattcaggacctcgagaaatatgttgaggacactaaaatagatctctggtcatacaacgcggagcttcttgttgccctggagaaccaacatacaattgatctaactgactcagaaatgaacaaactgtttgaaagaacaaagaagcaactgagggaaaatgctgaggatatgggcaatggttgtttcaaaatataccacaaatgtgacaatgcctgcatagagtcaatcagaaatggaacttatgaccatgatgtatacagagatgaagcattaaacaaccggttccagatcaaaggtgttgagctgaagtcaggatacaaagattggatcctatggatttcctttgccatatcatgttttttgctttgtgttgctttgttggggttcatcatgtgggcctgccaaaaaggcaacattaggtgcaacatttgcatttga

SEQ ID NO: 30659 - RNA, 1701 nt, synthetic construct; identical to SEQ ID NO: 30551
  misc_feature 1..1701: note = hemagglutinin__InfluenzaA__AAY28638
  source 1..1701: mol_type = other RNA

SEQ ID NO: 30660 - RNA, 1701 nt, synthetic construct
  misc_feature 1..1701: note = hemagglutinin__InfluenzaA__AAY28648
  source 1..1701: mol_type = other RNA
atgaagactatcattgctttgagctacattttatgcctggttttcgctcaaaaacttcccggaaatgacaacagcacggcaacgctgtgcctggggcatcatgcagtgccaaacggaacgctagtgaaaacaatcacgaatgaccaaattgaagtaactaatgctactgagctggttcagagttcctcaacaggtagaatatgcgacagtcctcaccaaatccttgatggagaaaactgcacactaatagatgctctattgggagaccctcattgtgatggcttccaaaataaggaatgggacctttttgttgaacgcagcaaagcctacagcaactgttacccttatgatgtgccggattatgtctcccttaggtcactagttgcctcatcaggcacgctggagtttaacaatgaaagcttcaattggactggagtcgctcagaatggaacaagctctgcttgcaaaaggagatctgataaaagtttctttagtagattgaattggttgcaccaattaaaatacaaatatccagcactgaacgtgactatgccaaacaatgaaaaatttgacaaattgtacatttggggggttcaccacccgggtacagacagtgaccaaatcagcctatatgctcaagcatcagggagagtcacagtctctaccaaaagaagccaacaaactgtaatcccgaatatcggatctggaccctgggtaaggggtgtctccagcagaataagcatctattggacaatagtaaaaccgggagacatacttttgattaacagcacagggaatctaattgctcctcggggttacttcaaaatacgaagtgggaaaagctcaataatgaggtcagatgcacccattggcaaatgcaattctgaatgcatcactccaaatggaagcattcccaatgacaaaccatttcaaaatgtaaacaggatcacatatggggcctgtcccagatatgttaagcaaaacactctgaaattggcaacagggatgcggaatgtgccagagaaacaaactagaggcatattcggtgcaatcgcgggcttcatagaaaatggttgggagggaatgatggacggttggtacggtttcaggcatcaaaattctgagggcacagggcaagcagcagatcttaaaagcactcaagcagcaatcaaccaaatcaacgggaaactgaataggttaatcgagaaaacgaacgagaaattccatcaaattgaaaaagaattctcagaagtagaagggagaattcaggacctcgagaaatatgttgaggacactaaaatagatctctggtcgtacaatgcggagcttcttgttgccctggagaaccaacatacaattgatctaactgactcagaaatgaacaaactgtttgaaagaacaaagaagcaactgagggaaaatgctgaggatatgggcaatggttgtttcaaaatataccacaaatgtgacaatgcctgcatagggtcaatcagaaatggaacttatgaccatgatgtatacagagacgaagcattgaacaaccggttccagatcaaaggtgttgagctgaagtcaggatacaaagattggatcctatggatttcctttgccatatcatgttttttgctttgtattgttttgctggggttcatcatgtgggcctgccaaaaaggcaacattaggtgcaacatttgcatttga

SEQ ID NO: 30661 - RNA, 1701 nt, synthetic construct
  misc_feature 1..1701: note = hemagglutinin__InfluenzaA__AAY44610
  source 1..1701: mol_type = other RNA
atgaagactatcattgctttgagctacattctatgtctggttttcgctcaaaaacttcccggaaatgacaacagcacggcaacgctgtgccttgggcaccatgcagtaccaaacggaacgatagtgaaaacaatcacgaatgaccaaattgaagttactaatgctactgagctggtacagagttcctcaacaggtggaatatgcgacagtcctcatcagatccttgatggagaaaactgcacactaatagatgctctattgggagaccctcagtgtgatggcttccaaaataagaaatgggacctttttgttgaacgcaacaaagcctacagcaactgttacccttatgatgtgccggattatgcctcccttaggtcactagttgcctcatccggcacactggagtttaacaatgaaagcttcgattggactggagtcactcagaatggaacaagctctgcttgcaaaaggagatctaataaaagtttctttagtagattgaattggttgacccacttaaaatacaaatacccagcattgaacgtgactatgccaaacaatgaaaaatttgacaaattgtacatttggggggttcaccacccgggtacggacagtgaccaaatcagcctatatgctcaagcatcaggaagaatcacagtctctaccaaaagaagccaacaaactgtaatcccgaatatcggatctagacccagggtaagggatgtctccagccgaataagcatctattggacaatagtaaaaccgggagacatacttttgattaacagcacagggaatctaattgctcctcggggttacttcaaaatacgaagtgggaaaagctcaataatgagatcagatgcacccattggcaaatgcaattccgaatgcatcactccaaatggaagcattcccaatgacaaaccatttcaaaatgtaaacaggatcacatatggggcctgtcccagatatgttaagcaaaacactctgaaattggcaacagggatgcgaaacgtaccagagaaacaaactagaggcatatttggcgcaatcgcgggtttcatagaaaatggttgggagggaatggtggacggttggtatggtttcaggcatcaaaattctgagggcacaggacaagcagcagatctcaaaagcactcaagcagcaatcaaccaaatcaatgggaaactgaataggttaatcgggaaaacaaacgagaaattccatcagattgaaaaagaattctcagaagtagaagggagaattcaggacctcgagaaatatgttgaggacactaaaatagatctctggtcatacaacgcggagcttcttgttgccctggagaaccaacatacaattgatctaactgactcggaaatgaacaaactgtttgaaagaacaaagaagcaactgagggaaaatgctgaggatatgggcaatggttgtttcaaaatataccacaaatgtgacaatgcctgcatagggtcaatcagaaatggaacttatgaccatgatgtgtacagagatgaagcattaaacaaccggttccagatcaaaggtgttgagctgaagtcaggatacaaagattggatcctatggatttcctttgccatatcatgttttttgctttgtgttgctttgttggggttcatcatgtgggcctgccaaaaaggcaacattaggtgcaacatttgcatttga

SEQ ID NO: 30662 - RNA, 1701 nt, synthetic construct
  misc_feature 1..1701: note = hemagglutinin__InfluenzaA__AAY44620
  source 1..1701: mol_type = other RNA
atgaagactatcattgctttgagctacattttatgtctggttttcgctcaaaaacttcccggaaatgacaacagcacggcaacgctgtgcctggggcaccatgcagtgccaaacggaacgctagtgaaaacaatcacgaatgaccaaattgaagtgactaatgctactgagctggttcagagttcctcaacaggtagaatatgcgacagtcctcaccaaatccttgatggagaaaactgcacactaatagatgctctattgggagaccctcattgtgatggcttccaaaataaggaatgggacctttttgttgaacgcagcaaagcctacagcaactgttacccttatgatgtgccggattatgtctcccttaggtcactagttgcctcatcaggcacgctggagtttaacaatgaaagcttcaattggactggagtcgctcagaatggaacaagctctgcttgcaaaaggagatctgataaaagtttctttagtagattgaattggttgcaccaattaaaatacaaatatccagcactgaacgtgactatgccaaacaatgaaaaatttgacaaattgtacatttggggggttcaccacccgggtacagacagtgaccaaatcagcctatatgctcaagcatcagggagagtcacagtctctaccaaaagaagccaacaaactgtaatcccgaatatcggatctagaccctgggtaaggggtgtctccagcagaataagcatctattggacaatagtaaaaccgggagacatacttttgattaacagcacagggaatctaattgctcctcggggttacttcaaaatacgaagtgggaaaagctcaataatgaggtcagatgcacccattggcaaatgcaattctgaatgcatcactccaaatggaagcattcccaatgacaaaccatttcaaaatgtaaacaggatcacatatgggccctgtcccagatatgttaagcaaaacactctgaaattggcaacagggatgcggaatgtgccagagaaacaaactagaggcatattcggtgcaatcgcgggcttcatagaaaatggttgggagggaatgatggacggttggtacggtttcaggcatcaaaattctgagggcacagggcaagcagcagatcttaaaagcactcaagcagcgatcaaccaaatcaacgagaaactgaataggttaatcgagaaaacgaacgagaaattccatcaaattgaaaaggaattctcagaagtagaagggagaattcaggacctcgagaaatatgttgaggacactaaaatagatctctggtcgtacaatgcggagcttcttgttgccctggagaaccaacatacaattgatctaactgactcagaaatgaacaaactgtttgaaagaacaaagaagcaactgagggaaaatgctgaggatatgggcaatggttgtttcaaaatataccacaaatgtgacaatgcctgcatagggtcaatcagaaatggaacttatgaccatgatgtatacagagacgaagcattgaacaaccggttccagatcaaaggtgttgagctgaagtcaggatacaaagattggatcctatggatttcctttgccatatcatgttttttgctttgtattgttttgctggggttcatcatgtgggcctgccaaaaaggcaacattaggtgcaacatttgcatttga

SEQ ID NO: 30663 - RNA, 1701 nt, synthetic construct
  misc_feature 1..1701: note = hemagglutinin__InfluenzaA__AAY44621
  source 1..1701: mol_type = other RNA
atgaagactatcattgctttgagctacattttatgcctggttttcgctcaaaaacttcccggaaatgacaacagcacggcaacgctgtgcctggggcaccatgcagtgccaaacggaacgctagtgaaaacaatcacgaatgaccaaattgaagtaactaatgctactgagctggttcagagttcctcaacaagtagaatatgcgacagtcctcaccaaatccttgatggagaaaactgcacactaatagatgctctattgggagaccctcattgtgatggcttccaaaataaggaatgggacctttttgttgaacgcagcaaagcctacagcaactgttacccttatgatgtgccggattatgtctcccttaggtcactagttgcctcatcaggcacgctggagtttaacaatgaaagcttcaattggactggagtcgctcagaatggaacaagctctgcttgcaaaaggagatctgataaaagtttctttagtagattgaattggttgcaccaattaaaatacaaatatccagcactgaacgtgactatgccaaacaatgaaaaatttgacaaattgtacatttggggggttcaccacccgggtacagacagtgaccaaatcagcctatatgctcaagcatcagggagagtcacagtctctaccaaaagaagccaacaaactgtaatcccgaatatcggatctggaccctgggtaaggggtgtctccagcagaataagcatctattggacaatagtaaaaccgggagacatacttttgattaacagcacagggaatctaattgctcctcggggttacttcaaaatacgaagtgggaaaagctcaataatgaggtcagatgcacccattggcaaatgcaattctgaatgcatcactccaaatggaagcattcccaatgacaaaccatttcaaaatgtaaacaggatcacatatggggcctgtcccagatatgttaagcaaaacactctgaaattggcaacagggatgcggaatgtaccagagaaacaaactagaggcatattcggtgcaatcgcgggcttcatagaaaatggttgggagggaatgatggacggttggtacggtttcaggcatcaaaattctgagggcacagggcaagcagcagatcttaaaagcactcaagcagcaatcaaccaaatcaacgggaaactgaataggttaatcgagaaaacgaacgagaaattccatcaaattgaaaaagaattctcagaagtagaagggagaattcaggacctcgagaaatatgttgaggacactaaaatagatctctggtcgtacaatgcggagcttcttgttgccctggagaaccaacatacaattgatctaactgactcagaaatgaacaaactgtttgaaagaacaaagaagcaactgagggaaaatgctgaggatatgggcaatggttgtttcaaaatataccacaaatgtgacaatgcctgcatagggtcaatcagaaatggaacttatgaccatgatgtatacagagacgaagcattgaacaaccggttccagatcaagggtgttgagctgaagtcaggatacaaagattggatcctatggatttcctttgccatatcatgttttttgctttgtattgttttgctggggttcatcatgtgggcctgccaaaaaggcaacattaggtgcaacatttgcatttga

SEQ ID NO: 30664 - RNA, 1701 nt, synthetic construct
  misc_feature 1..1701: note = hemagglutinin__InfluenzaA__AAY44631
  source 1..1701: mol_type = other RNA
atgaagactatcattgctttgagctacattttatgcctggttttcgctcaaaaacttcccggaaatgacaacagcacggcaacgctgtgcctggggcaccatgcagtgccaaacggaacgctagtgaaaacaatcacgaatgaccaaattgaagtaactaatgctactgagctggttcagagttcctcaacaagtagaatatgcgacagtcctcaccaaatccttgatggagaaaactgcacactaatagatgctctattgggagaccctcattgtgatggcttccaaaataaggaatgggacctttttgttgaacgcagcaaagcctacagcaactgttacccttatgatgtgccggattatgtctcccttaggtcactagttgcctcatcaggcacgctggagtttaacaatgaaagcttcaattggactggagtcgctcagaatggaacaagctctgcttgcaaaaggagatctgataaaagtttctttagtagattgaattggttgcaccaattaaaatacaaatatccagcactgaacgtgactatgccaaacaatgaaaaatttgacaaattgtacatttggggggttcaccacccgggtacagacagtgaccaaatcagcctatatgctcaagcatcagggagagtcacagtctctaccaaaagaagccaacaaactgtaatcccgaatatcggatctagaccctgggtaaggggtgtctccagcagaataagcatctattggacaatagtaaaaccgggagacatacttttgattaacagcacagggaatctaattgctcctcggggttacttcaaaatacgaagtgggaaaagctcaataatgaggtcagatgcacccattggcaaatgcaattcagaatgcatcactccaaatggaagcattcccaatgacaaaccatttcaaaatgtaaacaggatcacatatggggcctgtcccagatatgttaagcaaaacactctgaaattggcaacagggatgcggaatgtaccagagaaacaaactagaggcatattcggtgcaatcgcgggcttcatagaaaatggttgggagggaatgatggacggttggtacggtttcaggcatcaaaattctgagggcacagggcaagcagcagatcttaaaagcactcaagcagcaatcaaccaaatcaacgggaaactgaataggttaatcgagaaaacgaacgagaaattccatcaaattgaaaaagaattctcagaagtagaagggagaattcaggacctcgagaaatatgttgaggacactaaaatagatctctggtcgtacaatgcggagcttcttgttgccctggagaaccaacatacaattgatctaactgactcagaaatgaacaaactgtttgaaagaacaaagaagcaactgagggaaaatgctgaggatatgggcaatggttgtttcaaaatataccacaaatgtgacaatgcctgcatagggtcaatcagaaatggaacttatgaccatgatgtatacagagacgaagcattgaacaaccggttccagatcaaaggtgttgagctgaagtcaggatacaaagattggatcctatggatttcctttgccatatcatgttttttgctttgtattgttttgctggggttcatcatgtgggcctgccaaaaaggcaacattaggtgcaacatttgcatttga

SEQ ID NO: 30665 - RNA, 1701 nt, synthetic construct
  misc_feature 1..1701: note = hemagglutinin__InfluenzaA__AAY44641
  source 1..1701: mol_type = other RNA
atgaagactatcattgctttgagctacattttatgtctggttttcgctcaaaaacttcccggaaatgacaacagcacggcaacgctgtgcctggggcaccatgcagtgccaaacggaacgctagtgaaaacaatcacgaatgaccaaattgaagtgactaatgctactgagctggttcagagttcctcaacaggtagaatatgcgacagtcctcaccaaatccttgatggagaaaactgcacactaatagatgctctattgggagaccctcattgtgatggcttccaaaataaggaatgggacctttttgttgaacgcagcaaagcctacagcaactgttacccttatgatgtgccggattatgtctcccttaggtcactagttgcctcatcaggcacgctggagtttaacaatgaaagcttcaattggactggagtcgctcagaatggaacaagctctgcttgcaaaaggagatctgataaaagtttctttagtagattgaattggttgcaccaattaaaatacaaatatccagcactgaacgtgactatgccaaacaatgaaaaatttgacaaattgtacatttggggggttcaccacccgggtacagacagtgaccaaatcagcctatatgctcaagcatcagggagagtcacagtctctaccaaaagaagccaacaaactgtaatcccgaatatcggatctagaccctgggtaaggggtgtctccagcagaataagcatctattggacaatagtaaaaccgggagacatacttttgattaacagcacagggaatctaattgctcctcggggttacttcaaaatacgaagtgggaaaagctcaataatgaggtcagatgcacccattggcaaatgcaattctgaatgcatcactccaaatggaagcattcccaatgacaaaccatttcaaaatgtaaacaggatcacatatgggccctgtcccagatatgttaagcaaaacactctgaaattggcaacagggatgcggaatgtgccagagaaacaaactagaggcatattcggtgcaatcgcgggcttcatagaaaatggttgggagggaatgatggacggttggtacggtttcaggcatcaaaattctgagggcacagggcaagcagcagatcttaaaagcactcaagcagcaatcaaccaaatcaacgggaaactgaataggttaatcgagaaaacgaacgagaaattccatcaaattgaaaaggaattctcagaagtagaagggagaattcaggacctcgagaaatatgttgaggacactaaaatagatctctggtcgtacaatgcggagcttcttgttgccctggagaaccaacatacaattgatctaactgactcagaaatgaacaaactgtttgaaagaacaaagaagcaactgagggaaaatgctgaggatatgggcaatggttgtttcaaaatataccacaaatgtgacaatgcctgcatagggtcaatcagaaatggaacttatgaccatgatgtatacagagacgaagcattgaacaaccggttccagatcaaaggtgttgagctgaagtcaggatacaaagattggatcctatggatttcctttgccatatcatgttttttgctttgtattggtttgctggggttcatcatgtgggcctgccaaaaaggcaacattaggtgcaacatttgcatttga

SEQ ID NO: 30666 - RNA, 1701 nt, synthetic construct
  misc_feature 1..1701: note = hemagglutinin__InfluenzaA__AAY44651
  source 1..1701: mol_type = other RNA
atgaagactatcattgctttgagctacattttatgtctggttttcgctcaaaaacttcccgtaaatgacaacagcacggcaacgctgtgcctgggacaccatgcagtgccaaacggaacgctagtgaaaacaatcacgaatgaccacattgaagtgactaatgctactgagctggttcagagttcctcaacaggtagaatatgcgacagtcctcaccaaatccttgatggagaaaactgcacactaatagatgctctattgggagaccctcattgtgatggcttccaaaataaggaatgggacctttttgttgaacgcagcacagcctacagcaactgttacccttatgatgtgccggattatgcctcccttaggtcactagttgcctcatccggcacactggagtttaacaatgaaagcttcaattggactggagtcgctcagaatggaacaagctctgcttgcaaaaggagatctattaaaagtttctttagtagattgaattggttgcaccaattaaaatacaaatatccagcactgaacgtgaccatgccaaacaatgaaaaatttgacaaattgtacatttggggggttcaccacccgagtacggacagtgaccaaatcagcctatatgctcaagcatcagggagagtcacagtctctaccaaaagaagccaacaaactgtaatcccgaatatcggatctagaccctgggaaaggggtgtctccagcagaataagcatctattggacaatagtaaaaccgggagacatacttttgattaacagcacagggaatctaattgctcctcggggttacttcaaaatacgaagtgggaaaagctcaataatgaggtcaaatgcacccattggcaaatgcaattctgaatgcatcactccaaatggaagcattcccaatgacaaaccatttcaaaatgtaaacaggatcacatatggggcctgtcccagatatgttaagcaaaacactctgaaattggcaacagggatgcggaatgtaccagagaaacaaactagaggcatattcggcgcaatcgcgggtttcatagaaaatggttgggaaggaatggtggacggttggtacggtttcaggcatcaaaattctgagggcacaggacaagcagcagatcttaaaagcactcaagcagcaatcaaccaaatcaacgggaaactgaataggttaatcgagaaaacaaacgagaaattccatcaaattgaaaaagaattctcagaagtagaagggagaattcaggacctcgagaaatatgttgaggacactaaaatagatctctggtcgtacaacgcggagcttcttgttgccctggagaaccaacatacaattgatctaactgactcagaaatgaacaaactgtttgaaagaacaaggaagcaactgaaggaaaatgctgaggatatgggcaatggttgtttcaaaatataccacaaatgtgacaatgcctgcatagggtcaatcagaaatggaacttatgaccatgatgtatacagagacgaagcattaaacaaccggtttcagatcaaaggtgttgagctgaagtcaggatacaaagattggatcctatggatttcctttgccatatcatgttttttgctttgtgttgttttgctggggttcatcatgtgggcctgccaaaaaggcaacattaggtgcaacatttgcatttga

SEQ ID NO: 30667 - RNA, 1701 nt, synthetic construct
  misc_feature 1..1701: note = hemagglutinin__InfluenzaA__AAY44755
  source 1..1701: mol_type = other RNA
atgaagactatcattgctttgagctacattttatgtctggttttcgctcaaaaacttcccggaaatgacaacagcacggcaacgctgtgcctggggcaccatgcagtgccaaacggaacgctagtgaaaacaatcacgaatgaccaaattgaagtgactaatgctactgagctggttcagagttcctcaacaggtagaatatgcgacagtcctcaccaaatccttgatggagaaaactgcacactaatagatgctctattgggagaccctcattgtgatggcttccaaaataaggaatgggaccttttcgttgaacgcagcaaagcctacagcaactgttacccttatgatgtgccggattatgcctcccttaggtcactagttgcctcatccggcacactggagtttaacaatgaaagcttcaattggactggagtcgctcagaatggaacaagctctgcttgcaaaaggaggtctaataaaagtttctttagtagattgaattggttgcaccaattgaaatacaaatacccagcactgaacgtgactatgccaaacaatgaaaaatttgacaaattgtacatttggggggttcaccacccgagtacggacagtgaccaaatcagcctatatgctcaagcatcagggagagtcacagtctctaccaaaagaggccaacagactgtaatcccgaatatcggatctagaccctgggtaaggggtgtctccagcataataagcatctattggacaatagtaaaaccgggagacatacttttgattaacagcacagggaatctaattgctcctcggggttacttcaaaatacgaagtgggaaaagctcagtaatgaggtcagatgcatccattggtaaatgcaattctgaatgcatcactccaaatggaagcattcccaatgacaaaccatttcaaaatgtaaacaggatcacatatggggcctgtcccagatatgttaagcaaaacactctgaaattggcaacagggatgcggaatgtaccagagaaacaaactagaggcatattcggtgcaatcgcgggtttcatagaaaatggttgggagggaatggtggacggttggtacggtttcaggcatcaaaattctgagggcacaggacaagcagcagatcttaaaagcactcaagcagcaatcaaccaaatcaacgggaaactgaataggttaatcgagaaaacgaacgagaaattccatcaaattgaaaaagaattctcagaagtagaagggagaattcaggacctcgagaaatatgttgaggacactaaaatagatctctggtcgtacaacgcggagcttcttgttgccctggagaaccaacatacaattgatctaactgactcagaaatgaacaaactgtttgaaagaacaaagaagcaactgagggaaaatgctgaggatatgggcaatggctgtttcaaaatataccacaaatgtgacaatgcctgcatagggtcaatcagaaatggaacttatgaccatgatgtatacagagacgaagcattaaacaaccggttccagatcaaaggtgttgagctgaagtcaggatacaaagattggatcctatggatttcctttgccatatcatgttttttgctttgtgttgttttgctggggttcatcatgtgggcctgccaaaaaggcaacattaggtgcaacatttgcatttga

SEQ ID NO: 30668 - RNA, 1701 nt, synthetic construct
  misc_feature 1..1701: note = hemagglutinin__InfluenzaA__AAY44775
  source 1..1701: mol_type = other RNA
atgaagactatcattgctttgagctacattttatgtctggttttcgctcaaaaacttcccgtaaatgacaacagcacggcaacgctgtgcctgggacaccatgcagtgccaaacggaacgctagtgaaaacaatcacgaatgaccacattgaagtgactaatgccactgagctggttcagagttcctcaacaggtagaatatgcgacagtcctcaccaaatccttgatggagaaaactgcacactaatagatgctctattgggagaccctcattgtgatggcttccaagataaggaatgggacctttttgttgaacgcagcacagcctacagcaactgttacccttatgatgtgccggattatgcctcccttaggtcactagttgcctcatccggcacactggagtttaacaatgaaagcttcaattggactggagtcgctcagaatggaacaagctctgcttgcaaaaggagatctattaaaagtttctttagtagattgaattggttgcaccaattaaaatacaaatatccagcactgaacgtgactatgccaaacaatgaaaaatttgacaaattgtacatttggggggttcaccacccgagtacggacagtgaccaaatcagcctatatgctcaagcatcagggagagtcacagtctctaccaaaagaagccaacaaactgtaatcccgaatatcggatctagaccctgggtaaggggtgtctccagcagaataagcatctattggacaatagtaaaaccgggagacatacttttgattaacagcacagggaatctaattgctcctcggggttactttaaaatacgaagtgggaaaagctcaataatgaggtcaaatgcacccattggcaaatgcaattctgaatgcatcactccaaatggaagcattcccaatgacaaaccatttcaaaatgtaaacaggatcacatatggggcctgtcccagatatgttaagcaaaccactctgaaattggcaacagggatgcggaatgtaccagagaaacaaactagaggcatattcggcgcaatcgcgggtttcatagaaaatggttgggagggaatggtggatggttggtacggtttcaggcatcaaaattctgagggcacaggacaagcagcagatcttaaaagcactcaagcagcaatcaaccaaatcaacgggaaactgaataggttaatcgagaaaacaaacgagaaattccatcaaattgaaaaagaattctcagaagtagaagggagaattcaggacctcgagaaatatgttgaggacactaaaatagatctctggtcgtacaacgcggagcttcttgttgccctggagaaccaacatacaattgatctaactgactcagaaatgaacaaactgtttgaaagaacaaggaagcaactgagggaaaatgctgaggatatgggcaatggttgtttcaaaatataccacaaatgtgacaatgcctgcatagggtcaatcagaaatggaacttatgaccatgatgtatacagagacgaagcattaaacaaccggttccagatcaaaggtgttgagctgaagtcaggatacaaagattggatcctatggatttcctttgccatatcatgttttttgctttgtgttgttttgctggggttcatcatgtgggcctgccaaaaaggcaacattaggtgcaacatttgcatttga

SEQ ID NO: 30669 - RNA, 1701 nt, synthetic construct; identical to SEQ ID NO: 30576
  misc_feature 1..1701: note = hemagglutinin__InfluenzaA__AAY44785
  source 1..1701: mol_type = other RNA

SEQ ID NO: 30670 - RNA, 1701 nt, synthetic construct
  misc_feature 1..1701: note = hemagglutinin__InfluenzaA__AAY44795
  source 1..1701: mol_type = other RNA
atgaagactatcattgctttgagctacattttatgtctggttttcgctcaaaaacttcccgtaaatgacaacagcacggcaacgctgtgcctgggacaccatgcagtgccaaacggaacgctagtgaaaacaatcacgaatgaccacattgaagtgactaatgctactgagctggttcagagttcctcaacaggtagaatatgcgacagtactcaccaaatccttgatggagaaaactgcacactaatagatgctctattgggagaccctcattgtgatggcttccaaaataaggaatgggacctttttgttgaacgcagcacagcctacagcaactgttacccttatgatgtgccggattatgcctcccttaggtcactagttgcctcatccggcacactggagtttaacaatgaaagcttcaattggactggagtcgctcagaatggaacaagctctgcttgcaaaaggagatctattaaaagtttctttagtagattgaattggttgcaccaattaaaatacaaatatccagcactgaacgtgactatgccaaacaatgaaaaatttgacaaattgtacatttggggggttcaccacccgagtacggacagtgaccaaatcagcctatatgctcaagcatcagggagagtcacagtctctaccaaaagaagccaacaaactgtaatcccgaatatcggatctagaccctgggtaaggggtgtctccagcagaataagcatctattggacaatagtaaaaccgggagacatacttttgattaacagcacagggaatctaattgctcctcggggttactttaaaatacgaagtgggaaaagctcaataatgaggtcaaatgcacccattggcaaatgcaattctgaatgcatcactccaaatggaagcattcccaatgacaaaccatttcaaaatgtaaacaggatcacatatggggcctgtcccagatatgttaagcaaaacactctgaaattggcaacagggatgcggaatgtaccagagaaacaaactagaggcatattcggcgcaatcgcgggtttcatagaaaatggttgggagggaatggtggacggttggtacggtttcaggcatcaaaattctgagggcacaggacaagcagcagatcttaaaagcactcaagcagcaatcaaccaaatcaacgggaaactgaataggttaatcgagaaaacaaacgagaaattccatcaaattgaaaaagaattctcagaagtagaagggagaattcaggacctcgagaaatatgttgaggacactaaaatagatctctggtcgtacaacgcggagcttcttgttgccctggagaaccaacatacaattgatctaactgactcagaaatgaacaaactgtttgaaagaacaaggaagcaactgagggaaaatgctgaggatatgggcaatggttgtttcaaaatataccacaaatgtgacaatgcctgcatagggtcaatcagaaatggaacttatgaccatgatgtatacagagacgaagcattaaacaaccggttccagatcaaaggtgttgagctgaagtcaggatacaaagattggatcctatggatttcctttgccatatcatgttttttgctttgtgttgttttgctggggttcatcatgtgggcctgccaaaaaggcaacattaggtgcaacatttgcatttga

SEQ ID NO: 30671 - RNA, 1701 nt, synthetic construct
  misc_feature 1..1701: note = hemagglutinin__InfluenzaA__AAY44796
  source 1..1701: mol_type = other RNA
atgaagactatcattgctttgagctacactctatgtctggttttcgctcaaaaacttcccggaaatgacaacagcacggcaacgttgtgccttgggcaccatgcagtaccaaacggaacgatagtgaaaacaatcacgaatgaccaaattgaagttactaatgctactgagctggtacagagttcctcaacaggtggaatatgcgacagtcctcatcagatccttgatggagaaaactgcacactaatagatgctctattgggagaccctcagtgtgatggcttccaaaataagaaatgggacctttttgttgaacgcagcaaagcctacagcaactgttacccttatgatgtgccggattatgcctcccttaggtcactagttgcctcatccggcacactagagtttaacaatgaaagcttcgattggactggagtcactcagaatggaacaagctctgcttgcaaaaggagatctaataaaagtttctttagtagattgaattggttgacccacttaaaatacaaatacccagcattgaacgtgactatgccaaacaatgaaaaatttgacaaattgtacatttggggggttcaccacccgggtacggacagtgaccaaatcagcctatatgctcaagcatcaggaagaatcacagtctctaccaaaagaagccaacaaactgtaatcccgaatatcggatctagacccagggtaagggatgtctccagccgaataagcatctattggacaatagtaaaaccgggagacatacttttgattaacagcacagggaatctaattgctcctcggggttacttcaaaatacgaagtgggaaaagctcaataatgagatcagatgcacccattggcaaatgcaattctgaatgcatcactccaaatggaagcattcccaatgacaaaccatttcaaaatgtaaacaggatcacatatggggcctgtcccagatatatcaagcaaaacactctgaaattggcaacagggatgcgaaatgtaccagagaaacaaactagaggcatatttggcgcaatcgcgggtttcatagaaaatggttgggagggaatggtggacggttggtacggtttcaggcatcaaaattctgagggcacaggacaagcagcagatctcaaaagcactcaagcagcaatcaaccaaatcaatgggaaactgaataggttaatcgggaaaacaaacgagaaattccatcagattgaaaaagaattctcagaagtagaagggagaattcaggacctcgagaaatatgttgaggacactaaaatagatctctggtcatacaacgcggagcttcttgttgccctggagaaccaacatacaattgatctaactgactcagaaatgaacaaactgtttgaaagaacaaagaagcaactgagggaaaatgctgaggatatgggcaatggttgtttcaaaatataccacaaatgtgacaatgcctgcatagggtcaatcagaaatggaacttatgaccatgatgtgtacagagatgaagcattaaacaaccggttccagatcaaaggtgttgagctgaagtcaggatacaaagattggatcctatggatttcctttgccatatcatgttttttgctttgtgttgctttgttggggttcatcatgtgggcctgccaaaaaggcaacattaggtgcaacatttgcatttga

SEQ ID NO: 30672 - RNA, 1701 nt, synthetic construct; identical to SEQ ID NO: 30551
  misc_feature 1..1701: note = hemagglutinin__InfluenzaA__AAY44896
  source 1..1701: mol_type = other RNA

SEQ ID NO: 30673 - RNA, 1701 nt, synthetic construct
  misc_feature 1..1701: note = hemagglutinin__InfluenzaA__AAY44906
  source 1..1701: mol_type = other RNA
atgaagactatcattgctttgagctacattctatgtctggttttcgctcaaaaacttcccggaaatgacaacagcacggcaacgctgtgccttgggcaccatgcagtaccaaacggaacgatagtgaaaacaatcacgaatgaccaaattgaagttactaatgctactgagctggtacagagttcctcaacaggtggaatatgcgacagtcctcatcagatccttgatggagaaaactgcacactaatagatgctctattgggagaccctcagtgtgatggcttccaaaataagaaatgggacctttttgttgaacgcagcaaagcctacagcaactgttacccttatgatgtgccggattatgcctcccttaggtcactagttgcctcatccggcacactggagtttaacaatgaaagcttcgattggactggagtcactcagaatggaacaagctctgcttgcaaaaggagatctaataaaagtttctttagtagattgaattggttgacccacttaaaatacaaatacccagcattgaacgtgactatgccaaacaatgaaaaatttgacaaattgtacatttggggggttcaccacccgggtacggacagtgaccaaatcagcctatatgctcaagcatcaggaagaatcacagtctctaccaaaagaagccaacaaactgtaatcccgaatatcggatctagacccagggtaagggatgtctctagccgaataagcatctattggacaatagtaaaaccgggagacatacttttgattaacagcacagggaatctaattgctcctcggggttacttcaaaatacgaagtgggaaaagctcaataatgagatcagatgcacccattggcaaatgcaattccgaatgcatcactccaaatggaagcattcccaatgacaaaccatttcaaaatgtaaacaggatcacatatggggcctgtcccagatatgttaagcaaaacactttgaaattggcaacagggatgcgaaatgtaccagagagacaaactagaggaatatttggcgcaatcgcgggcttcatagaaaatggttgggagggaatggtggacggttggtacggtttcaggcatcaaaattctgagggcacaggacaagcagcagatctcaaaagcactcaagcagcaatcaaccaaatcaatgggaaactgaataggttaatcgggaaaacaaacgagaaattccatcagattgaaaaagaattctcagaagtagaagggagaattcaggacctcgagaaatatgttgaggacactaaaatagatctctggtcatacaacgcggagcttcttgttgccctagagaaccaacatacaattgatctaactgactcagaaatgaacaaactgtttgaaagaacaaagaagcaactgagggaaaatgctgaggatatgggcaatggttgtttcaaaatataccacaaatgtgacaatgcctgcatagggtcaatcagaaatggaacttatgaccatgatgtgtacagagatgaagcattaaacaaccggttccagatcaaaggtgttgagctgaagtcaggatacaaagattggatcctatggatttcctttgccatatcatgttttttgctttgtgttgctttgttggggttcatcatgtgggcctgccaaaaaggcaacattaggtgcaacatttgcatttga

SEQ ID NO: 30674 - RNA, 1701 nt, synthetic construct
  misc_feature 1..1701: note = hemagglutinin__InfluenzaA__AAY46371
  source 1..1701: mol_type = other RNA
atgaagactatcattgctttgagctacattttatgtctggtttttgctcaaaaacttcccggaaatgacaacagcacggcaacgctgtgcctgggacaccatgcagtgccaaacggaacgctagtgaaaacaatcacgagtgaccaaattgaagtgactaatgctactgagctggttcagagttcctcaacaggtagaatatgcgacagtcctcaccgaatccttgatggagaaaactgcacactgatagatgctctattgggagaccctcattgtgatggcttccaaaataaggaatgggacctttttgttgaacgcagcaaagcctacagcaactgttacccttatgatgtgccggattatgcctcccttaggtcactagttgcctcatccggcaccctggagtttaacaatgaaagcttcaattggactggagtcgctcagaatggaacaagctttgcttgcaaaaggagatctattaaaagtttctttagtagattgaattggttgcaccaattaaaatacaaatatccagcactgaacgtgactatgccaaacaatgacaaatttgacaaattgtacatttggggggttcaccacccgggtacggacagtgaccaaaccagcctatatgctcaagcatcagggagagtcacagtctctaccaaaagaagccaacaaactgtaatcccgaatatcggatctagaccctgggtaaggggtgtttccagcagaataagcatctattggacaatagtgaaaccgggagacatacttctgattaacagcacagggaatctaattgctcctcggggttacttcaaaatacgaagtgggaaaagctcaataatgaggtcagatgcacccattggcaaatgcaattctgaatgcatcactccaaatggaagcattcccaatggcaaaccatttcaaaatgtaaacaggatcacatatggggcctgtcccagatatgttaagcaaaacactctgaaattggcaacagggatgcggaatgtaccagagaaacaaactagaggcatattcggcgcaatcgcaggtttcatagaaaatggttgggagggaatggtagacggttggtacggtttcaggcatcaaaattctgagggcacaggacaagcagcagatcttaaaagcactcaagcagcaatcaaccaaatcaacgggaaactgaataggttaatcgagaaaacgaacgagaaattccatcaaattgaaaaagaattcacagaagtagaagggagaattcaggacctcgagaaatatgttgaggacactaaaatagatctctggtcgtacaacgcggagcttcttgttgccctggagaaccaacatacaattgatctaactgactcagaaatgaacaaactgtttgaaagaacaaggaagcaactgagggaaaatgctgaggatatgggcaatggttgtttcaaaatataccacaaatgtgacaatgcctgcatagggtcaatcagaaatggaacttatgaccatgatgtatacagagacgaagcattaaacaaccggttccagatcaaaggtgttgagctgaagtcaggatacaaagattggatcctatggatttcctttgccacatcatgttttttgctttgtgttgttttgctggggttcatcatgtgggcctgccaaaaaggcaacattaggtgcaacatttgcatttga

SEQ ID NO: 30675 - RNA, 1701 nt, synthetic construct; identical to SEQ ID NO: 30540
  misc_feature 1..1701: note = hemagglutinin__InfluenzaA__AAY46381
  source 1..1701: mol_type = other RNA

SEQ ID NO: 30676 - RNA, 1701 nt, synthetic construct
  misc_feature 1..1701: note = hemagglutinin__InfluenzaA__AAY46391
  source 1..1701: mol_type = other RNA
atgaagactatcattgctttgagctacattttatgtctggttttcgctcaaaaacttcccgtaaatgacaacagcacggcaacgctgtgcctgggacaccatgcagtgccaaacggaacgctagtgaaaacaatcacgaatgaccacattgaagtgactaatgctactgagctggttcagagttcctcaacaggtagaatatgcgacagtcctcaccaaatccttgatggagaaaactgcacactaatagatgctctattgggagaccctcattgtgatggcttccaaaataaggaatgggacctttttgttgaacgcagcacagcctacagcaactgttacccttatgatgtgccggattatgcctcccttaggtcactagttgcctcatccggcacactggagtttaacaatgaaagcttcaattggactggagtcgctcagaatggaacaagctctgcttgcaaaaggagatctattaaaagtttctttagtagattgaattggttacaccaattaaaatacaaatatccagcactgaacgtgactatgccaaacaatgaaaaatttgacaaattgtacatttggggggttcaccacccgagtacggacagtgaccaaatcagcctatatgctcaagcatcagggagagtcacagtctctaccaaaagaagccaacaaactgtaatcccgaatatcggatctagaccctgggtaaggggtgtctccagcataataagcatctattggacaatagtaaaaccgggagacatacttttgattaacagcacagggaatctaattgctcctcggggttacttcaaaatacgaagtgggaaaagctcaataatgaggtcaaatgcacccattggcaaatgcaattctgaatgcatcactccaaatggaagcattcccaatgacaaaccatttcaaaatgtaaacaggatcacatatggggcctgtcccagatatgttaagcaaaacactctgaaattggcaacagggatgcggaatgtaccagagaaacaaactagaggcatattcggcgcaatcgcgggtttcatagaaaatggttgggaaggaatggtggacggttggtacggtttcaggcatcaaaattctgagggcacaggacaagcagcagatcttaaaagcactcaagcagcaatcaaccaaatcaacgggaaactgaataggttaatcgagaaaacaaacgagaaattccatcaaattgaaaaagaattctcagaagtagaagggagaattcaggacctcgagaaatatgttgaggacactaaaatagatctctggtcgtacaacgcggagcttcttgttgccctggagaaccaacatacaattgatctaactgactcagaaatgaacaaactgtttgaaagaacaaggaagcaactgagggaaaatgctgaggatatgggcaatggttgtttcaaaatataccacaaatgtgacaatgcctgcatagggtcaatcagaaatggaacttatgaccatgatgtatacagagacgaagcattaaacaaccggttccagatcaaaggtgttgagctgaagtcaggatacaaagattggatcctatggatttcctttgccatatcatgttttttgctttgtgttgttttgctggggttcatcatgtgggcctgccaaaaaggcaacattaggtgcaacatttgcatttga

SEQ ID NO: 30677 - RNA, 1701 nt, synthetic construct
  misc_feature 1..1701: note = hemagglutinin__InfluenzaA__AAY46426
  source 1..1701: mol_type = other RNA
atgaagactatcattgctttgagctacattttatgtctggttttcgctcaaaaacttcccggaaatgacaacagcacggcaacgctgtgcctggggcaccatgcagtgccaaacggaacgctagtgaaaacaatcacgaatgaccaaattgaagtgactaatgctactgagctggttcagagttcctcaacaggtagaatatgcgacagtcctcaccaaatccttgatggagaaaactgcacactaatagatgctctattgggagaccctcattgtgatggcttccaaaataaggaatgggacctttttgttgaacgcagcaaagcctacagcaactgttacccttatgatgtgccggattatgcctcccttaggtcactagttgcctcatccggcacactggagtttaacaatgaaagcttcaattggactggagtcgctcagaatggaacaagctctgcttgcaaaaggagatctaataaaagtttctttagtagattgaattggttgcaccaattaaaatacaaatatccagcactgaacgtgactatgccaaacaataaaaaatttgacaaattgtacatttggggggttcaccacccgagtacggacagtgaccaaatcagcctatatgctcaagcatcagggagagtcacagtctctaccaaaagaagccaacaaactgtaatcccgaatatcggatctagaccctgggtaaggggtgtctccagcagaataagcatctattggacaatagtaaaaccgggagacatacttttgattaacagcacagggaatctaattgctcctcggggttacttcaaaatacgaagtgggaaaagctcaataatgaggtcagatgcacccattggcaaatgcaattctgaatgcatcactccaaatggaagcattcccaatgacaaaccatttcaaaatgtaaacaggatcacatatggggcctgtcccagatatgttaagcaaaacactctgaaattggcaacagggatgcggaatataccagagaaacaaactagaggcatattcggcgcaatcgcgggtttcatagaaaatggttgggagggaatggtggacggttggtacggtttcaggcatcaaaattctgagggcacaggacaagcagcagatcttaaaagcactcaagcagcaatcaaccaaatcaacgggaaactgaataggttaatcgagaaaacgaacgagaaattccatcaaattgaaaaagaattctcagaagtagaagggagaattcaggacctcgagaaatatgttgaggacactaaaatagatctctggtcgtacaacgcggagcttcttgttgccctggagaaccaacatacaattgatctaactgactcagaaatgaacaaactgtttgaaagaacaaagaagcaactgagggaaaatgctgaggatatgggcaatggttgtttcaaaatataccacaaatgtgacaatgcctgcatagggtcaatcagaaatggaacttatgaccatgatgtatacagagacgaagcattaaacaaccggttccagatcaaaggtgttgagctgaagtcaggatacaaagattggatcctatggatttcctttgccatatcatgttttttgctttgtgttgttttgctggggttcatcatgtgggcctgccaaaaaggcaacattaggtgcaacatttgcatttga

SEQ ID NO: 30678 - RNA, 1701 nt, synthetic construct
  misc_feature 1..1701: note = hemagglutinin__InfluenzaA__AAY47013
  source 1..1701: mol_type = other RNA
atgaagactatcattgctttgagctacattttatgtttggttttcgctcaaaaacttcccggaaatgacaacagcacggcaacgctgtgcctggggcatcatgcagtgccaaacggaacgctagtgaaaacaatcacgaatgaccaaattgaagtgactaatgctactgagctggttcagagttcctcaacaggtagaatatgcgacagtcctcaccaaatccttgatggagaaaactgcacactaatagatgctctattgggagaccctcattgtgatggcttccaaaataaggaatgggacctttttgttgaacgcagcaaagcctacagcaactgttacccttatgatgtgccggattatgtctcccttaggtcactagttgcctcatcaggcacgctggagtttaacaatgaaagcttcaattggactggagtcgctcagaatggaacaagctctgcttgcaaaaggagatctgataaaagtttctttagtagattgaattggttgcaccaattaaaatacaaatatccagcactgaacgtgactatgccaaacaatgaaaaatttgacaaattgtacatttggggggttcaccacccgggtacagacagtgaccaaatcagcctatatgctcaagcatcagggagagtcacagtctctaccaaaagaagccaacaaactgtaatcccgaatatcgggtctggaccctgggtaaggggtgtctccagcagaataagcatctattggacaatagtaaaaccgggagacatacttttgattaacagcacagggaatctaattgctcctcggggttacttcaaaatacgaagtgggaaaagctcaataatgaggtcagatgcacccattggcaaatgcaattctgaatgcatcactccaaatggaagcattcccaatgacaaaccatttcaaaatgtaaacaggatcacatatgggccctgtcccagatatgttaagcaaaacactctgaaattggcaacagggatgcggaatgtgccagagaaacaaactagaggcatattcggtgcaatcgcgggcttcatagaaaatggttgggagggaatgatggacggttggtacggtttcaggcatcaaaattctgagggcacagggcaagcagcagatcttaaaagcactcaagcagcaatcaaccaaatcaacgggaaactgaataggttaatcaagaaaacgaacgagaaattccatcaaattgaaaaagaattctcagaagtagaagggagaattcaggacctcgagaaatatgttgaggacactaaaatagatctctggtcgtacaatgcggagcttcttgttgccctggagaaccaacatacaattgatctaactgactcagaaatgaacaaactgtttgaaagaacaaagaagcaactgagggaaaatgctgaggatatgggcaatggttgtttcaaaatataccacaaatgtgacaatgcctgcatagggtcaatcagaaatggaacttatgaccatgatgtatacagagacgaagcattgaacaaccggttccagatcaaaggtgttgagctgaagtcaggatacaaagattggatcctatggatttcctttgccatatcatgttttttgctttgtattgttttgctggggttcatcatgtgggcctgccaaaaaggcaacattaggtgcaacatttgcatttga

SEQ ID NO: 30679 - RNA, 1701 nt, synthetic construct
  misc_feature 1..1701: note = hemagglutinin__InfluenzaA__AAY47023
  source 1..1701: mol_type = other RNA
atgaagactatcattgctttgagctacattttatgcctggttttcgctcaaaaacttcccggaaatgacaacagcacggcaacgctgtgcctggggcaccatgcagtgccaaacggaacgctagtgaaaacaatcacgaatgaccaaattgaagtaactaatgctactgagctggttcagagttcctcaacaagtagaatatgcgacagtcctcaccaaatccttgatggagaaaactgcacactaatagatgctctattgggagaccctcattgtgatggcttccaaaataaggaatggggcctttttgttgaacgcagcaaagcctacagcaactgttacccttatgatgtgccggattatgtctcccttaggtcactagttgcctcatcaggcacgctggagtttaacaatgaaagcttcaattggactggagtcgctcagaatggaacaagctctgcttgcaaaaggagatctgataaaagtttctttagtagattgaattggttgcaccaattaaaatacaaatatccagcactgaacgtgactatgccaaacaatgaaaaatttgacaaattgtacatttggggggttcaccacccgggtacagacagtgaccaaatcagcctatatgctcaagcatcagggagagtcacagtctctaccaaaagaagccaacaaactgtaatcccgaatatcggatctagaccctgggtaaggggtgtctccagcagaataagcatctattggacaatagtaaaaccgggagacatacttttgattaacagcacagggaatctaattgctcctcggggttacttcaaaatacgaagtgggaaaagctcaataatgaggtcagatgcacccattggcaaatgcaattctgaatgcatcactccaaatggaagcattcccaatgacaaaccatttcaaaatgtaaacaggatcacatatggggcctgtcccagatatgttaagcaaaacactctgaaattggcaacagggatgcggaatgtaccagagaaacaagctagaggcatattcggtgcaatcgcgggcttcatagaaaatggttgggagggaatgatggacggttggtacggtttcaggcatcaaaattctgagggcacagggcaagcagcagatcttaaaagcactcaagcagcaatcaaccaaatcaacgggaaactgaataggttaatcgagaaaacgaacgagaaattccatcaaattgaaaaagaattctcagaagtagaagggagaattcaggacctcgagaaatatgttgaggacactaaaatagatctctggtcgtacaatgcggagcttcttgttgccctggagaaccaacatacaattgatctaactgactcagaaatgaacaaactgtttgaaagaacaaagaagcaactgagggaaaatgctgaggatatgggcaatggttgtttcaaaatataccacaaatgtgacaatgcctgcatagggtcaatcagaaatggaacttatgaccatgatgtatacagagacgaagcattgaacaaccggttccagatcaaaggtgttgagctgaagtcaggatacaaagattggatcctatggatttcctttgccatatcatgttttttgctttgtattgttttgctggggttcatcatgtgggcctgccaaaaaggcaacattaggtgcaacatttgcatttga

SEQ ID NO: 30680 - RNA, 1701 nt, synthetic construct
  misc_feature 1..1701: note = hemagglutinin__InfluenzaA__AAY47052
  source 1..1701: mol_type = other RNA
atgaagactatcattgctttgagctacattttatgtctggttttcgctcaaaaacttcccgtaaatgacaacagcacggcaacgctgtgcctgggacaccatgcagtgccaaacggaacgctagtgaaaacaatcacgaatgaccacattgaagtgactaatgctactgagctggttcagagttcctcaacaggtagaatatgcgacagtcctcaccaaatccttgatggagaaaactgcacactaatagatgctctattgggagaccctcattgtgatggcttccaaaataaggaatgggacctttttgttgaacgcagcacagcctacagcaactgttacccttatgatgtgccggattatgcctcccttaggtcactagttgcctcatccggcacactggagtttaacaatgaaagcttcaattggactggagtcgctcagaatggaacaagctctgcttgcaaaaggagatctattaaaagtttctttagtagattgaattggttacaccaattaaaatacaaatatccagcactgaacgtgactatgccaaacaatgaaaaatttgacaaattgtacatttggggggttcaccacccgagtacggacagtgaccaaatcagcctatatgctcaagcatcagggagagtcacagtctctaccaaaagaagccaacaaactgtaatcccgaatatcggatctagaccctgggtaaggggtgtctccagcataataagcatctattggacaatagtaaaaccgggagacatacttttgattaacagcacagggaatctaattgctcctcggggttactttaaaatacgaagtgggaaaagctcaataatgaggtcaaatgcacccattggcaaatgcaattctgaatgcatcactccaaatggaagcattcccaatgacaaaccatttcaaaatgtaaacaggatcacatatggggcctgtcccagatatgttaagcaaaacactctgaaattggcaacagggatgcggaatgtaccagagaaacaaactagaggcatattcggcgcaatcgcgggtttcatagaaaatggttgggagggaatggtggacggttggtacggtttcaggcatcaaaattctgagggcacaggacaagcagcagatcttaaaagcactcaagcagcaatcaaccaaatcaacgggaaactgaataggttaatcgagaaaacaaacgagaaattccatcaaattgaaaaagaattctcagaagtagaagggagaattcaggacctcgagaaatatgttgaggacactaaaatagatctctggtcgtacaacgcggagcttcttgttgccctggagaaccaacatacaattgatctaactgactcagaaatgaacaaactgtttgaaagaacaaggaagcaactgagggaaaatgctgaggatatgggcaatggttgtttcaaaatataccacaaatgtgacaatgcctgcatagggtcaatcagaaatggaacttatgaccatgatgtatacagagacgaagcattaaacaaccggttccagatcaaaggtgttgagctgaagtcaggatacaaagattggatcctatggatttcctttgccatatcatgttttttgctttgtgttgttttgctggggttcatcatgtgggcctgccaaaaaggcaacattaggtgcaacatttgcatttga

SEQ ID NO: 30681 - RNA, 1701 nt, synthetic construct
  misc_feature 1..1701: note = hemagglutinin__InfluenzaA__AAY47075
  source 1..1701: mol_type = other RNA
atgaagactatcatagctttgagctacattttatgtctggttttcgctcaaaaacttcccggaaatgacaacagcatggcaacgctgtgcctgggacaccatgcagtgccaaacggaacgctagtgaaaacaatcacgaatgaccaaattgaagtgactaatgctactgagctggttcagagttcctcaacaggtagaatatgcgacagtcctcaccaaatccttgatggagaaaactgcacactaatagatgctctattgggagaccctcattgtgatggcttccaaaataaggaatgggacctttttgttgaacgcagcaaagcctacagcaactgttacccttatgatgtgccggattatgtctcccttaggtcactagttgcctcatcaggcacgctggagtttaacaatgaaagcttcaattggactggagtcgctcagaatggaacaagctctgcttgcaaaaggagatctaataaaagtttctttagtagattgaattggttgcaccaattaaaaaacaaatatccagcgctgaacgtgactatgccaaacaatgaaaaatttgacaaattgtacatttggggggttcaccacccgggcacagacagtgaccaaatcagcctatatgctcaagcatcagggagagtcacagtctctaccaaaagaagccaacaaactgtaatcccgaatatcggatctagacccagggtaagggatatctccagcagaataagcatctattggacaatagtaaaaccgggagacatacttttgattaacagcacagggaatctaattgctcctcggggttacttcaaaatacgaagtgggaaaagctcaataatgaggtcagatgcacccattggcaaatgcaattctgaatgcatcactccaaatggaagcattcctaatgacaaaccatttcaaaatgtaaacaggatcacatatggggcctgtcccagatatgttaagcaaaacactctgaaattggcaacagggatgcgaaatgtgccagagaaacaaactagaggcatattcggtgcaatcgcgggcttcatagaaaatggttgggagggaatgatggacggttggtacggtttcaggcatcaaaattctgagggcacaggacaagcagcagatcttaaaagcactcaagcagcaatcaaccaaatcaacgggaaactgaataggttaatcgagaaaacgaacgagaaattccaccaaattgaaaaagaattctcagaagtagaagggagaattcaggacctcgagaaatatgttgaggacactaaaatagatctctggtcgtacaatgcggagcttcttgttgccctggagaaccaacatacaattgatctaactgactcagaaatgaacaaactgtttgaaagaacaaagaagcaactgagggaaaatgctgaggatatgggcaatggttgtttcaaaatataccacaaatgtgacaatgcctgcatagggtcaatcagaaatggaacttatgaccatgatgtatacagagacgaagcattaaacaaccggttccagatcaaaggtgttgagctgaagtcaggatacaaagattggatcctatggatttcctttgccatatcatgttttttgctttgtattgttttgctggggttcatcatgtgggcctgccaaaaaggcaacatcaggtgcaacatttgcatttga

SEQ ID NO: 30682 - RNA, 1701 nt, synthetic construct
  misc_feature 1..1701: note = hemagglutinin__InfluenzaA__AAY47085
  source 1..1701: mol_type = other RNA
atgaagactatcattgctttgagctacattctatgtctggttttcgctcaaaagcttcccggaaatgacaacagcacggcaacgctgtgccttgggcaccatgcagtaccaaacggaacgatagtgaaaacaatcacgaatgaccaaattgaagttactaatgctactgagctggttcagagttcctcaacaggtggaatatgcgacagtcctcatcagatccttgatggagaaaactgcacactaatagatgctctattgggagaccctcagtgtgatggcttccaaaataagaaatgggacctttttgttgaacgcagcaaagcctacagcaactgttacccttatgatgtgccggattatgcctcccttagatcactagttgcctcatccggcacactggagtttaacaatgaaagcttcaattggactggagtcactcagaatggaacaagctctgcttgcaaaaggagatctaataaaagtttctttagtagattgaattggttgacccacttaaaatacaaatacccagcattgaacgtgactatgccaaacaatgaaaaatttgacaaattgtacatttggggggttcaccacccgggtacggacagtgaccaaatcagcctatatgctcaagcatcaggaagaatcacagtctctaccaaaagaagccaacaaactgtaatcccgaatgtcggatctagacccagggtaagggatgtctccagcagaataagcatctattggacaatagtaaaaccgggagacatacttttgattaacagcacagggaatctaattgctcctcggggttacttcaaaatacgaagtgggaaaagctcaataatgagatcagatgcacccattggcaaatgcaattctgaatgcatcactccaaatggaagcattcccaatgacaaaccatttcaaaatgtaaacaggatcacatatggggcctgtcccagatatgttaagcaaaacactctgaaattggcaacagggatgcgaaatgtaccagagaaacaaactagaggcatatttggcgcaatcgcgggtttcatagaaaatggttgggagggaatggtggacggttggtatggtttcaggcatcaaaattctgagggcacaggacaagcagcagatctcaaaagcactcaagcagcaatcaaccaaatcaatgggaaactgaataggttaatcgggaaaacaaacgagaaattccatcagattgaaaaagaattctcagaagtagaagggagaattcaggacctcgagaaatatgttgaggacactaaaatagatctctggtcatacaacgcggagcttcttgttgccctggagaaccaacatacaattgatctaactgactcagaaatgaacaaactgtttgaaagaacaaagaagcaactgagggaaaatgctgaggatatgggcaatggttgtttcaaaatataccacaaatgtgacaatgcctgcatagagtcaatcagaaatggaacttatgaccatgatgtatacagagatgaagcattaaacaaccggttccagatcaaaggtgttgagctgaagtcaggatacaaagattggatcctatggatttcctttgccatatcatgttttttgctttgtgttgctttgttggggttcatcatgtgggcctgccaaaaaggcaacattaggtgcaacatttgcatttga

SEQ ID NO: 30683 - RNA, 1701 nt, synthetic construct
  misc_feature 1..1701: note = hemagglutinin__InfluenzaA__AAY58320
  source 1..1701: mol_type = other RNA
atgaagactatcattgctttgagctacattctatgtctggttttcgctcaaaaacttcccggaaatgacaacagcacggcaacgctgtgccttgggcaccatgcagtaccaaacggaacgatagtgaaaacaatcacgaatgaccaaattgaagttactaatgctactgagctggtacagagttcctcaacaggtggaatatgcgacagtcctcatcagatccttgatggagaaaactgcacactaatagatgctctattgggagaccctcagtgtgatggcttccaaaataagaaatgggacctttttgttgaacgcagcaaagcctacagcaactgttacccttatgatgtgccggattatgcctcccttaggtcactagttgcctcatccggcacactggagtttaacaatgaaagcttcgattggactggagtcactcagaatggaacaagctctgcttgcaaaaggagatctaataaaagtttctttagtagattgaattggttgacccacttaaaatacaaatacccagcattgaacgtgactatgccaaacaatgaaaaatttgacaaattgtacatttggggggttcaccacccgggtacggacagtgaccaaatcagcctatatgctcaagcatcaggaagaatcacagtctctaccaaaagaagccaacaaactgtaatcccgaatatcggatctagacccagggtaagggatatctctagccgaataagcatctattggacaatagtaaaaccgggagacatacttttgattaacagcacagggaatctaattgctcctcggggttacttcaaaatacgaagtgggaaaagctcaataatgagatcagatgcacccattggcaaatgcaattccgaatgcatcactccaaatggaagcattcccaatgacaaaccatttcaaaatgtaaacaggatcacatatggggcctgtcccagatatgttaagcaaaacactttgaaattggcaacagggatgcgaaatgtaccagagaaacaaactagaggcatatttggcgcaatcgcgggcttcatagaaaatggttgggagggaatggtggacggttggtacggtttcaggcatcaaaattctgagggcacaggacaagcagcagatctcaaaagcactcaagcagcaatcaaccaaatcaatgggaaactgaataggttaatcgggaaaacaaacgagaaattccatcagattgaaaaagaattctcagaagtagaagggagaattcaggacctcgagaaatatgttgaggacactaaaatagatctctggtcatacaacgcggagcttcttgttgccctggagaaccaacatacaattgatctaactgactcagaaatgaacaaactgtttgaaagaacaaagaagcaactgagggaaaatgctgaggatatgggcaatggttgtttcaaaatataccacaaatgtgacaatgcctgcatagggtcaatcagaaatggaacttatgaccatgatgtgtacagagatgaagcattaaacaaccggttccagatcaaaggtgttgagctgaagtcaggatacaaagattggatcctatggatttcctttgccatatcatgttttttgctttgtgttgctttgttggggttcatcatgtgggcctgccaaaaaggcaacattaggtgcaacatttgcatttga

SEQ ID NO: 30684 - RNA, 1701 nt, synthetic construct
  misc_feature 1..1701: note = hemagglutinin__InfluenzaA__AAY59035
  source 1..1701: mol_type = other RNA
atgaagactatcattgctttgagctacattttatgtctggttttcgctcaaaaacttaccgtaaatgacaacagcacggcaacgctgtgcctgggacaccatgcagtgccaaacggaacgctagtgaaaacaatcacgaatgaccacattgaagtgactaatgctactgagctggttcagagttcctcaacaggtagaatatgcgacagtcctcaccaaatccttgatggagaaaactgcacactaatagatgctctattgggagaccctcattgtgatggcttccaaaataaggaatgggacctttttgttgaacgcagcacagcctacagcaactgttacccttatgatgtgccggattatgcctcccttaggtcactagttgcctcatccggcacactggagtttaacaatgaaagcttcaattggactggagtcgctcagaatggaacaagctctgcttgcaaaaggagatctattaaaagtttctttagtagattgaattggttgcaccaattaaaatacaaatatccagcactgaacgtgactatgccaaacaatgaaaaatttgacaaattgtacatttggggggttcaccacccgagtacggacagtgaccaaatcagcctatatgctcaagcatcagggagagtcacagtctctaccaaaagaagccaacaaactgtaatcccgaatatcggatctagaccctgggtaaggggtgtctccagcagaataagcatctattggacaatagtaaaaccgggagacatacttttgattaacagcacagggaatctaattgctcctcggggttacttcaaaatacgaagtgggaaaagctcaataatgaggtcaaatgcacccattggcaaatgcaattctgaatgtatcactccaaatggaagcattcccaatgacaaaccatttcaaaatgtaaacaggatcacatatggggcctgtcccagatatgttaagcaaaacactctgaaattggcaacagggatgcggaatgtaccagagaaacaaactagaggcatattcggcgcaatcgcgggtttcatagaaaatggttgggagggaatggtggacggttggtacggtttcaggcatcaaaattctgagggcacaggacaagcagcagatcttaaaagcactcaagcagcaatcaatcaaatcaacgggaaactgaataggttaatcgagaaaacaaacgagaaattccatcaaattgaaaaagaattctcagaagtagaagggagaattcaggacctcgagaaatatgttgaggacactaaaatagatctctggtcgtacaacgcggagcttcttgttgccctggagaaccaacatacaattgatctaactgactcagaaatgaacaaactgtttgaaagaacaaggaagcaactgagggaaaatgctgaggatatgggcaatggttgtttcaaaatatatcacaaatgtgacaatgcctgcatagggtcaatcagaaatggaacttatgaccatgatgtatacagagacgaagcattaaacaaccggttccagatcaaaggtgttgagctgaagtcaggatacaaagattggatcctatggatttcctttgccatatcatgttttttgctttgtgttgttttgctggggttcatcatgtgggcctgccaaaaaggcaacattaggtgcaacatttgcatttga

SEQ ID NO: 30685 - RNA, 1701 nt, synthetic construct
  misc_feature 1..1701: note = hemagglutinin__InfluenzaA__AAY64202
  source 1..1701: mol_type = other RNA
atgaagactatcattgctttgagctacattctatgtctggttttcgctcaaaaacttcccggaaatgacaacagcacggcaacgctgtgccttgggcaccatgcagtaccaaacggaacgatagtgaaaacaatcacgaatgaccaaattgaagttactaatgctactgagctggttcagagttcctcaacaggtggaatatgcgacagtcctcatcagatccttgatggagaaaactgcacactaatagatgctctattgggagaccctcagtgtgatggcttccaaaataagaaatgggacctttttgttgaacgcagcaaagcctacagcaactgttacccttatgatgtgccggattatgcctcccttaggtcactagttgcctcatccggcacactggagtttaacaatgaaagcttcaattggactggagtcactcagaatggaacaagctctgcttgcgaaaggagatctaataaaagtttctttagtagattgaattggttgacccacttaaaatacaaatacccagcattgaacgtgactatgccaaacaatgaaaaatttgacaaattgtacatttggggggttcaccacccgggtacggacagtgaccaaatcagcctatatgctcaagcatcaggaagaatcacagtctctaccaaaagaagccaacaaactgtaatcccgaatatcggatctagacccagggtaagggatgtctccagccgaataagcatctattggacaatagtaaaaccgggagacatacttttgattaacagcacagggaatctaattgctcctcggggttacttcaaaatacgaagtgggaaaagctcaataatgagatcagatgcacccattggcaaatgcaattctgaatgcatcactccaaatggaagcattcccaatgacaaaccatttcaaaatgtaaacaggatcacatatggggcctgtcccagatatgttaagcaaaacactctgaaattggcaacagggatgcgaaatgtaccagagaaacaaaatagaggcatatttggcgcaatcgcgggtttcatagaaaatggctgggagggaatggtggacggttggtacggtttcaggcatcaaaattctgagggcacaggacaagcagcagatctcaaaagcactcaagcagcaattaaccaaatcaatgggaaactgaataggttaatcgggaaaacaaacgagaaattccatcagattgaaaaagaattctcagaagtagaagggagaattcaggacctcgagaaatatgttgaggacactaaaatagatctctggtcatacaacgcggagcttcttgttgccctggagaaccaacatacaattgatctaactgactcagaaatgaacaaactgtttgaaagaacaaagaagcaactgagggaaaatgctgaggatatgggcaatggttgtttcaaaatataccacaaatgtgacaatgcctgcatagggtcaatcagaaatggaacttatgaccatgatgtgtacagagatgaagcattaaacaaccggttccagatcaaaggtgttgagctgaagtcaggatacaaagattggatcctatggatttcctttgccatatcatgttttttgctttgtgttgctttgttggggttcatcatgtgggcctgccaaaaaggcaacattaggtgcgacatttgcatttga

SEQ ID NO: 30686 - RNA, 1701 nt, synthetic construct
  misc_feature 1..1701: note = hemagglutinin__InfluenzaA__AAY64212
  source 1..1701: mol_type = other RNA
atgaagactatcattgctttgagctacattttatgtctggttttcgctcaaaaaattcccgtaaatgacaacagcacggcaacgctgtgcctgggacaccatgcagtgccaaacggaacgctagtgaaaacaatcacgaatgaacacattgaagtgactaatgctactgagctggttcagagttcctcaacaggtagaatatgcgacagtcctcaccaaatccttgatggagaaaactgcacactaatagatgctctattgggagaccctcattgtgatggcttccaaaataaggaatgggacctttttgttgaacgcagcacagcctacagcaactgttacccttatgatgtgccggattatgcctcccttaggtcactagttgcctcatccggcacactggagtttaacaatgaaagcttcaattggactggagtcgctcagaatggaacaagctctgcttgcaaaaggagatctattaaaagtttctttagtagattgaattggttgcaccaattaaaatacaaatatccagcactgaacgtgactatgccaaacaatgaaaaatttgacaaattgtacatttggggggttcaccacccgagtacggacagtgaccaaatcagcctatatgctcaagcatcagggagagtcacagtctctaccaaaagaagccaacaaactgtaatcccgaatatcggatctagaccctgggtaaggggtgtctccagcagaataagcatctattggacaatagtaaaaccgggagacatacttttgattaacagcacagggaatctaattgctcctcggggttactttaaaatacgaagtgggaaaagctcaataatgaggtcaaatgcactcattggcaaatgcaattctgaatgcatcactccaaatggaagcattcccaatgacaaaccatttcaaaatgtaaacaggatcacatatggggcctgtcccagatatgttaagcaaaacactctgaaattggcaacagggatgcggaatgtaccagagaaacaaactagaggcatattcggcgcaatcgcgggtttcatagaaaatggttgggagggaatggtggacggttggtacggtttcaggcatcaaaattctgagggcacaggacaagcagcagatcttaaaagcactcaagcagcaatcaaccaaatcaacgggaaactgaataggttaatcgagaaaacaaacgagaaattccatcaaattgaaaaagaattctcagaagtagaagggagaattcaggacctcgagaaatatgttgaggacactaaaatagatctctggtcgtacaacgcggagcttcttgttgccctggagaaccaacatacaattgatctaactgactcagaaatgaacaaactgtttgaaagaacaaggaagcaactgagggaaaatgctgaggatatgggcaatggttgtttcaaaatataccacaaatgtgacaatgcctgcatagggtcaatcagaaatggaacttatgaccatgatgtatacagagacgaagcattaaacaaccggttccagatcaaaggtgttgagctgaagtcaggatacaaagattggatcctatggatttcctttgccatatcatgttttttgctttgtgttgttttgctggggttcatcatgtgggcctgccaaaaaggcaacattaggtgcaacatttgcatttga

SEQ ID NO: 30687 - RNA, 1701 nt, synthetic construct
  misc_feature 1..1701: note = hemagglutinin__InfluenzaA__AAY64222
  source 1..1701: mol_type = other RNA
atgaagactatcattgctttgagctacattttatgtctggttttcgctcaaaaacttcccggaaatgacaacagcacggcaacgctgtgcctggggcaccatgcagtgccaaacggaacgctagtgaaaacaatcacgaatgaccaaattgaagtgactaatgctactgagctggttcagagttcctcaataggtagaatatgcgacagtcctcaccaaatccttgatggagaaaactgcacactaatagatgctctattgggagaccctcattgtgatggcttccaaaataaggaatgggacctttttgttgaacgcagcaaagcctacagcaactgttacccttatgatgtgccggattatgtctcccttaggtcactagttgcctcatcaggcacgctggagtttaacaatgaaagcttcaattggactggagtcgctcagaatggaacaagctcttcttgcaaaaggagatctgataaaagtttctttagtagattgaattggttgcaccaattaaaatacaaatatccagcactgaacgtgactatgccaaacaatgaaaaatttgacaaattgtacatttggggggttcaccacccgggtacagacagtgaccaaatcagcctatatgctcaagcatcagggagagtcacagtctctaccaaaagaagccaacaaactgtaatcccgaacatcggatctagaccctgggtaaggggtgtctccagcagaataagcatctattggacaatagtaaaaccgggagacatacttttgattaacagcacagggaatctaattgctcctcggggttacttcaaaatacgaagtgggaaaagctcaataatgaggtcagatgcacccattggcaaatgcaattctgaatgcatcactccaaatggaagcattcccaatgacaaaccatttcaaaatgtaaacaggatcacatatgggccctgtcccagatatgttaagcaaaacactctgaaattggcaacagggatgcggaatgtgccagagaaacaaactagaggcatattcggtgcaatcgcgggcttcatagaaaatggttgggagggaatgatggacggttggtacggtttcaggcatcaaaattctgagggcacagggcaagcagcagatcttaaaagcactcaagcagcaatcaaccagatcaacgggaaactgaataggttaatcgagaaaacgaacgagaaattccatcaaattgaaaaagaattctcagaagtagaagggagaatccaggacctcgagaaatatgttgaggacactaaaatagatctctggtcgtacaatgcggagcttcttgttgccctggagaaccaacatacaattgatctaactgactcagaaatgaacaaactgtttgaaaaaacaaagaagcaactgagggaaaatgctgaggatatgggcaatggttgtttcaaaatataccacaaatgtgacaatgcctgcatagggtcaatcagaaatggaacttatgaccatgatgtatacagagacgaagcattgaacaaccggttccagatcaaaggtgttgagctgaagtcaggatacaaagattggatcctatggatttcctttgccatatcatgttttttgctttgtattgttttgctggggttcatcatgtgggcctgccaaaaaggcaacattagatgcaacatttgcatttga

SEQ ID NO: 30688 - RNA, 1701 nt, synthetic construct
  misc_feature 1..1701: note = hemagglutinin__InfluenzaA__AAY64262
  source 1..1701: mol_type = other RNA
atgaagactatcattgctttgagctacattttatgtctggttttcgctcaaaaacttcccggaaatgacaacagcacggcaacgctgtgcctggggcaccatgcagtgccaaacggaacgctagtgaaaacaatcacgaatgaccaaattgaagtgactaatgctactgagctggttcagagttcctcaacaggtagaatatgcgacagtcctcaccaaatccttgatggagaaaactgcacactaatagatgctctattgggagaccctcattgtgatggcttccaaaataaggaatgggacctttttgttgaacgcagcaaagcctacagcaactgttacccttatgatgtgccggattatgcctcccttaggtcactagttgcctcatccggcacactggagtttaacaatgaaagcttcaattggactggagtcgctcagaatggaacaagctctgcttgcaaaaggagatctaataaaagtttctttagtagattgaattggttgcaccaattaaaatacaaatatccagcactgaacgtgactatgccaaacaatgaaaaatttgacaaattgtacatttggggggttcaccacccgagtacggacagtgaccaaatcagcctatatgctcaagcatcagggagagtcacagtctctaccaaaagaagccaacaaactgtaatcccgaatatcggatctagaccctgggtaaggggtgtctccagcagaataagcatctattggacaatagtaaaaccgggagacatacttttgattaacagcacagggaatctaattgctcctcggggttacttcaaaatacgaagtgggaaaagctcaataatgaggtcagatgcacccattggcaaatgcaattctgaatgcatcactccaaatggaagcattcccaatgacaaaccatttcaaaatgtaaacaggatcacatatggggcctgtcccagatatgttaagcaaaacactctgaaattggcaacagggatgcggaatgtaccagagaaacaaactagaggcatattcggcgcaatcgcgggtttcatagaaaatggttgggagggaatggtggacggttggtacggtttcaggcatcaaaattctgagggcacaggacaagcagcagatcttaaaagcactcaagcagcaatcaaccaaatcaacgggaaactgaataggttaatcgagaaaacgaacgagaaattccatcaaattgaaaaagaattctcagaagtagaagggagaattcaggacctcgagaaatatgttgaggacactaaaatagatctctggtcgtacaacgcggagcttcttgttgccctggagaaccaacatacaattgatctaactgactcagaaatgaacaaactgtttgaaagaacaaagaagcaactgagggaaaatgctgaggatatgggcaatggttgtttcaaaatataccacaaatgtgacaatgcctgcatggggtcaatcagaaatggaacttatgaccatgatgtatacagagacgaagcattaaacaaccggttccagatcaaaggtgttgagctgaagtcaggatacaaagattggatcctatggatttcctttgccatatcatgttttttgctttgtgttgttttgctggggttcatcatgtgggcctgccaaaaaggcaacattaggtgcaacatttgcatttga

SEQ ID NO: 30689 - RNA, 1701 nt, synthetic construct
  misc_feature 1..1701: note = hemagglutinin__InfluenzaA__AAY64272
  source 1..1701: mol_type = other RNA
atgaagactatcattgctttgagctacattctatgtctggttttcgctcaaaagcttcccggaaatgacaacagcacggcaacgctgtgccttgggcaccatgcagtaccaaacggaacgatagtgaaaacaatcacgaatgaccaaattgaagttactaatgctactgagctggttcagagttcctcaacaggtggaatatgcgacagtcctcatcagatccttgatggagaaaactgcacactaatagatgctctattgggagaccctcagtgtgatggcttccaaaataagaaatgggacctttttgttgaacgcagcaaagcctacagcaactgttacccttatgatgtgccggattatgcctcccttaggtcactagttgcctcatccggcacactggagtttaacaatgaaagcttcaattggactggagtcactcagaatggaacaagctctgcttgcaaaaggagatctaataaaagtttctttagtagattgaattggttgacccacttaaaatacaaatacccagcattgaacgtgactatgccaaacaatgaaaaatttgacaaattgtacatttggggggttcaccacccgggtacggacagtgaccaaatcagcctatatgctcaagcatcaggaagaatcacagtctctaccaaaagaagccaacaaactgtaatcccgaatatcggatctagacccagggtaagggatgtctccagcagaataagcatctattggacaatagtaaaaccgggagacatacttttgattaacagcacagggaatctaattgctcctcggggttacttcaaaatacgaagtgggaaaagctcaataatgagatcagatgcacccattggcaaatgcaattctgaatgcatcactccaaatggaagcattcccaatgacaaaccatttcaaaatgtaaacaggatcacatatggggcctgtcccagatatgttaagcaaaacactctgaaattggcaacagggatgcgaaatgtaccagagaaacaaactagaggcatatttggcgcaatcgcgggtttcatagaaaatggttgggagggaatggtggacggttggtacggtttcaggcatcaaaattctgagggcacaggacaagcagcagatctcaaaagcactcaagcagcaatcaaccaaatcaatgggaaactgaataggttaatcgggaaaacaaacgagaaattccatcagattgaaaaagaattctcagaagtagaagggagaattcaggacctcgagaaatatgttgaggacactaaaatagatctctggtcatacaacgcggagcttcttgttgccctggagaaccaacatacaattgatctaactgactcagaaatgaacaaactgtttgaaagaacaaagaagcaactgagggaaaatgctgaggatatgggcaatggttgtttcaaaatataccacaaatgtgacaatgcctgcatagagtcaatcagaaatggaacttatgaccatgatgtatacagagatgaagcattaaacaaccggttccagatcaaaggtgttgagctgaagtcaggatacaaagattggatcctatggatttcctttgccatatcatgttttttgctttgtgttgctttgttggggttcatcatgtgggcctgccaaaaaggcaacattaggtgcaacatttgcatttga

SEQ ID NO: 30690 - RNA, 1701 nt, synthetic construct
  misc_feature 1..1701: note = hemagglutinin__InfluenzaA__AAY64282
  source 1..1701: mol_type = other RNA
atgaagactatcattgctttgagctacattttatgtctggttttcgctcaaaaacttcccggaaatgacaacagcacggcaacgctgtgcctggggcaccatgcagtgccaaacggaacgctagtgaaaacaatcacgaatgaccaaattgaagtgactaatgctactgagctggttcagagttcctcaacaggtagaatatgcgacagtcctcaccaaatccttgatggagaaaactgcacactgatagatgctctattgggagaccctcattgtgatggcttccaaaataaggaatgggacctttttgttgaacgcagcaaagcctacagcaactgttacccttatgatgtgccggattatgcctcccttaggtcactagttgcctcatccggcacactggagtttaacaatgaaagcttcaattggactggagtcgctcagaatggaacaagctctgcttgcaaaaggagatctaataaaagtttctttagtagattgaattggttgcaccaattaaaatacaaatatccagcactgaacgtgactatgccaaacaatgaaaaatttgacaaattgtacatttggggggttcaccacccgagtacggacagtgaccaaatcagcctatatgctcaagcatcagggagagtcacagtctctaccaaaagaagccaacaaactgtaatcccgaatatcggatctagaccctgggtaaggggtgtctccagcagaataagcatctattggacaatagtaaaaccgggagacatacttttgattaacagcacagggaatctaattgctcctcggggttacttcaaaatacgaagtgggaaaagctcaataatgaggtcagatgcacccattggcaaatgcaattctgaatgcatcactccaaatggaagcattcccaatgacaaaccatttcaaaatgtaaacaggatcacatatggggcctgtcccagatatgttaagcaaaacactctgaaattggcaacagggatgcggaatgtaccagagaaacaaactagaggcatattcggcgcaatcgcgggtttcatagaaaatggttgggagggaatggtggacggttggtacggtttcaggcatcaaaattctgagggcacaggacaagcagcagatcttaaaagcactcaagcagcaatcaaccaaatcaacgggaaactgaataggttaatcgagaaaacgaacgagaaattccatcaaattgaaaaagaattctcagaagtagaagggagaattcaggacctcgagaaatatgttgaggacactaaaatagatctctggtcgtacaacgcggagcttcttgttgccctggagaaccaacatacaattgatctaactgactcagaaatgaacaaactgtttgaaagaacaaagaagcaactgagggaaaatgctgaggatatgggcaatggttgtttcaaaatataccacaaatgtgacaatgcctgcatagggtcaatcagaaatggaacttatgaccatgatgtatacagagacgaagcattaaacaaccggttccagatcaaaggtgttgagctgaagtcaggatacaaagattggatcctatggatttcctttgccatatcatgttttttgctttgtgttgttttgctggggttcatcatgtgggcctgccaaaaaggcaacattaggtgcaacatttgcatttga

SEQ ID NO: 30691 - RNA, 1701 nt, synthetic construct
  misc_feature 1..1701: note = hemagglutinin__InfluenzaA__AAY64292
  source 1..1701: mol_type = other RNA
atgaagactatcatagctttgagctacattttatgtctggttttcgctcaaaaacttcccggaaatgacaacagcacggcaacgctgtgcctggggcaccatgcagtgccaaacggaacgctagtgaaaacaatcacgaatgaccaaattgaagtgactaatgctactgagctggttcagagttcctcaacagataaaatatgcgacagtcctcaccaaatccttgatggaggaaactgcacactaatagatgctctattgggagaccctcattgtgatggcttccaaaataaggaatgggacctttttgttgaacgcagcaaagcctacagcaactgttacccttatgatgtgccggattatgtctcccttaggtcactagttgcctcatcaggcacgctggagtttaacaatgaaagcttcaattggactggagtcgctcagaatggaacaagctctgcttgcaaaaggagatctgataaaagtttctttagtagattgaattggttgcaccaattaaaaaataaatatccagcactgaacgtgactatgccaaacaatgaaaaatttgacaaattgtacatttggggggttcaccacccgggtacagacagtgaccaaatcagcctatatgctcaagcatcagggagagtcacagtctctaccaaaagaagccaacaaactgtaatcccgaatatcggatctagacccagggtaagggatatatccagcagaataagcatctattggacaatagtaaaaccgggagacatacttttgattaacagcacagggaatctaattgctcctcgaggttacttcaaaatacgaagtgggaaaagctcaataatgaggtcagatgcacccattggcaaatgcaattctgaatgcatcactccaaatggaagcattcctaatgacaaaccatttcaaaatgtaaacaggatcacatatggggcctgtcccagatatgttaagcaaaacactctgaaattggcaacagggatgcggaatgtgccggagaaacaaactagaggcatattcggtgcaatcgcgggcttcatagaaaatggttgggagggaatggtggacggttggtacggtttcaggcatcaaaattctgagggcacaggacaagcagcagatcttaaaagcactcaagcagcaatcaaccaaatcaacgggaaactgaataggttaatcgagaaaacgaacgagaaattccaccaaattgaaaaagaattctcagaagtagaagggagaattcaggacctcgagaaatatgttgaggacactaaaatagatctctggtcgtacaatgcggagcttcttgttgccctggagaaccaacatacaattgatctaactgactcagaaatgaacaaactgtttgaaagaacaaagaagcaactgagggaaaatgctgaggatatgggcaatggttgtttcaaaatataccacaaatgtgacaatgcctgcatagggtcaatcagaaatggaacttatgaccatgatgtatacagagacgaagcattaaacaaccggttccagatcaaaggtgttgagctgaaatcaggatacaaagattggatcctatggatttcctttgccatatcatgttttttgctttgtattgttttgctggggttcatcatgtgggcctgccaaaaaggcaacattaggtgcaacatttgcatttga

SEQ ID NO: 30692 - RNA, 1701 nt, synthetic construct
  misc_feature 1..1701: note = hemagglutinin__InfluenzaA__AAY64302
  source 1..1701: mol_type = other RNA
atgaagactatcattgctttgagctacattttatgtctggttttcgctcaaaaacttcccggaaatgacaacagcacggcaacgctgtgcctgggacaccatgcagtgccaaacggaacgctagtgaaaacaatcacgagtgaccaaattgaagtgactaatgctactgagctggttcagagttcctcaacaggtagaatatgcgacagtcctcaccgaatccttgatggagaaaactgcacactgatagatgctctattgggagaccctcattgtgatggcttccaaaataaggaatgggacctttttgttgaacgcagcaaagcctacagcaactgttacccttatgatgtgccggattatgcctcccttaggtcactagttgcctcatccggcaccctggagtttaacaatgaaagcttcaattggactggagtcgctcagaatggaacaagctttgcttgcaaaaggagatctattaaaagtttctttagtagattgaattggttgcaccaattaaaatacaaatatccagcactgaacgtgactatgccaaacaatgacaaatttgacaaattgtacatttggggggttcaccacccgagtacggacagtgaccaaaccagcctatatgctcaagcatcagggagagtcacagtctctaccaaaagaagccaacaaactgtaatcccgaatatcggatctagaccctgggtaaggggtgtttccagcagaataagcatctattggacaatagtgaaaccgggagacatacttctgattaacagcacagggaatctaattgctcctcggggttacttcaaaatacgaagtgggaaaagctcaataatgaagtcagatgcacccattggcaaatgcaattctgaatgcatcactccaaatggaagcattcccaatgacaaaccatttcaaaatgtaaacaggatcacatatggggcctgtcccagatatgttaagcaaaacactctgaaattggcaacagggatgcggaatgtaccagagaaacaaactagaggcatattcggcgcaatcgcaggtttcatagaaaatggttgggagggaatggtagacggttggtacggtttcaggcatcaaaattctgagggcacaggacaagcagcagatcttaaaagcactcaagcagcaatcaaccaaatcaacgggaaactgaataggttaatcgagaaaacgaacgagaaattccatcaaattgaaaaagaattcacagaagtagaagggagaattcaggacctcgagaaatatgttgaggacactaaaatagatctctggtcgtacaacgcggagcttcttgttgccctggagaaccaacatacaattgatctaactgactcagaaatgaacaaactgtttgaaagaacaaggaagcaactgagggaaaatgctgaggatatgggcaatggttgtttcaaaatataccacaaatgtgacaatgtctgcatagggtcaatcagaaatggaacttatgaccatgatgtatacagagacgaagcattaaacaaccggttccagatcaaaggtgttgagctgaagtcaggatacaaagattggatcctatggatttcctttgccacatcatgttttttgctttgtgttgttttgctggggttcatcatgtgggcctgccaaaaaggcaacattaggtgcaacatttgcatttga

SEQ ID NO: 30693 - RNA, 1701 nt, synthetic construct; identical to SEQ ID NO: 30687
  misc_feature 1..1701: note = hemagglutinin__InfluenzaA__AAY64312
  source 1..1701: mol_type = other RNA

SEQ ID NO: 30694 - RNA, 1701 nt, synthetic construct
  misc_feature 1..1701: note = hemagglutinin__InfluenzaA__AAY64322
  source 1..1701: mol_type = other RNA
atgaagactatcattgctttgagctacattttatgtctggttttcgctcaaaaacttcccggaaatgacaacagcacggcaacgctgtgcctggggcaccatgcagtgccaaacggaacgctagtgaaaacaatcacgaatgaccaaattgaagtgactaatgctactgagctggttcagagttcctcaacaggtagaatatgcgacagtcctcaccaaatccttgatggagaaaactgcacactaatagatgctctattgggagaccctcattgtgatggcttccaaaataaggaatgggacctttttgttgaacgcagcaaagcctacagcaactgttacccttatgatgtgccggattatgcctcccttaggtcactagttgcctcatccggcacactggagtttaacaatgaaagcttcaattggactggagtcgctcagaatggaacaagctctgcttgcaaaaggagatctaataaaagtttctttagtagattgaattggttgcaccaattaaaatacaaatatccagcactgaacgtgactatgccaaacaatgaaaaatttgacaaattgtacatttggggggttcaccacccgagtacggacagtgaccaaatcagcctatatgctcaagcatcagggagagtcacagtctctaccaaaagaagccaacaaactgtaatcccgaatatcggatctagaccctgggtaaggggtgtctccagcagaataagcatctattggacaatagtaaaaccgggagacatacttttgattaacagcacagggaatctaattgctcctcggggttacttcaaaatacgaagtgggaaaagctcaataatgaggtcagatgcacccattggcaaatgcaattctgaatgcatcactccaaatggaagcattcccaatgacaaaccatttcaaaatgtaaacaggatcacatatggggcctgtcccagatatgttaagcaaaacactctgaaattggcaacagggatgcggaatgtaccagagaaacaaactagaggcatattcggcgcaatcgcgggtttcatagaaaatggttgggagggaatggtggacggttggtacggtttcaggcatcaaaattctgagggcacaggacaagcagcagatcttaaaagcactcaagcagcaatcaaccaaatcaacgggaaactgaataggttaatcgagaaaacgaacgagaaattccatcaaattgaaaaagaattctcagaagtagaagggagaattcaggacctcgagaaatatgttgaggacactaaaatagatctctggtcgtacaacgcggagcttcttgttgccctggagaaccaacatacaattgatctaactgactcagaaatgaacaaactgtttgaaagaacaaagaagcaactgagggaaaatgctgaggatatgggcaatggttgtttcaaaatataccacaaatgtgacaatgcctgcatagggtcaatcagaaatggaacttatgaccatgatgtatacagagacgaagcattaaacaaccggttccagatcaaaggtgttgagctgaagtcaggatacaaagattggatcctatggatttcctttgccatatcatgttttttgctttgtgttgttttgctggggttcatcatgtgggcctgccaaaaaggcaacattaggtgcaacatttgcatttga

SEQ ID NO: 30695 - RNA, 1701 nt, synthetic construct
  misc_feature 1..1701: note = hemagglutinin__InfluenzaA__AAY64332
  source 1..1701: mol_type = other RNA
atgaagactatcattgctttgagctacattctatgtctggttttcactcaaaaacttcccggaaatgacaacagcacggcaacgctgtgccttgggcaccatgcagtaccaaacggaacgatagtgaaaacaatcacgaatgaccaaattgaagttactaatgctactgagctggttcagagttcctcaacaggtggaatatgcgacagtcctcatcagatccttgatggagaaaactgcacactaatagatgctctattgggagaccctcagtgtgatggcttccaaaataagaaatgggacctttttgttgaacgcagcaaagcctacagcaactgttacccttatgatgtgccggattatgcctcccttaggtcactagttgcctcatccggcacactggagtttaacaatgaaagcttcgattggactggagtcactcagaatggaacaagctctgcttgcaaaaggagatctaataaaagtttctttagtagattgaattggttgacccacttaaaattcaaatacccagcattgaacgtgactatgccaaacaatgaaaaatttgacaaattgtacatttggggggttcaccacccgggtacggacagtgaccaaatcagcctatatgctcaagcatcaggaagaatcacagtctctaccaaaagaagccaacaaactgtaatcccgaatatcggatctagacccagggtaagggatgtctccagccgaataagcatctattggacaatagtaaaaccgggagacatacttttgattaacagcacagggaatctaattgctcctcggggttacttcaaaatacgaagtgggaaaagctcaataatgagatcagatgcacccattggcaaatgcaattctgaatgcatcactccaaatggaagcattcccaatgacaaaccatttcaaaatgtaaacaggatcacatatggggcctgtcccagatatgttaagcaaaacactctgaaattggcaacagggatgcgaaatgtaccagagaaacaaactagaggcatatttggcgcaatcgcgggtttcatagaaaatggttgggagggaatggtggacggttggtacggtttcaggcatcaaaattctgagggcacaggacaagcagcagatctcaaaagcactcaagcagcaatcaaccaaatcaatgggaaactgaataggttaatcgggaaaacaaacgagaaattccatcagattgaaaaagaattctcagaagtagaagggagaattcaggacctcgagaaatatgttgaggacactaaaatagatctctggtcatacaacgcggagcttcttgttgccctggagaaccaacatacaattgatctaactgactcagaaatgaacaaactgtttgaaagaacaaagaagcaactgagggaaaatgctgaggatatgggcaatggttgtttcaaaatataccacaaatgtgacaatgcctgcatagggtcaatcagaaatggaacttatgaccatgatgtgtacagagatgaagcattaaacaaccggttccagatcaaaggtgttgagctgaagtcaggatacaaagattggatcctatggatttcctttgccatatcatgttttttgctttgtgttgctttgttggggttcatcatgtgggcctgccaaaaaggcaacattaggtgcgacatttgcatttga

SEQ ID NO: 30696 - RNA, 1701 nt, synthetic construct
  misc_feature 1..1701: note = hemagglutinin__InfluenzaA__AAY64342
  source 1..1701: mol_type = other RNA
atgaagactatcattgctttgagctacattttatgtctggttttcgctcaaaaacttcccggaaatgacaacagcacggcaacgctgtgcctggggcaccatgcagtgccaaacggaacgctagtgaaaacaatcacgaatgaccaaattgaagtgactaatgctactgagctggttcagagttcctcaacaggtagaatatgcgacagtcctcaccaaatccttgatggagaaaactgcacactaatagatgctctattgggagaccctcattgtgatggcttccaaaataaggaatgggacctttttgttgaacgcagcaaagcctacagcaactgttacccttatgatgtgccggattatgcctcccttaggtcactagttgcctcatccggcacactggagtttaacaatgaaagcttcaattggactggagtcgctcagaatggaacaagctctgcttgcaaaaggagatctaataaaagtttctttagtagattgaattggttgcaccaattaaaatacaaatatccagcactgaacgtgactatgccaaacaatgaaaaatttgacaaattgtacatttggggggttcaccacccgagtacggacagtgaccaaatcagcctatatgctcaagcatcagggagagtcacagtctctaccaaaagaagccaacaaactgtaatcccgaatatcggatctagaccctgggtaaggggtgtctccagcagaataagcatctattggacaatagtaaaaccgggagacatacttttgattaacagcacagggaatctaattgctcctcggggttacttcaaaatacgaagtgggaaaagctcaataatgaggtcagatgcacccattggcaaatgcaattctgaatgcatcactccaaatggaagcattcccaatgacaaaccatttcaaaatgtaaacaggatcacatatggggcctgtcccagatatgttaagcaaaacactctgaaattggcaacagggatgcggaatgtaccagagaaacaaactagaggcatattcggcgcaatcgcgggtttcatagaaaatggttgggagggaatggtggacggttggtacggtttcaggcatcaaaattctgaaggcacaggacaagcagcagatcttaaaagcactcaagcagcaatcaaccaaatcaacgggaaactgaataggttaatcgagaaaacgaacgagaaattccatcaaattgaaaaagaattctcagaagtagaagggagaattcaggacctcgagaaatatgttgaggacactaaaatagatctctggtcgtacaacgcggagcttcttgttgccctggagaaccaacatacaattgatctaactgactcagaaatgaacaaactgtttgaaagaacaaagaagcaactgagggaaaatgctgaggatatgggcaatggttgtttcaaaatataccacaaatgtgacaatgcctgcatagggtcaatcagaaatggaacttatgaccatgatgtatacagagacgaagcattaaacaaccggttccagatcaaaggtgttgagctgaagtcaggatacaaagattggatcctatggatttcctttgccacatcatgttttttgctttgtgttgttttgctggggttcatcatgtgggcctgccaaaaaggcaacattaggtgcaacatttgcatttga

SEQ ID NO: 30697 - RNA, 1701 nt, synthetic construct
  misc_feature 1..1701: note = hemagglutinin__InfluenzaA__AAY64352
  source 1..1701: mol_type = other RNA
atgaagactatcattgctttgagctacattctatgtctggttttcgctcaaaaacttcccggaaatgacaacagcacggcaacgctgtgccttgggcaccatgcagtaccaaacggaacgatagtgaaaacaatcacgaatgaccaaattgaagttactaatgctactgagctggtacagagttcctcaacaggtggaatatgcgacagtcctcatcagatccttgatggagaaaactgcacactaatagatgctctattgggagaccctcagtgtgatggcttccaaaataagaaatgggacctttttgttgaacgcagcaaagcctacagcaactgttacccttatgatgtgccggattatgcctcccttaggtcactagttgcctcatccggcacactggagtttaacaatgaaagcttcgattggactggagtcactcagaatggaacaagctctgcttgcaaaaggagatctaataaaagtttctttagtagattgaattggttgacccacttaaaatacaaatacccagcattgaacgtgactatgccaaacaatgaaaaatttgacaaattgtacatttggggggttcaccacccgggtacggacagtgaccaaatcagcctatatgctcaagcatcaggaagaatcacagtctctaccaaaagaagccaacaaactgtaatcccgaatatcggatctagacccagggtaagggatgtctccagccgaataagcatctattggacaatagtaaaaccgggagacatacttttgattaacagcacagggaatctaattgctcctcggggttacttcaaaatacgaagtgggaaaagctcaataatgagatcagatgcacccattggcaaatgcaattccgaatgcatcactccaaatggaagcattcccaatgacaaaccatttcaaaatgtaaacaggatcacatatggggcctgtcccagatatgttaagcaaaacactctgaaattggcaacagggatgcgaaatgtaccagagaaacaaactagaggcatatttggcgcaatcgcgggtttcatagaaaatggttgggagggaatggtggacggttggtacggtttcaggcatcaaaattctgagggcacaggacaagcagcagatctcaaaagcactcaagcagcaatcaaccaaatcaatgggaaactgaataggttaatcgggaaaacaaacgagaaattccatcagattgaaaaagaattctcagaagtagaagggagaattcaggacctcgagaaatatgttgaggacactaaaatagatctctggtcatacaacgcggagcttcttgttgccctggagaaccaacatacaattgatctaactgactcagaaatgaacaaactgtttgaaagaacaaagaagcaactgagggaaaatgctgaggatatgggcaatggttgtttcaaaatataccacaaatgtgacaatgcctgcatagggtcaatcagaaatggaacttatgaccatgatgtgtacagagatgaagcattaaacaaccggttccagatcaaaggtgttgagctgaagtcaggatacaaagattggatcctatggatttcctttgccatatcatgttttttgctttgtgttgctttgttggggttcatcatgtgggcctgccaaaaaggcaacattaggtgcaacatttgcatttga

SEQ ID NO: 30698 - RNA, 1701 nt, synthetic construct
  misc_feature 1..1701: note = hemagglutinin__InfluenzaA__AAY64362
  source 1..1701: mol_type = other RNA
atgaagactatcattgctttgagctacattctatgtctggttttcgctcaaaaacttcccggaaatgacaacagcacggcaacgctgtgccttgggcaccatgcagtaccaaacggaacgatagtgaaaacaatcacgaatgaccaaattgaagttactaatgctactgagctggtacagagttcctcaacaggtgaaatatgcgacagtcctcatcagatccttgatggagaaaactgcacactaatagatgctctattgggagaccctcagtgtgatggcttccaaaataagaaatgggacctttttgttgaacgcagcaaagcctacagcaactgttacccttatgatgtgccggattatgcctcccttaggtcactagttgcctcatccggcacactagagtttaacaatgaaagcttcgattggactggagtcactcagaatggaacaagctctgcttgcaaaaggagatctaataaaagtttctttagtagattgaattggttgacccacttaaaatacaaatacccagcattgaacgtgactatgccaaacaatgaaaaatttgacaaattgtacatttggggggttcaccacccgggtacggacagtgaccaaatcagcctatatgctcaagcatcaggaagaatcacagtctctaccaaaagaagccaacaaactgtaatcccgaatatcggatctagacccagggtaagggatatctccagccgaataagcatctattggacaatagtaaaaccgggagacatacttttgattaatagcacagggaatctaattgctcctcggggttacttcaaaatacgaagtgggaaaagctcaataatgagatcagatgcacccattggcaaatgcaattctgaatgcatcactccaaatggaagcattcccaatgacaaaccatttcaaaatgtaaacaggatcacatatggggcctgtcccagatatattaagcaaaacactctgaaattggcaacagggatgcgaaatgtaccagagaaacaaactagaggcatatttggcgcaatcgcgggtttcatagaaaatggttgggagggaatggtggacggttggtacggtttcaggcatcaaaattctgagggcacaggacaagcagcagatctcaaaagcactcaagcagcaatcaaccaaatcaatgggaaactgaataggttaatcgggaaaacaaacgagaaattccatcagattgaaaaagaattctcagaagtagaagggagaattcaggacctcgagaaatatgttgaggacactaaaatagatctctggtcatacaacgcggagcttcttgttgccctggagaaccaacatacaattgatctaactgactcagaaatgaacaaactgtttgaaagaacaaagaagcaactgagggaaaatgctgaggatatgggcaatggttgtttcaaaatataccacaaatgtgacaatgcctgcatagggtcaatcagaaatggaacttatgaccatgatgtgtacagagatgaagcattaaacaaccggttccagatcaaaggtgttgagctgaagtcaggatacaaagattggatcctatggatttcctttgccatatcatgttttttgctttgtgttgctttgttggggttcatcatgtgggcctgccaaaaaggcaacattaggtgcaacatttgcatttga

SEQ ID NO: 30699 - RNA, 1701 nt, synthetic construct
  misc_feature 1..1701: note = hemagglutinin__InfluenzaA__AAY64382
  source 1..1701: mol_type = other RNA
atgaagactatcattgctttgagctacattttatgtctggttttcgctcaaaaacttcccggaaatgacaacagcacggcaacgctgtgcctggggcaccatgcagtgccaaacggaacgctagtgaaaacaatcacgaatgaccaaattgaagtgactaatgctactgagctggttcagagttcctcaacaggtagaatatgcgacagtcctcaccaaatccttgatggagaaaactgcacactaatagatgctctattgggagaccctcattgtgatggcttccaaaataaggaatgggacctttttgttgaacgcagcaaagcctacagcaactgttacccttatgatgtgccggattatgcctcccttaggtcactagttgcctcatccggcacactggagtttaacaatgaaagcttcaattggactggagtcgctcagaatggaacaagctctgcttgcaaaaggagatctaataaaagtttctttagtagattgaattggttgcaccaattaaaatacaaatatccagcactgaacgtgactatgccaaacaatgaaaaatttgacaaattgtacatttggggggttcaccacccgagtacggacagtgaccaaatcagcctatatgctcaagcatcagggagagtcacagtctctaccaaaagaagccaacaaactgtaatcccgaatatcggatctagaccctgggtaaggggtgtctccagcagaataagcatctattggacaatagtgaaaccgggagacatacttttgattaacagcacagggaatctaattgctcctcggggttacttcaaaatacgaagtgggaaaagctcaataatgaggtcagatgcacccattggcaaatgcaattctgaatgcatcactccaaatggaagcattcccaatgacaaaccatttcaaaatgtaaacaggatcacatatggggcctgtcccagatatgttaagcaaaacactctgaaattggcaacaggaatgcggaatgtaccagagaaacaaactagaggcatattcggcgcaatcgcgggtttcatagaaaatggttgggagggaatggtggacggttggtacggtttcaggcatcaaaattctgagggcacaggacaagcagcagatcttaaaagcactcaagcagcaatcaaccaaatcaacgggaaactgaataggttaatcgagaaaacgaacgagaaattccatcaaattgaaaaagaattctcagaagtagaagggagaattcaggacctcgagaaatatgttgaggacactaaaatagatctctggtcgtacaacgcggagcttcttgttgccctggagaaccaacatacaattgatctaactgactcagaaatgaacaaactgtttgaaagaacaaagaagcaactgagggaaaatgctgaggatatgggcaatggttgtttcaaaatataccacaaatgtgacaatgcctgcatagggtcaatcagaaatggaacttatgaccatgatgtatacagagacgaagcattaaacaaccggttccagatcaaaggtgttgagctgaagtcaggatacaaagattggatcctatggatttcctttgccatatcatgttttttgctttgtgttgttttgctggggttcatcatgtgggcctgccaaaaaggcaacattaggtgcaacatttgcatttga

SEQ ID NO: 30700 - RNA, 1701 nt, synthetic construct
  misc_feature 1..1701: note = hemagglutinin__InfluenzaA__AAY64392
  source 1..1701: mol_type = other RNA
atgaagactatcattgctttgagctacattctatgtctggttttcgctcaaaaacttcccggaaatgacaacagcacggcaacgctgtgccttgggcaccatgcagtaccaaacggaacgatagtgaaaacaatcacgaatgaccaaattgaagttactaatgctactgagctggttcagagttcctcaacaggtggaatatgcgacagtcctcatcagatccttgatggagaaaactgcacactaatagatgctctattgggagaccctcagtgtgatggcttccaaaataagaaatgggacctttttgttgaacgcagcaaagcctacagcaactgttacccttatgatgtgccggattatgcctcccttaggtcactagttgcctcatccggcacactggagtttaacaatgaaagcttcaattggactggagtcactcagaatggaacaagctctgcttgcaaaaggagatctaataaaagtttctttagcagattgaattggttgacccacttaaaatacaaatacccagcattgaacgtgactatgccaaacaatgaaaaatttgacaaattgtacatttggggggttcaccacccgggtacggacaatgaccaaatcagcctatatgctcaagcatcaggaagaatcacagtctctaccaaaagaagccaacaaactgtaatcccgaatatcggatctagacccagggtaagggatgtctccagcagaataagcatctattggacaatagtaaaaccgggagacatacttttgattaacagcacagggaatctaattgctcctcggggttacttcaaaatacgaagtgggaaaagctcaataatgagatcagatgcacccattggcaaatgcaattctgaatgcatcactccaaatggaagcattcccaatgacaaaccatttcaaaatgtaaacaggatcacatatggggcctgtcccagatatgttaagcaaaacactctgaaattggcaacagggatgcgaaatgtaccagagaaacaaactagaggcatatttggcgctatcgcgggtttcatagaaaatggttgggagggaatggtggacggttggtacggtttcaggcatcaaaattctgagggcacaggacaagcagcagatctcaaaagcactcaagcagcaatcaaccaaatcaatgggaaactgaataggttgatcgggaaaacaaacgagaaattccatcagattgaaaaagaattctcagaagtagaagggagaattcaggacctcgagaaatatgttgaggacactaaaatagatctctggtcatacaacgcggagcttcttgttgccctggagaaccaacatacaattgatctaactgactcagaaatgaacaaactgtttgaaagaacaaagaagcaactgagggaaaatgctgaggatatgggcaatggttgtttcaaaatataccacaaatgtgacaatgcctgcatagggtcaatcagaaatggaacttatgaccatgatgtatacagagatgaagcattaaacaaccggttccagatcaaaggtgttgagctgaagtcaggatacaaagattggatcctatggatttcctttgccatatcatgttttttgctttgtgttgctttgttggggttcatcatgtgggcctgccaaaaaggcaacattaggtgcaacatctgcatttga

SEQ ID NO: 30701 - RNA, 1701 nt, synthetic construct; identical to SEQ ID NO: 30692
  misc_feature 1..1701: note = hemagglutinin__InfluenzaA__AAY64402
  source 1..1701: mol_type = other RNA

SEQ ID NO: 30702 - RNA, 1701 nt, synthetic construct
  misc_feature 1..1701: note = hemagglutinin__InfluenzaA__AAY98037
  source 1..1701: mol_type = other RNA
atgaagactatcattgctttgagctacattttatgtctggttttcgctcaaaaacttcccggaaatgacaacagcacggcaacgctgtgcctggggcaccatgcagtgccaaacggaacgctagtgaaaacaatcacgaatgaccaaattgaagtgactaatgctactgagctggttcagagttcctcaacaggtagaatatgcgacagtcctcaccaaatccttgatggagaaaactgcacactaatagatgctctattgggagaccctcattgtgatggcttccaaaataaggaatgggacctttttgttgaacgcagcaaagcctacagcaactgttacccttatgatgtgccggattatgcctcccttaggtcactagttgcctcatccggcacactggagtttaacaatgaaagcttcaattggactggagtcgctcagaatggaacaagctctgcttgcaaaaggagatctaataaaagtttctttagtagattgaattggttgcaccaattaaaatacaaatatccagcactgaacgtgactatgccaaacaatgaaaaatttgacaaattgtacatttggggggttcaccacccgagtacggacagtgaccaaatcagcctatatgctcaagcatcagggagagtcacagtctctaccaaaagaagccaacaaactgtaatcccgaatatcggatctagaccctgggtaaggggtgtctccagcagaataagcatctattggacaatagtaaaaccgggagacatacttttgattaacagcacagggaatctaattgctcctcggggttacttcaaaatacgaagtgggaaaagctcaataatgaggtcagatgcacccattggcaaatgcaattctgaatgcatcactccaaatggaagcattcccaatgacaaaccatttcaaaatgtaaacaggatcacatatggggcctgtcccagatatgttaagcaaaacactctgaaattggcaacagggatgcggaatgtaccagagaaacaaactagaggcatattcggcgcaatcgcgggtttcatagaaaatggttgggagggaatggtggacggttggtacggtttcaggcatcaaaattctgagggcacaggacaagcagcagatcttaaaagcactcaagcagcaattaaccaaatcaacgggaaactgaataggttaatcgagaaaacgaacgagaaattccatcaaattgaaaaagaattctcagaagtagaagggagaattcaggacctcgagaaatatgttgaggacactaaaatagatctctggtcgtacaacgcggagcttcttgttgccctggagaaccaacatacaattgatctaactgactcagaaatgaacaaactgtttgaaagaacaaagaagcaactgagggaaaatgctgaggatatgggcaatggttgtttcaaaatataccacaaatgtgacaatgcctgcatagggtcaatcagaaatggaacttatgaccatgatgtatacagagacgaagcattaaacaaccggttccagatcaaaggtgttgagctgaagtcaggatacaaagattggatcctatggatttcctttgccatatcatgttttttgctttgtgttgttttgctggggttcatcatgtgggcctgccaaaaaggcaacattaggtgcaacatttgcatttga

SEQ ID NO: 30703 - RNA, 1701 nt, synthetic construct; identical to SEQ ID NO: 30694
  misc_feature 1..1701: note = hemagglutinin__InfluenzaA__AAY98047
  source 1..1701: mol_type = other RNA

SEQ ID NO: 30704 - RNA, 1701 nt, synthetic construct; identical to SEQ ID NO: 30551
  misc_feature 1..1701: note = hemagglutinin__InfluenzaA__AAY98057
  source 1..1701: mol_type = other RNA

SEQ ID NO: 30705 - RNA, 1701 nt, synthetic construct
  misc_feature 1..1701: note = hemagglutinin__InfluenzaA__AAY98067
  source 1..1701: mol_type = other RNA
atgaagactatcattgctttgagctacattttatgtctggttttcgctcaagaacttcccggaaatgacaacagcacggcaacgctgtgcctggggcaccatgcagtgccaaacggaacgctagtgaaaacaatcacgaatgaccaaattgaagtgactaatgctactgagctggttcagagttcctcaacaggtagaatatgcgacagtcctcaccaaatccttgatggagaaaactgcacactaatagatgctctattgggagaccctcattgtgatggcttccaaaataaggaatgggacctttttgttgaacgcagcaaagcctacagcaactgttacccttatgatgtgccggattatgtctcccttaggtcactagttgcctcatcaggcacgctggagtttaacaatgaaagcttcaattggactggagtcgctcagaatggaacaagctctgcttgcaaaaggagatctgataaaagtttctttagtagattgaattggttgcaccaattaaaatacaaatatccagcactgaacgtgactatgccaaacaatgaaaaatttgacaaattgtacatttggggggttcaccacccgggtacagacagtgaccaaatcagcctatatgctcaagcatcagggagagtcacagtctctaccaaaagaagccaacaaactgtaatcccgaatatcggatctggaccctgggtaaggggtgtctccagcagaataagcatctattggacaatagtaaaaccgggagacatacttttgattaacagcacagggaatctaattgctcctcggggttacttcaaaatacgaagtgggaaaagctcaataatgaggtcagatgcacccattggcaaatgcaattctgaatgcatcactccaaatggaagcattcccaatgacaaaccatttcaaaatgtaaacaggatcacatatgggccctgtcccagatatgttaagcaaaacactctgaaattggcaacagggatgcggaatgtgccagagaaacaaactagaggcatattcggtgcaatcgcgggcttcatagaaaatggttgggagggaatgatggacggttggtacggtttcaggcatcaaaattctgagggcacagggcaagcagcagatcttaaaagcactcaagcagcaatcaaccaaatcaacgggaaactgaataggttaatcgaaaaaacgaacgagaaattccatcaaattgaaaaagaattctcagaagtagaagggagaattcaggacctcgagaaatatgttgaggacactaaaatagatctctggtcgtacaatgcggagcttcttgttgccctggagaaccaacatacaattgatctaactgactcagaaatgaacaaactgtttgaaagaacaaagaagcaactgagggaaaatgctgaggatatgggcaatggttgtttcaaaatataccacaaatgtgacaatgcctgcatagggtcaatcagaaatggaacttatgaccatgatgtatacagagacgaagcattgaacaaccggttccagatcaaaggtgttgagctgaagtcaggatacaaagattggatcctatggatttcctttgccatatcatgttttttgctttgtattgttttgctggggttcatcatgtgggcctgccaaaaaggcaacattaggtgcaacatttgcatttga

SEQ ID NO: 30706 - RNA, 1701 nt, synthetic construct
  misc_feature 1..1701: note = hemagglutinin__InfluenzaA__AAY98077
  source 1..1701: mol_type = other RNA
atgaagactatcattgctctgagctacattttatgcctggttttcgctcaaaaacttcccggaaatgacaacagcacggcaacgctgtgcctggggcaccatgcagtgccaaacggaacgctagtgaaaacaatcacgaatgaccaaattgaagtaactaatgctactgagctggttcagagttcctcagcaagtagaatatgcgacagtcctcaccaaatccttgatggagaaaactgcacactaatagatgctctattgggagaccctcattgtgatggcttccaaaataaggaatgggacctttttgttgaacgcagcaaagcctacagcaactgttacccttatgatgtgccggattatgtctcccttaggtcactagttgcctcatcaggcacgctggagtttaacaatgaaagcttcaattggactggagtcgctcagaatggaacaagctctgcttgcaaaaggagatctgataaaagtttctttagtagattgaattggttgcaccaattaaaatacaaatatccagcactgaacgtgactatgccaaacaatgaaaaatttgacaaattgtacatttggggggttcaccacccgggtacagacagtgaccaaatcagcctatatgctcaagcatcagggagagtcacagtctctaccaaaagaagccaacaaactgtaatcccgaatatcggatctagaccctgggtaaggggtgtctccagcagaataagcatctattggacaatagtaaaaccgggagacatacttttgattaacagcacagggaatctaattgctcctcggggttacttcaaaatacgaagtgggaaaagctcaataatgaggtcagatgcacccattggcaaatgcaattctgaatgcatcactccaaatggaagcattcccaatgacaaaccatttcaaaatgtaaacaggatcacatatggggcctgtcccagatatgttaagcaaaacactctgaaattggcaacagggatgcggaatgtaccagagaaacaaactagaggcatattcggtgcaatcgcgggcttcatagaaaatggttgggagggaatgatggacggttggtacggtttcaggcatcaaaattctgagggcacagggcaagcagcagatcttaaaagcactcaagcagcaatcaaccaaatcaacgggaaactgaataggttaattgagaaaacgaacgagaaattccatcaaattgaaaaagaattctcagaagtagaagggagaattcaggacctcgagaaatatgttgaggacactaaaatagatctctggtcgtacaatgcggagcttcttgttgccctggagaatcaacatacaattgatctaactgactcagaaatgaacaaactgtttgaaagaacaaagaagcaactgagggaaaatgctgaggatatgggcaacggttgtttcaaaatataccacaaatgtgacaatgcctgcatagggtcaatcagaaatggaacttatgaccatgatgtatacagagacgaagcattgaacaaccggttccagatcaaaggtgttgagctgaagtcaggatacaaagattggatcctatggatttcctttgccatatcatgttttttgctttgtattgttttgctggggttcatcatgtgggcctgccaaaaaggcaacattaggtgcaacatttgcatttga

SEQ ID NO: 30707 - RNA, 1701 nt, synthetic construct
  misc_feature 1..1701: note = hemagglutinin__InfluenzaA__AAY98087
  source 1..1701: mol_type = other RNA
atgaagactatcattgctttgagctacattttatgtctggttttcgctcaaaaacttcccggaaatgacaacagcacggcaacgctgtgcctgggacaccatgcagtgccaaacggaacgctagtgaaaacaatcacgaatgaccaaattgaagtgactaatgctactgagctggttcagagttcctcaacaggtagaatatgcgacagtcctcaccgaatccttgatggagaaaactgcacactgatagatgctctattgggagaccctcattgtgatggcttccaaaataaggaatgggacctttttgttgaacgcagcaaagcctacagcaactgttacccttatgatgtgccggattatgcctcccttaggtcactagttgcctcatccggcaccctggagtttaacaatgaaagcttcaattggactggagtcgctcagaatggaacaagctctgcttgcaaaaggagatctattaaaagtttctttagtagattgaattggttgcaccaattaaaatacaaatatccagcactgaacgtgactatgccaaacaatgacaaatttgacaaattgtacatttggggggttcaccacccgagtacggacagtgaccaaaccagcctatatgctcaagcatcagggagagtcacagtctctaccaaaagaagccaacaaactgtaatcccgaatatcggatctagaccctgggtaaggggtgtctccagcagaataagcatctattggacaatagtaaaaccgggagacatacttttgattaacagcacagggaatctaattgctcctcggggttacttcaaaatacgaagtgggaaaagctcaataatgaggtcagatgcacccattggcaaatgcaattctgaatgcatcactccaaatggaagcattcccaatgacaaaccatttcaaaatgtaaacaggatcacatatggggcctgtcccagatatgttaagcaaaacactctgaaactggcaacagggatgcggaatgtaccagagaaacaaactagaggcatattcggcgcaatcgcgggtttcatagaaaatggttgggagggaatggtggacggttggtacggtttcaggcatcaaaattctgagggcacaggacaagcagcagatcttaaaagcactcaagcagcaatcaaccaaatcaacgggaaactgaataggttaatcgagaaaacgaacgagaaattccatcaaattgaaaaagaattctcagaagtagaagggagaattcaggacctcgagaaatatgttgaggacactaaaatagatctctggtcgtacaacgcggagcttcttgttgccctggagaaccaacatacaattgatctaactgactcagaaatgaacaaactgtttgaaagaacaaggaagcaactgagggaaaatgctgaggatatgggcaatggttgtttcaaaatataccacaaatgtgacaatgcctgcatagggtcaatcagaaatggaacttatgaccatgatgtatacagagacgaagcattaaacaaccggttccagatcaaaggtgttgagctgaagtcaggatacaaagattggatcctatggatttcctttgccatatcatgttttttgctttgtgttgttttgctggggttcatcatgtgggcctgccaaaaaggcaacattaggtgcaacatttgcatttga

SEQ ID NO: 30708 - RNA, 1701 nt, synthetic construct; identical to SEQ ID NO: 30702
  misc_feature 1..1701: note = hemagglutinin__InfluenzaA__AAY98097
  source 1..1701: mol_type = other RNA

SEQ ID NO: 30709 - RNA, 1701 nt, synthetic construct
  misc_feature 1..1701: note = hemagglutinin__InfluenzaA__AAY98107
  source 1..1701: mol_type = other RNA
atgaagactatcattgctttgagctacattttatgtctggttttcgctcaaaaacttcccggaaatgacaacagcacggcaacgctgtgcctggggcaccatgcagtgccaaacggaacgctagtgaaaacaatcacgaatgaccaaattgaagtgactaatgctactgagctggttcagagttcctcaacaggtagaatatgcgacagtcctcaccaaatccttgatggagaaaactgcacactaatagatgctctattgggagaccctcattgtgatggcttccaaaataaggaatgggacctttttgttgaacgcagcaaagcctacagcaactgttacccttatgatgtgccggattatgcctcccttaggtcactagttgcctcatccggcacactggagtttaacaatgaaagcttcaattggactggagtcgctcagaatggaacaagctctgcttgcaaaaggagatctaataaaagtttctttagtagattgaattggttgcaccaattaaaatacaaatatccagcactgaacgtgactatgccaaacaatgaaaaatttgacaaattgtacatttggggggttcaccacccgagtacggacagtgaccaaatcagcctatatgctcaagcatcagggagagtcacagtctctaccaaaagaagccaacaaactgtaatcccgaatatcggatctagaccctgggtaaggggtgtctccagcagaataagcatctattggacaatagtaaaaccgggagacatacttttgattaacagcacagggaatctaattgctcctcggggttacttcaaaatacgaagtgggaaaagctcaataatgaggtcagatgcacccattggcaaatgcaattctgaatgcatcactccaaatggaagcattcccaatgacaaaccatttcaaaatgtaaacaggatcacatatggggcctgtcccagatatgttaagcaaaacactctgaaattggcaacagggatgcggaatgtaccagagaaacaaactagaggcatattcggcgcaatcgcgggtttcatagaaaatggttgggagggaatggtggacggttggtacggtttcaggcatcaaaactctgagggcacaggacaagcagcagatcttaaaagcactcaagcagcaatcaaccaaatcaacgggaaactgaataggttaatcgagaaaacgaacgagaaattccatcaaattgaaaaagaattctcagaagtagaagggagaattcaggacctcgagaaatatgttgaggacactaaaatagatctctggtcgtacaacgcggagcttcttgttgccctggagaaccaacatacaattgatctaactgactcagaaatgaacaaactgtttgaaagaacaaagaagcaactgagggaaaatgctgaggatatgggcaatggttgtttcaaaatataccacaaatgtgacaatgcctgcatagggtcaatcagaaatggaacttatgaccatgatgtatacagagacgaagcattaaacaaccggttccagatcaaaggtgttgagctgaagtcaggatacaaagattggatcctatggatttcctttgccatatcatgttttttgctttgtgttgttttgctggggttcatcatgtgggcctgccaaaaaggcaacattaggtgcaacatttgcatttga

SEQ ID NO: 30710 - RNA, 1701 nt, synthetic construct
  misc_feature 1..1701: note = hemagglutinin__InfluenzaA__AAY98117
  source 1..1701: mol_type = other RNA
atgaagactatcattgctttgagctacattttatgtctggttttcgctcaaaaacttcccggaaatgacaacagcacggcaacgctgtgcctggggcaccatgcagtgccaaacggaacgctagtgaaaacaatcacgaatgaccaaattgaagtgactaatgctactgagctggttcagagttcctcaacaggtagaatatgcgacagtcctcaccaaatccttgatggagaaaactgcacactaatagatgctctattgggagaccctcattgtgatggcttccaaaataaggaatgggacctttttgttgaacgcagcaaagcctacagcaactgttacccttatgatgtgccggattatgcctcccttaggtcactagttgcctcatccggcacactggagtttaacaatgaaagcttcaattggactggagtcgctcagaatggaacaagctctgcttgcaaaaggggatctaataaaagtttctttagtagattgaattggttgcaccaattaaaatacaaatatccagcactgaacgtgactatgccaaacaatgaaaaatttgaaaaattgtacatttggggggttcaccacccgagtacggacagtgaccaaatcagcctatatgctcaagcatcagggagagtcacagtctctaccaaaagaagccaacaaactgtaatcccgaatatcggatctagaccctgggtaaggggtgtctccagcagaataagcatctattggacaatagtaaaaccgggagacatacttttgattaacagcacagggaatctaattgctcctcggggttacttcaaaatacgaagtgggaaaagctcaataatgaggtcagatgcacccattggcaaatgcaattctgaatgcatcactccaaatggaagcattcccaatgacaaaccatttcaaaatgtaaacaggatcacatatggggcctgtcccagatatgttaagcaaaacactctgaaattggcaacagggatgcggaatgtaccagagaaacaaactagaggcatattcggcgcaatcgcgggtttcatagaaaatggttgggagggaatggtggacggttggtacggtttcaggcatcaaaattctgagggcacaggacaagcagcagatcttaaaagcactcaagcagcaatcaaccaaatcaacgggaaactgaataggttaatcgagaaaacgaacgagaaattccatcaaattgaaaaagaattctcagaagtagaagggagaattcaggacctcgagaaatatgttgaggacactaaaatagatctctggtcgtacaacgcggagcttcttgttgccctggagaaccaacatacaattgatctaactgactcagaaatgaacaaactgtttgaaagaacaaagaagcaactgagggaaaatgctgaggatatgggcaatggttgtttcaaaatataccacaaatgtgacaatgcctgcatagggtcaatcagaaatggaacttatgaccatgatgtatacagagacgaagcattaaacaaccggttccagatcaaaggtgttgagctgaagtcaggatacaaagattggatcctatggatttcctttgccatatcatgttttttgctttgtgttgttttgctggggttcatcatgtgggcctgccaaaaaggcaacattaggtgcaacatttgcatttga

SEQ ID NO: 30711 - RNA, 1701 nt, synthetic construct
  misc_feature 1..1701: note = hemagglutinin__InfluenzaA__AAY98147
  source 1..1701: mol_type = other RNA
atgaagactatcattgctttgagctacattttatgtctggttttcgctcaaaaacttcccggaaatgacaacagcacggcaacgctgtgcctggggcaccatgcagtgccaaacggaacgctagtgaaaacaatcacgaatgaccaaattgaagtgactaatgctactgagctggttcagagttcctcaacaggtagaatatgcgacagtcctcaccaaatccttgatggagaaaactgcacactaatagatgctctattgggagaccctcattgtgatggcttccaaaataaggaatgggacctttttgttgaacgcagcaaagcctacagcaactgttacccttatgatgtgccggattatgcctcccttaggtcactagttgcctcatccggcacactggagtttaacaatgaaagcttcaattggactggagtcgctcagaatggaacaagctctgcttgcaaaaggagatctaataaaagtttctttagtagattgaattggttgcaccaattaaaatacaaatatccagcactgaacgtgactatgccaaacaatgaaaaatttgacaaattgtacatttggggggttcaccacccgagtacggacagtgaccaaatcagcctatatgctcaagcatcagggagagtcacagtctctaccaaaagaagccaacaaactgtaatcccgaatatcggatctagaccctgggtaaggggtgtctccagcagaataagcatctattggacaatagtaaaaccgggagacatacttttgattaacagcacagggaatctaattgctcctcggggttacttcaaaatacgaagtgggaaaagctcaataatgaggtcagatgcacccattggcaaatgcaattctgaatgcatcactccaaatggaagcattcccaatgacaaaccatttcaaaatgtaaacaggatcacatatggggcctgtcccagatatgttaagcaaaacactctgaaattggcaacagggatgcggaatgtaccagagaaacaaactagaggcatattcggcgcaatcgcgggtttcatagaaaatggttgggagggaatggtggacggttggtacggtttcaggcatcaaaattctgagggcacaggacaagcagcagatcttaaaagcactcaagcagcaatcaaccaaatcaacgggaaactgaataggttaatcgagaaaacaaacgagaaattccatcaaattgaaaaagaattctcagaagtagaagggagaattcaggacctcgagaaatatgttgaggacactaaaatagatctctggtcgtacaacgcggagcttcttgttgccctggagaaccaacatacaattgatctaactgactcagaaatgaacaaactgtttgaaagaacaaagaagcaactgagggaaaatgctgaggatatgggcaatggttgtttcaaaatataccacaaatgtgacaatgcctgcatagggtcaatcagaaatggaacttatgaccatgatgtatacagagacgaagcattaaacaaccggttccagatcaaaggtgttgagctgaagtcaggatacaaagattggatcctatggatttcctttgccatatcatgttttttgctttgtgttgttttgctggggttcatcatgtgggcctgccaaaaaggcaacattaggtgcaacatttgcatttga

SEQ ID NO: 30712 - RNA, 1701 nt, synthetic construct; identical to SEQ ID NO: 30694
  misc_feature 1..1701: note = hemagglutinin__InfluenzaA__AAY98157
  source 1..1701: mol_type = other RNA

SEQ ID NO: 30713 - RNA, 1701 nt, synthetic construct
  misc_feature 1..1701: note = hemagglutinin__InfluenzaA__AAY98167
  source 1..1701: mol_type = other RNA
atgaagactatcattgctttgagctacattttatgtctggttttcgctcaaaaacttcccggaaatgacaacagcacggcaacgctgtgcctggggcaccatgcagtgccaaacggaacgctagtgaaaacaatcacgaatgaccaaattgaagtgactaatgctactgagctggttcagagttcctcaacaggtagaatatgcgacagtcctcaccaaatccttgatggagaaaactgcacactaatagatgctctattgggagaccctcattgtgatggcttccaaaataaggaatgggacctttttgttgaacgcagcaaagcctacagcaactgttacccttatgatgtgccggattatgcctcccttaggtcactagttgcctcatccggcacactggagttcaacaatgaaagcttcaattggactggagtcgctcagaatggaacaagctctgcttgcaaaaggagatctaataaaagtttctttagtagattgaattggttgcaccaattaaaatacaaatatccagcactgaacgtgactatgccaaacaatgaaaaatttgacaaattgtacatttggggggttcaccacccgagtacggacagtgaccaaatcagcctatatgctcaagcatcagggagagtcacagtctctacccaaagaagccaacaaactgtaatcccgaatatcggatctagaccctgggtaaggggtgtctccagcagaataagcatctattggacaatagtaaaaccgggagacatacttttgattaacagcacagggaatctaattgctcctcggggttacttcaaaatacgaagtgggaaaagctcaataatgaggtcagatgcacccattggcaaatgcaattctgaatgcatcactccaaatggaagcattcccaatgacaaaccatttcaaaatgtaaacaggatcacatatggggcctgtcccagatatgttaagcaaaacactctgaaattggcaacagggatgcggaatgtaccagagaaacaaactagaggcatattcggcgcaatcgcgggtttcatagaaaatggttgggagggaatggtggacggttggtacggtttcaggcatcaaaattctgagggcacaggacaagcagcagatcttaaaagcactcaagcagcaatcaaccaaatcaacgggaaactgaataggttaatcgagaaaacgaacgagaaattccatcaaattgaaaaagaattctcagaagtagaagggagaattcaggacctcgagaaatatgttgaggacactaaaatagatctctggtcgtacaacgcggagcttcttgttgccctggagaaccaacatacaattgatctaactgactcagaaatgaacaaactgtttgaaagaacaaagaagcaactgagggaaaatgctgaggatatgggcaatggttgtttcaaaatataccacaaatgtgacaatgcctgcatagggtcaatcagaaatggaacttatgaccatgatgtatacagagacgaagcattaaacaaccggttccagatcaaaggtgttgagctgaagtcaggatacaaagattggatcctatggatttcctttgccatatcatgttttttgctttgtgttgttttgctggggttcatcatgtgggcctgccaaaaaggcaacattaggtgcaacatttgcatttga

SEQ ID NO: 30714 - RNA, 1701 nt, synthetic construct
  misc_feature 1..1701: note = hemagglutinin__InfluenzaA__AAY98177
  source 1..1701: mol_type = other RNA
atgaagactatcattgctttgagctacattctatgtctggttttcgctcaaaaacttcccggaaatgacaacagcacggcaacgctgtgcctggggcaccatgcagtgccaaacggaacgctagtgaaaacaatcacgaatgaccaaattgaagtgactaatgctactgagctggttcagagttcctcaacaggtagaatatgcgacagtcctcaccaaatccttgatggagaaaactgcacactaatagatgctctattgggagaccctcattgtgatggcttccaaaataaggaatgggacctttttgttgaacgcagcaaagcctacagcaactgttacccttatgatgtgccggattatgcctcccttaggtcactagttgcctcatccggcacactggagtttaacaatgaaagcttcaattggactggagtcgctcagaatggaacaagctctgcttgcaaaaggagatctaataaaagtttctttagtagattgaattggttgcaccaattaaaatacaaatatccagcactgaacgtgactatgccaaacaatgaaaaatttgacaaattgtacatttggggggttcaccacccgagtacggacagtgaccaaatcagcctatatgctcaagcatcagggagagtcacagtctctaccaaaagaagccaacaaactgtaatcccgaatatcggatctagaccctgggtaaggggtgtctccagcagaataagcatctattggacaatagtaaaaccgggagacatacttttgattaacagcacagggaatctaattgctcctcggggttacttcaaaatacgaagtgggaaaagctcaataatgaggtcagatgcacccattggcaaatgcaattctgaatgcatcactccaaatggaagcattcccaatgacaaaccatttcaaaatgtaaacaggatcacatatggggcctgtcccagatatgttaagcaaaacactctgaaattggcaacagggatgcggaatgtaccagagaaacaaactagaggcatattcggcgcaatcgcgggtttcatagaaaatggttgggagggaatggtggacggttggtacggtttcaggcatcaaaattctgagggcacaggacaagcagcagatcttaaaagcactcaagcagcaatcaaccaaatcaacgggaaactgaataggttaatcgagaaaacgaacgagaaattccatcaaattgaaaaagaattctcagaagtagaagggagaattcaggacctcgagaaatatgttgaggacactaaaatagatctctggtcgtacaacgcggggcttcttgttgccctggagaaccaacatacaattgatctaactgactcagaaatgaacaaactgtttgaaagaacaaagaagcaactgagggaaaatgctgaggatatgggcaatggttgtttcaaaatataccacaaatgtgacaatgcctgcatagggtcaatcagaaatggaacttatgaccatgatgtatacagagacgaagcattaaacaaccggttccagatcaaaggtgttgagctgaagtcaggatacaaagattggatcctatggatttcctttgccatatcatgttttttgctttgtgttgttttgctggggttcatcatgtgggcctgccaaaaaggcaacattaggtgcaacatttgcatttga

SEQ ID NO: 30715 - RNA, 1701 nt, synthetic construct
  misc_feature 1..1701: note = hemagglutinin__InfluenzaA__AAY98195
  source 1..1701: mol_type = other RNA
atgaagactatcattgctttgagctacattttatgtctggttttcgctcaaaaacttcccggaaatgacaacagcacggcaacgctgtgcctggggcaccatgcagtgccaaacggaacgctagtgaaaacaatcacgaatgaccaaattgaagtgactaatgctactgagctggttcagagttcctcaacaggtagaatatgcgacagtcctcaccaaatccttgatggagaaaactgcacactaatagatgctctattgggagaccctcattgtgatggcttccaaaataaggaatgggacctttttgttgaacgcagcaaagcctacagcaactgttacccttatgatgtgccggattatgcctcccttaggtcactagttgcctcatccggcacactggagtttaacaatgaaagcttcaattggactggagtcgctcagaatggaacaagctctgcttgcaaaaggagatctaataaaagtttctttagtagattgaattggttgcaccaattaaaatacaaatatccagcactgaacgtgactatgccaaacaatgaaaaatttgacaaattgtacatttggggggttcaccacccgagtacggacagtgaccaaatcagcctatatgctcaagcatcagggagagtcacagtctctaccaaaagaagccaacaaactgtaatcccgaatatcggatctagaccctgggtaaggggtgtctccagcagaataagcatctattggacaatagtaaaaccgggagacatacttttgattaacagcacagggaatctaattgctcctcggggttacttcaaaatacgaagtgggaaaagctcaataatgaggtcagatgcacccattggcaaatgcaattctgaatgcatcactccaaatggaagcattcccaatgacaaaccatttcaaaatgtaaacaggatcacatatggggcctgtcccagatatgttaagcaaaacactctgaaattggcaacagggatgcggaatgtaccagagaaacaaactagaggcatattcggcgcaatcgcgggtttcatagaaaatggttgggagggaatggtggacggttggtacggtttcaggcatcaaaattctgagggcacaggacaagcagcagatcttaaaagcactcaagcagcaatcaaccaaatcaacgggaaactgaataggttaatcgagaaaacgaacgagaaattccatcaaattgaaaaagaattctcagaagtagaagggagaattcaggacctcgagaaatatgttgaggacactaaaatagatctctggtcgtacaacgcggagcttcttgttgccctggagaaccaacatacaattgatctaactgactcagaaatgaacaaactgtttgaaagaacaaggaagcaactgagggaaaatgctgaggatatgggcaatggttgtttcaaaatataccacaaatgtgacaatgcctgcatagggtcaatcagaaatggaacttatgaccatgatgtatacagagacgaagcattaaacaaccggttccagatcaaaggtgttgagctgaagtcaggatacaaagattggatcctatggatttcctttgccatatcatgttttttgctttgtgttgttttgctggggttcatcatgtgggcctgccaaaaaggcaacattaggtgcaacatttgcatttga

SEQ ID NO: 30716 - RNA, 1701 nt, synthetic construct
  misc_feature 1..1701: note = hemagglutinin__InfluenzaA__AAY98207
  source 1..1701: mol_type = other RNA
atgaagactatcattgctttgagctacattttatgtctggttttcgctcaaaaacttcccggaaatgacaacagcacggcaacgctgtgcctggggcaccatgcagtgccaaacggaacgctagtgaaaacaatcacgaatgaccaaattgaagtgactaatgctactgagctggttcagagttcctcaacaggtagaatatgcgacagtcctcaccaaatccttgatggagaaaactgcacactaatagatgctctattgggagaccctcattgtgatggcttccaaaataaggaatgggacctttttgttgaacgcagcaaagcctacagcaactgttacccttatgatgtgccggattatgcctcccttaggtcactagttgcctcatccggcacactggagttcaacaatgaaagcttcaattggactggagtcgctcagaatggaacaagctctgcttgcaaaaggagatctaataaaagtttctttagtagattgaattggttgcaccaattaaaatacaaatatccagcactgaacgtgactatgccaaacaatgaaaaatttgacaaattgtacatttggggggttcaccacccgagtacggacagtgaccaaatcagcctatatgctcaagcatcagggagagtcacagtctctaccaaaagaagccaacaaactgtaatcccgaatatcggatctagaccctgggtaaggggtgtctccagcagaataagcatctattggacaatagtaaaaccgggagacatacttttgattaacagcacagggaatctaattgctcctcggggttacttcaaaatacgaagtgggaaaagctcaataatgaggtcagatgcacccattggcaaatgcaattctgaatgcatcactccaaatggaagcattcccaatgacaaaccatttcaaaatgtaaacaggatcacatatggggcctgtcccagatatgttaagcaaaacactctgaaattggcaacagggatgcggaatgtaccagagaaacaaactagaggcatattcggcgcaatcgcgggtttcatagaaaatggttgggagggaatggtggacggttggtacggtttcaggcatcaaaattctgagggcacaggacaagcagcagatcttaaaagcactcaagcagcaatcaaccaaatcaacgggaaactgaataggttaatcgagaaaacgaacgagaaattccatcaaattgaaaaagaattctcagaagtagaagggagaattcaggacctcgagaaatatgttgaggacactaaaatagatctctggtcgtacaacgcggagcttcttgttgccctggagaaccaacatacaattgatctaactgactcagaaatgaacaaactgtttgaaagaacaaagaagcaactgagggaaaatgctgaggatatgggcaatggttgtttcaaaatataccacaaatgtgacaatgcctgcatagggtcaatcagaaatggaacttatgaccatgatgtatacagagacgaagcattaaacaaccggttccagatcaaaggtgttgagctgaagtcaggatacaaagattggatcctatggatttcctttgccatatcatgttttttgctttgtgttgttttgctggggttcatcatgtgggcctgccaaaaaggcaacattaggtgcaacatttgcatttga

SEQ ID NO: 30717 - RNA, 1701 nt, synthetic construct; identical to SEQ ID NO: 30692
  misc_feature 1..1701: note = hemagglutinin__InfluenzaA__AAY98217
  source 1..1701: mol_type = other RNA

SEQ ID NO: 30718 - RNA, 1701 nt, synthetic construct; identical to SEQ ID NO: 30709
  misc_feature 1..1701: note = hemagglutinin__InfluenzaA__AAY98227
  source 1..1701: mol_type = other RNA

SEQ ID NO: 30719 - RNA, 1701 nt, synthetic construct; identical to SEQ ID NO: 30694
  misc_feature 1..1701: note = hemagglutinin__InfluenzaA__AAY98237
  source 1..1701: mol_type = other RNA

SEQ ID NO: 30720 - RNA, 1701 nt, synthetic construct
  misc_feature 1..1701: note = hemagglutinin__InfluenzaA__AAY98247
  source 1..1701: mol_type = other RNA
atgaagactatcattgctttgagctacattttatgtctggttttcgctcaaaaacttcccggaaatgacaacagcacggcaacgctgtgcctggggcaccatgcagtgccaaacggaacgctagtgaaaacaatcacgaatgaccaaattgaagtgactaatgctactgagctggttcagagttcctcaacaggtagaatatgcgacagtcctcaccaaatccttgatggagaaaactgcacactaatagatgctctattgggagaccctcattgtgatggcttccaaaataaggaatgggacctttttgttgaacgcagcaaagcctacagcaactgttacccttatgatgtgccggattatgcctcccttaggtcactagttgcctcatccggcacactggagtttaacaatgaaagcttcaattggactggagtcgctcagaatggaacaagctctgcttgcaaaaggagatctaataaaagtttctttagtagattgaattggttgcaccaattaaaatacaaatatccagcactgaacgtgactatgccaaacaatgaaaaatttgacaaattgtacatttggggggttcaccacccgagtacggacagtgaccaaatcagcctatatgctcaagcatcagggagagtcacagtctctaccaaaagaagccaacaaactgtaatcccgaatatcggatctagaccctgggtaaggggtgtctccagcagaataagcatctattggacaatagtaaaaccgggagacatacttttgattaacagcacagggaatctaattgctcctcggggttacttcaaaatacgaagtgggaaaagctcaataatgaggtcagatgcacccattggcaaatgcaattctgaatgcatcactccaaatggaagcattcccaatgacaaaccatttcaaaatgtaaacaggatcacatatggggcctgtcccagatatattaagcaaaacactctgaaattggcaacagggatgcggaatgtaccagagaaacaaactagaggcatattcggcgcaatcgcgggtttcatagaaaatggttgggagggaatggtggacggttggtacggtttcaggcatcaaaattctgagggcacaggacaagcagcagatcttaaaagcactcaagcagcaatcaaccaaatcaacgggaaactgaataggttaatcgagaaaacgaacgagaaattccatcaaattgaaaaagaattctcagaagtagaagggagaattcaggacctcgagaaatatgttgaggacactaaaatagatctctggtcgtacaacgcggagcttcttgttgccctggagaaccaacatacaattgatctaactgactcagaaatgaacaaactgtttgaaagaacaaagaagcaactgagggaaaatgctgaggatatgggcaatggttgtttcaaaatataccacaaatgtgacaatgcctgcatagggtcaatcagaaatggaacttatgaccatgatgtatacagagacgaagcattaaacaaccggttccagatcaaaggtgttgagctgaagtcaggatacaaagattggatcctatggatttcctttgccatatcatgttttttgctttgtgttgttttgctggggttcatcatgtgggcctgccaaaaaggcaacattaggtgcaacatttgcatttga

SEQ ID NO: 30721 - RNA, 1701 nt, synthetic construct
  misc_feature 1..1701: note = hemagglutinin__InfluenzaA__AAY98319
  source 1..1701: mol_type = other RNA
atgaagactatcattgctttgagctacattctatgtctggttttcgctcaaaaacttcccggaaatgacaacagcacggcaacgctgtgcctggggcaccatgcagtgccaaacggaacgctagtgaaaacaatcacgaatgaccaaattgaagtgactaatgctactgagctggttcagagttcctcaacaggtagaatatgcgacagtcctcaccaaatccttgatggagaaaactgcacactaatagatgctctattgggagaccctcattgtgatggcttccaaaataaggaatgggacctttttgttgaacgcagcaaagcctacagcaactgttacccttatgatgtgccggattatgcctcccttaggtcactagttgcctcatccggcacactggagtttaacaatgaaagcttcaattggactggagtcgctcagaatggaacaagctctgcttgcaaaaggagatctaataaaagtttctttagtagattgaattggttgcaccaattaaaatacaaatatccagcactgaacgtgactatgccaaacaatgaaaaatttgacaaattgtacatttggggggttcaccacccgagtacggacagtgaccaaatcagcctatatgctcaagcatcagggagagtcacagtctctaccaaaagaagccaacaaactgtaatcccgaatatcggatctagaccctgggtaaggggtgtctccagcagaataagcatctattggacaatagtaaaaccgggagacatacttttgattaacagcacagggaatctaattgctcctcggggttacttcaaaatacgaagtgggaaaagctcaataatgaggtcagatgcacccattggcaaatgcaattctgaatgcatcactccaaatggaagcattcccaatgacaaaccatttcaaaatgtaaacaggatcacatatggggcctgtcccagatatgttaagcaaaacactctgaaattggcaacagggatgcggaatgtaccagagaaacaaactagaggcatattcggcgcaatcgcgggtttcatagaaaatggttgggagggaatggtggacggttggtacggtttcaggcatcaaaattctgagggcacaggacaagcagcagatcttaaaagcactcaagcagcaatcaaccaaatcaacgggaaactgaataggttaatcgagaaaacgaacgagaaattccatcaaattgaaaaagaattctcagaagtagaagggagaattcaggacctcgagaaatatgttgaggacactaaaatagatctctggtcgtacaacgcggagcttcttgttgccctggagaaccaacatacaattgatctaactgactcagaaatgaacaaactgtttgaaagaacaaagaagcaactgagggaaaatgctgaggatatgggcaatggttgtttcaaaatataccacaaatgtgacaatgcctgcatagggtcaatcagaaatggaacttatgaccatgatgtatacagagacgaagcattaaacaaccggttccagatcaaaggtgttgagctgaagtcaggatacaaagattggatcctatggatttcctttgccatatcatgttttttgctttgtgttgttttgctggggttcatcatgtgggcctgccaaaaaggcaacattaggtgcaacatttgcatttga

SEQ ID NO: 30722 - RNA, 1701 nt, synthetic construct
  misc_feature 1..1701: note = hemagglutinin__InfluenzaA__AAY98329
  source 1..1701: mol_type = other RNA
atgaagactatcattgctttgagctacattttatgtctggttttcgctcaaaaacttcccggaaatgacaacagcacggcaacgctgtgcctggggcaccatgcagtgccaaacggaacgctagtgaaaacaatcacgaatgaccaaattgaagtgactaatgctactgagctggttcagagttcctcaacaggtagaatatgcgacagtcctcaccaaatccttgatggagaaaactgcacactaatagatgctctattgggagaccctcattgtgatggcttccaaaataaggaatgggacctttttgttgaacgcagcaaagcctacagcaactgttacccttatgatgtgccggattatgcctcccttaggtcactagttgcctcatccggcacactggagtttaacaatgaaagcttcaattggactggagtcgctcagaatggaacaagctctgcttgcaaaaggagatctaataaaagtttctttagtagattgaattggttgcaccaattaaaatacaaatatccagcactgaacgtgactatgccaaacaatgaaaaatttgacaaattgtacatttggggggttcaccacccgagtacggacagtgaccaaatcagcctatatgctcaagcattagggagagtcacagtctctaccaaaagaagccaacaaactgtaatcccgaatatcggatctagaccctgggtaaggggtgtctccagcagaataagcatctattggacaatagtaaaaccgggagacatacttttgattaacagcacagggaatctaattgctcctcggggttacttcaaaatacgaagtgggaaaagctcaataatgaggtcagatgcacccattggcaaatgcaattctgaatgcatcactccaaatggaagcattcccaatgacaaaccatttcaaaatgtaaacaggatcacatatggggcctgtcccagatatgttaagcaaaacactctgaaattggcaacagggatgcggaatgtaccagagaaacaaactagaggcatattcggtgcaatcgcgggtttcatagaaaatggttgggagggaatggtggacggttggtacggtttcaggcatctaaattctgagggcacaggacaagcagcagatcttaaaagcactcaagcagcaatcaaccaaatcaacgggaaactgaataggttaatcgagaaaacgaacgagaaattccatcaaattgaaaaagaattctcagaagtagaagggagaattcaggacctcgagaaatatgttgaggacactaaaatagatctctggtcgtacaacgcggagcttcttgttgccctggagaaccaacatacaattgatctaactgactcagaaatgaacaaactgtttgaaagaacaaagaagcaactgagggaaaatgctgaggatatgggcaatggttgtttcaaaatataccacaaatgtgacaatgcctgcatagggtcaatcagaaatggaacttatgaccatgatgtatacagagacgaagcattaaacaaccggttccagatcaaaggtgttgagctgaagtcaggatacaaagattggatcctatggatttcctttgccatatcatgttttttgctttgtgttgttttgctggggttcatcatgtgggcctgccaaaaaggcaacattaggtgcaacatttgcatttga

SEQ ID NO: 30723 - RNA, 1701 nt, synthetic construct; identical to SEQ ID NO: 30694
  misc_feature 1..1701: note = hemagglutinin__InfluenzaA__AAY98339
  source 1..1701: mol_type = other RNA

SEQ ID NO: 30724 - RNA, 1701 nt, synthetic construct; identical to SEQ ID NO: 30694
  misc_feature 1..1701: note = hemagglutinin__InfluenzaA__AAY98353
  source 1..1701: mol_type = other RNA

SEQ ID NO: 30725 - RNA, 1701 nt, synthetic construct
  misc_feature 1..1701: note = hemagglutinin__InfluenzaA__AAY98366
  source 1..1701: mol_type = other RNA
atgaagactatcattgctttgagctacattttatgcctggttttcgctcaaaaacttcccggaaatgacaacagcacggcaacgctgtgcctgggacaccatgcagtgccaaacggaacgctagtgaaaacaatcacgagtgaccaaattgaagtgactaatgctactgagctggttcagagttcctcaacaggtagaatatgcgacagtcctcaccgaatccttgatggagaaaactgcacactgatagatgctctattgggagaccctcattgtgatggcttccaaaataaggaatgggacctttttgttgaacgcagcaaagcctacagcaactgttacccttatgatgtgccggattatgcctcccttaggtcactagttgcctcatccggcaccctggagtttaacaatgaaagcttcaattggactggagtcgctcagaatggaacaagctttgcttgcaaaaggagatctattaaaagtttctttagtagattgaattggttgcaccaattaaaatacaaatatccagcactgaacgtgactatgccaaacaatgacaaatttgacaaattgtacatttggggggttcaccacccgggtacggacagtgaccaaaccagcctatatgctcaagcatcagggagagtcacagtctctaccaaaagaagccaacaaactgtaatcccgaatatcggatctagaccctgggtaaggggtgtttccagcagaataagcatctattggacaatagtgaaaccgggagacatacttctgatcaacagcacagggaatctaattgctcctcggggttacttcaaaatacgaagtgggaaaagctcaataatgaggtcagatgcacccattggcaaatgcaattctgaatgcatcactccaaatggaagcattcccaatgacaaaccatttcaaaatgtaaacaggatcacatatggggcctgtcccagatatgttaagcaaaacactctgaaattggcaacagggatgcggaatgtaccagagaaacaaactagaggcatattcggcgcaatcgcaggtttcatagaaaatggttgggagggaatggtagacggttggtacggtttcaggcatcaaaattctgagggcacaggacaagcagcagatcttaaaagcactcaagcagcaatcaaccaaatcaacgggaaactgaataggttaatcgagaaaacgaacgagaaattccatcaaattgaaaaagaattcacagaagtagaagggagaattcaggacctcgagaaatatgttgaggacactaaaatagatctctggtcgtacaacgcggagcttcttgttgccctggagaaccaacatacaattgatctaactgactcagaaatgaacaaactgtttgaaagaacaaggaagcaactgagggaaaatgctgaggatatgggcaatggttgtttcaaaatataccacaaatgtgacaatgcctgcatagggtcaatcagaaatggaacttatgaccatgatgtatacagagacgaagcattaaacaaccggttccagatcaaaggtgttgagctgaagtcaggatacaaagattggatcctatggatttcctttgccacatcatgttttttgctttgtgttgttttgctggggttcatcatgtgggcctgccaaaaaggcaacattaggtgcaacatttgcatttga

SEQ ID NO: 30726 - RNA, 1701 nt, synthetic construct
  misc_feature 1..1701: note = hemagglutinin__InfluenzaA__AAY98376
  source 1..1701: mol_type = other RNA
atgaagactatcattgctttgagctacattttatgtctggttttcgctcaaaaacttcccggaaatgacaacagcacggcaacgctgtgcctgggacaccatgcagtgccaaacggaacgctagtgaaaacaatcacgaatgaccaaattgaagtgactaatgctactgagctggttcagagttcctcaacaggtagaatatgtgacagtcctcaccaaatccttgatggagaaaactgcacactaatagatgctctattgggagatcctcattgtgatggcttccaaaataaggaatgggacctttttgttgaacgcagcaaagcctacagcaactgttacccttatgatgtgccggattatgcctcccttaggtcactagttgcctcatccggcacactggagtttaacaatgaaagcttcaattggactggagtcgctcagaatggaacaagctctgcttgcaaaaggagatctattaaaagtttctttagtagattgaattggttgcaccaattaaaatacaaatatccagcactgaacgtgactatgccaaacaatgacaaatttgacaaattgtacatttggggggttcaccacccgagtacggacagtgaccaaaccagcctatatgctcaagcatcagggagagtcacagtctctaccaaaagaagccaacaaacagtaatcccgaatatcggatctagaccctgggtaaggggtgtctccagcagaataagcatctattggacaatagtaaaaccgggagacatacttttgattaacagcacagggaatctaattgctcctcggggttacttcaaaatacgaagtgggaaaagctcaataatgaggtcagatgcacccattggcaaatgcaattctgaatgcatcactccaaatggaagcattcccaatgacaaaccatttcaaaatgtaaacaggatcacatatggggcctgtcccagatatgttaagcaaaacactctgaaattggcaacagggatgcggaatgtaccagagaaacaaactagaggcatattcggcgcaatcgcgggtttcatagaaaatggttgggagggaatggtggacggttggtacggtttcaggcatcaaaattctgagggcacaggacaagcagcagatcttaaaagcactcaagcagcaatcaaccaaatcaacgggaaactgaataggttaatcgagaaaacgaatgagaaattccatcaaattgaaaaagaattctcagaagtagaagggagaattcaggacctcgagaaatatgttgaggacactaaaatagatctctggtcgtacaacgcggagcttcttgttgccctggagaaccaacatacaattgatctaactgactcagaaatgaacaaactgtttgaaagaacaaggaagcaactgagggaaaatgctgaggatatgggcaatggttgtttcaaaatataccacaaatgtgacaatgcctgcatagggtcaatcagaaatggaacttatgaccatgatgtatacagagacgaagcattaaacaaccggttccagatcaaaggtgttgagctgaagtcaggatacaaagattggatcctatggatttcctttgccatatcatgttttttgctttgtgttgttttgctggggttcatcatgtgggcctgccaaaaaggcaacattaggtgcaacatttgcatttga

SEQ ID NO: 30727 - RNA, 1701 nt, synthetic construct
  misc_feature 1..1701: note = hemagglutinin__InfluenzaA__AAY98386
  source 1..1701: mol_type = other RNA
atgaagactatcattgctttgagctacattttatgtctggttttcgctcaaaaacttcccggaaatgacaacagcacggcaacgctgtgcctggggcaccatgcagtgccaaacggaacgctagtgaaaacaatcacgaatgaccaaattgaagtgactaatgctaccgagctggttcagagttcctcaacaggtagaatatgcgacagtcctcaccaaatccttgatggaggaaactgcacactaatagatgctctattgggagaccctcattgtgatggcttccaaaataaggaatgggacctttttgttgaacgcagcaaagtctacagcaactgttacccttatgatgtgccggattatgcctcccttaggtcactagttgcctcatccggcacactggagtttaacaatgaaagcttcaattggactggagtcgctcagaatggaacaagctctgcttgcaaaaggagatctattaaaagtttctttagtagattgaattggttgcaccaattaaaatacaaatatccagcactgaacgtgactatgccaaacaatgaaaaatttgacaaattgtacatttggggggttcaccacccgagtacggacagtgaccaaatcagcctatatgctcaagcatcagggagagtcacagtctctaccaaaagaagccaacaaactgtaatcccgaatatcggatctagaccctgggtaaggggtgtctccagcagaataagcatctattggacaatagtaaaaccgggagacatacttttgattaacagcacagggaatctaattgctcctcggggttacttcaaaatacgaagtgggaaaagctcaataatgaggtcagatgcacccattggcaaatgcaattctgaatgcatcactccaaatggaagcattcccaatgacaaaccatttcaaaatgtaaacaggatcacatatggggcctgtcccagatatgttaagcaaaacactctgaaattggcaacagggatgcggaatgtaccagagaaacaaactagaggcatattcggcgcaatcgcgggtttcatagaaaatggttgggagggaatggtggacggttggtacggtttcaggcatcaaaattctgagggcacaggacaagcagcagatcttaaaagcactcaagcagcaatcaaccaaatcaacgggaaactgaataggttaatcgagaaaacgaacgagaaattccatcaaattgaaaaagaattctcagaagtagaagggagaattcaggatctcgagaaatatgttgaggacactaaaatagatctctggtcgtacaacgcggagcttcttgttgccctggagaaccaacatacaattgatctaactgactcagaaatgaacaaactgtttgaaagaacaaagaagcaactgagggaaaatgctgaggatatgggcaatggttgttttaaaatataccacaaatgtgacaatgcctgcatagggtcaatcagaaatggaacttatgaccatgatgtatacagagacgaagcattaaacaaccggttccagatcaaaggtgttgagctgaagtcaggatacaaagattggatcctatggatttcctttgccatatcatgttttttgctttgtgttgttttgctggggttcatcatgtgggcctgccaaaaaggcaacattaggtgcaacatttgcatttga

SEQ ID NO: 30728 - RNA, 1701 nt, synthetic construct; identical to SEQ ID NO: 30694
  misc_feature 1..1701: note = hemagglutinin__InfluenzaA__AAY98396
  source 1..1701: mol_type = other RNA

SEQ ID NO: 30729 - RNA, 1701 nt, synthetic construct
  misc_feature 1..1701: note = hemagglutinin__InfluenzaA__AAY98406
  source 1..1701: mol_type = other RNA
atgaagactatcattgctttgagctacattttatgtctggttttcgctcaaaaacttcccggaaatgacaacagcacggcaacgctgtgcctggggcaccatgcagtgccaaacggaacgctagtgaaaacaatcacgaatgaccaaattgaagtgactaatgctactgagctggttcagagttcctcaacaggtagaatatgcgacagtccccaccaaatccttgatggagaaaactgcacactaatagatgctctattgggagaccctcattgtgatggcttccaaaataaggaatgggacctttttgttgaacgcagcaaagcctacagcaactgttacccttatgatgtgccggattatgcctcccttaggtcactagttgcctcatccggcacactggagtttaacaatgaaagcttcaattggactggagtcgctcagaatggaacaagctctgcttgcaaaaggagatctaataaaagtttctttagtagattgaattggttgcaccaattaaaatacaaatatccagcactgaacgtgactatgccaaacaatgaaaaatttgacaaattgtacatttggggggttcaccacccgagtacggacagtgaccaaatcagcctatatgctcaagcatcagggagagtcacagtctctaccaaaagaagccaacaaactgtaatcccgaatatcggatctagaccctgggtaaggggtgtctccagcagaataagcatctattggacaatagtaaaaccgggagacatacttttgattaacagcacagggaatctaattgctcctcggggttacttcaaaatacgaagtgggaaaagctcaataatgaggtcagatgcacccattggcaaatgcaattctgaatgcatcactccaaatggaagcattcccaatgacaaaccatttcaaaatgtaaacaggatcacatatggggcctgtcccagatatgttaagcaaaacactctgaaattggcaacagggatgcggaatgtaccagagaaacaaactagaggcatattcggcgcaatcgcgggtttcatagaaaatggttgggagggaatggtggacggttggtacggtttcaggcatcaaaattctgagggcacaggacaagcagcagatcttaaaagcactcaagcagcaatcaaccaaatcaacgggaaactgaataggttaatcgagaaaacgaacgagaaattccatcaaattgaaaaagaattctcagaagtagaagggagaattcaggacctcgagaaatatgttgaggacactaaaatagatctctggtcgtacaacgcggagcttcttgttgccctggagaaccaacatacaattgatctaactgactcagaaatgaacaaactgtttgaaagaacaaagaagcaactgagggaaaatgctgaggatatgggcaatggttgtttcaaaatataccacaaatgtgacaatgcctgcatagggtcaatcagaaatggaacttatgaccatgatgtatacagagacgaagcattaaacaaccggttccagatcaaaggtgttgagctgaagtcaggatacaaagattggattctatggatttcctttgccatatcatgttttttgctttgtgttgttttgctggggttcatcatgtgggcctgccaaaaaggcaacattaggtgcaacatttgcatttga

SEQ ID NO: 30730 - RNA, 1701 nt, synthetic construct
  misc_feature 1..1701: note = hemagglutinin__InfluenzaA__AAZ32946
  source 1..1701: mol_type = other RNA
atgaagactatcattgctttgagctacattctatgtctggttttcgctcaaaaacttcccggaaatgacaacagcacggcaacgctgtgccttgggcaccatgcagtaccaaacggaacgatagtgaaaacaatcacgaatgaccaaattgaagttactaatgctactgagctggttcagagttcctcaacaggtggaatatgcgacagtcctcatcagatccttgatggagaaaactgcacactaatagatgctctattgggagaccctcagtgtgatggcttccaaaataagaaatgggacctttttgttgaacgcagcgaagcctacagcaactgttacccttatgatgtgccggattatgcctcccttaggtcactaattgcctcatccggcacactggagtttaccaatgaaagcttcaattggactggagtcactcagaatggaacaagctctgcttgcaaaaggagatctaataaaagtttctttagtagattgaattggttgacccatttaaaatacaaatacccagcattgaacgtgactatgccaaacaatgaaaaatttgacaaattgtacatttggggggttcaccacccgggtacggacagtgaccaaatcagcctatatgctcaagcatcaggaagaatcacagtctctaccaaaagaagccaacaaactgtaatcccgaatatcggatctagaccaagggtaagggatgtctccagcagaataagcatctattggacaatagtaaaaccgggagacatacttttgattaacagcacagggaatctaattgctcctcggggttacttcaaaatacgaagtgggaaaagctcaataatgagatcagatgcacccattggcaaatgcaattctgaatgcatcactccaaatggaagcattcccaatgacaaaccatttcaaaatataaacaggatcacatatgggacctgtcccagatatgttaagcaaaacactctgaaattggcaacagggatgcgaaatgtaccagagaaacaaactagaggcatatttggcgcaatcgcgggtttcatagaaaatggttgggagggaatggtggacggttggtacggtttcaggcatcaaaattctgagggcacaggacaagcagcagatctcaaaagcactcaagcagcaatcaaccaaatcaatgggaaactgaataggttaatcgggaaaacaaacgagaaattccatcagattgaaaaagaattctcagaagtagaagggagaattcaggacctcgagaaatatgttgaggacactaaaatagatctctggtcatacaacgcggagcttcttgttgccctggagaaccaacatacaattgatctaactgactcagaaatgaacaaactgtttgaaagaacaaagaagcaattgagggaaaatgctgaggatatgggcaatggttgtttcaaaatataccacaaatgtgacaatgcctgcatagggtcaatcagaaatggaacttatgaccatgatgtatacagagatgaagcattaaacaaccggttccagatcaaaggtgttgagctgaagtcaggatacaaagattggatcctatggatttcctttgccatatcatgttttttgctttgtgttgttttgttggggttcatcatgtgggcctgccaaaaaggcaacattaggtgcaacatttgcatttga

SEQ ID NO: 30731 - RNA, 1701 nt, synthetic construct
  misc_feature 1..1701: note = hemagglutinin__InfluenzaA__AAZ32949
  source 1..1701: mol_type = other RNA
atgaagactatcattgctttgagctacattctatgtctggttttcgctcaaaaacttcccggaaatgacaacagcacggcaacgctgtgccttgggcaccatgcagtaccaaacggaacgatagtgaaaacaatcacgaatgaccaaattgaagttactaatgctactgagctggttcagagttcctcaacaggtggaatatgcgacagtcctcatcagatccttgatggagaaaactgcacactaatagatgctctattgggagaccctcagtgtgatggcttccaaaataagaaatgggacctttttgttgaacgcagcgaagcctacagcaactgttacccttatgatgtgccggattatgcctcccttaggtcactaattgcctcatccggcacactggagtttaccaatgaaagcttcaattggactggagtcactcagaatggaacaagctctgcttgcaaaaggagatctaataaaagtttctttagtagattgaattggttgacccatttaaaatacaaatacccagcattgaacgtgactatgccaaacaatgaaaaatttgacaaattgtacatttggggggttcaccacccgggtacggacagtgaccaaatcagcctatatgctcaagcatcaggaagaatcacagtctctaccaaaagaagccaacaaactgtaatcccgaatatcggatctagaccaagggtaagggatatctccagcagaataagcatctattggacaatagtaaaaccgggagacatacttttgattaacagcacagggaatctaattgctcctcggggttacttcaaaatacgaagtgggaaaagctcaataatgagatcagatgcacccattggcaaatgcaattctgaatgcatcactccaaatggaagcattcccaatgacaaaccatttcaaaatataaacaggatcacatatggggcctgtcccagatatgttaagcaaaacactctgaaattggcaacagggatgcgaaatgtaccagagaaacaaactagaggcatatttggcgcaatcgcgggtttcatagaaaatggttgggagggaatggtggacggttggtacggtttcaggcatcaaaattctgagggcacaggacaagcagcagatctcaaaagcactcaagcagcaatcaaccaaatcaatgggaaactgaataggttaatcgggaaaacaaacgagaaattccatcagattgaaaaagaattctcagaagtagaagggagaattcaggacctcgagaaatatgttgaggacactaaaatagatctctggtcatacaacgcggagcttcttgttgccctggagaaccaacatacaattgatctaactgactcagaaatgaacaaactgtttgaaagaacaaagaagcaattgagggaaaatgctgaggatatgggcaatggttgtttcaaaatataccacaaatgtgacaatgcctgcatagggtcaatcagaaatggaacttatgaccatgatgtatacagagatgaagcattaaacaaccggttccagatcaaaggtgttgagctgaagtcaggatacaaagattggatcctatggatttcctttgccatatcatgttttttgctttgtgttgttttgttggggttcatcatgtgggcctgccaaaaaggcaacattaggtgcaacatttgcatttga

SEQ ID NO: 30732 - RNA, 1701 nt, synthetic construct
  misc_feature 1..1701: note = hemagglutinin__InfluenzaA__AAZ32950
  source 1..1701: mol_type = other RNA
atgaagactatcattgctttgagctacattctatgtctggttttcgctcaaaaacttcccggaaatgacaacagcacggcaacgctgtgccttgggcaccatgcagtaccaaacggaacgatagtgaaaacaatcacgaatgaccaaattgaagttactaatgctactgagctggttcagagttcctcaacaggtggaatatgcgacagtcctcatcagatccttgatggagaaaactgcacactaatagatgctctattgggagaccctcagtgtgatggcttccaaaataagaaatgggacctttttgttgaacgcagcgaagcctacagcaactgttacccttatgatgtgccggattatgcctcccttaggtcactaattgcctcatccggcacactggagtttaccaatgaaagcttcaattggactggagtcactcagaatggaacaagctctgcttgcaaaaggagatctaataaaagtttctttagtagattgaattggttgacccatttaaaatacaaatacccagcattgaacgtgactatgccaaacaatgaaaaatttgacaaattgtacatttggggggttcaccacccgggtacggacagtgaccaaatcagcctatatgctcaagcatcaggaagaatcacagtctctaccaaaagaagccaacaaactgtaatcccgaatatcggatctagaccaagggtaagggatgtctccagcagaataagcatctattggacaatagtaaaaccgggagacatacttttgattaacagcacagggaatctaattgctcctcggggttacttcaaaatacgaagtgggaaaagctcaataatgagatcagatgcacccattggcaaatgcaattctgaatgcatcactccaaatggaagcattcccaatgacaaaccatttcaaaatataaacaggatcacatatggggcctgtcccagatatgttaagcaaaacactctgaaattggcaacagggatgcgaaatgtaccagagaaacaaactagaggcatatttggcgcaatcgcgggtttcatagaaaatggttgggagggaatggtggacggttggtacggtttcaggcatcaaaattctgagggcacaggacaagcagcagatctcaaaagcactcaagcagcaatcaaccaaatcaatgggaaactgaataggttaatcgggaaaacaaacgagaaattccatcagattgaaaaagaattctcagaagtagaagggagaattcaggacctcgagaaatatgttgaggacactaaaatagatctctggtcatacaacgcggagcttcttgttgccctggagaaccaacatacaattgatctaactgactcagaaatgaacaaactgtttgaaagaacaaaggagcaattgagggaaaatgctgaggatatgggcaatggttgtttcaaaatataccacaaatgtgacaatgcctgcatagggtcaatcagaaatggaacttatgaccatgatgtatacagagatgaagcattaaacaaccggttccagatcaaaggtgttgagctgaagtcaggatacaaagattggatcctatggatttcctttgccatatcatgttttttgctttgtgttgttttgttggggttcatcatgtgggcctgccaaaaaggcaacattaggtgcaacatttgcatttga

SEQ ID NO: 30733 - RNA, 1701 nt, synthetic construct
  misc_feature 1..1701: note = hemagglutinin__InfluenzaA__AAZ32951
  source 1..1701: mol_type = other RNA
atgaagactatcattgctttgagctacattttatgtctggttttcgctcaaaaaattcccggaaatgacaacagcacggcaacgctgtgccttgggcaccatgcagtaccaaatggaacgctagtgaaaacaatcacgaatgaccaaattgaagtgactaatgctactgagctggttcagagttcctcaacaggtggaatatgcgacagtcctcatcagatccttgatggagaaaactgcacactaatagatgctctattgggagaccctcattgtgatggcttccaaaataagaaatgggacctttttgttgaacgcagcaaagcctacagcaactgttacccttatgatgtgccggattatgcctcccttaggtcactagttgcctcatccggcacactggagtttaacaatgaaagcttcaattggactggagtcactcagaatggaacaagctctgcttgcaaaaggagatctaataaaagtttctttagtagattgaattggttgcaccaattaaaatacaaatacccagcattgaacgtggctatgccaaacaatgaaaaatttgacaaattgtacatttggggggttcaccacccgggtacggacagtgaccaaatcagcctatatgctcaagcatcagggagaatcacagtctctaccaaaagaagccaacaaactgtaatcccgaatatcggatctagacccagggtaagggatatctccagcagaataagcatctattggacaatagtaaaaccgggagacatacttttgattaacagcacagggaatctaattgctcctcggggttacttcaaaatacgaagtgggaaaagctcaataatgagatcagatgcacccattggcaaatgcaattctgaatgcatcactccaaatggaagcattcccaatgacaaaccatttcaaaatgtaaacaggatcacatatggggcctgtcccagatatgttaagcaaaacactctgaaattggcaacagggatgcggaatgtaccagagaaacaaactagaggcatattcggcgcaatcgcgggtttcatagaaaatggttgggagggaatggtggacggttggtacggtttcaggcatcaaaattctgagggcacaggacaagcagcagatcttaaaagcactcaagcagcaatcaaccaaatcaatgggaaactgaataggttaatcgggaaaacaaacgagaaattccatcagattgaaaaagaattctcagaagtagaagggagaattcaggacctcgagaaatatgttgaggacactaaaatagatctctggtcatacaacgcggagcttcttgttgccctggagaaccaacatacaattgatctaactgactcagaaatgaacaaactgtttgaaagaacaaagaagcaactgagggaaaatgctgaggatatgggcaatggttgtttcaaaatataccacaaatgtgacaatgcctgcatagggtcaatcagaaatggaacttatgaccatgatgtatacagagatgaagcattaaacaaccggttccagatcaaaggtgttgagctgaagtcaggatacaaagattggatcctatggatttcctttgccatatcatgttttttgctttgtgttgctttgctggggttcatcatgtgggcctgccaaaaaggcaacattaggtgcaacatttgcatttga

SEQ ID NO: 30734 - RNA, 1701 nt, synthetic construct
  misc_feature 1..1701: note = hemagglutinin__InfluenzaA__AAZ32952
  source 1..1701: mol_type = other RNA
atgaagactatcattgctttgagctacattttatgtctggttttcgctcaaaaaattcccggaaatgacaacagcacggcaacgctgtgccttgggcaccatgcagtaccaaatggaacgctagtgaaaacaatcacgaatgaccaaattgaagtgactaatgctactgagctggttcagagttcctcaacaggtggaatatgcgacagtcctcatcagatccttgatggagaaaactgcacactaatagatgctctattgggagaccctcattgtgatggcttccaaaataagaaatgggacctttttgttgaacgcagcaaagcctacagcaactgttacccttatgatgtgccggattatgcctcccttaggtcactagttgcctcatccggcacactggagtttaacaatgaaagcttcaattggactggagtcactcagaatggaacaagctctgcttgcaaaaggagatctaataaaagtttctttagtagattgaattggttgcaccaattaaaatacaaatacccagcattgaacgtggctatgccaaacaatgaaaaatttgacaaattgtacatttggggggttcaccacccgggtacggacagtgaccaaatcagcctatatgctcaagcatcagggagaatcacagtctctaccaaaagaagccaacaaactgtaatcccgaatatcggatctagacccagggtaagggatgtctccagcagaataagcatctattggacaatagtaaaaccgggagacatacttttgattaacagcacagggaatctaattgctcctcggggttacttcaaaatacgaagtgggaaaagctcaataatgagatcagatgcacccattggcaaatgcaattctgaatgcatcactccaaatggaagcattcccaatgacaaaccatttcaaaatgtaaacaagatcacatatggggcctgtcccagatatgttaagcaaaacactctgaaattggcaacagggatgcggaatgtaccagagaaacaaactagaggcatattcggcgcaatcgcgggtttcatagaaaatggttgggagggaatggtggacggttggtacggtttcaggcatcaaaattctgagggcacaggacaagcagcagatcttaaaagcactcaagcagcaatcaaccaaatcaatgggaaactgaataggttaatcgggaaaacaaacgagaaattccatcagattgaaaaagaattctcagaagtagaagggagaattcaggacctcgagaaatatgttgaggacactaaaatagatctctggtcatacaacgcggagcttcttgttgccctggagaaccaacatacaattgatctaactgactcagaaatgaacaaactgtttgaaagaacaaagaagcaactgagggaaaatgctgaggatatgggcaatggttgtttcaaaatataccacaaatgtgacaatgcctgcatagggtcaatcagaaatggaacttatgaccatgatgtatacagagatgaagcattaaacaaccggttccagatcaaaggtgttgagctgaagtcaggatacaaagattggatcctatggatttcctttgccatatcatgttttttgctttgtgttgctttgctggggttcatcatgtgggcctgccaaaaaggcaacattaggtgcaacatttgcatttga

SEQ ID NO: 30735 - RNA, 1701 nt, synthetic construct
  misc_feature 1..1701: note = hemagglutinin__InfluenzaA__AAZ32953
  source 1..1701: mol_type = other RNA
atgaagactatcattgctttgagctacattttatgtctggttttcgctcaaaaaattcccggaaatgacaacagcacggcaacgctgtgccttgggcaccatgcagtaccaaatggaacgctagtgaaaacaatcacgaatgaccaaattgaagtgactaatgctactgagctggttcagagttcctcaacaggtggaatatgcgacagtcctcatcagatccttgatggagaaaactgcacactaatagatgctctattgggagaccctcattgtgatggcttccaaaataagaaatgggacctttttgttgaacgcagcaaagcctacagcaactgttacccttatgatgtgccggattatgcctcccttaggtcactagttgcctcatccggcacactggagtttaacaatgaaagcttcaattggactggagtcactcagaatggaacaagctctgcttgcaaaaggagatctaataaaagtttctttagtagattgaattggttgcaccaattaaaatacaaatacccagcattgaacgtggctatgccaaacaatgaaaaatttgacaaattgtacatttggggggttcaccacccgggtacggacagtgaccaaatcagcctatatgctcaagcatcagggagaatcacagtctctaccaaaagaagccaacaaactgtaatcccgaatatcggatctagacccagggtaagggatgtctccagcagaataagcatctattggacaatagtaaaaccgggagacatacttttgattaacagcacagggaatctaattgctcctcggggttacttcaaaatacgaagtgggaaaagctcaataatgagatcagatgcacccattggcaaatgcaattctgaatgcatcactccaaatggaagcattcccaatgacaaaccatttcaaaatgtaaacaggatcacatatggggcctgtcccagatatgttaagcaaaacactctgaaattggcaacagggatgcggaatgtaccagagaaacaaactagaggcatattcggcgcaatcgcgggtttcatagaaaatggttgggagggaatggtggacggttggtacggtttcaggcatcaaaattctgagggcacaggacaagcagcagatcttaaaagcactcaagcagcaatcaaccaaatcaatgggaaactgaataggttaatcgggaaaacaaacgagaaattccatcagattgaaaaagaattctcagaagtagaagggagaattcaggacctcgagaaatatgttgaggacactaaaatagatctctggtcatacaacgcggagcttcttgttgccctggagaaccaacatacaattgatctaactgactcagaaatgaacaaactgtttgaaagaacaaagaagcaactgagggaaaatgctgaggatatgggcaatggttgtttcaaaatataccacaaatgtgacaatgcctgcatagggtcaatcagaaatggaacttatgaccatgatgtatacagagatgaagcattaaacaaccggttccagatcaaaggtgttgagctgaagtcaggatacaaagattggatcctatggatttcctttgccatatcatgttttttgctttgtgttgctttgctggggttcatcatgtgggcctgccaaaaaggcaacattaggtgcaacatttgcatttga

SEQ ID NO: 30736 - RNA, 1701 nt, synthetic construct
  misc_feature 1..1701: note = hemagglutinin__InfluenzaA__AAZ38462
  source 1..1701: mol_type = other RNA
atgaagactatcattgctttgagctacattttatgtctggttttcgctcaaaaacttcccggaaatgacaacagcacggcaacgctgtgcctgggacaccatgcagtgccaaacggaacgctagtgaaaacaatcacgagtgaccaaattgaagtgactaatgctactgagctggttcagagttcctcaacaggtagaatatgcgacagtcctcaccgaatccttgatggagaaaactgcacactgatagatgctctattgggagaccctcattgtgatggcttccaaaataaggaatgggacctttttgttgaacgcagcaaagcctacagcaactgttacccttatgatgtgccggattatgcctcccttaggtcactagttgcctcatccggcaccctggagtttaacaatgaaagcttcaattggactggagtcgctcagaatggaacaagctttgcttgcaaaaggagatctattaaaagtttctttagtagattgaattggttgcaccaattaaaatacaaatatccagcactgaacgtgactatgccaaacaatgacaaatttgacaaattgtacatttggggggttcactacccgggtacggacagtgaccaaaccagcctatatgctcaagcatcagggagagtcacagtctctaccaaaagaagccaacaaactgtaatcccgaatatcggatctagaccctgggtaaggggtgtttccagcagaataagcatctattggacaatagtgaaaccgggagacatacttctgattaacagcacagggaatctaattgcccctcggggttacttcaaaatacgaagtgggaaaagctcaataatgaggtcagatgcacccattggcaaatgcaattctgaatgcatcactccaaatggaagcattcccaatggcaaaccatttcaaaatgtaaacaggatcacatatggggcctgtcccagatatgttaagcaaaacactctgaaattggcaacagggatgcggaatgtaccagagaaacaaactagaggcatattcggcgcaatcgcaggtttcatagaaaatggttgggagggaatggtagacggttggtacggtttcaggcatcaaaattctgagggcacaggacaagcagcagatcttaaaagcactcaagcagcaatcaaccaaatcaacgggaaactgaataggttaatcgagaaaacgaacgagaaattccatcaaattgaaaaagaattcacagaagtagaagggagaattcaggacctcgagaaatatgttgaggacactaaaatagatctctggtcgtacaacgcggagcttcttgttgccctggagaaccaacatacaattgatctaactgactcagaaatgaacaaactgtttgaaagaacaaggaggcaactgagggaaaatgctgaggatatgggcaatggttgtttcaaaatataccacaaatgtgacaatgcctgcatagggtcaatcagaaatggaacttatgaccatgatgtatacagagacgaagcattaaacaaccggttccagatcaaaggtgttgagctgaagtcaggatacaaagattggatcctatggatttcctttgccacatcatgttttttgctttgtgttgttttgctggggttcatcatgtgggcctgccaaaaaggcaacattaggtgcaacatttgcatttga

SEQ ID NO: 30737 - RNA, 1701 nt, synthetic construct
  misc_feature 1..1701: note = hemagglutinin__InfluenzaA__AAZ38473
  source 1..1701: mol_type = other RNA
atgaagactatcattgctttgagctacattttatgtctggttttcgctcaaaaacttcccggaaatgacaacagcacggcaacgctgtgcctgggacaccatgcagtgccaaacggaacgctagtgaaaacaatcacgagtgaccaaattgaagtgactaatgctactgagctggttcagagttcctcaacaggtagaatatgcgacagtcctcaccgaatccttgatggagaaaactgcacactgatagatgctctattgggagaccctcattgtgatggcttccaaaataaggaatgggacctttttgttgaacgcagcaaagcctacagcaactgttacccttatgatgtgccggattatgcctcccttaggtcactagttgcctcatccggcaccctggagtttaacaatgaaagcttcaattggactggagtcgctcagaatggaacaagctttacttgcaaaaggagatctattaaaagtttctttagtagattgaattggttgcaccaattaaaatacaaatatccagcactgaacgtgactatgccaaacaatgacaaatttgacaaattgtacatttggggggttcaccacccaagtacggacagtgaccaaaccagcctatatgctcaagcatcagggagagtcacagtctctaccaaaagaagccaacaaactgtaatcccgaatatcggatctagaccctgggtaaggggtgtttccagcagaataagcatctattggacaatagtgaaaccgggagacatacttctgattaacagcacagggaatctaattgctcctcggggttacttcaaaatacgaagtgggaaaagctcaataatgaagtcagatgcacccattggcaaatgcaattctgaatgcatcactccaaatggaagcattcccaatgacaaaccatttcaaaatgtaaacaggatcacatatggggcctgtcccagatatgttaagcaaaacactctgaaattggcaacagggatgcggaatgtaccagagaaacaaactagaggcatattcggcgcaatcgcaggtttcatagaaaatggttgggagggaatggtagacggttggtacggtttcaggcatcaaaattctgagggcacaggacaagcagcagatcttaaaagcactcaagcagcaatcaaccaaatcaacgggaaactgaataggttaatcgagaaaacgaacgagaaattccatcaaattgaaaaagaattcacagaagtagaagggagaattcaggacctcgagaaatatgttgaggacactaaaatagatctctggtcgtacaacgcggagcttcttgttgccctggagaaccaacatacaattgatctaactgactcagaaatgaacaaactgtttgaaagaacaaggaagcaactgagggaaaatgctgaggatatgggcaatggttgtttcaaaatataccacaaatgtgacaatgtctgcatagggtcaatcagaaatggaacttatgaccatgatgtatacagagacgaagcattaaacaaccggttccagatcaaaggtgttgagctgaagtcaggatacaaagattggatcctatggatttcctttgccacatcatgttttttgctttgtgttgttttgctggggttcatcatgtgggcctgccaaaaaggcaacattaggtgcaacatttgcatttga

SEQ ID NO: 30738 - RNA, 1701 nt, synthetic construct; identical to SEQ ID NO: 30694
  misc_feature 1..1701: note = hemagglutinin__InfluenzaA__AAZ38484
  source 1..1701: mol_type = other RNA

SEQ ID NO: 30739 - RNA, 1701 nt, synthetic construct
  misc_feature 1..1701: note = hemagglutinin__InfluenzaA__AAZ38495
  source 1..1701: mol_type = other RNA
atgaagactatcattgctttgagctacattttatgtctggttttcgctcaaaaacttcccggaaatgacaacagcacggcaacgctgtgcctggggcaccatgcagtgccaaacggaacgctagtgaaaacaatcacgaatgaccaaattgaagtgactaatgctactgagctggttcagagttcctcaacaggtagaatatgcgacagtcctcaccaaatccttgatggagaaaactgcacactaatagatgctctattgggagaccctcattgtgatggcttccaaaataaagaatgggacctttttgttgaacgcagcaaagcctacagcaactgttacccttatgatgtgccggattatgcctcccttaggtcactagttgcctcatccggcacactggagtttaacaatgaaagcttcaattggactggagtcgctcagaatggaacaagctctgcttgcaaaaggagatctaataaaagtttctttagtagattgaattggttgcaccaattaaaatacaaatatccagcactgaacgtgactatgccaaacaatgaaaaatttgacaaattgtacatttggggggttcaccacccgagtacggacagtgaccaaatcagcctatatgctcaagcatcagggagagtcacagtctctaccaaaagaagccaacaaactgtaatcccgaatatcggatctagaccctgggtaaggggtgtctccagcaaaataagcatctattggacaatagtaaaaccgggagacatacttttgattaacagcacagggaatctaattgctcctcggggttacttcaaaatacgaagtgggaaaagctcaataatgaggtcagatgcacccattggcaaatgcaattctgaatgcatcactccaaatggaagcattcccaatgacaaaccatttcaaaatgtaaacaggatcacatatggggcctgtcccagatatgttaagcaaaacactctgaaattggcaacagggatgcggaatgtaccagagaaacaaactagaggcatattcggcgcaatcgcgggtttcatagaaaatggttgggagggaatggtggacggttggtacggtttcaggcatcaaaattctgagggcacaggacaagcagcagatcttaaaagcactcaagcagcaatcaaccaaatcaacgggaaactgaataggttaatcgagaaaacgaacgagaaattccatcaaattgaaaaagaattctcagaagtagaagggagaattcaggacctcgagaaatatgttgaggacactaaaatagatctctggtcgtacaacgcggagcttcttgttgccctggagaaccaacatacaattgatctaactgactcagaaatgaacaaactgtttgaaagaacaaagaagcaactgagggaaaatgctgaggatatgggcaatggttgtttcaaaatataccacaaatgtgacaatgcctgcatagggtcaatcagaaatggaacttatgaccatgatgtatacagagacgaagcattaaacaaccggttccagatcaaaggtgttgagctgaagtcaggatacaaagattggatcctatggatttcctttgccatatcatgttttttgctttgtgttgttttgctggggttcatcatgtgggcctgccaaaaaggcaacattaggtgcaacatttgcatttga

SEQ ID NO: 30740 - RNA, 1701 nt, synthetic construct
  misc_feature 1..1701: note = hemagglutinin__InfluenzaA__AAZ38517
  source 1..1701: mol_type = other RNA
atgaagactatcattgctttgagctacattctatgtctggttttcgctcaaaaacttcccggaaatgacaacagcacggcaacgctgtgccttgggcaccatgcagtaccaaacggaacgatagtgaaaacaatcacgaatgaccaaattgaagttactaatgctactgagctggttcagagttcctcaacaggtggaatatgcgacagtcctcatcagatccttgatggagaaaactgcacactaatagatgctctattgggagaccctcagtgtgatggcttccaaaataagaaatgggacctttttgttgaacgcagcaaagcctacagcaactgttacccttatgatgtgccggattatgcctcccttaggtcactagttgcctcatccggcacactggagtttaacaatgaaagcttcaattggactggagtcactcaaaatggaacaagctctgcttgcaaaaggagatctaataacagtttctttagtagattgaattggttgacccacttaaaattcaaatacccagcattgaacgtgactatgccaaacaatgaaaaatttgacaaattgtacatttggggggttcaccacccgggtacggacaatgaccaaattagcctatatgctcaagcttcaggaagaatcacagtctctaccaaaagaagccaacaaactgtaatcccgaatatcggatctagacccagggtaagggatatccccagcagaataagcatatattggacaatagtaaaaccgggagacatacttttgattaacagcacagggaatctaattgctcctcggggttacttcaaaatacgaagtgggaaaagctcaataatgagatcagatgcacccattggcaaatgcaattctgaatgcatcactccaaatggaagcattcccaatgacaaaccatttcaaaatgtaaacaggatcacatatggggcctgtcccagatatgttaagcaaaacactctgaaattggcaacagggatgcgaaatgtaccagagaaacaaactagaggcatatttggcgcaatcgcgggtttcatagaaaatggttgggagggaatggtggatggttggtacggtttcaggcatcaaaattctgagggaataggacaagcagcagatctcaaaagcactcaagcagcaatcaaccaaatcaatgggaagctgaataggttgatcgggaaaaccaacgagaaattccatcagattgaaaaagaattctcagaagtagaagggagaattcaggacctcgagaaatatgttgaggacactaaaatagatctctggtcatacaacgcggagcttcttgttgccctggagaaccaacatacaattgatctaactgactcagaaatgaacaaactgtttgaaagaacaaagaagcaactgagggaaaatgctgaggatatgggcaatggttgtttcaaaatataccacaaatgtaacaatgcctgcatagggtcaatcagaaatggaacttatgaccatgatgtatacagagatgaagcattaaacaaccggttccagatcaaaggtgttgagctgaagtcaggatacaaagattggatcctatggatttcctttgccatatcatgttttttgctttgtgttgttttgttggggttcatcatgtgggcctgccaaaaaggcaacattaggtgcaacatttgcatttga

SEQ ID NO: 30741 - RNA, 1701 nt, synthetic construct
  misc_feature 1..1701: note = hemagglutinin__InfluenzaA__AAZ38539
  source 1..1701: mol_type = other RNA
atgaagactatcattgctttgagctacattttatgtctggttttcgctcaaaaacttcccggaaatgacaacagcacggcaacgctgtgcctggggcaccatgcagtgccaaacggaacgctagtgaaaacaatcacgaatgaccaaattgaagtgactaatgctactgagctggttcagagttcctcaacaggtagaatatgcgacagtcctcaccaaatccttgatggagaaaactgcacactaatagatgctctattgggagaccctcattgtgatggcttccaaaataaggaatgggacctttttgttgaacgcagcaaagcctacagcaactgttacccttatgatgtgccggattatgtctcccttaggtcactagttgcctcatcaggcacgctggagtttaacaatgaaagcttcaattggactggagtcgctcagaatggaacaagctctgcttgcaaaaggagatctgataaaagtttctttagtagattgaattggttgcaccaattaaaatacaaatatccagcactgaacgtgactatgccaaacaatgaaaaatttgacaaattgtacatttggggggttcaccacccgggtacagacagtgaccaaatcagcctatatgctcaagcatcagggagagtcacagtctctaccaaaagaagccaacaaactgtaatcccgaatatcggatctagaccctgggtaaggggtgtctccagcaaaataagcatctattggacaatagtaaaaccgggagacatatttttgattaacagcacagggaatctaattgctcctcggggttatttcaaaatacgaagtgggaaaagctcaataatgaggtcagatgcacccattggcaaatgcaattctgaatgcatcactccaaatggaagcattcccaatgacaaaccatttcaaaatgtaaacaggatcacatatgggccctgtcccagatatgttaagcaaaacactctgaaattggcaacagggatgcggaatgtgccagagaaacaaactagaggcatattcggtgcaatcgcgggcttcatagaaaatggttgggagggaatgatggacggttggtacggtttcaggcatcaaaattctgagggcacagggcaagcagcagatcttaaaagcactcaagcagcaatcaaccaaatcaacgggaaactgaataggttaatcgagaaaacgaacgagaaattccatcaaattgaaaaggaattctcagaagtagaagggagaattcaggacctcgagaaatatgttgaggacactaaaatagatctctggtcgtacaatgcggagcttcttgttgccctggagaaccaacatacaattgatctaactgactcagaaatgaacaaactgtttgaaagaacaaagaagcaactgagggaaaatgctgaggatatgggcaatggttgtttcaaaatataccacaaatgtgacaatgcctgcatagggtcaatcagaaatggaacttatgaccatgatgtatacagagacgaagcattgaacaaccggttccagatcaaaggtgttgagctgaagtcaggatacaaagattggatcctatggatttcctttgccatatcatgttttttgctttgtattgttttgctggggttcatcatgtgggcctgccaaaaaggcaacattaggtgcaacatttgcatttga

SEQ ID NO: 30742 - RNA, 1701 nt, synthetic construct; identical to SEQ ID NO: 30729
  misc_feature 1..1701: note = hemagglutinin__InfluenzaA__AAZ38561
  source 1..1701: mol_type = other RNA

SEQ ID NO: 30743 - RNA, 1701 nt, synthetic construct
  misc_feature 1..1701: note = hemagglutinin__InfluenzaA__AAZ38583
  source 1..1701: mol_type = other RNA
atgaagactatcattgctttgagctacatcctatgtctggttttcgctcaaaaaattcccggaaatgacaacagcacggcaacgctgtgccttgggcaccatgcagtaccaaacggaacgatagtgaaaacaatcacgaatgaccaaattgaagttactaatgctactgagctggttcagagttcctcaacaggtggaatatgcgacagtcctcatcagatccttgatggagaaaactgcacactaatagatgctctattgggagaccctcagtgtgatggcttccaaaataagaaatgggacctttttgttgaacgcagcaaagcctacagcaactgttacccttatgatgtgccggattatgcctcccttaggtcactagttgcctcatccggcacactggagtttaacaatgaaagcttcaattggactggagtcactcaaaatggaacaagctctgcttgcaaaaggagatctaataacagtttctttagtagattgaattggttgacccatttaaaattcaaatacccagcattgaacgtgactatgccaaacaatgaaaaatttgacaaattgtacatttggggggttcaccacccgggtacgaacaatgaccaaatcagcctatatgctcaagcatcaggaagaatcacagtctctaccaaaagaagccaacaaactgtaatcccgaatatcggatctagacccagggtaagggatatccccagcagaataagcatctattggacaatagtaaaaccgggagacatacttttgattaacagcacagggaatctaattgctcctcggggttacttcaaaatacgaagtgggaaaagctcaataatgagatcagatgcacccattggcaaatgcaattctgaatgcatcactccaaatggaagcattcccaatgacaaaccatttcaaaatgtaaacaggatcacatatggggcctgtcccagatatgttaagcaaaacactctgaaattggcaacagggatgcgaaatgtaccagagaaacaaactagaggcatatttggcgcaatcgcgggtttcatagaaaatggttgggagggaatggtggatggttggtacggtttcaggcatcaaaattctgagggaataggacaagcagcagatctcaaaagcactcaagcagcaatcaaccaaatcaatgggaagctgaataggttgatcgggaaaaccaacgagaaattccatcagattgaaaaagaattctcagaagtagaagggagaattcaggacctcgagaaatatgttgaggacactaaaatagatctctggtcatacaacgcggagcttcttgttgccctggagaaccaacatacaattgatctaactgactcagaaatgaacaaactgtttgaaagaacaaagaagcaactgagggaaaatgctgaggatatgggcaatggttgtttcaaaatataccacaaatgtgacaatgcctgcatagggtcaatcagaaatggaacttatgaccatgatgtatacagagatgaagcattaaacaaccggttccagatcaaaggtgttgagctgaagtcaggatacaaagattggatcatatggatttcctttgccatatcatgttttttgctttgtgttgctttgttggggttcatcatgtgggcctgccaaaaaggcaacattaggtgcaacatttgcatttga

SEQ ID NO: 30744 - RNA, 1701 nt, synthetic construct
  misc_feature 1..1701: note = hemagglutinin__InfluenzaA__AAZ38594
  source 1..1701: mol_type = other RNA
atgaagactatcattgctttgagctacattctatgtctggttttcgctcaaaaacttcccggaaatgacaacagcacggcaacgctgtgccttgggcaccatgcagtaccaaacggaacgatagtgaaaacaatcacgaatgaccaaattgaagttactaatgctactgagctggttcagagttcctcaacaggtggaatatgcgacagtcctcatcagatccttgatggagaaaactgcacactaatagatgctctattgggagaccctcagtgtgatggcttccaaaataagaaatgggacctttttgttgaacgcagcaaagcctacagcaactgttacccttatgatgtgccggattatgcctcccttaggtcactagttgcctcatccggcacactggagtttaacaatgaaagcttcaattggactggagtcactcaaaatggaacaagctctgcttgcaaaaggagatctaatagcagtttctttagtagattgaattggttgacccacttaaaattcaaatacccagcattgaacgtgactatgccaaacaatgaaaaatttgacaaattgtacatttggggggttcaccacccgggtacggacaatgaccaaatcagcctatatgctcaagcatcaggaagaatcacagtctctaccaaaagaagccaacaaactgtaatcccgaatatcggatctagacccagggtaagggatatccccagcagaataagcatctattggacaatagtaaaaccgggagacatacttttgattaacagcacagggaatctaattgctcctcggggttacttcaaaatacgaagtgggaaaagctcaataatgagatcagatgcacccattggcaaatgcaattctgaatgcatcactccaaatggaagcattcccaatgacaaaccatttcaaaatgtaaacaggatcacatatggggcctgtcccagatatgttaagcaaaacactctgaaattggcaacagggatgcgaaatgtaccagagaaacaaactagaggcatatttggcgcaatcgcgggtttcatagaaaatggttgggagggaatggtggatggttggtacggtttcaggcatcaaaattctgagggaataggacaagcagcagatctcaaaagcactcaagcagcaatcaaccaaatcaatgggaagctgaataggttgatcgggaaaaccaacgagaaattccatcagattgaaaaagaattctcagaagtagaagggagaattcaggacctcgagaaatatgttgaggacactaaaatagatctctggtcatacaacgcggagcttcttgttgccctggagaaccaacatacaattgatctaactgactcagaaatgaacaaactgtttgaaagaacaaagaagcaactgagggaaaatgctgaggatatgggcaatggttgtttcaaaatataccacaaatgtgacaatgcctgcatagggtcaatcagaaatggaacttatgaccatgatgtatacagagatgaagcattaaacaaccggttccagatcaaaggtgttgagctgaagtcaggatacaaagattggatcctatggatttcctttgccatatcatgttttttgctttgtgttgctttgttggggttcatcatgtgggcctgccaaaaaggcaacattaggtgcaacatttgcatttga

SEQ ID NO: 30745 - RNA, 1701 nt, synthetic construct
  misc_feature 1..1701: note = hemagglutinin__InfluenzaA__AAZ38605
  source 1..1701: mol_type = other RNA
atgaagactatcattgctttgagctacattctatgtctggtttttactcaaaaacttcccggaaatgacaacagcacggcaacgctgtgccttgggcaccatgcagtaccaaacggaacgatagtgaaaacaatcacgaatgaccaaattgaagtcactaatgctactgagctggttcagagttcctcaacaggtggaatatgcgacagtcctcatcagatccttgatggagaaaactgcacactaatagatgctctattgggagaccctcagtgtgatggcttccaaaataagaaatgggacctttttgttgaacgcagcaaagcctacagcaactgttacccttatgatgtgccggattatgcatcccttagatcactagttgcctcatccggcacactggagtttaacaatgaaagcttcaattggactggagtcactcaaaatggaacaagctctgcttgcaaaaggagatctaataacagtttctttagtagattgaattggttgacccacttaaaattcaaatacccagcattgaacgtgactatgccaaacaatgaaaaatttgacaaactgtacatttggggggttcaccacccgggtacggacaatgaccaaatcagcctatatgctcaagcatcaggaagaatcacagtctccaccaaaagaagccaacaaactgtaatcccgagtatcgggtctagacccaggataagggatgtccccagcagaataagcatctattggacaatagtaaaaccgggagacatacttttgattaacagcacagggaatctaattgctcctcggggttacttcaaaatacgaagtgggaaaagctcaataatgagatcagatgcacccattggcaaatgcaattctgaatgcatcactccaaatggaagcattcccaatgacaaaccatttcaaaatgtaaacaggatcacatatggggcctgtcccagatatgttaagcaaaacactctgaaattggcaacagggatgcgaaatgtaccagagaaacaaactagaggcatatttggcgcaatcgcgggtttcatagaaaatggttgggagggaatggtggacggttggtacggtttcaggcatcaaaattctgagggaacaggacaagcagcagatctcaaaagcactcaagcagcaatcaaccaaatcaatgggaagctgaataggttgatcgggaaaacaaacgagaaattccatcagattgaaaaagaattctcagaagtagaagggagaattcaggacctcgagaaatatgttgaggacactaaaatagatctctggtcatacaacgcggagcttcttgtggccctggagaaccaacatacaattgatctaactgactcagaaatgaacaaactgtttgaaagaacaaagaagcaactgagggaaaatgctgaggatatgggcaatggttgtttcaaaatataccacaaatgtgacaatgcctgcatagggtcaatcagaaatggaacttatgaccatgatgtatacagagatgaagcattaaacaaccggttccagatcaaaggtgttgagttgaagtcaggatacaaagattggatcctatggatttcttttgccatatcatgttttttgctttgtgttgctttgttggggttcatcatgtgggcctgccaaaaaggcaacattaggtgcaacatttgcatttga

SEQ ID NO: 30746 - RNA, 1698 nt, synthetic construct
  misc_feature 1..1698: note = hemagglutinin__InfluenzaA__AAZ38627
  source 1..1698: mol_type = other RNA
atgaaagcaaaactactggtcctgttatgtacatttacagctacatacgcagacacaatatgtataggctaccatgccaacaactcaaccgacactgttgacacagtacttgagaagaatgtgacagtgacacactctgtcaacctacttgaggacagtcacaatggaaaactatgtctactaaaaggaatagccccactacaattgggtaattgcagcgttgccggatggatcttaggaaacccagaatgcgaattactgatttccaaggaatcatggtcctacattgtagaaacaccaaatcctgagaatggaacatgttacccagggtatttcgccgactatgaggaactgagggagcaattgagttcagtatcttcatttgagagattcgaaatattccccaaaggaagctcatggcccaaccacaccgtaaccggagtatcagcatcatgctcccataatgggaaaagcagtttttacagaaatttgctatggctgacgggaaagaatggtttgtacccaaacctgagcatgtcctatgtaaacaacaaagagaaagaagtccttgtgctatggggtgttcatcacccacctaacataggggaccaaagggccctctatcatacagaaaatgcttatgtctctgtagtgtcttcacattatagcagaagattcaccccagaaatagccaaaagacccaaagtaagagatcaggaaggaagaatcaactactactggactctgctggaacccggggacacaataatatttgaggcaaatggaaatctaatagcgccatggtatgctttcgcactgagtagaggctttggatcaggaatcatcacctcaaatgcaccaatggatgaatgtgatgcgaagtgtcaaacacctcagggagctataaacagtagtcttcctttccagaatgtacacccagttacaataggagagtgtccaaagtatgtcaggagtgcaaaattaaggatggctacaggactaaggaacatcccttccattcaatccagaggtttgtttggagccattgccggtttcattgaaggggggtggactggaatggtagatgggtggtatggttatcatcatcagaatgagcaaggatctggctatgctgcagatcaaaaaagcacacaaaatgccattaacgggattacaaacaaggtgaattctgtaattgagaaaatgaacactcaattcacagctgtgggcaaagaattcaataaattagaaagaaggatggaaaacttaaataaaaaagttgatgatgggtttctagacatttggacatataatgcagaattgttggttctactggaaaatgaaaggactttggatttccatgactccaatgtgaagaatctgtatgagaaagtaaaaagccaattaaagaataatgccaaagaaataggaaacgggtgttttgaattctatcacaagtgtaacaatgaatgcatggaaagtgtgaaaaacggaacttatgactatccaaaatattccgaagaatcaaagttaaacagggagaaaattgatggagtaaaattggaatcaatgggagtctatcagattctggcaatctactcaactgtcgccagttccctggttcttttggtctccctgggggcaatcagcttctggatgtgttccaatgggtctttgcagtgtagaatatgcatctga

SEQ ID NO: 30747 - RNA, 1701 nt, synthetic construct
  misc_feature 1..1701: note = hemagglutinin__InfluenzaA__AAZ38638
  source 1..1701: mol_type = other RNA
atgaagactatcattgctttgagctacattctatgtctggttttcgctcaaaaacttcccggaaatgacaacagcacggcaacgctgtgccttgggcaccatgcagtaccaaacggaacgatagtgaaaacaatcacgaatgaccaaattgaagttactaatgctactgagctggttcagagttcctcaacaggtggaatatgcgacagtcctcatcagatccttgatggagaaaactgcacactaatagatgctctattgggagaccctcagtgtgatggcttccaaaataagaaatgggacctttttgttgaacgcagcaaagcctacagcaactgttacccttatgatgtgccggattatgcctcccttaggtcactagttgcctcatccggcacactggagtttaacaatgaaagcttcaattggactggagtcactcaaaatggaacaagctctgcttgcaaaaggagatctaataacagtttctttagtagattgaattggttgacccacttaaaattcaaatacccagcattgaacgtgactatgccaaacaatgaaaaatttgacaaattgtacatttggggggttcaccacccgggtacggacaatgaccaaatcagcctatatgctcaagcttcaggaagaatcacagtctctaccaaaagaagccaacaaactgtaatcccgaatatcggatctagacccagggtaagggatatccccagcagaataagcatctattggacaatagtaaaaccgggagacatacttttgattaacagcacagggaatctaattgctcctcggggttacttcaaaatacgaagtgggaaaagctcaataatgagatcagatgcacccattggcaaatgcaattctgaatgcatcactccaaatggaagcattcccaatgacaaaccatttcaaaatgtaaacaggatcacatatggggcctgtcccagatatgttaagcaaaacactctgaaattggcaacagggatgcgaaatgtaccagagaaacaaactagaggcatatttggcgcaatcgcgggtttcatagaaaatggttgggagggaatggtggatggttggtacggtttcaggcatcaaaattctgagggaataggacaagcagcagatctcaaaagcactcaagcagcaatcaaccaaatcaatgggaagctgaataggttgatcgggaaaaccaacgagaaattccatcagattgaaaaagaattctcagaagtagaagggagaattcaggacctcgagaaatatgttgaggatactaaaatagatctctggtcatacaacgcggagcttcttgttgccctggagaaccaacatacaattgatctaactgactcagaaatgaacaaactgtttgaaagaacaaagaagcaactgagggaaaatgctgaggatatgggcaatggttgtttcaaaatataccacaaatgtgacaatgcctgcatagggtcaatcagaaatggaacttatgaccatgatgtatacagagatgaagcattaaacaaccggttccagatcaaaggtgttgagctgaagtcaggatacaaagattggatcctatggatttcctttgccatatcatgttttttgctttgtgttgctttgttggggttcatcatgtgggcctgccaaaaaggcaacattaggtgcaacatttgcatttga

SEQ ID NO: 30748 - RNA, 1701 nt, synthetic construct
  misc_feature 1..1701: note = hemagglutinin__InfluenzaA__AAZ38650
  source 1..1701: mol_type = other RNA
atgaagactatcattgctttgagctacattctatgtctggttttcgctcaaaaacttcccggaaatgacaacagcacggcaacgctgtgccttgggcaccatgcagtaccaaacggaacgatagtgaaaacaatcacgaatgaccaaattgaagttactaatgctactgagctggttcagagttcctcaacaggtggaatatgcgacagtcctcatcagatccttgatggagaaaactgcacactaatagatgctctattgggagaccctcagtgtgatggcttccaaaataagaaatgggacctttttgttgaacgcagcaaagcctacagcaactgttacccttatgatgtgccggattatgcctcccttaggtcactagttgcctcatccggcacactggagtttaacaatgaaagcttcaattggactggagtcactcaaaatggaacaagctctgcttgcaaaaggagatctaataacagtttctttagtagattgaattggttgacccacttaaaattcaaatacccagcattgaacgtgactatgccaaacaatgaaaaatttgacaaattgtacatttggggggttcaccacccgggtacggacaatgaccaaatcagcctatatgctcaagcatcaggaagaatcacagtctctaccaaaagaagccaacaaactgtaatcccgaatatcggatctagacccagggtaagggatatccccagcagaataagcatctattggacaatagtaaaaccgggagacatacttttgattaacagcacagggaatctaattgctcctcggggttacttcaaaatacgaagtgggaaaagctcaataatgagatcagatgcacccattggcaaatgcaattctgaatgcatcactccaaatggaagcattcccaatgacaaaccatttcaaaatgtaaacaggatcacatatggggcctgtcccagatatgttaagcaaaacaccctgaaattggcaacagggatgcgaaatgtaccagagaaacaaactagaggcatatttggcgcaatcgcgggtttcatagaaaatggttgggagggaatggtggatggttggtacggtttcaggcatcaaaattctgagggaataggacaagcagcagatctcaaaagcactcaagcagcaatcaaccaaatcaatgggaagctgaataggttgatcgggaaaaccaacgagaaattccatcagattgaaaaagaattctcagaagtagaagggagaattcaggacctcgagaaatatgttgaggacactaaaatagatctctggtcatacaacgcggagcttcttgttgccctggagaaccaacatacaattgatctaactgactcagaaatgaacaaactgtttgaaagaacaaagaagcaactgagggaaaatgctgaggatatgggcaatggttgtttcaaaatataccacaaatgtgacaatgcctgcatagggtcaatcagaaatggaacttatgaccatgatgtatacagagatgaagcattaaacaaccggttccagatcaaaggtgttgagctgaagtcaggatacaaagattggatcctatggatttcctttgccatatcatgttttttgctttgtgttgctttgttggggttcatcatgtgggcctgccaaaaaggcaacattaggtgcaacatttgcatttga

SEQ ID NO: 30749 - RNA, 1701 nt, synthetic construct
  misc_feature 1..1701: note = hemagglutinin__InfluenzaA__AAZ43370
  source 1..1701: mol_type = other RNA
atgaagactatcattgctttgagctacattttctgtctggttttcgcccaaaaacttcccggaaatgacaacagcacagcaacgctgtgcctgggacatcatgcagtgccaaacggaacgctagtgaaaacaatcacgaatgatcagattgaagtgactaatgctactgagctggttcagagttcctcaacaggtagaatatgcgacagtcctcaccgaatccttgatggaaaaaactgcacactgatagatgctctattgggagaccctcattgtgatggcttccaaaatgagaaatgggacctttttattgaacgcagcaaagctttcagcaactgttacccttatgatgtgccggattatgcctcccttaggtcactagttgcctcatcaggcaccctggagtttatcaatgaaggcttcaattggactggagtcactcagagtgggggaagctatgcttgcaaaaggggatctgttaaaagtttcttcagtagattgaattggttgtacgaatcagaatacaaatatccagcgctgaacgtgactatgccaaacaatggcaaatttgacaaactgtacatttggggggttcaccacccgagcacggaaaaagaacaaaccaacctatatgttcgagcatcagggagagtcacagtctctaccaagagaagccagcaaactgtaatcccgaatatcgggtctagaccctgggtaaggggtctgtccagtagaataagcatctattggacaatagtaaaaccgggagacatactgttgattaatagcactgggaacctaattgctcctcggggttacttcaaaatacgcactgggaaaagctcaataatgaggtcagatgcacctattggcacctgcagttctgaatgcatcactccaaatggaagcattcccaatgacaaaccctttcaaaatgtaaacaagatcacatatggggcatgtcccaggtatgttaagcaaaacactctgaaattggcaacagggatgcggaatgtaccagagaaacaaactagaggcatattcggcgcaatagcaggtttcatagaaaatggttgggagggaatggtagacggttggtacggtttcaggcatcaaaattctgagggcacaggacaagcagcagatcttaaaagcactcaagcagcaatcgaccaaatcaacggaaaactgaataggttaatcgagaaaacgaacgagaaattccatcaaatcgaaaaggaattctcagaagtagaagggagaattcaggacctcgagaaatatgttgaagacactaaaatagatctctggtcttacaacgcggagcttcttgtcgccctggagaaccaacatacaattgatctgactgactcagaaatgaacaaactgtttgaaaaaacaaggaagcaactgagggaaaatgctgaggacatgggcaatggttgcttcaaaatataccacaaatgtgacaatgcttgcatagggtcaatcagaaatggaacttatgaccatgatgtatacagagacgaagcattaaacaaccggtttcagatcaaaggtgttgagctgaagtcaggatacaaagactggatcctatggatttcctttgccatatcatgctttttgctttgtgttgttttgctggggttcatcatgtgggcctgccaaaaaggcaacattaggtgcaacatttgcatttga

SEQ ID NO: 30750 - RNA, 1701 nt, synthetic construct
  misc_feature 1..1701: note = hemagglutinin__InfluenzaA__AAZ43394
  source 1..1701: mol_type = other RNA
atgaagactatcattgctttgagctacattctatgtctggttttcgctcaaaaacttcccggaaatgacaacagcacggcaacgctgtgccttgggcaccatgcagtaccaaacggaacgatagtgaaaacaatcacgaatgaccaaattgaagttactaatgctactgagctggtacagagttcctcaacaggtggaatatgcgacagtcctcatcagatccttgatggagaaaactgcacactaatagatgctctattgggagaccctcagtgtgatggcttccaaaataagaaatgggacctttttgttgaacgcagcaaagcctacagcaactgttacccttatgatgtgccggattatgcctcccttaggtcactagttgcctcatccggcacactagagtttaacaatgaaagcttcgattggactggagtcactcagaatggaacaagctctgcttgcaaaaggagatctaataaaagtttctttagtagattgaattggttgacccacttaaaatacaaatacccagcattgaacgtgactatgccaaacaatgaaaaatttgacaaattgtacatttggggggttcaccacccgggtacggacagtgaccaaatcagcctatatgctcaagcatcaggaagaatcacagtctctaccaaaagaagccaacaaactgtaatcccgaatatcggatctagacccagggtaagggatgtctccagccgaataagcatctattggacaatagtaaaaccgggagacatacttttgattaacagcacagggaatctaattgctcctcggggttacttcaaaatacgaagtgggaaaagctcaataatgagatcagatgcacccattggcaaatgcaattctgaatgcatcactccaaatggaagcattcccaatgacaaaccatttcaaaatgtaaacaggatcacatatggggcctgtcccagatatattaagcaaaacactctgaaattggcaacagggatgcgaaatgtaccagagaaacaaactagaggcatatttggcgcaatcgcgggtttcatagaaaatggttgggagggaatggtggacggttggtacggtttcaggcatcaaaattctgagggcacaggacaagcagcagatctcaaaagcactcaagcagcaatcaaccaaatcaatgggaaactgaataggttaatcgggaaaacaaacgagaaattccatcagattgaaaaagaattctcagaagtagaagggagaattcaggacctcgagaaatatgttgaggacactaaaatagatctctggtcatacaacgcggagcttcttgttgccctggagaaccaacatacaattgatctaactgactcagaaatgaacaaactgtttgaaagaacaaagaagcaactgagggaaaatgctgaggacatgggcaatggttgtttcaaaatataccacaaatgtgacaatgcctgcatagggtcaatcagaaatggaacttatgaccatgatgtgtacagagatgaagcattaaacaaccggttccagatcaaaggtgttgagctgaagtcaggatacaaagattggatcctatggatttcctttgccatatcatgttttttgctttgtgttgctttgttggggttcatcatgtgggcctgccaaaaaggcaacattaggtgcaacatttgcatttga

SEQ ID NO: 30751 - RNA, 1701 nt, synthetic construct
  misc_feature 1..1701: note = hemagglutinin__InfluenzaA__AAZ43405
  source 1..1701: mol_type = other RNA
atgaagactatcattgctttgagctacattttatgtctggttttcgctcaaaaacttcccggaaatgacaacagcacggcaacgctgtgcctggggcaccatgcagtgccaaacggaacgctagtgaaaacaatcacgaatgaccaaattgaagtgactaatgctactgagctggttcagagttcctcaacaggtagaatatgcgacagtcctcaccaaatccttgatggagaaaactgcacactaatagatgctctattgggagaccctcattgtgatggcttccaaaataaggaatgggacctttttgttgaacgcagcaaagcctacagcaactgttacccttatgatgtgccggattatgcctcccttaggtcactagttgcctcatccggcacactggagtttaacaatgaaagcttcaattggactggagtcgctcagaatggaacaagctctgcttgcaaaaggagatctaataaaagtttctttagtagattgaattggttgcaccaattaaaatacaaatacccagcactgaacgtgactatgccaaacaatgaaaaatttgacaaattgtacatttggggggttcaccacccgagtacggacagtgaccaaatcagcctatatgctcaagcatcagggagagtcacagtctctaccaaaagaagccaacaaactgtaatcccgaatatcggatctagaccctgggtaaggggtgtctccagcagaataagcatctattggacaatagtaaaaccgggagacatacttttgattaactgcacagggaatctaattgctcctcggggttacttcaaaatacgaagtgggaaaagctcaataatgaggtcagatgcatccattggcaaatgcaattctgaatgcatcactccaaatggaagcattcccaatgacaaaccatttcaaaatgtaaacaggatcacatatggggcctgtcccagatatgttaagcaaaacactctgaaattggcaacagggatgcggaatgtaccagagaaacaaactagaggcatattcggcgcaatcgcgggtttcatagaaaatggttgggagggaatggtggacggttggtacggtttcaggcatcaaaattctgagggcacaggacaagcagcagatcttaaaagcactcaagcagcaatcaaccaaatcaacgggaaactgaataggttaatcgagaaaacgaacgagaaattccatcaaattgaaaaagaattctcagaagtagaagggagaattcaggacctcgagaaatatgttgaggacactaaaatagatctctggtcgtacaacgcggagcttcttgttgccctggagaaccaacatacaattgatctaactgactcagaaatgaacaaactgtttgaaagaacaaagaagcaactgagggaaaatgctgaggatatgggcaatggttgtttcaaaatataccacaaatgtgacaatgcctgcatagggtcaatcagaaatggaacttatgaccatgatgtatacagagacgaagcattaaacaaccggttccagatcaaaggtgttgagctgaagtcaggatacaaagattggatcctatggatttcctttgccatatcatgttttttgctttgtgttgtcttgctggggttcatcatgtgggcctgccaaaaaggcaacattaggtgcaacatttgcatttga

SEQ ID NO: 30752 - RNA, 1701 nt, synthetic construct; identical to SEQ ID NO: 30551
  misc_feature 1..1701: note = hemagglutinin__InfluenzaA__AAZ74352
  source 1..1701: mol_type = other RNA

SEQ ID NO: 30753 - RNA, 1701 nt, synthetic construct
  misc_feature 1..1701: note = hemagglutinin__InfluenzaA__AAZ74363
  source 1..1701: mol_type = other RNA
atgaagactatcattgctttgagctacattttatgtctggttttcgctcaaaaacttcccggaaatgacaacagcacggcaacgctgtgcctgggacaccatgcagtgccaaacggaacgctagtgaaaacaatcacgaatgaccaaattgaagtgactaatgctactgagctggttcagagttcctcaacaggtagaatatgcgacagtcctcaccgaatccttgatggagaaaactgcacactgatagatgctctattgggagaccctcattgtgatggcttccaaaataaggaatgggacctttttgttgaacgcagtaaagcctacagcaactgttacccttatgatgtgccggattatgcctcccttaggtcactagttgcctcatccggcaccctggagtttaacaatgaaagcttcaattggactggagtcgctcagaatggaacaagctctgcttgcaaaaggagatctattaaaagtttctttagtagattgaattggttgcaccaattaaaatacaaatatccagcactgaacgtgactatgccaaacaatgacaaatttgacaaattgtacatttggggggttcaccacccgagtacggacagtgaccaaaccagcctatatgctcaagcatcagggagagtcacagtctctaccaaaagaagccaacaaactgtaatcccgaatatcggatctagaccctgggtaaggggtgtctccagcagaataagcatctattggacaatagtaaaaccgggagacatacttttgattaacagcacagggaatctaattgctcctcggggttacttcaaaatacgaagtgggaaaagctcaataatgaggtcagatgcacccattggcaaatgcaattctgaatgcatcactccaaatggaagcattcccaatgacaaaccatttcaaaatgtaaacaggatcacatatggggcctgtcccagatatgttaagcaaaacactctgaaactggcaacagggatgcggaatgtaccagagaaacaaactagaggcatattcggcgcaatcgcgggtttcatagaaaatggttgggagggaatggtggacggttggtacggtttcaggcatcaaaattctgagggcacaggacaagcagcagatcttaaaagcacccaagcagcaatcaaccaaatcaacgggaaactgaataggttaatcgagaaaacgaacgagaaattccatcaaattgaaaaagaattctcagaagtagaagggagaattcaggacctcgagaaatatgttgaggacactaaaatagatctctggtcgtacaacgcggagcttcttgttgccctggagaaccaacatacaattgatctaactgactcagaaatgaacaaactgtttgaaagaacaaggaagcaactgagggaaaatgctgaggatatgggcaatggttgtttcaaaatataccacaaatgtgacaatgcctgcatagggtcaatcagaaatggaacttatgaccatgatgtatacagagacgaagcattaaacaaccggttccagatcaaaggtgttgagctgaagtcaggatacaaagattggatcctatggatttcctttgccatatcatgttttttgctttgtgttgttttgctggggttcatcatgtgggcctgccaaaaaggcaacattaggtgcaacatttgcatttga

SEQ ID NO: 30754 - RNA, 1698 nt, synthetic construct
  misc_feature 1..1698: note = hemagglutinin__InfluenzaA__AAZ74374
  source 1..1698: mol_type = other RNA
atgaaagtaaaactactgatcctgttatgtacatttacagctacatatgcagacacaatatgtataggctaccatgccaacaactcaaccgacactgttgacacagtacttgagaaaaatgtgacagtgacacactctgtcaacctacttgaggacagtcacaatggaaaactgtgcctactaaaaggaatagcccccctacaattgggtaattgcagcgttgccggatggatcttaggaaacccagaatgcgaattactgatttccaaggaatcatggtcctacattgtagaaacaccaaatcctgagaatggagcatgttacccagggtatttcgccgactatgaggagctaagggagcaattgagttcagtatcttcatttgagagattcgaaatattccccaaagaaagctcatggcccaaccacaccgtaaccggagtatcagcatcatgctcccataatgggaaaagcagtttttacagaaatttgctgtggctgacggggaagaatggtttgtacccaaacctgagcaagtcctatgcaaacaacaaagagaaagaagtccttatactatggggtgttcatcacccgcctaacataggggaccaaaggaccctctatcacacagaaaatgcttatgtctctgtagtgtcttcacattatggcagaagattcaccccagaaataaccaaaaggcccaaagtaagagatcaggaaggaagaatcaactactactggactctgctggaacccggggatacaataatatttgaggcaaatggaaatctaatagcgccatggtatgctttcgcactgagtagaggctttggatcaggaatcatcacctcaaatgcaccaatggatgaatgtgatgcgaagtgtcaaacacctcagggagctataaacagcagtcttcctttccagaatgtacatccagtcacaataggagagtgtccaaagtatgtcaggagtgcaaaattaaggatggttacaggactaaggaacatcccatccattcaatccagaggtttgtttggagccattgccggtttcattgaaggggggtggactggaatggtagatgggtggtatggttatcatcatcagaatgagcaaggatctggctatgctgcagatcaaaaaagcacacaaaatgccattaacgggattacaaacaaggtgaattctgtaattgagaaaatgaacactcaattcacagctgtgggcaaagaattcaacaaattggaaagaaggatggaaaacttaaataaaaaggttgatgatgggtttctagacgtttggacatataatgcagaattgttggttctactggaaaatgaaaggactttggatttccacgactccaatgtgaagaatctgtacgagaaagtaaaaagccaattaaagaataatgccaaagaaataggaaatgggtgttttgaattctatcacaagtgtaacaatgaatgcatggagagtgtgaaaaatggaacttatgactatccaaaatattccgaagaatcaaagttaaacagggaaaaaattgatggagtgaaattggactcaatgggggtctatcagattctggcgatctactcaactgtcgccagttccctggttcttttggtctccctgggggcaatcagcttctggatgtgttccaatgggtctttgcagtgtagaatatgcatctga

SEQ ID NO: 30755 - RNA, 1701 nt, synthetic construct
  misc_feature 1..1701: note = hemagglutinin__InfluenzaA__AAZ74397
  source 1..1701: mol_type = other RNA
atgaatactatcattgctttgagctacattttatgtctggtttttgctcaaaaacttcccggaaatgacaacagcacggcaacgctgtgcctgggacaccatgcagtgccaaacggaacgctagtgaaaacaatcacgagtgaccaaattgaagtgactaatgctactgagctggttcagagttcctcaacaggtagaatatgcgacagtcctcaccgaatccttgatggagaaaactgcacactgatagatgctctattgggagaccctctttgtgatggcttccaaaataaggaatgggacctttttgttgaacgcagcaaagcctacagcaactgttacccttatgatgtgccggattatgcctcccttaggtcactagttgcctcatccggcaccctggagtttaacaatgaaagcttcaattggactggagtcgctcagaatggaacaagctttgcttgcaaaaggagatctattaaaagtttctttagtagattgaattggttgcaccaattaaaatacaaatatccagcactgaacgtgactatgccaaacaatgacaaatttgacaaattgtacatttggggggttcaccacccgggtacggacagtgaccaaaccagcctatatgctcaagcatcagggagagtcacagtctctaccaaaagaagccaacaaactgtaatcccgaatatcggatctagaccctgggtaaggggtgtttccagcagaataagcatctattggacaatagtgaaaccgggagacatacttctgattaacagcacagggaatctaattgctcctcggggttacttcaaaatacgaagtgggaaaagctcaataatgaggtcagatgcacccattggcaaatgcaattctgaatgcatcactccaaatggaagcattcccaatggcaaaccatttcaaaatgtaaacaggatcacatatggggcctgtcccagatatgttaagcaaaacactctgaaattggcaacagggatgcggaatgtaccagagaaacaaactagaggcatattcggtgcaatcgcaggtttcatagaaaatggttgggagggaatggtagacggttggtacggtttcaggcatcaaaattctgagggcacaggacaagcagcagatcttaaaagcactcaagcagcaatcaaccaaatcaacgggaaactgaataggttaatcgagaaaacgaacgagaaattccatcaaattgaaaaagaattcacagaagtagaagggagaattcaggacctcgagaaatatgttgaggacactaaaatagatctctggtcgtacaacgcggagcttcttgttgccctggagaaccaacatacaattgatctaactgactcagaaatgaacaaactgtttgaaagaacaaggaagcaactgagggaaaatgctgaggatatgggcaatggttgtttcaaaatataccacaaatgtgacaatgcctgcatagggtcaatcagaaatggaacttatgaccatgatgtatacagagacgaagcattaaacaaccggttccagatcaaaggtgttgagctgaagtcaggatacaaagattggatcctatggatttcctttgccacatcatgttttttgctttgtgttgttttgctggggttcatcatgtgggcctgccaaaaaggcaacattaggtgcaacatttgcatttga

SEQ ID NO: 30756 - RNA, 1701 nt, synthetic construct
  misc_feature 1..1701: note = hemagglutinin__InfluenzaA__AAZ74408
  source 1..1701: mol_type = other RNA
atgaagactatcattgctttgagctacattttatgtctggttttcgctcaaaaacttcccggaaatgacaacagcacggcaacgctgtgcctggggcaccatgcagtgccaaacggaacgctagtgaaaacaatcacgaatgaccaaattgaagtgactaatgctactgagctggttcagagttcctcaacaggtagaatatgcgacagtcctcaccaaatccttgatggagaaaactgcacactaatagatgctctattgggagaccctcattgtgatggcttccaaaataaggaatgggacctttttgttgaacgcagcaaagcctacagcaactgttacccttatgatgtgccggattatgcctcccttaggtcactagttgcctcatccggcacactggagtttaacaatgaaagcttcaattggactggagtcgctcagaatggaacaagctctgcttgcaaaaggagatctaataaaagtttctttagtagattgaattggttgcaccaattaaaatacaaatatccagcactgaacgtgactatgccaaacaatgaaaaatttgacaaattgtacatttggggggttcaccacccgagtacggacagtgaccaaatcagcctatatgctcaagcatcagggagagtcacagtctctaccaaaagaagccaacaaactgtaatcccgaatatcggatctagaccctgggtaaggggtgtctccagcagaataagcatctattggacaatagtaaaaccgggagacatacttttgattaacagcacagggaatctaattgctcctcggggttacttcaaaatacgaagtgggaaaagctcaataatgaggtcagatgcacccattggcaaatgcaattctgaatgcatcactccaaatggaagcattcccaatgacaaaccatttcaaaatgtaaacaggatcacatatggggcctgtcccagatatgttaagcaaaacactctgaaattggcaacagggatgcggaatgtaccagagaaacaaactagaggcatattcggcgcaatcgcgggtttcatagaaaatggttgggagggaatggtggacggttggtacggtttcaggcatcaaaattctgagggcacaggacaagcagcagatcttaaaagcactcaagcagcaatcaaccaaatcaacgggaaactgaataggttaatcgagaaaacgaacgagaaattccatcaaattgaaaaagaattctcagaagtagaagggagaattcaggacctcgagaaatatgttgaggacactaaaatagatctctggtcgtacaacgcggagcttcttgttgccctggagaaccaacatacaattgatctaactgactcagaaatgaacaaactgtttgaaagaacaaagaagcaactgagggaaaatgctgaggatatgggcaatggttgtttcaaaatataccacaaatgtgacaatgcctgcatagggtcaatcagaaatggaacttataaccatgatgtatacagagacgaagcattaaacaaccggttccagatcaaaggtgttgagctgaagtcaggatacaaagattggatcctatggatttcctttgccatatcatgttttttgctttgtgttgttttgctggggttcatcatgtgggcctgccaaaaaggcaacattaggtgcaacatttgcatttga

SEQ ID NO: 30757 - RNA, 1701 nt, synthetic construct; identical to SEQ ID NO: 30694
  misc_feature 1..1701: note = hemagglutinin__InfluenzaA__AAZ74430
  source 1..1701: mol_type = other RNA

SEQ ID NO: 30758 - RNA, 1701 nt, synthetic construct
  misc_feature 1..1701: note = hemagglutinin__InfluenzaA__AAZ74441
  source 1..1701: mol_type = other RNA
atgaagactatcattgctttgagctacattctatgtctggttttcgctcaaaaacttcccggaaatgacaacagcacggcaacgctgtgccttgggcaccatgcagtaccaaacggaacgatagtgaaaacaatcacgaatgaccaaattgaagttactaatgctactgagctggttcagagttcctcaacaggtggaatatgcgacagtcctcatcagatccttgatggagaaaactgcacactaatagatgctctattgggagaccctcagtgtgatggcttccaaaataagaaatgggacctttttgttgaacgcagcaaagcctacagcaactgctacccttatgatgtgccggattatgcctcccttaggtcactagttgcctcatccggcacactggagtttaacaatgaaagcttcaattggactggagtcactcaaaatggaacaagctctgcttgcaaaaggagatctaataacagtttctttagtagattgaattggttgacccacttaaaattcaaatacccagcattgaacgtgactatgccaaacaatgaaaaatttgacaaattgtacatttggggggttcaccacccgggtacggacaatgaccaaatcagcctatatgctcaagcttcaggaagaatcacagtctctaccaaaagaagccaacaaactgtaatcccgaatatcggatctagacccagggtaagggatatccccagcagaataagcatctattggacaatagtaaaaccgggagacatacttttgattaacagcacagggaatctaattgctcctcggggttacttcaaaatacgaagtgggaaaagctcaataatgagatcagatgcacccattggcaaatgcaattctgaatgcatcactccaaatggaagcattcccaatgacaaaccatttcaaaatgtaaacaggatcacatatggggcctgtcccagatatgttaagcaaaacactctgaaattggcaacagggatgcgaaatgtaccagagaaacaaactagaggcatatttggcgcaatcgcgggtttcatagaaaatggttgggagggaatggtggatggttggtatggtttcaggcatcaaaattctgagggaataggacaagcagcagatctcaaaagcactcaagcagcaatcaaccaaatcaatgggaagctgaataggttgatcgggaaaaccaacgagaaattccatcagattgaaaaagaattctcagaagtagaagggagaattcaggacctcgagaaatatgttgaggacactaaaatagatctctggtcatacaacgcggagcttcttgttgccctggagaaccaacatacaattgatctaactgactcagaaatgaacaaactgtttgaaagaacaaagaagcaactgagggaaaatgctgaggatatgggcaatggttgtttcaaaatataccacaaatgtgacaatgcctgcatagggtcaatcagaaatggaacttatgaccatgatgtatacagagatgaagcattaaacaaccggttccagatcaaaggtgttgagctgaagtcaggatacaaagattggatcctatggatttcctttgccatatcatgttttttgctttgtgttgctttgttggggttcatcatgtgggcctgccaaaaaggcaacattaggtgcaacatttgcatttga

SEQ ID NO: 30759 - RNA, 1701 nt, synthetic construct
  misc_feature 1..1701: note = hemagglutinin__InfluenzaA__AAZ74452
  source 1..1701: mol_type = other RNA
atgaagactatcattgctttgagctacattctatgtctggttttcgctcaaaaacttcccggaaacgacaacagcacggcaacgctgtgccttgggcaccatgcagtaccaaacggaacgatagtgaaaacaatcacgaatgaccaaattgaagttactaatgctactgagctggttcagagttcctcaacaggtggaatatgcgacagtcctcatcagatccttgatggagaaaactgcacactaatagatgctctattgggagaccctcagtgtgatggcttccaaaataagaaatgggacctttttattgaacgcagcaaagcctacagcaactgttacccttatgatgtgccggattatgcctcccttaggtcactagttgcctcatccggcacactggaatttaacaatgaaagcttcaattggactggagtcactcaaaatggaacaagctctgcttgcaaaaggagatctaataacagtttctttagtagattgaattggttgacccacttaaaattcaaatacccagcattgaacgtgactatgccaaacaatgaaaaatttgacaaattgtacatttggggggttcaccacccgggtacggacaatgaccaaatcagcctatatgctcaagcttcaggaagaatcacagtctctaccaaaagaagccaacaaactgtaatcccgaatatcggatctagacccagggtaagggatatccccagcagaataagcatctattggacaatagtaaaaccgggagacatacttttgattaacagcacagggaatctaattgctcctcggggttacttcaaaatacgaagtgggaaaagctcaataatgagatcagatgcacccattggcaaatgcaattctgaatgcatcacaccaaatggaagcattcccaatgacaaaccatttcaaaatgtaaacaggatcacatatggggcctgtcccagatatgttaagcaaaacactctgaaattggcaacagggatgcgaaatgtaccagagaaacaaactagaggcatatttggcgcaatcgcgggtttcatagaaaatggttgggagggaatggtggatggttggtacggtttcaggcatcaaaattctgagggaataggacaagcagcagatctcaaaagcactcaagcagcaatcaaccaaatcaatgggaagctgaataggttgatcgggaaaaccaacgagaaattccatcagattgaaaaagaattctcagaagtagaagggagaattcaggacctcgagaaatatgttgaggacactaaaatagatctctggtcatacaacgcggagcttcttgttgccctggagaaccaacatacaattgatctaactgactcagaaatgaacaaactgtttgaaagaacaaagaaacaactgagggaaaatgctgaggatatgggcaatggttgtttcaaaatataccacaaatgtgacaatgcctgcatagggtcaatcagaaatggaacttatgaccatgatgtatacagagatgaagcattgaacaaccggttccagatcaaaggtgttgagctgaagtcagggtacaaagattggatcctatggatttcctttgccatatcatgttttttgctttgtgttgctttgttggggttcatcatgtgggcctgccaaaaaggcaacattaggtgcaacatttgcatttga

SEQ ID NO: 30760 - RNA, 1701 nt, synthetic construct
  misc_feature 1..1701: note = hemagglutinin__InfluenzaA__AAZ74463
  source 1..1701: mol_type = other RNA
atgaagactatcattgctttgagctacattctatgtctggttttcgctcaaaaacttcccggaaatgacaacagcacggcaacgctgtgccttgggcaccatgcagtaccaaacggaacgatagtgaaaacaatcacgaatgaccaaattgaagttactaatgctactgagctggttcagagttcctcaacaggtggaatatgcgacagtcctcatcagatccttgatggagaaaactgcacactaatagatgctctattgggagaccctcagtgtgatggcttccaaaataagaaatgggacctttttgttgaacgcagcaaagcctacagcaactgttacccttatgatgtgccggattatgcctcccttaggtcactagttgcctcatccggcacactggagtttaacaatgaaagcttcaattggactggagtcactcaaaatggaacaagctctgcttgtaaaaggagatctaataacagtttctttagtagattgaattggttgacccacttaaaattcaaatacccagcattgaacgtgactatgccaaacaatgaaaaatttgacaaattgtacatttggggggttcaccacccgggtacggacaatgaccaaattagcctatatgctcaagcttcaggaagaatcacagtctctaccaaaagaagccaacaaactgtaatcccgaatatcggatctagacccagggtaagggatatccccagcagaataagcatctattggacaatagtaaaaccgggagacatacttttgattaacagcacagggaatctaattgctcctcggggttacttcaaaatacgaagtgggaaaagctcaataatgagatcagatgcacccattggcaaatgcaattctgaatgcatcactccaaatggaagcattcccaatgacaaaccatttcaaaatgtaaacaggatcacatatggggcctgtcccagatatgttaagcaaaacactctgaaattggcaacagggatgcgaaatgtaccagagaaacaaactagaggcatatttggcgcaatcgcgggtttcatagaaaatggttgggagggaatggtggatggttggtacggtttcaggcatcaaaattctgagggaataggacaagcagcagatctcaaaagcactcaagcagcaatcaaccaaatcaatgggaagctgaataggttgatcgggaaaaccaacgagaaattccatcagattgaaaaagaattctcagaagtagaagggagaattcaggacctcgagaaatatgttgaggacactaaaatagatctctggtcatacaacgcggagcttcttgttgccctggagaaccaacatacaattgatctaactgactcagaaatgaacaaactgtttgaaagaacaaagaagcaactgagggaaaatgctgaggatatgggcaatggttgtttcaaaatataccacaaatgtgacaatgcctgcatagggtcaatcagaaatggaacttatgaccatgatgtatacagagatgaagcattaaacaaccggttccagatcaaaggtgttgagctgaagtcaggatacaaagattggatcctatggatttcctttgccatatcatgttttttgctttgtgttgttttgttggggttcatcatgtgggcctgccaaaaaggcaacattaggtgcaacatttgcatttga

SEQ ID NO: 30761 - RNA, 1701 nt, synthetic construct
  misc_feature 1..1701: note = hemagglutinin__InfluenzaA__AAZ74474
  source 1..1701: mol_type = other RNA
atgaagactatcattgctttgagctacattctatgtctggttttcgctcaaaaacttcccggaaatgacaacagcacggcaacgctgtgccttgggcaccatgcagtaccaaacggaacgatagtgaaaacaatcacgaatgaccaaattgaagttactaatgctactgagctggttcagagttcctcaactggtggaatatgcgacagtcctcatcagatccttgatggagaaaactgcacactaatagatgctctattgggagaccctcagtgtgatggcttccaaaataagaaatgggacctttttgttgaacgcagcaaagcctacagcaactgttacccttatgatgtgccggattatgcctcccttaggtcactagttgcctcatccggcacactggagtttaacaatgaaagcttcaattggactggagtcactcaaaatggaacaagctctgcttgcaaaaagagatctaataacagtttctttagtagattgaattggttgacccacttaaaattcaaatacccagcactgaacgtgactatgccaaacaatgaaaaatttgacaaattgtacatttggggggttcaccacccgggtacggacaatgaccaaatcagcctatatgctcaagcatcaggaagaatcacagtctctaccaaaagaagccaacaaactgtaatcccgaatatcggatctagacccagggtaagggatatccccagcagaataagcatctattggacaatagtaaaaccgggagacatacttttgattaacagcacagggaatctaattgctcctcggggttacttcaaaatacgaagtgggaaaagctcaataatgagatcagatgcacccattggcaaatgcaattctgaatgcatcactccaaatggaagcattcccaatgacaaaccatttcaaaatgtaaacaggatcacatatggggcctgtcccagatatgttaagcaaaacactctgaaattggcaacagggatgcgaaatgtaccagagaaacaaactagaggcatatttggcgcaatcgcgggtttcatagaaaatggttgggagggaatggtggatggttggtacggtttcaggcatcaaaattctgagggaataggacaagcagcagatctcaaaagcactcaagcagcaatcaaccaaatcaatgggaagctgaataggttgatcggaaaaaccaacgagaaattccatcagattgaaaaagaattctcagaagtagaagggagaattcaggacctcgagaaatatgttgaggacactaaaatagatctctggtcatacaacgcggagcttcttgttgccctggagaaccaacatacaattgatctaactgactcagaaatgaacaaactgtttgaaagaacaaagaagcaactgagggaaaatgctgaggatatgggcaatggttgtttcaaaatataccacaaatgtgacaatgcctgcatagggtcaatcagaaatggaacttatgaccatgatgtatacagagatgaagcattaaacaaccggttccagatcaaaggtgttgagctgaagtcaggatacaaagattggatcctatggatttcctttgccatatcatgttttttgctttgtgttgctttgttggggttcatcatgtgggcctgccaaaaaggcaacattaggtgcaacatttgcatttga

SEQ ID NO: 30762 - RNA, 1701 nt, synthetic construct
  misc_feature 1..1701: note = hemagglutinin__InfluenzaA__AAZ74485
  source 1..1701: mol_type = other RNA
atgaagactatcattgctttgagctacattctatgtctggttttcgctcaaaaacttcccggaaatgacaacagcacggcaacgctgtgccttgggcaccatgcagtaccaaacggaacgatagtgaaaacaatcacgaatgaccaaattgaagttactaatgctactgagctggttcagagttcctcaacaggtggaatatgcgacagtcctcatcagatccttgatggagaaaactgcacactaatagatgctctattgggagaccctcagtgtgatggcttccaaaataagaaatgggacctttttattgaacgcagcaaagcctacagcaactgttacccttatgatgtgccggattatgcctcccttaggtcactagttgcctcatccggcacactggaatttaacaatgaaagcttcaattggactggagtcactcaaaatggaacaagctctgcttgcaaaaggagatctaataacagtttctttagtagattgaattggttgacccacttaaaattcaaatacccagcattgaacgtgactatgccaaacaatgaaaaatttgacaaattgtacatttggggggttcaccacccgggtacggacaatgaccaaatcagcctatatgctcaagcttcaggaagaatcacagtctctaccaaaagaagccaacaaactgtaatcccgaatatcggatctagacccagggtaagggatatccccagcagaataagcatctattggacaatagtaaaaccgggagacatacttttgattaacagcacagggaatctaattgctcctcggggttacttcaaaatacgaagtgggaaaagctcaataatgagatcagatgcacccattggcaaatgcaattctgaatgcatcactccaaatggaagcattcccaatgacaaaccatttcaaaatgtaaacaggatcacatatggggcctgtcccagatatgttaagcaaaacactctgaaattggcaacagggatgcgaaatgtaccagagaaacaaactagaggcatatttggcgcaatcgcgggtttcatagaaaatggttgggagggaatggtggatggttggtacggtttcaggcatcaaaattctgagggaataggacaagcagcagatctcaaaagcactcaagcagcaatcaaccaaatcaatgggaagctgaataggttgatcgggaaaaccaacgagaaattccatcagattgaaaaagaattctcagaagtagaagggagaattcaggacctcgagaaatacgttgaggacactaaaatagatctctggtcatacaacgcagagcttcttgttgccctggagaaccaacatacaattgatctaactgactcagaaatgaacaaactgtttgaaagaacaaagaagcaactgagggaaaatgctgaggatatgggcaatggttgtttcaaaatataccacaaatgtgacaatgcctgcatagggtcaatcagaaatggaacttatgaccatgatgtatacagagatgaggcattgaacaaccggttccagatcaaaggtgttgagctgaagtcaggatacaaagattggatcctatggatttcctttgccatatcatgttttttgctttgtgttgctttgttggggttcatcatgtgggcctgccaaaaaggcaacattaggtgcaacatttgcatttga

SEQ ID NO: 30763 - RNA, 1701 nt, synthetic construct
  misc_feature 1..1701: note = hemagglutinin__InfluenzaA__AAZ74496
  source 1..1701: mol_type = other RNA
atgaagactatcattgctttgagctacattctatgtctggttttcgctcaaaaacttcccggaaatgacaacagcacggcaacgctgtgccttgggcaccatgcagtaccaaacggaacgatagtgaaaacaatcacgaatgaccaaattgaagttactaatgctactgagctggttcagagttcctcaacaggtggaatatgcgacagtcctcatcagatccttgatggagaaaactgcacactaatagatgctctattgggagaccctcagtgtgatggcttccaaaataagaaatgggacctttttgttgaacgcagcaaagcctacagcaactgttacccttatgatgtgccggattatgcctcccttaggtcactagttgcctcatccggcacactggagtttaacaatgaaagcttcaattggactggagtcactcaaaatggaacaagctctgcatgcaaaaggagatctaataacagtttctttagtagattgaattggttgacccacttaaaattcaaatacccagcattgaacgtgactatgccaaacaatgaaaaatttgacaaattgtacatttggggggttcaccacccgggtacggacaatgaccaaattagcctatatgctcaagcttcaggaagaatcacagtctctaccaaaagaagccaacaaactgtaatcccgaatatcggatctagacccagggtaagggatatccccagcagaataagcatctattggacaatagtaaaaccgggagacatacttttgattaacagcacagggaatctaattgctcctcggggttacttcaaaatacgaagtgggaaaagctcaataatgagatcagatgcacccattggcaaatgcaattctgaatgcatcactccaaatggaagcattcccaatgacaaaccatttcaaaatgtaaacaggatcacatatggggcctgtcccagatatgttaagcaaaacactctgaaattggcaacagggatgcgaaatgtaccagagaaacaaactagaggcatatttggcgcaatcgcgggtttcatagaaaatggttgggagggaatggtggatggttggtacggtttcaggcatcaaaattctgagggaataggacaagcagcagatctcaaaagcactcaagcagcaatcaaccaaatcaatgggaagctgaataggttgatcgggaaaaccaacgagaaattccatcagattgaaaaagaattctcagaagtagaagggagaattcaggacctcgagaaatatgttgaggacactaaaatagatctctggtcatacaacgcggagcttcttgttgccctggagaaccaacatacaattgatctaactgactcagaaatgaacaaactgtttgaaagaacaaagaagcaactgagggaaaatgctgaggatatgggcaatggttgtttcaaaatataccacaaatgtgacaatgcctgcatagggtcaatcagaaatggaacttatgaccatgatgtatacagagatgaagcattaaacaaccggttccagatcaaaggtgttgagctgaagtcaggatacaaagattggatcctatggatttcctttgccatatcatgttttttgctttgtgttgttttgttggggttcatcatgtgggcctgccaaaaaggcaacattaggtgcaacatttgcatttga

SEQ ID NO: 30764 - RNA, 1701 nt, synthetic construct
  misc_feature 1..1701: note = hemagglutinin__InfluenzaA__AAZ74507
  source 1..1701: mol_type = other RNA
atgaagactatcattgctttgagctacattctatgtctggttttcgctcaaaaacttcccggaaatgacaacagcacggcaacgctgtgccttgggcaccatgcagtaccaaacggaacgatagtgaaaacaatcacgaatgaccaaattgaagttactaatgctactgagctggttcagagttcctcaacaggtggaatatgcgacagtcctcatcagatccttgatggagaaaactgcacactaatagatgctctattgggagaccctcagtgtgatggcttccaaaataagaaatgggacctttttattgaacgcagcaaagcctacagcaactgttacccttatgatgtgccggattatgcctcccttaggtcactagttgcctcatccggcacactggaatttaacaatgaaagcttcaattggactggagtcactcaaaatggaacaagctctgcttgcaaaaggagatctaataacagtttctttagtagattgaattggttgacccacttaaaattcaaatacccagcattgaacgtgactatgccaaacaatgaaaaatttgacaaattgtacatttggggggttcaccacccgggtacggacaatgaccaaatcagcctatatgctcaagcttcaggaagaatcacagtctctaccaaaagaagccaacaaactgtaatcccgaatatcggatctagacccagggtaagggatatccccagcagaataagcatctattggacaatagtaaaaccgggagacatacttttgattaacagcacagggaatctaattgctcctcggggttacttcaaaatacgaagtgggaaaagctcaataatgagatcagatgcacccattggcaaatgcaattctgaatgcatcactccaaatggaagcattcccaatgacaaaccatttcaaaatgtaaacaggatcacatatggggcctgtcccagatatgttaagcaaaacactctgaaattggcaacagggatgcgaaatgtaccagagaaacaaactagaggcatatttggcgcaatcgcgggtttcatagaaaatggttgggagggaatggtggatggttggtacggtttcaggcatcaaaattctgagggaataggacaagcagcagatctcaaaagcactcaagcagcaatcaaccaaatcaatgggaagctgaataggttgatcgggaaaaccaacgagaaattccatcagattgaaaaagaattctcagaagtagaagggagaattcaggacctcgagaaatatgttgaggacactaaaatagatctctggtcatacaacgcggagcttcttgttgccctggagaaccaacatacaattgatctaactgactcagaaatgaacaaactgtttgaaagaacaaagaagcaactgagggaaaatgctgaggatatgggcaatggttgtttcaaaatataccacaaatgtgacaatgcctgcatagggtcaatcagaaatggaacttatgaccatgatgtatacagagatgaggcattgaacaaccggttccagatcaaaggtgttgagctgaagtcaggatacaaagattggatcctatggatttcctttgccatatcatgttttttgctttgtgttgctttgttggggttcatcatgtgggcctgccaaaaaggcaacattaggtgcaacatttgcatttga

SEQ ID NO: 30765 - RNA, 1701 nt, synthetic construct; identical to SEQ ID NO: 30763
  misc_feature 1..1701: note = hemagglutinin__InfluenzaA__AAZ74518
  source 1..1701: mol_type = other RNA

SEQ ID NO: 30766 - RNA, 1701 nt, synthetic construct
  misc_feature 1..1701: note = hemagglutinin__InfluenzaA__AAZ74529
  source 1..1701: mol_type = other RNA
atgaagactatcattgctttgagctacattctatgtctggttttcgctcaaaaacttcccggaaatgacaacagcacggcaacgctgtgccttgggcaccatgcagtaccaaacggaacgatagtgaaaacaatcacgaatgaccaaattgaagttactaatgctactgagctggttcagagttcctcaacaggtggaatatgcgacagtcctcatcagatccttgatggagaaaactgcacactaatagatgctctattgggagaccctcagtgtgatggcttccaaaataagaaatgggacctttttattgaacgcagcaaagcctacagcaactgttacccttatgatgtgccggattatgcctcccttaggtcactagttgcctcatccggcacactggaatttaacaatgaaagcttcaattggactggagtcactcaaaatggaacaagctctgcttgcaaaaggagatctaataacagtttctttagtagattgaattggttgacccacttaaaattcaaatacccagcattgaacgtgactatgccaaacaatgaaaaatttgacaaattgtacatttggggggttcaccacccgggtacggacaatgaccaaatcagcctatatgctcaagcttcaggaagaatcacagtctctaccaaaagaagccaacaaactgtaatcccgaatatcggatctagacccagggtaagggatatccccagcagaataagcatctattggacaatagtaaaaccgggagacatacttttgattaacagcacagggaatctaattgctcctcggggttacttcaaaatacgaagtgggaaaagctcaataatgagatcagatgcacccattggcaaatgcaattctgaatgcatcactccaaatggaagcattcccaatgacaaaccatttcaaaatgtaaacaggatcacatatggggcctgtcccagatatgttaagcaaaacactctgaaattggcaacagggatgcgaaatgtaccagagaagcaaactagaggcatatttggcgcaatcgcgggtttcatagaaaatggttgggagggaatggtggatggttggtacggcttcaggcatcaaaattctgagggaataggacaagcagcagatctcaaaagcactcaagcagcaatcaaccaaatcaatgggaagctgaataggttgatcgggaaaaccaacgagaaattccatcagattgaaaaagaattctcagaagtagaagggagaattcaggacctcgagaaatatgttgaggacactaaaatagatctctggtcatacaacgcggagcttcttgttgccctggagaaccaacatacaattgatctaactgactcagaaatgaacaaactgtttgaaagaacaaagaagcaactgagggaaaatgctgaggatatgggcaatggttgtttcaaaatataccacaaatgtgacaatgcctgcatagggtcaatcagaaatggaacttatgaccatgatgtatacagagatgaggcattgaacaaccggttccagatcaaaggtgttgagctgaagtcaggatacaaagattggatcctatggatttcctttgccatatcatgttttttgctttgtgttgctttgttggggttcatcatgtgggcctgccaaaaaggcaacattaggtgcaacatttgcatttga

SEQ ID NO: 30767 - RNA, 1701 nt, synthetic construct
  misc_feature 1..1701: note = hemagglutinin__InfluenzaA__AAZ74551
  source 1..1701: mol_type = other RNA
atgaagactatcattgctttgagctacattctatgtctggttttcgctcaaaaacttcccggaaatgacaacagcacggcaacgctgtgccttgggcaccatgcagtaccaaacggaacgatagtgaaaacaatcacgaatgaccaaattgaagttactaatgctactgagctggttcagagttcctcaacaggtggaatatgcgacagtcctcatcagatccttgatggagaaaactgcacactaatagatgctctattgggagaccctcagtgtgatggcttccaaaataagaaatgggacctttttgttgaacgcagcaaagcctacagcaactgttacccttatgatgtgccggattatgcctcccttaggtcactagttgcctcatccggcacactggagtttaacaatgaaagcttcaattggactggagtcactcaaaatggaacaagctctgcttgcaaaaggagatctaataacagtttctttagtagattgaattggttgacccacttaaaattcaaatacccagcattgaacgtgactatgccaaacaatgaaaaatttgacaaattgtacatttggggggttcaccacccgggtacggacaatgaccaaatcagcctatatgctcaagcttcaggaagaatcacagtctctaccaaaagaagccaacaaactgtaatcccgaatatcggatctagacccagggtaagggatatccccagcagaataagcatctattggacaatagtaaaaccgggagacatacttttgattaacagcacagggaatctaattgctcctcggggttacttcaaaatacgaagtgggaaaagctcaataatgagatcagatgcacccattggcaaatgcaattctgaatgcatcactccaaatggaagcattcccaatgacaaaccatttcaaaatgtaaacaggatcacatatggggcctgtcccagatatgttaagcaaaacactctgaaattggcaacagggatgcgaaatgtaccagagaaacaaactagaggcatatttggcgcaattgcgggtttcatagaaaatggttgggagggaatggtggatggttggtacggtttcaggcatcaaaattctgagggaataggacaagcagcagatctcaaaagcactcaagcagcaatcaaccaaatcaatgggaagctgaataggttgatcgggaaaaccaacgagaaattccatcagattgaaaaagaattctcagaagtagaagggagaattcaggacctcgagaaatatgttgaggacactaaaatagatctctggtcatacaacgcggagcttcttgttgccctggagaaccaacatacacttgatctaactgactcagaaatgaacaaactgtttgaaagaacaaagaagcaactgagggaaaatgctgaggatatgggcaatggttgtttcaaaatataccacaaatgtgacaatgcctgcatagggtcaatcagaaatggaacttatgaccatgatgtatacagagatgaagcattaaacaaccgattccagatcaaaggtgttgagctgaagtcaggatacaaagattggatcctatggatttcctttgccatatcatgttttttgctttgtgttgctttgttggggttcatcatgtgggcctgccaaaaaggcaacattaggtgcaacatttgcatttga

SEQ ID NO: 30768 - RNA, 1701 nt, synthetic construct
  misc_feature 1..1701: note = hemagglutinin__InfluenzaA__AAZ74562
  source 1..1701: mol_type = other RNA
atgaagactatcattgctttgagctacattttatgtctggttttcgctcaaaaacttcccggaaatgacaacagcacggcaacgctgtgcctggggcaccatgcagtgccaaacggaacgctagtgaaaacaatcacgaatgaccaaattgaggtgactaatgctactgagctggttcagagttcctcaacaggtagaatatgcgacagtcctcaccaaatccttgatggagaaaactgcacactaatagatgctctattgggagaccctcattgtgatggcttccaaaataaggaatgggacctttttgttgaacgcagcaaagcctacagcaactgttacccttatgatgtgccggattatgcctcccttaggtcactagttgcctcatccggcacactggagtttaacaatgaaagcttcaattggactggagtcgctcagaatggaacaagctctgcttgcaaaaggagatctaataaaagtttctttagtagattgaattggttacaccaattaaaatacaaatatccagcactgaacgtgactatgccaaacaatgaaaaatttgacaaattgtacatttggggggttcaccacccgagtacggacagtgaccaaatcagcctatatgctcaagcatcagggagagtcacagtctctaccaaaagaagccaacaaactgtaatcccgaatatcggatctagaccctgggtaaggggtgtctccagcagaataagcatctattggacaatagtaaaaccgggagacatacttttgattaacagcacagggaatctaattgctcctcggggttacttcaaaatacgaagtgggaaaagctcaataatgaggtcagatgcacccattggcaaatgcaattctgaatgcatcactccaaatggaagcattcccaatgacaaaccatttcaaaatgtaaacaggatcacatatggggcctgtcccagatatgttaagcaaaacactctgaaattggcaacagggatgcggaatgtaccagagaaacaaactagaggcatattcggcgcaatcgcgggtttcatagaaaatggttgggagggaatggtggacggttggtacggtttcaggcatcaaaattctgagggcacaggacaagcagcagatcttaaaagcactcaagcagcaatcaaccaaatcaacgggaaactgaataggttaatcgagaaaacgaacgagaaattccatcaaattgaaaaagaattctcagaagtagaagggagaattcaggacctcgagaaatatgttgaggacactaaaatagatctctggtcgtacaacgcggagcttcttgttgccctggagaaccaacatacaattgatctaactgactcagaaatgaacaaactgtttgaaagaacaaagaagcaactgagggaaaatgctgaggatatgggcaatggttgtttcaaaatataccacaaatgtgacaatgcctgcatagggtcaatcagaaatggaacttatgaccatgatgtatacagagacgaagcattaaacaaccggttccagatcaaaggtgttgagctgaagtcaggatacaaagattggatcctatggatttcctttgccatatcatgttttttgctttgtgttgttttgctggggttcatcatgtgggcctgccaaaaaggcaacattaggtgcaacatttgcatttga

SEQ ID NO: 30769 - RNA, 1701 nt, synthetic construct
  misc_feature 1..1701: note = hemagglutinin__InfluenzaA__AAZ74573
  source 1..1701: mol_type = other RNA
atgaagactatcattgctttgagctacattctatgtctggttttcgctcaaaaacttcccggaaatgacaacagcacggcaacgctgtgccttgggcaccatgcagtaccaaacggaacgatagtgaaaacaatcacgaatgaccaaattgaagttactaatgctactgagctggttcagagttcctcaacaggtggaatatgcgacagtcctcatcagatccttgatggagaaaactgcacactaatagatgctctattgggagaccctcagtgtgatggcttccaaaataagaaatgggacctttttattgaacgcagcaaagcctacagcaactgttacccttatgatgtgccggattatgcctcccttaggtcactagttgcctcatccggcacactggaatttaacaatgaaagcttcaattggactggagtcactcaaaatggaacaagctctgcttgcaaaaggagatctaataacagtttctttagtagattgaattggttgacccacttaaaattcaaatacccagcattgaacgtgactatgccaaacaatgaaaaatttgacaaattgtacatttggggggttcaccacccgggtacgggcaatgaccaaatcagcctatatgctcaagcttcaggaagaatcacagtctctaccaaaagaagccaacaaactgtaatcccgaatatcggatctagacccagggtaagggatatccccagcagaataagcatctattggacaatagtaaaaccgggagacatacttttgattaacagcacagggaatctaattgctcctcggggttacttcaaaatacgaagtgggaaaagctcaataatgagatcagatgcacccattggcaaatgcaattctgaatgcatcactccaaatggaagcattcccaatgacaaaccatttcaaaatgtaaacaggatcacatatggggcctgtcccagatatgttaagcaaaacactctgaaattggcaacagggatgcgaaatgtaccagagaaacaaactagaggcatatttggcgcaatcgcgggtttcatagaaaatggttgggagggaatggtggatggttggtacggtttcaggcatcaaaattctgagggaataggacaagcagcagatctcaaaagcactcaagcagcaatcaaccaaatcaatgggaagctgaataggttgatcgggaaaaccaacgagaaattccatcagattgaaaaagaattctcagaagtagaagggagaattcaggacctcgagaaatatgttgaggacactaaaatagatctctggtcatacaacgcggagcttcttgttgccctggagaaccaacatacaattgatctaactgactcagaaatgaacaaactgtttgaaagaacaaagaagcaactgagggaaaatgctgaggatatgggcaatggttgtttcaaaatataccacaaatgtgacaatgcctgcatagggtcaatcagaaatggaacttatgaccatgatgtatacagagatgaggcattgaacaaccggttccagatcaaaggtgttgagctgaagtcaggatacaaagattggatcctatggatttcctttgccatatcatgttttttgctttgtgttgctttgttggggttcatcatgtgggcctgccaaaaaggcaacattaggtgcaacatttgcatttga

SEQ ID NO: 30770 - RNA, 1701 nt, synthetic construct
  misc_feature 1..1701: note = hemagglutinin__InfluenzaA__AAZ74584
  source 1..1701: mol_type = other RNA
atgaagactatcattgctttgagctacattttatgtctagttttcgctcaaaaacttcccggaaatgacaacagcacggcaacgctgtgcctggggcaccatgcagtgccaaacggaacgctagtgaaaacaatcgcgaatgaccaaattgaagtgactaatgctactgagctggttcagagttcctcaacaggtagaatatgcgacagtcctcaccaaatccttgatggagaaaactgcacactaatagatgctctattgggagaccctcattgtgatggcttccaaaataaggaatgggacctttttgttgaacgcagcaaagcctacagcaactgttacccttatgatgtgccggattatgcttcccttaggtcactagttgcctcatccggcacactggagtttaacaatgaaagcttcaattggactggagtcgctcagaatggaacaagctctgcttgcaaaaggagatctaataaaagtttctttagtagattgaattggttgcaccaattaaaatacaaatatccagcacagaacgtgactatgccaaacaatgaaaaatttgacaaattgtacatttggggggttcaccacccgagtacggacagtgaccaaatcagcctatatgctcaagcatcagggagagtcacagtctctaccaaaagaagccaacaaactgtaatcccgaatatcggatctagaccctgggtaaggggtgtctccagcagaataagcatctattggacaatagtaaaaccgggagacatacttttgattaacagcacagggaatctaattgctcctcggggttacttcaaaatacgaagtgggaaaagctcaataatgaggtcagatgcacccattggcaaatgcaattctgaatgcatcactccaaatggaagcattcccaatgacaaaccatttcaaaatgtaaacaggatcacatatggggcctgtcccagatatgttaagcaaaacactctgaaattggcaacagggatgcggaatgtaccagagaaacaaactagaggcatattcggcgcaatcgcgggtttcatagaaaatggttgggagggaatggtggacggttggtacggtttcaggcatcaaaattctgagggcacaggacaagcagcagatcttaaaagcactcaagcagcaatcaaccaaatcaacgggaaactgaataggttaatcgagaaaacgaacgagaaattccatcaaattgaaaaagaattctcagaagtagaagggagaattcaggacctcgagaaatatgttgaggacactaaaatagatctctggtcgtacaacgcggagcttcttgttgccctggagaaccaacatacaattgatctaactgactcagaaatgaacaaactgtttgaaagaacaaagaagcaactgagggaaaatgctgaggatatgggcaatggttgtttcaaaatataccacaaatgtgacaatgcctgcatagggtcaatcagaaatggaacttatgaccatgatgtatacagagacgaagcattaaacaaccggttccagatcaaaggtgttgagctgaagtcaggatacaaagattggatcctatggatttcctttgccatatcatgttttttgctttgtgttgctttgctggggttcatcatgtgggcctgccaaaaaggcaacattaggtgcaacatttgcatttga

SEQ ID NO: 30771 - RNA, 1701 nt, synthetic construct
  misc_feature 1..1701: note = hemagglutinin__InfluenzaA__AAZ74595
  source 1..1701: mol_type = other RNA
atgaagactatcattgctttgagctacattctatgtctggttttcgctcaaaaacttcccggaaatgacaacagcacggcaacgctgtgccttgggcaccatgcagtaccaaacggaacgatagtgaaaacaatcacgaatgaccaaattgaagttactaatgctactgagctggttcagagttcctcaacaggtggaatatgcgacagtcctcatcagatccttgatggagaaaactgcacactaatagatgctctattgggagaccctcagtgtgatggcttccaaaataagaaatgggacctttttgttgaacgcagcaaagcctacagcaactgttacccttatgatgtgccggattatgcctcccttaggtcactagttgcctcatccggcacactggagtttaacaatgaaagcttcaattggactggagtcactcaaaatggaacaagctctgcttgcaaaaggagatctaataacagtttctttagtagattgaattggttgacccacttaaaattcaaatacccagcattgaacgtgactatgccaaacaatgaaaaatttgacaaattgtacatttggggggttcaccacccgggtacggacaatgaccaaatcagcctatatgctcaagcatcaggaagaatcacagtctctaccaaaagaagccaacaaactgtaatcccgaatatcggatctagacccagggtaagggatatccccagcagaataagcatctattggacaatagtaaaaccgggagacatacttttgattaacagcacagggaatctaattgctcctcggggttacttcaaaatacgaagtgggaaaagctcaataatgagatcagatgcacccattggcaaatgcaattctgaatgcatcactccaaatggaagcattcccaatgacaaaccatttcaaaatgtaaacaggatcacatatggggcctgtcccagatatgttaagcaaaacactctgaaattggcaacagggatgcgaaatgtaccagagaaacaaactagaggcatatttggcgcaatcgcgggtttcatagaaaatggttgggagggaatggtggatggttggtacggtttcaggcatcaaaattctgagggaataggacaagcagcagatctcaaaagcactcaagcagcaatcaaccaaatcaatgggaagctgaataggttgatcgggaaaaccaacgagaaattccatcagattgaaaaagaattctcagaagtagaagggagaattcaggacctcgagaaatatgttgaggacactaaaatagatctctggtcatacaacgcggagcttcttgttgccctggagaaccaacatacaattgatctaactgactcagaaatgaacaaactgtttgaaagaacaaagaagcaactgagggaaaatgctgaggatatgggcaatggttgtttcaaaatataccacaaatgtgacaatgcctgcatagggtcaatcagaaatggaacttatgaccatgatgtatacagagatgaagcattaaacaaccggttccagatcaaaggtgttgagctgaagtcaggatacaaagattggatcctatggatttcctttgccatatcatgttttttgctttgtgttgctttgttggggttcatcatgtgggcctgccaaaaaggcaacattaggtgcaacatttgcatttga

SEQ ID NO: 30772 - RNA, 1701 nt, synthetic construct
  misc_feature 1..1701: note = hemagglutinin__InfluenzaA__AAZ74617
  source 1..1701: mol_type = other RNA
atgaagactatcattgctttgagctacattttatgtctggttttcgctcaaaaacttcccgtaaatgacaacagcacggcaacgctgtgcctgggacaccatgcagtgccaaacggaacgctagtgaaaacaatcacgaatgaccacattgaagtgactaatgctactgagctggttcagagttcctcaacaggtagaatatgcgacagtcctcaccaaatccttgatggagaaaactgcacactaatagatgctctattgggagaccctcattgtgatggcttccagaataaggaatgggacctttttgttgaacgcagcacagcctacagcaactgttacccttatgatgtgccggattatgcctcccttaggtcactagttgcctcatccggcacactggagtttaacaatgaaagcttcaattggactggagtcgctcagaatggaacaagctctgcttgcaaaaggagatctattaaaagtttctttagtagattgaattggttgcaccaattaaaatacaaatatccagcactgaacgtgactatgccaaacaatgaaaaatttgacaaattgtacatttggggggttcaccacccgagtacggacagtgaccaaatcagcctatatgctcaagcatcagggagagtcacagtctctaccaaaagaagccaacaaactgtaatcccgaatatcggatctagaccctgggtaaggggtgtctccagcaaaataagcatctattggacaatagtaaaaccgggagacatacttttgattaacagcacagggaatctaattgctcctcggggttactttaaaatacgaagtgggaaaagctcaataatgaggtcaaatgcacccattggcaaatgcaattctgaatgcatcactccaaatggaagcattcccaatgacaaaccatttcaaaatgtaaacaggatcacatatggggcctgtcccagatatgttaagcaaaacactctgaaattggcaacagggatgcggaatgtaccagagaaacaaactagaggcatattcggcgcaatcgcgggtttcatagaaaatggttgggagggaatggtggacggttggtacggtttcaggcatcaaaattctgagggcacaggacaagcagcagatcttaaaagcactcaagcagcaatcaaccaaatcaacgggaaactgaataggttaatcgagaaaacaaacgagaaattccatcaaattgaaaaagaattctcagaagtagaagggagaattcaggacctcgagaaatatgttgaggacactaaaatagatctctggtcgtacaacgcggagcttcttgttgccctggagaaccaacatacaattgatctaactgactcagaaatgaacaaactgtttgaaagaacaaggaagcaactgagggaaaatgctgaggatatgggcaatggttgtttcaaaatataccacaaatgtgacaatgcctgcatagggtcaatcagaaatggaacttatgaccatgatgtatacagagacgaagcattaaacaaccggttccagatcaaaggtgttgagctgaagtcaggatacaaagattggatcctatggatttcctttgccatatcatgttttttgctttgtgttgttttgctggggttcatcatgtgggcctgccaaaaaggcaacattaggtgcaacatttgcatttga

SEQ ID NO: 30773 - RNA, 1701 nt, synthetic construct; identical to SEQ ID NO: 30574
  misc_feature 1..1701: note = hemagglutinin__InfluenzaA__AAZ79505
  source 1..1701: mol_type = other RNA

SEQ ID NO: 30774 - RNA, 1701 nt, synthetic construct
  misc_feature 1..1701: note = hemagglutinin__InfluenzaA__AAZ79516
  source 1..1701: mol_type = other RNA
atgaagactatcattgctttgagctacattttatgtctggttttcgctcaaaaacttcccggaaatgacaacagcacggcaacgctgtgcctggggcaccatgcagtgccaaacggaacgctagtgaaaacaatcacgaatgaccaaattgaagtgactaatgctactgagctggttcagagttcctcaacaggtagaatatgcgacagtcctcaccaaatccttgatggagaaaactgcacactaatagatgctctattgggagaccctcattgtgatggcttccaaaataaggaatgggacctttttgttgaacgcagcaaagcctacagcaactgttacccttatgatgtgccggattatgcctcccttaggtcactagttgcctcatccggcacactggagtttaacaatgaaagcttcaattggactggagtcgctcagaatggaacaagctctgcttgcaaaaggagatctaataaaagtttctttagtagattgaattggttgcaccaattaaaatacaaatatccagcactgaacgtgactatgccaaacaatgaaaaatttgacaaattgtacatttggggggtccaccacccgagtacggacagtgaccaaatcagcctatatgctcaagcatcagggagagtcacagtctctaccaaaagaagccaacaaactgtaatcccgaatatcggatctagaccctgggtaaggggtgtctccagcagaataagcatctattggacaatagtaaaaccgggagacatacttttgattaacagcacagggaatctaattgctcctcggggttacttcaaaatacgaagtgggaaaagctcaataatgaggtcagatgcacccattggcaaatgcaattctgaatgcatcactccaaatggaagcattcccaatgacaaaccatttcaaaatgtaaacaggatcacatatggggcctgtcccagatatgttaagcaaaacactctgaaattggcaacagggatgcggaatgtaccagagaaacaaactagaggcatattcggcgcaatcgcgggtttcatagaaaatggttgggagggaatggtggacggttggtacggtttcaggcatcaaaattctgagggcacaggacaagcagcagatcttaaaagcactcaagcagcaatcaaccaaatcaacgggaaactgaataggttaatcgagaaaacgaacgagaaattccatcaaattgaaaaagaattctcagaagtagaagggagaattcaggacctcgagaaatatgttgaggacactaaaatagatctctggtcgtacaacgcggagcttcttgttgccctggagaaccaacatacaattgatctaactgactcagaaatgaacaaactgtttgaaagaacaaagaagcaactgagggaaaatgctgaggatatgggcaatggttgtctcaaaatataccacaaatgtgacaatgcctgcatagggtcaatcagaaatggaacttatgaccatgatgtatacagagacgaagcattaaacaaccggttccagatcaaaggtgttgagctgaagtcaggatacaaagattggatcctatggatttcctttgccatatcatgttttttgctttgtgttgttttgctggggttcatcatgtgggcctgccaaaaaggcaacattaggtgcaacatttgcatttga

SEQ ID NO: 30775 - RNA, 1701 nt, synthetic construct
  misc_feature 1..1701: note = hemagglutinin__InfluenzaA__AAZ79527
  source 1..1701: mol_type = other RNA
atgaagactatcattgctttgagctacattctatgtctggttttcgctcaaaaacttcccggaaatgacaacagcacggcaacgctgtgccttgggcaccatgcagtaccaaacggaacgatagtgaaaacaatcacgaatgaccaaattgaagttactaatgctactgagctggtacagagttcctcaacaggtggaatatgcgacagtcctcatcagatccttgatggagaaaactgcacactaatagatgctctattgggagaccctcagtgtgatggcttccaaaataagaaatgggacctttttgttgaacgcagcaaagcctacagcaactgttacccttatgatgtgccggattatgcctcccttaggtcactagttgcctcatccggcacactggagtttaacaatgaaagcttcgattggactggagtcactcagaatggaacaagctctgcttgcaaaaggagatctaataaaagtttctttagtagattgaattggttgacccacttaaaatacaaatacccagcattgaacgtgactatgccaaacaatgaaaaatttgacaaattgtacatttggggggttcaccacccgggtacggacagtgaccaaatcagcctatatgctcaagcatcaggaagaatcacagtctctaccaaaagaagccaacaaactgtaatcccgaatatcggatctagacccagggtaagggatgtctctagccgaataagcatctattggacaatagtaaaaccgggagacatacttttgattaacagcacagggaatctaattgctcctcggggttacttcaaaatacgaagtgggaaaagctcaataatgagatcagatgcacccattggcaaatgcaattccgaatgcatcactccaaatggaagcattcccaatgacaaaccatttcaaaatgtaaacaggatcacatatggggcctgtcccagatatgttaagcaaaacactttgaaattggcaacagggatgcgaaatgtaccagagagacaaactagaggaatatttggcgcaatcgcgggcttcatagaaaatggttgggagggaatggtggacggttggtacggtttcaggcatcaaaattctgagggcacaggacaagcagcagatctcaaaagcactcaagcagcaatcaaccaaatcaatgggaaactgaataggttaatcgggaaaacaaacgagaaattccatcagattgaaaaagaattctcagaagtagaagggagaattcaggacctcgagagatatgttgaggacactaaaatagatctctggtcatacaacgcggagcttcttgttgccctggagaaccaacatacaattgatctaactgactcagaaatgaacaaactgtttgaaagaacaaagaagcaactgagggaaaatgctgaggatatgggcaatggttgtttcaaaatataccacaaatgtgacaatgcctgcatagggtcaatcagaaatggaacttatgaccatgatgtgtacagagatgaagcattaaacaaccggttccagatcaaaggtgttgagctgaagtcaggatacaaagattggatcctatggatttcctttgccatatcatgttttttgctttgtgttgctttgttggggttcatcatgtgggcctgccaaaaaggcaacattaggtgcaacatttgcatttga

SEQ ID NO: 30776 - RNA, 1698 nt, synthetic construct
  misc_feature 1..1698: note = hemagglutinin__InfluenzaA__AAZ79549
  source 1..1698: mol_type = other RNA
atgaaagtaaaactactgatcctgttatgtacatttacagctacatatgcagacacaatatgtataggctaccatgccaacaactcaaccgacactgttgacacagtacttgagaagaatgtgacagtgacacactctgtcaacctacttgaggacagtcacaatggaaaactgtgcctactaaaagggatagcccccctacaattgggtaattgcagcgttgccggatggatcttaggaaacccagaatgcgaattactgatttccaaggaatcatggtcctacattgtagaaacaccaaatcctgagaatggagcatgttacccagggtatttcgccgactatgaggagctaagggagcaattgagttcagtatcttcatttgagagattcgaaatattccccaaagaaagctcatggcccaaccacaccgtaaccggagtatcagcatcatgctcccataatgggaaaagcagtttttacagaaatttgctatggctgacggggaagaatggtttgtacccaaacctgagcaaatcctatgcaaacaacaaagagaaagaagtccttatactatggggtgttcatcacccgcctaacatagggaaccaaaggaccctctatcacacagaaaatgcttatgtctctgtagtgtcttcacattatagcagaagattcaccccagaaataaccaaaaggcccaaagtaagagatcaggaaggaagaatcaactactactggactctgctggaacccggggatacaataatatttgaggcaaatggaaatctaatagcgccatggtatgctttcgcactgagtagaggctttggatcaggaatcatcacctcaaatgcaccaatggatgaatgtgatgcgaagtgtcaaacacctcagggagctataaacagcagtcttcctttccagaatgtacacccagtcacaataggagagtgtccaaagtatgtcaggagtgcaaaattaaggatggttacaggactaaggaacatcccatccattcaatccagaggtttgtttggagccattgccggtttcattgaaggggggtggactggaatggtagatgggtggtatggttatcatcatcagaatgagcaaggatctggctatgctgcagatcaaaaaagcacacaaaatgccattaacgggattacaaacaaggtgaattctgtaattgagaaaatgaacactcaattcacagctgtgggcaaagaattcaacaaattggaaagaaggatggaaaacttaaataaaaaggttgatgatgggtttctagacatttggacatataatgcagaattgttggttctactggaaaatgaaaggactttggatttccacgactccaatgtgaagaatctgtacgagaaagtaaaaagccaattaaagaataatgccaaagaaataggaaatgggtgttttgaattctatcacaagtgtaacaatgaatgcatggagagtgtgaaaaatggaacttatgactatccaaaatattccgaagaatcaaagttaaacagggaaaaaattgatggagtgaaattggactcaatgggggtctatcagattctggcgatctactcaactgtcgccagttccctggttcttttggtctccctgggggcaatcagcttctggatgtgttccaatgggtccttgcagtgtagaatatgcatctga

SEQ ID NO: 30777 - RNA, 1701 nt, synthetic construct
  misc_feature 1..1701: note = hemagglutinin__InfluenzaA__AAZ79560
  source 1..1701: mol_type = other RNA
atgaagactatcattgctttgagctacattttatgtctggttttcgctcaaaaacttcccggaaatgacaacagcacggcaacgctgtgcctggggcaccatgcagtgccaaacggaacgctagtgaaaacaatcacgaatgaccaaattgaagtgactaatgctactgagctggttcagagttcctcaacaggtagaatatgcgacagtcctcaccaaatccttgatggagaaaactgcacactaatagatgctctattgggagaccctcattgtgatggcttccaaaataaggaatgggacctttttgttgaacgcagcaaagcctacagcaactgttacccttatgatgtgccggattatgcctcccttaagtcactagttgcctcatccggcacactggagtttaacaatgaaagcttcaattggactggagtcgctcagaatggaacaagctctgcttgcaaaaggagatctaataaaagtttctttagtagattgaattggttgcaccaattaaaatacaaatatccagcactgaacgtgactatgccaaacaatgaaaaatttgacaaattgtacatttggggggttcaccacccgagtacggacagtgaccaaatcagcctatatgctcaagcatcagggagagtcacagtctctaccaaaagaagccaacaaactgtaatcccgaatatcggatctagaccctgggtaaggggtgtctccagcagaataagcatctattggacaatagtaaaaccgggagacatacttttgattaacagcacagggaatctaattgctcctcggggttacttcaaaatacgaagtgggaaaagctcaataatgaggtcaaatgcacccattggcaaatgcaattctgaatgcatcactccaaatggaagcattcccaatgacaaaccatttcaaaatgtaaacaggatcacatatggggcctgtcccagatatgttaagcaaaacactctgaaattggcaacagggatgcggaatgtaccagagaaacaaactagaggcatattcggcgcaatcgcgggtttcatagaaaatggttgggagggaatggtggacggttggtacggtttcaggcatcaaaattctgagggcacaggacaagcagcagatcttaaaagcactcaagcagcaatcaaccaaatcaacgggaaactgaataggttaatcgagaaaacgaacgagaaattccatcaaattgaaaaagaattctcagaagtagaagggagaattcaggacctcgagaaatatgttgaggacactaaaatagatctctggtcatacaacgcggagcttcttgttgccctggagaaccaacatacaattgatctaactgactcagaaatgaacaaactgtttgaaagaacaaagaagcaactgagggaaaatgctgaggatatgggcaatggttgtttcaaaatataccacaaatgtgacaatgcctgcatagggtcaatcagaaatggaacttatgaccatgatgtatacagagacgaagcattaaacaaccggttccagatcaaaggtgttgagctgaagtcaggatacaaagattggatcctatggatttcctttgccatatcatgttttttgctttgtgttgttttgctggggttcatcatgtgggcctgccaaaaaggcaacattaggtgcaacatttgcatttga

SEQ ID NO: 30778 - RNA, 1701 nt, synthetic construct
  misc_feature 1..1701: note = hemagglutinin__InfluenzaA__AAZ79571
  source 1..1701: mol_type = other RNA
atgaagactatcattgctttgagctacattttatgtctggttttcgctcaaaaacttcccggaaatgacaacagcacggcaacgctgtgcctggggcaccatgcagtgccaaacggaacgctagtgaaaacaatcacgaatgaccaaattgaagtgactaatgctactgagctggttcagagttcctcaacaggtagaatatgcgacagtcctcaccaaatccttgatggagaaaactgcacactaatagatgctctattgggagaccctcgttgtgatggcttccaaaataaggaatgggacctttttgttgaacgcagcaaagcctacagcaactgttacccttatgatgtgccggattatgcctcccttaggtcactagttgcctcatccggcacactggagtttaacaatgaaagcttcaattggactggagtcgctcagaatggaacaagctctgcttgcaaaaggagatctaataaaagtttctttagtagattgaattggttgcaccaattaaaatacaaatatccagcactgaacgtgactatgccaaacaatgaaaaatttgacaaattgtacatttggggggttcaccacccgagtacggacagtgaccaaatcagcctatatgctcaagcatcagggagagtcacagtctctaccaaaagaagccaacaaactgtaatcccgaatatcggatctagaccctgggtaaggggtgtctccagcagaataagcatctattggacaatagtaaaaccgggagacatacttttgattaacagcacagggaatctaattgctcctcggggttacttcaaaatacgaagtgggaaaagctcaataatgaggtcagatgcacccattggcaaatgcaattctgaatgcatcactccaaatggaagcattcccaatgacaaaccatttcaaaatgtaaacaggatcacatatggggcctgtcccagatatgttaagcaaaacactctgaaattggcaacagggatgcggaatgtaccagagaaacaaactagaggcatattcggcgcaatcgcgggtttcatagaaaatggttgggagggaatggtggacggttggtacggtttcaggcatcaaaattctgagggcacaggacaagcagcagatcttaaaagcactcaagcagcaatcaaccaaatcaacgggaaactgaataggttaatcgagaaaacgaacgagaaattccatcaaattgaaaaagaattctcagaagtagaagggagaattcaggacctcgagaaatatgttgaggacactaaaatagatctctggtcgtacaacgcggagcttcttgttgccctggagaaccaacatacaattgatctaactgactcagaaatgaacaaactgtttgaaagaacaaagaagcaactgagggaaaatgctgaggatatgggcaatggttgtttcaaaatataccacaaatgtgacaatgcctgcatagggtcaatcagaaatggaacttatgaccatgatgtatacagagacgaagcattaaacaaccggttccagatcaaaggtgttgagctgaagtcaggatacaaagattggatcctatggatttcctttgccatatcatgttttttgctttgtgttgttttgctggggttcatcatgtgggcctgccaaaaaggcaacattaggtgcaacatttgcatttga

SEQ ID NO: 30779 - RNA, 1701 nt, synthetic construct
  misc_feature 1..1701: note = hemagglutinin__InfluenzaA__AAZ79582
  source 1..1701: mol_type = other RNA
atgaagactatcattgctttgagctacattttatgtctggttttcgctcaaaaacttcccggaaatgacaacagcacggcaacgctgtgcctggggcaccatgcagtgccaaacggaacgctagtgaaaacaatcacgaatgaccaaattgaagtgactaatgctactgagctggttcagagttcctcaacaggtagaatatgcgacagtcctcaccaaatccttgatggagaaaactgcacactaatagatgctctattgggagaccctcattgtgatggcttccaaaataaggaatgggacctttttgttgaacgcagcaaagcctacagcaactgttacccttatgatgtgccggattatgcctcccttaggtcactagttgcctcatccggcacactggagtttaacaatgaaagcttcaattggactggagtcgctcagaatggaacaagctctgcttgcaaaaggagatctaataaaagtttctttagtagattgaattggttgcaccaattaaaatacaaatatccagcactgaacgtgactatgccaaacaatgaaaaatttgacaaattgtacatttggggggttcaccacccgagtacggacagtgaccaaatcagcctatatgctcaagcatcagggagagtcacagtctctaccaaaagaagccaacaaactgtaatcccgaatatcggatctggaccctgggtaaggggtgtctccagcagaataagcatctattggacaatagtaaaaccgggagacatacttttgattaacagcacagggaatctaattgctcctcggggttacttcaaaatacgaagtgggaaaagctcaataatgaggtcagatgcacccattggcaaatgcaattctgaatgcatcactccaaatggaagcattcccaatgacaaaccatttcaaaatgtaaacaggatcacatatggggcctgtcccagatatgttaagcaaaacactctgaaattggcaacagggatgcggaatgtaccagagaaacaaactagaggcatattcggcgcaatcgcgggtttcatagaaaatggttgggagggaatggtggacggttggtacggtttcaggcatcaaaattctgagggcacaggacaagcagcagatcttaaaagcactcaagcagcaatcaaccaaatcaacgggaaactgaataggttaatcgagaaaacgaacgagaaattccatcaaattgaaaaagaattctcagaagtagaagggagaattcaggacctcgagaaatatgttgaggacactaaaatagatctctggtcgtacaacgcggagcttcttgttgccctggagaaccaacatacaattgatctaactgactcagaaatgaacaaactgtttgaaagaacaaagaagcaactgagggaaaatgctgaggatatgggcaatggttgtttcaaaatataccacaaatgtgacaatgcctgcatagggtcaatcagaaatggaacttatgaccatgatgtatacagagacgaagcattaaacaaccggttccagatcaaaggtgttgagctgaagtcaggatacaaagattggatcctatggatttcctttgccatatcatgttttttgctttgtgttgttttgctggggttcatcatgtgggcctgccaaaaaggcaacattaggtgcaacatttgcatttga

SEQ ID NO: 30780 - RNA, 1698 nt, synthetic construct
  misc_feature 1..1698: note = hemagglutinin__InfluenzaA__AAZ79604
  source 1..1698: mol_type = other RNA
atgaaagcaaaactactggtcctgttatgtacatttacagctacatacgcagacacaatatgtataggctaccatgccaacaactcaaccgacactgttgacacagtacttgagaagaatgtgacagtgacacactctgtcaacctacttgaggacagtcacaatggaaaactatgtctactaaaaggaatagccccactacaattgggtaattgcagcgttgccggatggatcttaggaaacccagaatgcgaattactgatttccaaggaatcatggtcctacattgtagaaacaccaaatcctgagaatggaacatgttacccagggtatttcgccgactatgaggaactgagggagcaattgagttcagtatcttcatttgagagattcgaaatattccccaaaggaagctcatggcccaaccacaccgtaaccggagtatcagcatcatgctcccataatgggaaaagcagtttttacagaaatttgctatggctgacggggaagaatggtttgtacccaaatctgagcatgtcctatgtaaacaacaaagagaaagaagtccttgtgctatggggtgttcatcacccacctaacataggggaccaaagggccctctaccatacagaaaatgcttatgtctctgtagtgtcttcacattatagcagaagattcaccccagaaatagccaaaagacccaaagtaagagatcaggaaggaagaatcaactactactggactctgctggaacccggggacacaataatatttgaggcaaatggaaatctaatagcgccatggtatgctttcgcactgagtagaggctttggatcaggaatcatcacctcaaatgcaccaatggatgaatgtgatgcgaagtgtcaaacacctcagggagctataaacagtagtcttcctttccagaatgtacacccagttacaataggagagtgtccaaagtatgtcaggagtgcaaaattaaggatggttacaggactaaggaacatcccatccattcaatccagaggtttgtttggagccattgccggtttcattgaaggggggtggactggaatggtagatgggtggtatggttatcatcatcagaatgagcaaggatctggctatgctgcagatcaaaaaagcacacaaaatgccattaacaggattacaaacaaggtgaattctgtaattgagaaaatgaacactcaattcacagctgtgggcaaagaattcaacaaattagaaagaaggatggaaaacttaaataaaaaggttgatgatgggtttctagacatttggacatataatgcagaattgttggttctactggaaaatgaaaggactttggatttccatgactccaatgtgaagaatctgtatgagaaagtaaaaagccaattaaagaataatgccaaagaaataggaaacgggtgttttgaattctatcacaagtgtaacaatgaatgcatggaaagtgtgaaaaatggaacttatgactatccgaaatattccgaagaatcaaagttaaacagggagaaaattgatggagtaaaattggaatcaatgggagtctatcagattctggcgatctactcaactgtcgctagttccctggttcttttggtctccctgggggcaatcagcttctggatgtgttccaatgggtctttgcagtgtagaatatgcatctga

SEQ ID NO: 30781 - RNA, 1701 nt, synthetic construct
  misc_feature 1..1701: note = hemagglutinin__InfluenzaA__AAZ79615
  source 1..1701: mol_type = other RNA
atgaagactatcattgctttgagctacattctatgtctggttttcgctcaaaaaattcccggaaatgacaacagcacggcaacgctgtgcgttgggcaccatgcagtaccaaacggaacgatagtgaaaacaatcacgaatgaccaaattgaagttactaatgctactgagctggttcagagttcctcaacaggtggaatatgcgacagtcctcatcagatccttgatggagaaaactgcacactaatagatgctctattgggagaccctcagtgtgatggcttccaaaataagaaatgggacctttttgttgaacgcagcaaagcctacagcaactgttacccttatgatgtgccggattatgcctcccttaggtcactagttgcctcatccggcacactggagtttaacaatgaaagcttcaattggactggagtcactcaaaatggaacaagctctgcttgcaaaaggagatctaataacagtttctttagtagattgaattggttgacccacttaaaattcaaatacccagcattgaacgtgactatgccaaacaatgaaaaatttgacaaattgtacatttggggggttcaccacccgggtacggacaatgaccaaattagcctatatgctcaagcttcaggaagaatcacagtctctaccaaaagaagccaacaaactgtaatcccgaatatcggatctagacccagggtaagggatatccccagcagaataagcatctattggacaatagtaaaaccgggagacatacttttgattaacagcacagggaatctaattgctcctcggggttacttcaaaatacgaagtgggaaaagctcaataatgagatcagatgcacccattggcaaatgcaattctgaatgcatcactccaaatggaagcattcccaatgacaaaccatttcaaaatgtaaacaggatcacatatggggcctgtcccagatatgttaagcaaaacactctgaaattggcaacagggatgcgaaatgtaccagagaaacaaactagaggcatatttggcgcaatcgcgggtttcatagaaaatggttgggagggaatggtggatggttggtacggtttcaggcatcaaaattctgagggaataggacaagcagcagatctcaaaagcactcaagcagcaatcaaccaaatcaatgggaagctgaataggttgatcgggaaaaccaacgagaaattccatcagattgaaaaagaattctcagaagtagaagggagaattcaggacctcgagaaatatgttgaggacactaaaatagatctctggtcatacaacgcggagcttcttgttgccctggagaaccaacatacaattgatctaactgactcagaaatgaacaaactgtttgaaagaacaaagaagcaactgagggaaaatgctgaggatatgggcaatggttgtttcaaaatataccacaaatgtgacaatgcctgcatagggtcaatcagaaatggaacttatgaccatgatgtatacagagatgaagcattaaacaaccggttccagatcaaaggtgttgagctgaagtcaggatacaaagattggatcctatggatttcctttgccatatcatgttttttgctttgtgttgttttgttggggttcatcatgtgggcctgccaaaaaggcaacattaggtgcaacatttgcatttga

SEQ ID NO: 30782 - RNA, 1701 nt, synthetic construct
  misc_feature 1..1701: note = hemagglutinin__InfluenzaA__AAZ79627
  source 1..1701: mol_type = other RNA
atgaagactatcattgctttgagctacattctatgtctggttttcgctcaaaaacttcccggaaatgacaacagcacggcaacgctgtgccttgggcaccatgcagtaccaaacggaacgatagtgaaaacaatcacgaatgaccaaattgaagttactaatgctactgagctggttcagagttcctcaacaggtggaatatgcgacagtcctcatcagatccttgatggagaaaactgcacactaatagatgctctattgggagaccctcagtgtgatggcttccaaaataagaaatgggacctttttgttgaacgcagcaaagcctacagcaactgttacccttatgatgtgccggattatgcctcccttaggtcactagttgcctcatccggcacactggagtttaacaatgaaagcttcaattggactggagtcactcaaaatggaacaagctctgcttgcaaaaggagatctaatagcagtttctttagtagattgaattggttgacccacttaaaattcaaatacccagcattgaaagtgactatgccaaacaatgaaaaatttgacaaattgtacatttggggggttcaccacccgggtacggacaatgaccaaatcagcctatatgctcaagcatcaggaagaatcacagtctctaccaaaagaagccaacaaactgtaatcccgaatatcggatctagacccagggtaagggatatccccagcagaataagcatctattggacaatagtaaaaccgggagacatacttttgattaacagcacagggaatctaattgctcctcggggttacttcaaaatacgaagtgggaaaagctcaataatgagatcagatgcacccattggcaaatgcaattctgaatgcatcactccaaatggaagcattcccaatgacaaaccatttcaaaatgtaaacaggatcacatatggggcctgtcccagatatgttaagcaaaacactctgaaattggcaacagggatgcgaaatgtaccagagaaacaaactagaggcatatttggcgcaatcgcgggtttcatagaaaatggttgggagggaatggtggatggttggtacggtttcaggcatcaaaattctgagggaataggacaagcagcagatctcaaaagcactcaagcagcaatcaaccaaatcaatgggaagctgaataggttgatcgggaaaaccaacgagaaattccatcagattgaaaaagaattctcagaagtagaagggagaattcaggacctcgagaaatatgttgaggacactaaaatagatctctggtcatacaacgcggagcttcttgttgccctggagaaccaacatacaattgatctaactgactcagaaatgaacaaactgtttgaaagaacaaagaagcaactgagggaaaatgctgaggatatgggcaatggttgtttcaaaatataccacaaatgtgacaatgcctgcatagggtcaatcagaaatggaacttatgaccatgatgtatacagagatgaagcattaaacaaccggttccagatcaaaggtgttgagctgaagtcaggatacaaagattggatcctatggatttcctttgccatatcatgttttttgctttgtgttgctttgttggggttcatcatgtgggcctgccaaaaaggcaacattaggtgcaacatttgcatttga

SEQ ID NO: 30783 - RNA, 1701 nt, synthetic construct
  misc_feature 1..1701: note = hemagglutinin__InfluenzaA__AAZ79941
  source 1..1701: mol_type = other RNA
atgaagactatcattgctttgagctacattctatgtctggttttcgctcaaaaacttcccggaaatgacaacagcacggcaacgctgtgccttgggcaccatgcagtaccaaacggaacgatagtgaaaacaatcacgaatgaccaaattgaagttactaatgctactgagctggttcagagttcctcaacaggtggaatatgcgacagtcctcatcagatccttgatggagaaaactgcacactaatagatgctctattgggagaccctcagtgtgatggcttccaaaataagaaatgggacctttttgttgaacgcagcaaagcctacagcaactgttacccttatgatgtgccggattatgcctcccttaggtcactagttgcctcatccggcacactggagtttaacaatgaaagcttcaattggactggagtcactcaaaatggaacaagctctgcttgcaaaaggagatctaataacagtttctttagtagattgaattggttgacccacttaaaattcaaatacccagcattgaacgtgactatgccaaacaatgaaaaatttgacaaattgtacatttggggggttcaccacccgggtacggacaatgaccaaattagcctatatgctcaagcttcaggaagaatcacagtctctaccaaaagaagccaacaaactgtaatcccgaatatcggatctagacccagggtaagggatatccccagcagaataagcatctattggacaatagtaaaaccgggagacatacttttgattaacagcacagggaatctaattgctcctcggggttacttcaaaatacgaagtgggaaaagctcaataatgagatcagatgcacccattggcaaatgcaattctgaatgcatcactccaaatggaagcattcccaatgacaaaccatttcaaaatgtaaacaggatcacatatggggcctgtcccagatatgttaagcaaaacactctgaaattggcaacagggatgcgaaatgtaccagagaaacaaactagaggcatatttggcgcaatcgcgggtttcatagaaaatggttgggagggaatggtggatggttggtacggtttcaggcatcaaaattctgagggaataggacaagcagcagatctcaaaagcactcaagcagcaatcaaccaaatcaatgggaagctgaataggttgatcgggaaaaccaacgagaaattccatcagattgaaaaagaattctcagaagtagaagggagaattcaggacctcgagaaatatgttgaggacactaaaatagatctctggtcatacaacgcggagcttcttgttgccctggagaaccaacatacaattgatctaactgactcagaaatgaacaaactgtttgaaagaacaaagaagcaactgagggaaaatgctgaggatatgggcaatggttgtttcaaaatataccacaaatgtgacaatgcctgcatagggtcaatcagaaatggaacttatgaccatgatgtatacagagatgaagcattaaacaaccggttccagatcaaaggtgttgagctgaagtcaggatacaaagattggatcctatggatttcctttgccatatcatgttttttgctttgtgttgttttgttggggttcatcatgtgggcctgccaaaaaggcaacattaggtgcaacatttgcatttga

SEQ ID NO: 30784 - RNA, 1701 nt, synthetic construct
  misc_feature 1..1701: note = hemagglutinin__InfluenzaA__AAZ79944
  source 1..1701: mol_type = other RNA
atgaagactatcattgctttgagctacattctatgtctggttttcgctcaaaaacttcccggaaatgacaacagcacggcaacgctgtgccttgggcaccatgcagtaccaaacggaacgatagtgaaaacaatcacgaatgaccaaattgaagttactaatgctactgagctggttcagagttcctcaacaggtggaatatgcgacagtcctcatcagatccttgatggagaaaactgcacactaatagatgctctattgggagaccctcagtgtgatggcttccaaaataagaaatgggacctttttattgaacgcagcaaagcctacagcaactgttacccttatgatgtgccggattatgcctcccttaggtcactagttgcctcatccggcacactggaatttaacaatgaaagcttcaattggactggagtcactcaaaatggaacaagctctgcttgcaaaaggagatctaataacagtttctttagtagattgaattggttgacccacttaaaattcaaatacccagcattgaacgtgactatgccaaacaatgaaaaatttgacaaattgtacatttggggggttcaccacccgggtacggacaatgaccaaatcagcctatatgctcaagcttcaggaagaatcacagtctctaccaaaagaagccaacaaactgtaatcccgaatatcggatctagacccagggtaagggatatccccagcagaataagcatctattggacaatagtaaaaccgggagacatacttttgattaacagcacagggaatctaattgctcctcggggttacttcaaaatacgaagtgggaaaagctcaataatgagatcagatgcacccattggcaaatgcaattctgaatgcatcactccaaatggaagcattcccaatgacaaaccatttcaaaatgtaaacaggatcacatatggggcctgtcccagatatgttaagcaaaacactctgaaattggcaacagggatgcgaaatgtaccagagaaacaaactagaggcatatttggcgcaatcgcgggtttcatagaaaatggttgggagggaatggtggatggttggtacggtttcaggcatcaaaattctgagggaataggacaagcagcagatctcaaaagcactcaagcagcaatcaaccaaatcaatgggaagctgaataggttgatcgggaaaaccaacgagaagttccatcagattgaaaaagaattctcagaagtagaagggagaattcaggacctcgagaaatatgttgaggacactaaaatagatctctggtcatacaacgcggagcttcttgttgccctggagaaccaacatacaattgatctaactgactcagaaatgaacaaactgtttgaaagaacaaagaagcaactgagggaaaatgctgaggatatgggcaatggttgtttcaaaatataccacaaatgtgacaatgcctgcatagggtcaatcagaaatggaacttatgaccatgatgtatacagagatgaggcattgaacaaccggttccagatcaaaggtgttgagctgaagtcaggatacaaagattggatcctatggatttcctttgccatatcatgttttttgctttgtgttgctttgttggggttcatcatgtgggcctgccaaaaaggcaacattaggtgcaacatttgcatttga

SEQ ID NO: 30785 - RNA, 1701 nt, synthetic construct
  misc_feature 1..1701: note = hemagglutinin__InfluenzaA__AAZ79963
  source 1..1701: mol_type = other RNA
atgaagactatcattgctttgagctacattctatgtctggtttttgctcaaaaacttcccggaaatgacaacagcacggcaacgctgtgccttgggcaccatgcagtaccaaacggaacgatagtgaaaacaatcacgaatgaccaaattgaagtcactaatgctactgagctggttcagagttcctcaacaggtggaatatgcgacagtcctcatcagatccttgatggagaaaactgcacactaatagatgctctattgggagaccctcagtgtgatggcttccaaaataagaaatgggacctttttgttgaacgcagcaaagcctacagcaactgttacccttatgatgtgccggattatgcctcccttagatcactagttgcctcatccggcacactggagtttaacaatgaaagcttcaattggactggagtcactcaaaatggaacaagctcagcttgcaaaaggagatctaataacagtttctttagtagattgaattggttgacccacttaaaattcaaatacccagcattgaacgtgactatgccaaacaatgaaaaatttgacaaactgtacatttggggggttcaccacccgggtacggacaatgaccaaatcagcctatatgctcaagcatcaggaagaatcacagtctctaccaaaagaagccaacaaactgtaatcccgagtatcggatctagacccaggataagggatgtccccagcagaataagcatctattggacaatagtaaaaccgggagacatacttttgattaacagcacagggaatctaattgctcctcggggttacttcaaaatacgaagtgggaaaagctcaataatgagatcagatgcacccattggcaaatgcaattctgaatgcatcactccaaatggaagcattcccaatgacaaaccatttcaaaatgtaaacaggatcacatatggggcctgtcccagatatgttaagcaaaacactctgaaattggcaacagggatgcgaaatgtaccagagaaacaaactagaggcatatttggcgcaatcgcgggtttcatagaaaatggttgggagggaatggtggacggttggtacggtttcaggcatcaaaattctgagggaacaggacaagcagcagatctcaaaagcactcaagcagcaatcaaccaaatcaatgggaagctgaataggttgatcgggaaaacaaacgagaaattccatcagattgaaaaagaattctcagaagtagaagggagaattcaggacctcgagaaatatgttgaggacactaaaatagatctctggtcatacaacgcggagcttcttgtggccctggagaaccaacatacaattgatctaactgactcagaaatgaacaaactgtttgaaagaacaaagaagcaactgagggaaaatgctgaggatatgggcaatggttgtttcaaaatataccacaaatgtgacaatgcctgcatagggtcaatcagaaatggaacttatgaccatgatgtatacagagatgaagcattaaacaaccggttccagatcaaaggtgttgagttgaagtcaggatacaaagattggatcctatggatttcctttgccatatcatgttttttgctttgtgttgctttgttggggttcatcatgtgggcctgccaaaaaggcaacattaggtgcaacatttgcatttga

SEQ ID NO: 30786 - RNA, 1701 nt, synthetic construct
  misc_feature 1..1701: note = hemagglutinin__InfluenzaA__AAZ79974
  source 1..1701: mol_type = other RNA
atgaagactatcattgctttgagctacattctatgtctggttttcgctcaaaaacttcccggaaatgacaacagcacggcaacgctgtgccttgggcaccatgcagtaccaaacggaacgatagtgaaaacaatcacgaatgaccaaattgaagttactaatgctactgagctggttcagagttcttcaacaggtggaatatgcgacagtcctcatcagatccttgatggagaaaactgcacactaatagatgctctattgggagaccctcagtgtgatggcttccaaaataagaaatgggacctttttgttgaacgcagcaaagcctacagcaactgttacccttatgatgtgccggattatgcctcccttaggtcactagttgcctcatccggcacactggagtttaacaatgaaagcttcaattggactggagtcactcaaaatggaacaagctctgcttgcaaaaggagatctaataacagtttctttagtagattgaattggttgacccatttaaaattcaaatacccagcattgaacgtgactatgccaaacaatgaaaaatttgacaaattgtacatttggggggttcaccacccgggtacgaacaatgaccaaatcagcctatatgctcaagcatcaggaagaatcacagtctctaccaaaagaagccaacaaactgtaatcccgaatatcggatctagacccagggtaagggatatccccagcagaataagcatctattggacaatagtaaaaccgggagacatacttttgattaacagcacagggaatctaattgctcctcggggttacttcaaaatacgaagtgggaaaagctcaataatgagatcagatgcacccattggcaaatgcaattctgaatgcatcactccaaatggaagcattcccaatgacaaaccatttcaaaatgtaaacaggatcacatatggggcctgtcccagatatgttaagcaaaacactctgaaattggcaacagggatgcgaaatgtaccagagaaacaaactagaggcatatttggcgcaatcgcgggtttcatagaaaatggttgggagggaatggtggatggttggtacggtttcaggcatcaaaattctgagggaataggacaagcagcagatctcaaaagcactcaagcagcaatcaaccaaatcaatgggaagctgaataggttgatcgggaaaaccaacgagaaattccatcagattgaaaaagaattctcagaagtagaagggagaattcaggacctcgagaaatatgttgaggacactaaaatagatctctggtcatacaacgcggagcttcttgttgccctggagaaccaacatacaattgatctaactgactcagaaatgaacaaactgtttgaaagaacaaagaagcaactgagggaaaatgctgaggatatgggcaatggttgtttcaaaatataccacaaatgtgacaatgcctgcatagggtcaatcagaaatggaacttatgaccatgatgtatacagagatgaagcattaaacaaccggttccagatcaaaggtgttgagctgaagtcaggatacaaagattggatcctatggatttcctttgccatatcatgttttttgctttgtgttgctttgttggggttcatcatgtgggcctgccaaaaaggcaacattaggtgcaacatttgcatttga

SEQ ID NO: 30787 - RNA, 1701 nt, synthetic construct
  misc_feature 1..1701: note = hemagglutinin__InfluenzaA__AAZ79996
  source 1..1701: mol_type = other RNA
atgaagactatcattgctttgagctacattctatgtctggttttcgctcaaaaacttcccggaaatgacaacagcacggcaacgctgtgccttgggcaccatgcagtaccaaacggaacgatagtgaaaacaatcacgaatgaccaaattgaagttactaatgctactgagctggttcagagttcctcaacaggtggaatatgcgacagtcctcatcagatccttgatggagaaaactgcacactaatagatgctctattgggagaccctcagtgtgatggcttccaaaataagaaatgggacctttttattgaacgcagcaaagcctacagcaactgttacccttatgatgtgccggattatgcctcccttaggtcactagttgcctcatccggcacactggaatttaacaatgaaagcttcaattggactggagtcactcaaaatggaacaagctctgcttgcaaaaggagatctaataacagtttctttagtagattgaattggttgacccacttaaaattcaaatacccagcattgaacgtgactatgccaaacaatgaaaaatttgacaaattgtacatttggggggttcaccacccgggtacggacaatgaccaaatcagcctatatgctcaagcttcaggaagaatcacagtctctaccaaaagaagccaacaaactgtaatcccgaatatcggatctagacccagggtaagggatatccccagcagaataagcatctattggacaatagtaaaaccgggagacatacttttgattaacagcacagggaatctaattgctcctcggggttacttcaaaatacgaagtgggaaaagctcaataatgagatcagatgcacccattggcaaatgcaattctgaatgcatcactccaaatggaagcattcccaatgacaaaccatttcaaaatgtaaacaggatcacatatggggcctgtcccagatatgttaagcaaaacactctgaaattggcaacagggatgcgaaatgtaccagagaaacaaactagaggcatatttggcgcaatcgcgggtttcatagaaaatggttgggagggaatggtggatggttggtacggtttcaggcatcaaaattctgagggaataggacaagcagcagatctcaaaagcactcaagcagcaatcaaccaaatcaatgggaagctgaataggttgatcgggaaaaccaacgagaaattccatcagattgaaaaagaattctcagaagtagaagggagaattcaggacctcgagaaatatgttgaggacactaaaatagatctctggtcatacaacgcggagcttcttgttgccctggagaaccaacatacaattgatctaactgactcagaaatgaacaaactgtttgaaagaacaaagaagcaactgagggaaaatgctgaggatatgggcaatggttgtttcaaaatataccacaaatgtgacaatgcctgcatagggtctatcagaaatggaacttatgaccatgatgtatacagagatgaggcattgaacaaccggttccagatcaaaggtgttgagctgaagtcaggatacaaagattggatcctatggatttcctttgccatatcatgttttttgctttgtgttgctttgttggggttcatcatgtgggcctgccaaaaaggcaacattaggtgcaacatttgcatttga

SEQ ID NO: 30788 - RNA, 1701 nt, synthetic construct
  misc_feature 1..1701: note = hemagglutinin__InfluenzaA__AAZ80007
  source 1..1701: mol_type = other RNA
atgaagaccattattgctttgagccacattttctgtctggttctcggccaataccttccaggaaatgacaacagcacagcaacgctgtgtctgggacatcatgcagtgccaaacggaacactagtgaaaacaatcacaaatgatcagattgaagtgactaatgctactgagctagttcagagctcctcaacggggaaaatatgcaacaatcctcatcgaatccttgatggaatagactgcacactgatagatgctctattgggggaccctcattgtgatggttttcaaaatgagacatgggaccttttcgttgaacgcagcaaagctttcagcaactgttacccctatgatgtgccagattatgcctcccttagatcactagttgcctcgtcaggcactcttgagtttatcactgagggtttcacttggactggggtcactcagaatgggggaagcaatgcttgcaaaaggggacctggtagcggttttttcagtagactgaactggttgaccaaatcagaaagcacatatccagtgctgaacgtgactatgccaaacaatgacaattttgacaaactatacatttggggagttcaccacccgagcacgaaccaagaacaaaccagcctgtatgttcaagcatcagggagagtcacagtctctaccaggagaagccagcaaactataatcccgaatatcgggtctagaccctgggtaaggggtctgtctagtagaataagcatctattggacaatagttaagccgggagacgtactggtaattaatagtaatgggaacctaatcgctcctcggggttatttcaaaatgcgcactgggaaaagctcaataatgaggtcagatgcacctattgatacctgtatttctgaatgcatcactccaaatggaagcattcccaacgacaagccctttcaaaacgtaaacaagatcacatatggagcatgccccaagtatgttaagcaaaacaccctgaagttggcaacagggatgcggaatgtaccagagaaacaaactagaggcctattcggcgcaatagcaggtttcatagaaaatggttgggagggaatgatagacggttggtacggtttcaggcatcaaaattctgagggcacaggacaagcagcagatcttaaaagcactcaagcagccatcgatcaaatcaatgggaaattgaatagggtaattgagaagacaaacgagaaattccatcaaatcgaaaaggaattctcagaagtagaagggagaattcaggacctcgagaaatacgttgaagacactaaaatagatctctggtcttacaatgcggagcttcttgtcgctctggagaatcaacatacaattgatctgactgactcggaaatgaacaagctgtttgaaaaaacaaggaggcaactgagggaaaatgctgaagacatgggcaatggttgcttcaaaatataccacaaatgtgacaacgcttgcatagagtcaatcagaaatgggacttatgaccatgatgtatacagagacgaagcattaaacaaccggtttcagatcaaaggtgttgaactgaagtctggatacaaagactggatcctgtggatttcctttgccatatcatgttttttgctttgtgttgttttgctggggttcatcatgtgggcctgccagagaggcaacattaggtgcaacatttgcatttga

SEQ ID NO: 30789 - RNA, 1701 nt, synthetic construct
  misc_feature 1..1701: note = hemagglutinin__InfluenzaA__AAZ80017
  source 1..1701: mol_type = other RNA
atgaagactatcattgctttgagctacattctatgtctggttttcgctcaaaaacttcccggaaatgacaacagcacggcaacgctgtgccttgggcaccatgcagtaccaaacggaacgatagtgaaaacaatcacgaatgaccaaattgaagttactaatgctactgagctggttcagagttcctcaacaggtgggatatgcgacagtcctcatcagatccttgatggagaaaactgcacactaatagatgctctattgggagaccctcagtgtgatggcttccaaaataagaaatgggacctttttgttgaacgcagcaaagcctacagcaactgttacccttatgatgtgccggattatgcctcccttaggtcactagttgcctcatccggcacactggagtttaacaatgaaagcttcaattggactggagtcactcaaaatggaacaagctctgcttgcaaaaggagatctaataacagtttctttagtagattgaattggttgacccacttaaaattcaaatacccagcattgaacgtgactatgccaaacaatgaaaaatttgacaaattgtacatttggggggttcaccacccgggtacggacaatgaccaaattagcctatatgctcaagcttcaggaagaatcacagtctctaccaaaagaagccaacaaactgtaatcccgaatatcggatctagacccagggtaagggatatccccagcagaataagcatctattggacaatagtaaaaccgggagacatacttttgattaacagcacagggaatctaattgctcctcggggttacttcaaaatacgaagtgggaaaagctcaataatgagatcagatgcacccattggcaaatgcaattctgaatgcatcactccaaatggaagcattcccaatgacaaaccatttcaaaatgtaaacaggatcacatatggggcctgtcccagatatgttaagcaaaacactctgaaattggcaacagggatgcgaaatgtaccagagaaacaaactagaggcatatttggcgcaatcgcgggtttcatagaaaatggttgggagggaatggtggatggttggtacggtttcaggcatcaaaattctgagggaataggacaagcagcagatctcaaaagcactcaagcagcaatcaaccaaatcaatgggaagctgaataggttgatcgggaaaaccaacgagaaattccatcagattgaaaaagaattctcagaagtagaagggagaattcaggacctcgagaaatatgttgaggacactaaaatagatctctggtcatacaacgcggagcttcttgttgccctggagaaccaacatacaattgatctaactgactcagaaatgaacaaactgtttgaaagaacaaagaagcaactgagggaaaatgctgaggatatgggcaatggttgtttcaaaatataccacaaatgtgacaatgcctgcatagggtcaatcagaaatggaacttatgaccatgatgtatacagagatgaagcattaaacaaccggttccagatcaaaggtgttgagctgaagtcaggatacaaagattggatcctatggatttcctttgccatatcatgttttttgctttgtgttgttttgttggggttcatcatgtgggcctgccaaaaaggcaacattaggtgcaacatttgcatttga

SEQ ID NO: 30790 - RNA, 1701 nt, synthetic construct
  misc_feature 1..1701: note = hemagglutinin__InfluenzaA__AAZ80030
  source 1..1701: mol_type = other RNA
atgaagactatcattgctttgagctacattctatgtctggttttcgctcaagaacttcccggaaatgacaacagcacggcaacgctgtgccttgggcaccatgcagtaccaaacggaacgatagtgaaaacaatcacgaatgaccaaattgaagttactaatgctactgagctggttcagagttcctcaacaggtggaatatgcgacagtcctcatcagatccttgatggagaaaactgcacactaatagatgctctattgggagaccctcagtgtgatggcttccaaaataagaaatgggacctttttgttgaacgcagcaaagcctacagcaactgttacccttatgatgtgccggattatgcctcccttaggtcactagttgcctcatccggcacactggagtttaacaatgaaagcttcaattggactggagtcactcaaaatggaacaagctctgcttgcaaaaggagatctaataacagtttctttagtagattgaattggttgacccacttaaaattcaaatacccagcattgaacgtgactatgccaaacaatgaaaaatttgacaaattgtacatttggggggttcaccacccgggtacggacaatgaccaaaccagcctatatgctcaagcatcaggaagaatcacagtctctaccaaaagaagccaacaaactgtaatcccgaatatcggatctagacccagggtaagggatatccccagcagaataagcatctattggacaatagtaaaaccgggagacatacttttgattaacagcacagggaatctaattgctcctcggggttacttcaaaatacgaagtgggaaaagctcaataatgagatcagatgcacccattggcaaatgcaattctgaatgcatcactccaaatggaagcattcccaatgacaaaccatttcaaaatgtaaacaggatcacatatggggcctgtcccagatatgttaagcaaaacactctgaaattggcaacagggatgcgaaatgtaccagagaaacaaactagaggcatatttggcgcaatcgcgggtttcatagaaaatggttgggagggaatggtggatggttggtacggttttaggcatcaaaattctgagggaataggacaagcagcagatctcaaaagcactcaagcagcaatcaaccaaatcaatgggaagctgaataggttgatcggaaaaaccaacgagaaattccatcagattgaaaaagaattctcagaagtagaagggagaattcaggacctcgagaaatatgttgaggacactaaaatagatctctggtcatacaacgcggagcttcttgttgccctggagaaccaacatacaattgatctaactgactcagaaatgaacaaactgttcgaaagaacaaagaagcaactgagggaaaatgctgaggatatgggcaatggttgtttcaaaatataccacaaatgtgacaatgcctgcatagggtcaatcagaaatggaacttatgaccatgatgtatacagagatgaagcattaaacaaccggttccagatcaaaggtgttgagctgaagtcaggatacaaagattggatcctatggatttcctttgccatatcatgttttttgctttgtgttgctttgttggggttcatcatgtgggcctgccaaaaaggcaacattaggtgcaacatttgcatttga

SEQ ID NO: 30791 - RNA, 1701 nt, synthetic construct
  misc_feature 1..1701: note = hemagglutinin__InfluenzaA__AAZ83242
  source 1..1701: mol_type = other RNA
atgaagactatcattgctttgagctacattctatgtctggttttcgctcaaaaacttcccggaaatgacaacagcacggcaacgctgtgccttgggcaccatgcagtaccaaacggaacgatagtgaaaacaatcacgaatgaccaaattgaagttactaatgctactgagctggttcagagttcctcaacaggtgaaatatgcgacagtcctcatcaaatccttgatggagaaaactgcacactaatagatgctctattgggagaccctcagtgtgatggcttccaaaataagaaatgggacctttttgttgaacgcaacaaagcctacagcaactgttacccttatgatgtgccggattatgcctcccttaggtcactagttgcctcatccggcacactggagtttaacaatgaaagcttcaattggactggagtcactcagaatggaacaagctctgcttgcaaaaggagatctaataaaagtttctttagtagattgaattggttgacccacttaaaatacaaatacccagcattgaacgtgactatgccaaacaatgaaaaatttgacaaattgtacatttggggggttcatcacccgggtacggacagtgaccaaatcaacctatatgctcaagcatcaggaagaatcacagtttctaccaaaagaagccaacaaactgtaatcccgaatatcggatatagacccagggtaagggatgtccccagcagaataagcatctattggacaatagtaaaaccgggagacatacttttgattaacagcacagggaatctaattgctcctcggggttacttcaaaatacgaagtgggaaaagctcaataatgagatcagatgcacccattggcaaatgcaattctgaatgcatcactccaaatggaagcattcccaatgacaaaccatttcaaaatgtaaacaggatcacatatggggcctgtcccagatatgttaagcaaaacaccctgaaattggcaacagggatgcgaaatgtaccagagaaacaaactagaggcatatttggcgcaatcgcgggtttcatagaaaatggttgggagggaatggtggacggttggtacggtttcaggcatcaaaattctgagggcacaggacaagcagcagatctcaaaagcactcaagcagcaatcaaccaaatcaatgggaaactgaataggttaatcgggaaaacaaacgaaaaattccatcagattgaaaaagaattctcagaagtagaagggagaattcaggacctcgagaaatatgttgaggacactaaaatagatctctggtcatacaacgcggagcttcttgttgccctggagaaccaacatacaattgatctaactgactcagaaatgaacaaactgtttgaaagaacaaagaagcaactgagggaaaatgctgaggatatgggcaatggttgtttcaaaatataccacaaatgtgacaatgcctgcatagggtcaatcagaaatggaacttatgaccatgatgtatacagagatgaagcattaaacaaccggttccagatcaaaggtgttgagctgaagtcaggatacaaagattggatcctatggatttcctttgccatatcatgttttttgctttgtgttgctttgttggggttcatcatgtgggcctgccaaaaaggcaacattaggtgcaacatttgcatttga

SEQ ID NO: 30792 - RNA, 1701 nt, synthetic construct
  misc_feature 1..1701: note = hemagglutinin__InfluenzaA__AAZ83266
  source 1..1701: mol_type = other RNA
atgaagactatcattgctttgagctacattttatgtctggttttcgctcaaaaacttcccggaaatgacaacagcacggcaacgctgtgcctggggcaccatgcagtgccaaacggaacgctagtgaaaacaatcacgaatgaccaaattgaagtgactaatgctaatgagctggttcagagttcctcaacaggtagaatatgcgacagtcctcaccaaatccttgatggagaaaactgcacactaatagatgctctattgggagaccctcgttgtgatggcttccaaaataaggaatgggacctttttgttgaacgcagcaaagcctacagcaactgttacccttatgatgtgccggattatgcctcccttaggtcactagttgcctcatccggcacactggagtttaacaatgaaagcttcaattggactggagtcgctcagaatggaacaagctctgcttgcaaaaggagatctaataaaagtttctttagtagattgaattggttgcaccaattaaaatacaaatatccagcactgaacgtgactatgccaaacaatgaaaaatttgacaaattgtacatttggggggttcaccacccgagtacggacagtgaccaaatcagcctatatgctcaagcatcagggagagtcacagtctctaccaaaagaagccaacaaactgtaatcccgaatatcggatctagaccctgggtaaggggtgtctccagcagaataagcatctattggacaatagtaaaaccgggagacatacttttgattaacagcacagggaatctaattgctcctcggggttacttcaaaatacgaagtgggaaaagctcaataatgaggtcagatgcacccattggcaaatgcaattctgaatgcatcactccaaatggaagcattcccaatgacaaaccatttcaaaatgtaaacaggatcacatatggggcctgtcccagatatgttaagcaaaacactctgaaattggcaacagggatgcggaatgtaccagagaaacaaactagaggcatattcggcgcaatcgcgggtttcatagaaaatggttgggagggaatggtggacggttggtacggtttcaggcatcaaaattctgagggcacaggacaagcagcagatcttaaaagcactcaagcagcaatcaaccaaatcaacgggaaactgaataggttaatcgagaaaacgaacgagaaattccatcaaattgaaaaagaattctcagaagtagaagggagaattcaggacctcgagaaatatgttgaggacactaaaatagatctctggtcgtacaacgcggagcttcttgttgccctggagaaccaacatacaattgatctaactgactcagaaatgaacaaactgtttgaaagaacaaagaagcaactgagggaaaatgctgaggatatgggcaatggttgtttcaaaatataccacaaatgtgacaatgcctgcatagggtcaatcagaaatggaacttatgaccatgatgtatacagagacgaagcattaaacaaccggttccagatcaaaggtgttgagctgaagtcaggatacaaagattggatcctatggatttcctttgccatatcatgttttttgctttgtgttgttttgctggggttcatcatgtgggcctgccaaaaaggcaacattaggtgcaacatttgcatttga

SEQ ID NO: 30793 - RNA, 1701 nt, synthetic construct
  misc_feature 1..1701: note = hemagglutinin__InfluenzaA__AAZ83277
  source 1..1701: mol_type = other RNA
atgaagactatcattgctttgagctacattttatgtctggttttcgctcaaaaacttcccggaaatgacaacagcacggcaacgctgtgcctggggcaccatgcagtgccaaacggaacgctagtgaaaacaatcacgaatgaccaaattgaagtaactaatgctactgagctggttcagagttcctcaacaggtagaatatgcgacagtcctcaccaaatccttgatggagaaaactgcacactaatagatgctctattgggagaccctcattgtgatggcttccaaaataaggaatgggacctttttgttgaacgcagcaaagcctacagcaactgttacccttatgatgtgccggattatgcctcccttaggtcactagttgcctcatccggcacactggagtttaacaatgaaagcttcaattggactggagtcgctcagaatggaacaagctctgcttgcaaaaggagatctaataaaagtttctttagtagattgaattggttgcaccaattaaaatacaaatatccagcactgaacgtgactatgccaaacaatgaaaaatttgacaaattgtacatttggggggttcaccacccgagtacggacagtgaccaaatcagcctatatgctcaagcatcagggagagtcacagtctctaccaaaagaagccaacaaactgtaatcccgaatatcggatctagaccctgggtaaggggtgtctccagcagaataagcatctattggacaatagtaaaaccgggagacatacttttgattaacagcacagggaatctaattgctccccggggttacttcaaaatacgaagtgggaaaagctcaataatgaggtcagatgcacccattggcaaatgcaattctgaatgcatcactccaaatggaagcattcccaatgacaaaccatttcaaaatgtaaacaggatcacatatggggcctgtcccagatatgttaagcaaaacactctgaaattggcaacagggatgcggaatgtaccagagaaacaaactagaggcatattcggcgcaatcgcgggtttcatagaaaatggttgggagggaatggtggacggttggtacggtttcaggcatcaaaattctgagggcacaggacaagcagcagatcttaaaagcactcaagcagcaatcaaccaaatcaacgggaaactgaataggttaatcgagaaaacgaacgagaaattccatcaaattgaaaaagaattctcagaagtagaagggagaattcaggacctcgagaaatatgttgaggacactaaaatagatctctggtcgtacaacgcggagcttcttgttgccctggagaaccaacatacaattgatctaactgactcagaaatgaacaaactgtttgaaagaacaaagaagcaactgagggaaaatgctgaggatatgggcaatggttgtttcaaaatataccacaaatgtgacaatgcctgcatagggtcaatcagaaatggaacttatgaccatgatgtatacagagacgaagcattaaacaaccggttccagatcaaaggtgttgagctgaagtcaggatacaaagattggatcctatggatttcctttgccatatcatgttttttgctttgtgttgttttgctggggttcatcatgtgggcctgccaaaaaggcaacattaggtgcaacatttgcatttga

SEQ ID NO: 30794 - RNA, 1701 nt, synthetic construct
  misc_feature 1..1701: note = hemagglutinin__InfluenzaA__AAZ83288
  source 1..1701: mol_type = other RNA
atgaagactatcattgctttgagctacattttatgtctggttttcgctcaaaaacttcccgtaaatgacaacagcacggcaacgctgtgcctgggacaccatgcagtgccaaacggaacgctagtgaaaacaatcacgaatgaccacattgaagtgactaatgctactgagctggttcagagttcctcaacaggtagaatatgcgacagtcctcaccaaatccttgatggagaaaactgcacactaatagatgctctattgggagaccctcattgtgatggcttccaaaataaggaatgggacctttttgttgaacgcagcacagcctacagcaactgttacccttatgatgtgccggattatgcctcccttaggtcactagttgcctcatccggcacactggagtttaacaatgaaagcttcaattggactggagtcgctcagaatggaacaagctctgcttgcaaaaggagatctattaaaagtttctttagtagattgaattggttgcaccaattaaaatacaaatatccagcactgaacgtgactatgccaaacaatgaaaaatttgacaaattgtacatttggggggttcaccacccgagtacggacagtgaccaaatcagcctatatgctcaagcatcagggagagtcacagtctctaccaaaagaagccaacaaactgtaatcccgaatatcggatctagaccctgggtaaggggtgtctccagcagaataagcatctattggacaatagtaaaaccgggagacatacttttgattaacagcacagggaatctaattgctcctcggggttacttcaaaatacgaagtgggaaaagctcaataatgaggtcaaatgcacccattggcaaatgcaattctgaatgcatcactccaaatggaagcattcccaatgacaaaccatttcaaaatgtaaacaggatcacatatggggcctgtcccagatatgttaagcaaaacactctgaaattggcaacagggatgcggaatgtaccagagaaacaaactagaggcatattcggcgcaatcgcgggtttcatagaaaatggttgggaaggaatggtggacggttggtacggtttcaggcatcaaaattctgagggcacaggacaagcagcagatcttaaaagcactcaagcagcaatcaaccaaatcaacgggaaactgaataggttaatcgagaaaacaaacgagaaattccatcaaattgaaaaagaattctcagaagtagaagggagaattcaggacctcgagaaatatgttgaggacactaaaatagatctctggtcgtacaacgcggagcttcttgttgccctggagaaccaacatacaattgatctaactgactcagaaatgaacaaactgtttgaaagaacaaggaagcaactgagggaaaatgctgaggatatgggcaatggttgtttcaaaatataccacaaatgtgacaatgcctgcatagggtcaatcagaaatggaacttatgaccatgatgtatacagagacgaagcattaaacaaccggttccagatcaaaggtgttgagctgaagtcaggatacaaagattggatcctatggatttcctttgccatatcatgttttttgctttgtgttgttttgctggggttcatcatgtgggcctgccaaaaaggcaacattaggtgcaacatttgcatttga

SEQ ID NO: 30795 - RNA, 1701 nt, synthetic construct
  misc_feature 1..1701: note = hemagglutinin__InfluenzaA__AAZ83312
  source 1..1701: mol_type = other RNA
atgaagactatcattgctttgagctacattttatgtctggttttcgctcaaaaacttcctggaaatgacaacagcacggcaacgctgtgcctgggacaccatgcagtgccaaacggaacgctagtgaaaacaatcacgaatgaccaaattgaagtgactaatgctactgagctggttcagagttcctcaacaggtagaatatgcgacagtcctcaccaaatccttgatggagaaaactgcacactgatagatgctctattgggagacccccattgtgatggcttccaaaataaggaatgggacctttttgttgaacgcagcaaagcctacagcaactgttacccttatgatgtgccggattatgcctcccttaggtcactagttgcctcatccggcaccctggagtttaacaatgaaagcttcaattggactggagttgctcagaatggaacaagctctgcttgcaaaaggagatctattaaaagtttctttagtagattgaattggttgcaccaattaaaatacaaatatccagcactgaacgtgactatgccaaacaatgacaaatttgacaaattgtacatttggggggttcatcacccgagtacggacagtgaccaaaccagcctatatgctcaagcatcagggagagtcacagtctctaccaaaagaagccaacaaactgtaatcccgaatatcggatctagaccctgggtaaggggtgtctccagcagaataagcatctattggacaatagtaaaaccgggagacatacttttgattaacagcacagggaatctaattgctcctcggggttacttcaaaatacgaagtgggaaaagctcaataataaggtcagatgcacccattggcaaatgcaattctgaatgcatcactccaaatggaagcattcccaatgacaaaccatttcaaaatgtaaacaggataacatatggggcctgtcccagatatgttaagcaaaacactctgaaattggcaacagggatgcggaatgtaccagagaaacaaactagaggcatcttcggcgcaatcgcgggtttcatagaaaatggttgggagggaatggtggacggttggtacggtttcaggcatcaaaattctgagggcacaggacaagcagcagatcttaaaagcactcaagcagcaatcaaccaaatcaacgggaaactgaataggttaatcgagaaaacgaacgagaaattccatcaaattgaaaaagaattctcagaagtagaagggagaattcaggacctcgagaaatatgttgaggacactaaaatagatctctggtcgtacaacgcggagcttcttgttgccctggagaaccaacatacaattgatctaactgactcagaaatgaacaaactgtttgaaagaacaaggaagcaactgagggaaaatgctgaggatatgggcaatggttgtttcaaaatataccacaaatgtgacaatgcctgcatagggtcaatcagaaatggaacttatgaccatgatgtatacagagacgaagcattaaacaaccggttccagatcaaaggtgttgagctgaagtcaggatacaaagattggatcctatggatttcctttgccatatcatgttttttgctttgtgttgttttgctggggttcatcatgtgggcctgccaaaaaggcaacattaggtgcaacatttgcatttga

SEQ ID NO: 30796 - RNA, 1701 nt, synthetic construct
  misc_feature 1..1701: note = hemagglutinin__InfluenzaA__AAZ83323
  source 1..1701: mol_type = other RNA
atgaagactatcattgctttgagctacattttatgtctggttttcgctcaaaaacttcccggaaatgacaacagcacggcaacgctgtgcctgggacaccatgcagtgccaaacggaacgctagtgaaaacaatcacgaatgaccaaattgaagtgactaatgctactgagctggttcagagttcctcaacaggtagaatatgcgacagtcctcaccgaatccttgatggagaaaactgcacactgatagatgctctattgggagaccctcattgtgatggcttccaaaataaggaatgggacctttttgttgaacgcagcaaagcctacagcaactgttacccttatgatgtgcaggattatgcctcccttaggtcactagttgcctcatccggcaccctggagtttaacaatgaaagcttcaattggactggagtcgctcagaatggaacaagctatgcttgcaaaaggagatctattaaaagtttctttagtagattgaattggttgcaccaattaaaatacaaatatccagcactgaacgtgactatgccaaacaatgacaaatttgacaaattgtacatttggggggttcaccacccgagtacggacagtgaccaaaccagcctatatgctcaagcatcagggagagtcacagtctctaccaaaagaagccaacaaactgtaatctcgaatatcggatctagaccctgggtaaggggtgtctccagcagaataagcatctattggacaatagtaaaaccgggagacatacttttgattaccagcacagggaatctaattgctcctcggggttacttcaaaatacgaagtgggaaaagctcaataatgaggtcagatgcacccattggcaaatgcaattctgaatgcatcactccaaatggaagcattcccaatgacaaaccatttcaaaatgtaaacaggatcacatatggggcctgtcccagatatgttaagcaaaacactctgaaattggcaacagggatgcggaatgtaccagagaaacaaactagaggcatattcggcgcaatcgcaggtttcatagaaaatggttgggagggaatggtggacggttggtacggtttcaggcatcaaaattctgagggcacaggacaagcagcagatcttaaaagcactcaagcagcaatcaaccaaatcaacgggaaactgaataggttaatcgagaaaacgaacgagaaattccatcaaattgaaaaagaattctcagaagtagaagggagaattcaggacctcgagaaatatgttgaggacactaaaatagatctctggtcgtacaacgcggagcttcttgttgccctggagaaccaacatacaattgatctaactgactcagaaatgaacaaactgtttgaaagaacaaggaagcaactgagggaaaatgctgaggatatgggcaatggttgtttcaaaatataccacaaatgtgacaatgcctgcatagggtcaatcagaaatggaacttatgaccatgatgtatacagagacgaagcattaaacaaccggttccagatcaaaggtgttgagctgaagtcaggatacaaagattggatcctatggatttcctttgccatatcatgttttttgctttgtgttgttttgctggggttcatcatgtgggcctgccaaaaaggcaacattaggtgcaacatttgcatttga

SEQ ID NO: 30797 - RNA, 1701 nt, synthetic construct
  misc_feature 1..1701: note = hemagglutinin__InfluenzaA__AAZ83371
  source 1..1701: mol_type = other RNA
atgaagactatcattgctttgagctacattctatgtctggttttcgctcaaaaacttcccggaaatgacaacagcacggcaacgctgtgccttgggcaccatgcagtaccaaacggaacgatagtgaaaacaatcacgaatgaccaaattgaagttactaatgctactgagctggttcagagttcctcaacaggtggaatatgcgacagtcctcatcagatccttgatggagaaaactgcacactaatagatgctctattgggagaccctcagtgtgatggcttccaaaataagaaatgggacctttttgttgaacgcagcaaagcctacagcaactgttacccttatgatgtgccggattatgcctcccttaggtcactagttgcctcatccggcacactggagtttaacaatgaaagcttcaattggactggagtcactcaaaatggaacaagctctgcttgcaaaaggagatctaataacagtttctttagtagattgaattggttgacccatttaaaattcaaatacccagcattgaacgtgactatgccaaacaatgaaaaatttgacaaattgtacatttggggggttcaccacccgggtacgaacaatgaccaaatcagcctatatgctcaagcatcaggaagaatcacagtctctaccaaaagaagccaacaaactgtaatcccgaatatcggatctagacccagggtaagggatatccccagcagaataagcatctattggacaatagtaaaaccgggagacatacttttgattaacagcacagggaatctaattgctcctcggggttacttcaaaatacgaagtgggaaaagctcaataatgagatcagatgcacccattggcaaatgcaattctgaatgcatcactccaaatggaagcattcccaatgacaaaccatttcaaaatgtaaacaggatcacatatggggcctgtcccagatatgttaagcaaaacactctgaaattagcaacagggatgcgaaatgtaccagagaaacaaactagaggcatatttggcgcaatcgcgggtttcatagaaaatggttgggagggaatggtggatggttggtacggtttcaggcatcaaaattctgagggaataggacaagcagcagatctcaaaagcactcaagcagcaatcaaccaaatcaatgggaagctgaataggttgatcgggaaaaccaacgagaaattccatcagattgaaaaagaattctcagaagtagaagggagaattcaggacctcgagaaatatgttgaggacaccaaaatagatctctggtcatacaacgcggagcttcttgttgccctggagaaccaacatacaattgatctaactgactcagaaatgaacaaactgtttgaaagaacaaagaagcaactgagggaaaatgctgaggatatgggcaatggttgtttcaaaatataccacaaatgtgacaatgcctgcatagggtcaatcagaaatggaacttatgaccatgatgtatacagagatgaagcattaaacaaccggttccagatcaaaggtgttgagctgaagtcaggatacaaagattggatcctatggatttcctttgccatatcatgttttttgctttgtgttgctttgttggggttcatcatgtgggcctgccaaaaaggcaacattaggtgcaacatttgcatttga

SEQ ID NO: 30798 - RNA, 1701 nt, synthetic construct; identical to SEQ ID NO: 30764
  misc_feature 1..1701: note = hemagglutinin__InfluenzaA__AAZ83688
  source 1..1701: mol_type = other RNA

SEQ ID NO: 30799 - RNA, 1698 nt, synthetic construct
  misc_feature 1..1698: note = hemagglutinin__InfluenzaA__ABA06510
  source 1..1698: mol_type = other RNA
atgaaagtaaaactactgatcctgttatgtacatttacagctacatatgcagacacaatatgtataggctaccatgccaacaactcaaccgacactgttgacacagtacttgagaagaatgtgacagtgacacactctgtcaacctacttgaggacagtcacaatggaaaactgtgcctactaaaaggaatagcccccctacaattgggtaattgcagcgttgccggatggatcttaggaaacccagaatgcgaattactgattgccaaggaatcatggtcctacattgtagaaacaccaaatcctgagaatggagcatgttacccagggtatttcgccgactatgaggagctaagggagcaattgagttcagtatcttcatttgagagattcgaaatattccccaaagaaagctcatggcccaaccacaccgtaaccggagtatcagcatcatgctcccataatgggaaaagcagtttttacagaaatttgctatggctgacggggaagaatggtttgtacccaaacctgagcaagtcctatgcaaacaacaaagagaaagaagtccttatactatggggtgttcatcacccgcctaacataggggaccaaaggaccctctatcacacagaaaatgcttatgtctctgtagtgtcttcacattatagcagaagattcaccccagaaataaccaaaaggcccaaagtaagagatcaggaaggaagaatcaactactactggactctgctggaacccggggatacaataatatttgaggcaaatggaaatctaatagcgccatggtatgctttcgcactgagtagaggctttggatcaggaatcatcacctcaaatgcaccaatggatgaatgtgatgcgaagtgtcaaacacctcagggagctataaacagcagtcttcctttccagaatgtacacccagtcacaataggagagtgtccaaagtatgtcaggagtgcaaaattaaggatggttacaggactaaggaacatcccatccattcaatccagaggtttgtttggagccattgccggtttcattgaaggggggtggactggaatggtagatgggtggtatggttatcatcatcagaatgagcaaggatctggctatgctgcagatcaaaaaagcacacaaaatgccattaacgggattacaaacaaggtgaattctgtaattgagaaaatgaacactcaattcacagctgtgggcaaagaattcaacaaattggaaagaaggatggaaaacttaaataaaaaggttgatgatgggtttctagacatttggacatataatgcagaattgttggttctactggaaaatgaaaggactttggatttccacgactccaatgtgaagaatctgtacgagaaagtaaaaagccaattaaagaataatgccaaagaaataggaaatgggtgttttgaattctatcacaagtgtaacaatgaatgcatggagagtgtgaaaaatggaacttatgactatccaaaatattccgaagaatcaaagttaaacagggaaaaaattgatggagtgaaattggactcaatgggggtctatcagattctggcgatctactcaactgtcgccagttccctggttcttttggtctccctgggggcaatcagcttctggatgtgttccaatgggtctttgcagtgtagaatatgcatctga

SEQ ID NO: 30800 - RNA, 1698 nt, synthetic construct
  misc_feature 1..1698: note = hemagglutinin__InfluenzaA__ABA08464
  source 1..1698: mol_type = other RNA
atgaaagcaaaactactggtcctgttatgtacatttacagctacatacgcagacacaatatgtataggctaccatgccaacaactcaacagacactgttgacacagtacttgagaagaatgtgacagtgacacactctgtcaacctacttgaggacagtcacaatggaaaactatgtctactaaaaggaatagccccactacaattgggtaattgcagcgttgccggatggatcttaggaaacccagaatgcgaattactgatttccaaggaatcatggtcctacattgtagaaacaccaaatcccgagaatggaacatgttacccagggtatttcgccgactatgaggaactgagggagcaattgagttcagtatcttcatttgagagattcgaaatattccccaaaggaagctcatggcccaaccacaccgtaaccggagtatcagcatcatgctcccataatgggaaaagcagtttttacagaaatttgctatggctgacggggaagaatggtttgtacccaaacctgagcatgtcctatgtaaacaacaaagagaaagaagtccttgtgctatggggtgttcatcacccacctaacataggggaccaaagggccctctaccatacagaaaatgcttatgtctctgtagtgtcttcacattatagcagaagattcaccccagaaatagccaaaagacccaaagtaagagatcaggaaggaagaatcaactactactggactctgctggaacccggggacacaataatatttgaggcaaatggaaatctaatagcgccatggtatgctttcgcactgagtagaggctttggatcaggaatcatcacctcaaatgcaccaatggatgaatgtgatgcgaagtgtcaaacacctcagggagctataaacagtagtcttcctttccagaatgtacacccagttacaataggagagtgtccaaagtatgtcaggagtgcaaaattaaggatggttacaggactaaggaacatcccatccattcaatccagaggtttgtttggagccattgccggtttcattgaaggggggtggactggaatggtagatgggtggtatggttatcatcatcagaatgagcaaggatctggctatgctgcagatcaaaaaagcacacaaaatgccattaacgggattacgaacaaggtgaattctgtaattgagaaaatgaacactcaattcacagctgtgggcaaagaattcaacaaattagaaagaaggatggaaaacttaaataaaaaagttgatgatgggtttctagacatttggacatataatgcagaattgttggttctactggaaaatgaaaggactttggatttccatgactccaatgtgaagaatctgtatgagaaagtaaaaagccaattaaagaataatgccaaagaaataggaaacgggtgttttgaattctatcacaagtgtaacaatgaatgcatggaaagtgtgaaaaatggaacttatgactatccaaaatattccgaagaatcaaagttaaacagggagaaaattgatggagtaaaattggaatcaatgggagtctatcagattctggcgatctactcaactgtcgccagttccctggttcttttggtctccctgggggcaatcagcttctggatgtgttccaatgggtctttgcagtgtagaatatgcatctga

SEQ ID NO: 30801 - RNA, 1698 nt, synthetic construct
  misc_feature 1..1698: note = hemagglutinin__InfluenzaA__ABA08486
  source 1..1698: mol_type = other RNA
atgaaagcaaaactactggtcctgttatgtacatttacagctacatacgcagacacaatatgtataggctaccatgccaacaactcaaccgacactgttgacacagtacttgagaagaatgtgacagtgacacactctgtcaacctacttgaggacagtcacaatggaaaactatgtctactaaaaggaatagccccactacaattgggtaattgcagcgttgccggatggatcttaggaaacccagaatgcgaattactgatttccaaggaatcatggtcctacattgtagaaacaccaaatcccgagaatggaacatgttacccagggtatttcgccgattatgaggaactgagggagcaattgagttcagtatcttcatttgagagattcgaaatattccccaaaggaagctcatggcccaaccacaccgtaaccggagtatcagcatcatgctcccataatgggaaaagcagtttttacagaaatttgctatggctgacggggaagaatggtttgtacccaaacctgagcatgtcctatgtaaacaacaaagagaaagaagtccttgtgctatggggtgttcaccacccacctaacataggggaccaaagggccctctaccatacagaaaatgcttatgtctctgtagtgtcttcacattatagtagaagattcaccccagaaatagccaaaagacccaaagtaagagatcaggaaggaagaatcaactactactggactctgctggaacccggggacacaataatatttgaggcaaatggaaatctaatagcgccatggtatgctttcgcactgagtagaggctttggatcaggaatcatcacctcaaatgcaccaatggatgaatgtgatgcgaagtgtcaaacacctcagggagctataaacagtagtcttcctttccagaatgtacacccagttacaataggagagtgtccaaagtatgtcaggagtgcaaaattaaggatggttacaggactaaggaacatcccatccattcaatccagaggtttgtttggagccattgccggtttcattgaaggggggtggactggaatggtagatgggtggtatggttatcatcatcagaatgagcaaggatctggttatgctgcagatcaaaaaagcacacaaaatgccattaacgggattacaaacaaggtgaattctgtaattgagaaaatgaacactcaattcacagctgtgggcaaagaattcaacaaattagaaagaaggatggaaaacttaaataaaaaagttgatgatgggtttctagacatttggacatataatgcagaattgttggttctactggaaaatgaaaggactttggatttccatgactccaatgtgaagaatctgtatgagaaagtaaaaagccaattaaagaataatgccaaagaaataggaaacgggtgttttgaattctatcacaagtgtaacaatgaatgcatggaaagtgtgaaaaatggaacttatgactatccaaaatattccgaagaatcaaagttaaacagggagaaaattgatggagtaaaattggaatcaatgggagtctatcagattctggcgatctactcaactgtcgccagttccctggttcttttggtctccctgggggcaatcagcttctggatgtgttccaatgggtctttgcagtgtagaatatgcatctga

SEQ ID NO: 30802 - RNA, 1698 nt, synthetic construct
  misc_feature 1..1698: note = hemagglutinin__InfluenzaA__ABA08508
  source 1..1698: mol_type = other RNA
atgaaagtaaaactactgatcctgttatgtacatttacagctacatatgcagacacaatatgtataggctaccatgccaacaactcaaccgacactgttgacacagtacttgagaagaatgtgacagtgacacactctgtcaacctacttgaggacagtcacaatggaaaactgtgcctactaaaaggaatagcccccctacaattgggtaattgcagcgttgccggatggatcttaggaaacccagaatgcgaattactgatttccaaggaatcatggtcctacattgtagaaacaccaaatcctgagaatggagcatgttacccagggtatttcgccgactatgaggagctaagggagcaattgagttcagtatcttcatttgagagattcgaaatattccccaaagaaagctcatggcccaaccacaccgtaaccggagtatcagcatcatgctcccataatgggaaaagcagtttttacagaaatttgctatggctgacggggaagaatggtttgtacccaaacctgagcaagtcctatgcaaacaacaaaaagaaagaagtcctcatactatggggtgttcatcacccgcctaacataggggtccaaaggaccctctattacacagaaaatgcttatgtctctgtagtgtcttcacattatagcagaagattcaccccagaaataaccaaaaggcccaaagtaagagatcaggaaggaagaatcaactactactggactctgctggaacccggggatacaataatatttgaggcaaatggaaatctaatagcgccatggtatgctttcgcactgagtagaggctttggatcaggaatcatcacctcaaatgcaccaatggatgaatgtgatgcgaagtgtcaaacacctcagggagctataaacagcagtcttcctttccagaatgtacacccagtcacaataggagagtgtccaaagtatgtcaggagtgcaaaattaaggatggttacaggactaaggaacatcccatccattcaatccagaggtttgtttggagccattgccggtttcattgaaggggggtggactggaatggtagatgggtggtatggttatcatcatcagaatgagcaaggatctggctatgctgcagatcaaaaaagcacacaaaatgccattaacgggattacaaacaaggtgaattctgtaattgagaaaatgaacactcaattcacagctgtgggcaaagaattcaacaaattggaaagaaggatggaaaacttaaataaaaaggttgatgatgggtttctagacatttggacatataatgcagaattgttggttctactggaaaatgaaaggactttggatttccacgactccaatgtgaagaatctgtacgagaaagtaaaaagccaattaaagaataatgccaaagaaataggaaatgggtgttttgaattctatcacaagtgtaacaatgaatgcatggagagtgtgaaaaatggaacttatgactatccaaaatattccgaagaatcaaagttaaacagggaaaaaattgatggagtgaaattggactcaatgggggtctatcagattctggcgatctactcaactgtcgccagttccctggttcttttggtctccctgggggcaatcagcttctggatgtgttccaatgggtctttgcagtgtagaatatgcatctga

SEQ ID NO: 30803 - RNA, 1698 nt, synthetic construct
  misc_feature 1..1698: note = hemagglutinin__InfluenzaA__ABA12707
  source 1..1698: mol_type = other RNA
atgaaagtaaaactactggttctgttatgtacatttacagctacatatgcagacacaatatgtataggctaccatgccaacaactcaaccgacactgttgacacagtacttgagaagaatgtgacagtgacacactctgtcaacctacttgaggacagtcacaatggaaaactatgtctactaaaaggaatagccccactacaattgggtaattgcagcgttgccggatggatcttaggaaacccagaatgcgaattactgatttccaaggaatcatggtcctacattgtagaaacaccaaatcctgagaatggaacatgttacccagggtatttcgccgactatgaggaactgagggagcaattgagttcagtatcttcatttgagaggttcgaaatattccccaaagagagctcatggcccaatcacaccgtaaccggagtatcagcatcatgctcccataacgggaaaagcagtttttacagaaatttgctatggctgacggggaagaatggtttgtacccaaacctgagcaagtcctatgcaaacaacaaagagaaagaagtccttgtactatggggtgttcatcacccgcctaacataggggaccaaagggccctctatcatacagaaaatgcttatgtctctgtagtgtcttcacattatagcagaagattcaccccagaaatagccaaaagacccaaggtgagagatcaggaaggaagaatcaactactactggactctgctggaacccggggatacaataatatttgaggcaaatggaaatctaatagcgccaaggtatgctttcgcactgagtagaggctttggatcaggaatcatcacctcaaatgcaccaatggatgaatgtgatgcgaagtgtcaaacacctcagggagctataaacagcagtcttcctttccagaatgtacacccagtcacaataggagagtgtccaaagtatgtcaggagtgcaaaattaaggatggttacaggactaaggaacatcccatccattcaatccagaggtttgtttggagccattgccggtttcattgaaggggggtggactggaatggtagatggttggtatggttatcatcatcagaatgagcaaggatctgggtatgctgcagatcaaaaaagcacacaaaatgccattaacgggattacaaacaaggtgaattctgtaattgagaaaatgaacactcaattcacagctgtgggcaaagaattcaacaaattggaaagaaggatggaaaacttaaataaaaaagttgatgatgggtttctagacatttggacatataatgcagaattgttggttctactggaaaatgaaaggactttggatttccatgactccaacgtgaagaatctgtatgagaaagtaaaaagccaattaaagaataatgccaaagaaataggaaacgggtgttttgaattctatcacaagtgtaacgatgaatgcatggagagtgtgaaaaatggaacttatgactatccaaaatattccgaagaatcaaagttaaacagagagaaaattgatggagtgaaattggaatcaatgggagtctatcagattctggcgatctactcaacagtcgccagttccctggttcttttggtctccctgggggcaatcagcttctggatgtgttccaatgggtctttgcagtgtagaatatgcatctaa

SEQ ID NO: 30804 - RNA, 1698 nt, synthetic construct
  misc_feature 1..1698: note = hemagglutinin__InfluenzaA__ABA12715
  source 1..1698: mol_type = other RNA
atgaaagcaaaactactggtcctgttatgtacatttacagctacatacgcagacacaatatgtataggctaccatgccaacaactcaaccgacactgttgacacagtacttgagaagaatgtgacagtgacacactctgtcaacctacttgaggacagtcacaatggaaaactatgtctactaaaaggaatagccccactacaattgggtaattgcagcgttgccggatggatcttaggaaacccagaatgcgaattactgatttccaaggaatcatggtcctacattgtagaaacaccaaatcctgagaatggaacatgttacccagggtatttcgccgactatgaggaactgagggagcaattgagttcagtatcttcatttgagagattcgaaatattccccaaaggaagctcatggcccaaccacaccgtaaccggagtatcagcatcatgctcccataatgggaaaagcagtttttacagaaatttgctatggctgacggggaagaatggtttgtacccaaatctgagcatgtcctatgtaaacaacaaagagaaagaagtccttgtgctatggggtgttcatcacccacctaacataggggaccaaagggccctctaccatacagaaaatgcttatgtctctgtagtgtcttcacattatagcagaagattcaccccagaaatagccaaaagacccaaagtaagagatcaggaaggaagaatcaactactactggactctgctggaacccggggacacaataatatttgaggcaaatggaaatctaatagcgccatggtatgctttcgcactgagtagaggctttggatcaggaatcatcacctcaaatgcaccaatggatgaatgtgatgcgaagtgtcaaacacctcagggagctataaacagtagtcttcctttccagaatgtacacccagttacaataggagagtgtccaaagtatgtcaggagtacaaaattaaggatggttacaggactaaggaacatcccatccattcaatccagaggtttgtttggagccattgccggtttcattgaaggggggtggactggaatggtagatgggtggtatggttatcatcatcagaatgagcaaggatctggctatgctgcagatcaaaaaagcacacaaaatgccattaacgggattacaaacaaggtgaattctgtaattgagaaaatgaacactcaattcacagctgtgggcaaagaattcaacaaattagaaagaaggatggaaaacttaaataaaaaagttgatgatgggtttctagacatttggacatataatgcagaattgttggttctactggaaaatgaaaggactttggatttccatgactccaatgtgaagaatctgtatgagaaagtaaaaagccaattaaagaataatgccaaagaaataggaaacgggtgttttgaattctatcacaagtgtgacaatgaatgcatggaaagtgtgaaaaatggaacttatgactatccgaaatattccgaagaatcaaagttaaacagggagaaaattgatggagtaaaattggaatcaatgggagtctatcagattctggcgatctactcaactgtcgctagttccctggtttttttggtctccctgggggcaatcagcttctggatgtgttccaatgggtctttgcagtgtagaatatgcatctga

SEQ ID NO: 30805 - RNA, 1698 nt, synthetic construct
  misc_feature 1..1698: note = hemagglutinin__InfluenzaA__ABA12729
  source 1..1698: mol_type = other RNA
atgaaagtaaaactactggttctgttatgtacatttacagctacatatgcagacacaatatgtataggctaccatgccaacaactcaaccgacactgttgacacagtacttgagaagaatgtgacagtgacacactctgtcaacctacttgaggacagtcacaatggaaaactatgtctactaaaaggaatagccccactacaattgggtaattgcagcgttgccggatggatcttaggaaacccagaatgcgaattactgatttccaaggaatcatggtcctacattgtagaaacaccaaatcctgaaaatggaacatgttacccagggtatttcgccgactatgaggaactgagggagcaattgagttcagtatcttcatttgagaggttcgaaatattccccaaagagagctcatggcccaaccacaccgtaaccggagtatcagcatcatgctcccataacgggaaaagcagtttttacagaaatttgctatggctgacggggaagaatggtttgtacccaaacctgagcaagtcctatgcaaacaacaaagagaaagaagtccttgtactatggggtgttcatcacccgcctaacataggggaccaaagggccctctatcatacagaaaatgcttatatctctgtagtgtcttcacattatagcagaagattcaccccagaaatagccaaaagacccaaggtaagagatcaggaaggaagaatcaactactactggactctgctggaacccggggatacaataatatttgaggcaaatggaaatctaatagcgccaaggtatgctttcgcactgagtagaggctttggatcaggaatcatcacctcaaatgcaccaatggatgaatgtgatgcgaagtgtcaaacacctcagggagctataaacagcagtcttccttttcagaatgtacacccagtcacaataggagagtgtccaaagtatgtcaggagtgcaaaattaaggatggttacaggactaaggaacatcccatccattcaatccagaggtttgtttggagccattgccggtttcattgaaggggggtggactggaatggtagatggttggtatggttatcatcatcagaatgagcaaggatctgggtatgctgcagatcaaaaaagcacacaaaatgccattaacgggattacaaacaaggtgaattctgtaattgagaaaatgaacactcaattcacagctgtgggcaaagaattcaacaaattggaaagaaggatggaaaacttaaataaaaaggttgatgatgggtttctagacatttggacatataatgcagaattgttggttctactggaaaatgaaaggactttggatttccatgactccaacgtgaagaatctgtatgagaaagtaaaaagccaattaaagaataatgccaaagaaataggaaacgggtgttttgaattctatcacaagtgtaacgatgaatgcatggagagtgtgaaaaatggaacttatgactatccaagatattccgaagaatcaaagttaaacagggagaaaattgatggagtgaaattggaatcaatgggagtctatcagattctggcgatctactcaacagtcgccagttccctggttcttttggtctccctgggggcaatcagcttctggatgtgttccaatgggtctttgcagtgtagaatatgcatctaa

SEQ ID NO: 30806 - RNA, 1701 nt, synthetic construct; identical to SEQ ID NO: 30790
  misc_feature 1..1701: note = hemagglutinin__InfluenzaA__ABA12740
  source 1..1701: mol_type = other RNA

SEQ ID NO: 30807 - RNA, 1701 nt, synthetic construct
  misc_feature 1..1701: note = hemagglutinin__InfluenzaA__ABA12751
  source 1..1701: mol_type = other RNA
atgaagactatcattgctttgagctacattctatgtctggttttcgctcaaaaacttcccggaaatgacaacagcacggcaacgctgtgccttgggcatcatgcagtaccaaacggaacgatagtgaaaacaatcacgaatgaccaaattgaagttactaatgctactgagctggttcagagttcctcaacaggtggaatatgcgacagtcctcatcagatccttgatggagaaaactgcacactaatagatgctctattgggagaccctcagtgtgatggcttccaaaataagaaatgggacctttttattgaacgcagcaaagcctacagcaactgttacccttatgatgtgccggattatgcctcccttaggtcactagttgcctcatccggcacactggaatttaacaatgaaagcttcaattggactggagtcactcaaaatggaacaagctctgcttgcaaaaggagatctaataacagtttctttagtagattgaattggttgacccacttaaaattcaaatacccagcattgaacgtgactatgccaaacaatgaaaaatttgacaaattgtacatttggggggttcaccacccgggtacggacaatgaccaaatcagcctatatgctcaagcttcaggaagaatcacagtctctaccaaaagaagccaacaaactgtaatcccgaatatcggatctagacccagggtaagagatatccccagcagaataagcatctattggacaatagtaaaaccgggagacatacttttgattaacagcacagggaatctaattgctcctcggggttacttcaaaatacgaagtgggaaaagctcaataatgagatcagatgcacccattggcaaatgcaattctgaatgcatcactccaaatggaagcattcccaatgacaaaccatttcaaaatgtaaacaggatcacatatggggcctgtcccagatatgttaagcaaaacactctgaaattggcaacagggatgcgaaatgtaccagagaaacaaactagaggcatatttggcgcaatcgcgggtttcatagaaaatggttgggagggaatggtggatggttggtacggtttcaggcatcaaaattctgagggaataggacaagcagcagatctcaaaagcactcaagcagcaatcaaccaaatcaatgggaagctgaataggttgatcgggaaaaccaacgagaaattccatcagattgaaaaagaattctcagaagtagaagggagaattcaggacctcgagaaatatgttgaggacactaaaatagatctctggtcatacaacgcggagcttcttgttgccctggagaaccaacatacaattgatctaactgactcagaaatgaacaaactgtttgaaagaacaaagaagcaactgagggaaaatgctgaggatatgggcaatggttgtttcaaaatataccacaaatgtgacaatgcctgcatagggtcaatcagaaatggaacttatgaccatgatgtatacagagatgaagcattgaacaaccggttccagatcaaaggtgttgagctgaagtcaggatacaaagattggatcctatggatttcctttgccatatcatgttttttgctttgtgttgctttgttggggttcatcatgtgggcctgccaaaaaggcaacattaggtgcaacatttgcatttga

SEQ ID NO: 30808 - RNA, 1701 nt, synthetic construct
  misc_feature 1..1701: note = hemagglutinin__InfluenzaA__ABA12762
  source 1..1701: mol_type = other RNA
atgaagactatcattgctttgagctacattctatgtctggttttcgctcaaaaatttcccggaaatgacaacagcacggcaacgctgtgccttgggcaccatgcagtaccaaacggaacgatagtgaaaacaatcacgaatgaccaaattgaagttactaatgctactgagctggttcagagttcctcaacaggtggaatatgcgacagtcctcatcagatccttgatggagaaaactgcacactaatagatgctctattgggagaccctcagtgtgatggcttccaaaataagaaatgggacctttttgttgaacgcagcaaagcctacagcaactgttacccttatgatgtgccggattatgcctcccttaggtcactagttgcctcatccggcacactggagtttaacaatgaaagcttcaattggactggagtcactcaaaatggaacaagctctgcttgcaaaaggagatctaataacagtttctttagtagattgaattggttgacccacttaaaattcaaatacccagcattgaacgtgactatgccaaacaatgaaaaatttgacaaattgtacatttggggggttcaccacccgggtacggacaatgaccaaattagcctatatgctcaagcttcaggaagaatcacagtctctaccaaaagaagccaacaaactgtaatcccgaatatcggatctagacccagggtaagggatatccccagcagaataagcatctattggacaatagtaaaaccgggagacatacttttgattaacagcacagggaatctaattgctcctcggggttacttcaaaatacgaagtgggaaaagctcaataatgagatcagatgcacccattggcaaatgcaattctgaatgcatcactccaaatggaagcattcccaatgacaaaccatttcaaaatgtaaacaggatcacatatggggcctgtcccagatatgttaagcaaaacactctgaaattggcaacagggatgcgaaatgtaccagagaaacaaactagaggcatatttggcgcaatcgcgggtttcatagaaaatggttgggagggaatggtggatggttggtacggtttcaggcatcaaaattctgagggaataggacaagcagcagatctcaaaagcactcaagcagcaatcaaccaaatcaatgggaagctgaataggttgatcgggaaaaccaacgagaaattccatcagattgaaaaagaattctcagaagtagaagggagaattcaggacctcgagaaatatgttgaggacactaaaatagatctctggtcatacaacgcggagcttcttgttgccctggagaaccaacatacaattgatctaactgactcagaaatgaacaaactgtttgaaagaacaaagaagcaactgagggaaaatgctgaggatatgggcaatggttgtttcaaaatataccacaaatgtgacaatgcctgcatagggtcaatcagaaatggaacttatgaccatgatgtatacagagatgaagcattaaacaaccggttccagatcaaaggtgttgagctgaagtcaggatacaaagattggatcctatggatttcctttgccatatcatgttttttgctttgtgttgttttgttggggttcatcatgtgggcctgccaaaaaggcaacattaggtgcaacatttgcatttga

SEQ ID NO: 30809 - RNA, 1701 nt, synthetic construct
  misc_feature 1..1701: note = hemagglutinin__InfluenzaA__ABA12773
  source 1..1701: mol_type = other RNA
atgaagactatcattgctttgagctacattttctgtctggttctcggccaagattttccaggaaatgacaacagcacagcaacgctgtgcctgggacatcatgcggtgccaaacggaacactagtgaaaacaatcacaaatgatcagattgaagtgactaatgctactgagctggttcagagttcctcaacggggaaaatatgcaacaatcctcatcgaatccttgatggaatagactgcacactgatagatgctctattgggggaccctcattgtgatggctttcaaaatgagacatgggaccttttcgttgaacgcagcaaagctttcagcaactgttacccttatgatgtgccagattatgcctcccttaggtcactagttgcctcgtcaggcactctggagtttatcaatgaaggcttcacttggactggggtcactcagaatgggggaagcaatgcttgcaaaaggggacctgatagcggttttttcagtagactgaactggttgtacaaatcaggaagcacatatccagtgctgaacgtgactatgccaaataatgacaattttgacaaactatacatttggggggttcaccacccgagcacggaccaagaacaaaccagcctatatgttcaagcatcagggagagtcacagtctctaccaagagaagccagcaaactataatcccgaatatcgggtctagaccctgggtaaggggtctgtctagtagaataagcatctattggacaatagttaaaccaggagacatactggtaattaacagtaatgggaacctaattgctcctcggggttatttcaaaatgcgcactgggaaaagctcaataatgaggtcagatgcacctattggcacctgcatttctgaatgcatcactccaaatggaagcattcccaatgacaagccctttcaaaacgtaaacaagatcacatatggggcatgtcccaagtatgttaagcaaaacaccctgaagttggcaacagggatgcggaatgtaccagagaaacaaactagaggcctattcggcgcaatagcaggtttcatagaaaatggttgggagggaatgatagacggttggtacggtttcaggcatcaaaattctgagggcacaggacaagcagcagatcttaaaagcactcaagcagccatcgaccaaatcaatgggaaactgaatagggtaatcgagaagacgaacgagaaattccatcaaatcgaaaaggaattctcagaagtagaagggagaattcaggacctcgagaaatacgttgaagacactaaaatagatctctggtcttacaatgcggagcttcttgtcgctctggagaaccaacatacaattgatctgactgactcggaaatgaacaaactgtttgaaaaaacaaggaggcaactgagggaaaatgctgaggacatgggcaatggttgcttcaaaatataccacaaatgtgacaatgcttgcatagggtcaatcagaaatgggacttatgaccatgatgtatacagagacgaagcattaaacaaccggtttcagatcaaaggtgttgaactgaagtcaggatacaaagactggatcctgtggatttcctttgccatatcatgctttttgctttgtgttgttttgctggggttcatcatgtgggcctgccagaaaggcaacattaggtgcaacatttgcatttga

SEQ ID NO: 30810 - RNA, 1701 nt, synthetic construct
  misc_feature 1..1701: note = hemagglutinin__InfluenzaA__ABA12780
  source 1..1701: mol_type = other RNA
atgaagactatcattgctttgagctacattctatgtctggttttcgctcaaaaacttcccggaaatgacaacagcacggcaacgctgtgccttgggcaccatgcagtaccaaacggaacgatagtgaaaacaatcacgaatgaccaaattgaagttactaatgctactgagctggttcagagttcctcaacaggtggaatatgcgacagtcctcatcagatccttgatggagaaaactgcacactaatagatgctctattgggagaccctcagtgtgatggcttccaaaataagaaatgggacctttttgttgaacgcagcaaagcctacagcaactgttacccttatgatgtgccggattatgcctcccttaggtcactagttgcctcatccggcacactggagtttaacaatgaaagcttcaattggactggagtcactcaaaatggaacaagctctgcttgcaaaaggagatctaataacagtttctttagtagattgaattggttgacccatttaaaattcaaatacccagcattgaacgtgactatgccaaacaatgaaaaatttgacaaattgtacatttggggggttcaccacccgggtacgaacaatgaccaaatcagcctatatgctcaagcatcaggaagaatcacagtctctaccaaaagaagccaacaaactgtaatcccgaatatcgaatctagacccagggtaagggatatccccagcagaataagcatctattggacaatagtaaaaccgggagacatacttttgattaacagcacagggaatctaattgctcctcggggttacttcaaaatacgaagtgggaaaagctcaataatgagatcagatgcacccattggcaaatgcaattctgaatgcatcactccaaatggaagcattcccaatgacaaaccatttcaaaatgtaaacaggatcacatatggggcctgtcccagatatgttaagcaaaacactctgaaattggcaacagggatgcgaaatgtaccagagaaacaaactagaggcatatttggcgcaatcgcgggtttcatagaaaatggttgggagggaatggtggatggttggtacggtttcaggcatcaaaattctgagggaataggacaagcagcagatctcaaaagcactcaagcagcaatcaaccaaatcaatgggaagctgaataggttgatcgggaaaaccaacgagaaattccatcagattgaaaaagaattctcagaagtagaagggagaattcaggacctcgagaaatatgttgaggacactaaaatagatctctggtcatacaacgcggagctccttgttgccctggagaaccaacatacaattgatctaactgactcagaaatgaacaaactgtttgaaagaacaaagaagcaactgagggaaaatgctgaggatatgggcaatggttgtttcaaaatataccacaaatgtgacaatgcctgcatagggtcaatcagaaatggaacttatgaccatgatgtatacagagatgaagcattaaacaaccggttccagatcaaaggtgttgagctgaagtcaggatacaaagattggatcctatggatttcctttgccatatcatgttttttgctttgtgttgctttgttggggttcatcatgtgggcctgccaaaaaggcaacattaggtgcaacatttgcatttga

SEQ ID NO: 30811 - RNA, 1701 nt, synthetic construct
  misc_feature 1..1701: note = hemagglutinin__InfluenzaA__ABA16214
  source 1..1701: mol_type = other RNA
atgaagactatcattgctttgagctacatttcctgtctggttttcgcccaaaaacttcccggaaatgacaacagcacagcaacgctgtgcctgggacatcatgcagtaccaaacggaacgctagtgaaaacaatcacgaatgatcagattgaagtgactaatgctactgagctggtccaaagttcctcaacaggtagaatatgcgacagtcctcaccgaatccttgatggaaaaaactgcacactgatagatgctctattgggagaccctcattgtgatggcttccaaaatgagaaatgggatctttttgttgaacgcagcaaagctttcagcaactgctacccttatgatgtgccggattatgcctcccttaggtcactagttgcctcatcaggcaccctggagtttatcaatgaaggcttcaattggactggagtcactcagagtgggggaagctatgcttgcaaaaggggatctgttaaaagtttcttcagtagattgaattggttgtatgagtcagaaagcaaatatccagcgctgaacgtgactatgccaaacaatggcaaatttgacaaattgtacatttggggggttcaccaccctagcacggacaaagaacaaaccaacctatatgttcgagcatcagggagagtcacagtctctaccaagagaagccagcaaactgtaatcccgaatatcgggcctagaccctgggtaaggggtctgtctagtagaataagtatctattggacaatagtaaaaccgggagacatactgttaattaatagcactgggaacctaattgctccccggggttacttcaaaatacgcactgggaaaagctcaataatgaggtcagatgcacctattggcacctgcagttctggatgcatcactccaaatggaagcattcccaatgacaaaccctttcaaaatgtgaacaagatcacatatggggcatgtcccaggtatgttaagcagaacactctgaagttggcaacagggatgcggaatgtacctgaaaaacaaactagaggcatattcggcgcaatagcaggtttcatagaaaatggttgggagggaatggtagacggttggtacggtttcaggcatcaaaattctgagggcacaggacaagcagcagatcttaaaagcactcaagcagcaatcgaccaaatcaacgggaaactgaataggttaatcgagaaaacgaacgagaaattccatcaaatcgaaaaggaattctcagaagtagaagggagaattcaggacctcgagaagtatgttgaagacactaaaatagatctctggtcttacaacgcggagcttcttgttgccctggagaaccaacatacaattgatatgactgactcagaaatgaacaaactgtttgaaaaaacaaggaagcaactgagggaaaatgctgaggacatgggcaatggttgcttcaaaatataccacaaatgtgacaatgcttgcatagggtcaatcagaaatggaacttatgaccatgatgtatacagagacgaagcattaaacaaccggtttcagatcaaaggtgttgagctgaagtcaggatacaaagactggatcctatggatttcctttgccatatcatgctttttgctctgtgttgttttgctggggttcataatgtgggcctgccaaaaaggcaacattaggtgcaacatttgcatttga

SEQ ID NO: 30812 - RNA, 1701 nt, synthetic construct; identical to SEQ ID NO: 30783
  misc_feature 1..1701: note = hemagglutinin__InfluenzaA__ABA18026
  source 1..1701: mol_type = other RNA

SEQ ID NO: 30813 - RNA, 1698 nt, synthetic construct
  misc_feature 1..1698: note = hemagglutinin__InfluenzaA__ABA18037
  source 1..1698: mol_type = other RNA
atgaaagcaaaactactggtcctgttatgtacatttacagctacatacgcagacacaatatgtataggctaccatgccaacaactcaaccgacactgttgacacagtacttgagaagaatgtgacagtgacacactctgtcaacctacttgaggacagtcacaatggaaaactatgtctactaaaaggaatagccccactacaattgggtaattgcagcgttgccggatggatcttaggaaacccagaatgcgaattactgatttccaaggaatcatggtcctacattgtagaaacaccaaatcccgagaatggaacatgttacccagggtatttcgccgactatgaggaactgaaggagcaattgagttcagtatcttcatttgagagattcgaaatattccccaaagggagctcatggcccaaccacaccgtaaccggagtatcagcatcatgctcccataatgggaaaagcagtttttacagaaatttgctatggctgacggggaagaatggtttgtacccaaacctgagcatgtcatatgtaaacaacaaagagaaagaagtccttgtgctatggggtgttcatcacccacctaacataggggaccaaagggccctctaccatacagaaaatgcttatgtctctgtagtgtcttcacattatagcagaagattcaccccagaaatagccaaaagacccaaagtaagagatcaggaaggaagaatcaactactactggactctgctggaacccggggacacaataatatttgaggcaaatggaaatctaatagcgccatggtatgctttcgcactgagtagaggctttggatcaggaatcatcacctcaaatgcaccaatggatgaatgtgatgcgaagtgtcaaacacctcagggagctataaacagtagtcttcctttccagaatgtacacccagttacaataggagagtgtccaaagtatgtcaggagtgcaaaattaaggatggttacaggactaaggaacatcccatccattcaatccagaggtttgtttggagccattgccggtttcattgaaggggggtggactggaatggtagatgggtggtatggttatcatcatcagaatgagcaaggatctggctatgctgcagatcaaaaaagcacacaaaatgccattaacgggattacaaacaaggtgaattctgtaattgagaaaatgaacactcaattcacagctgtgggcaaagaattcaacaaattagaaagaaggatggaaaacttaaataaaaaagttgatgatgggtttctagacatttggacatataatgcagaattgttggttctactggaaaatgaaaggactttggatttccatgactccaatgtgaagaatctgtatgagaaagtaaaaagccaattaaagaataatgccaaagaaataggaaacgggtgttttgaattctatcacaagtgtaacaatgaatgcatggaaagtgtgaaaaatggaacttatgactatccaaaatattccgaagaatcaaagttaaacagggagaaaattgatggagtaaaattggaatcaatgggagtctatcagattctggcgatctactcaactgtcgccagttccctggttcttttggtctccctgggggcaatcagcttctggatgtgttccaatgggtctttgcagtgtagaatatgcatctga

SEQ ID NO: 30814 - RNA, 1701 nt, synthetic construct; identical to SEQ ID NO: 30764
  misc_feature 1..1701: note = hemagglutinin__InfluenzaA__ABA18048
  source 1..1701: mol_type = other RNA

SEQ ID NO: 30815 - RNA, 1701 nt, synthetic construct
  misc_feature 1..1701: note = hemagglutinin__InfluenzaA__ABA18123
  source 1..1701: mol_type = other RNA
atgaagactatcattgctttgagctacattttatgtctggttttcgctcaaaaacttcccggaaatgacaacagcacggcaacgctgtgcctggggcaccatgcagtgccaaacggaacgctagtgaaaacaatcacgaatgaccaaattgaagtgactaatgctactgagctggttcagagttcctcaacaggtagaatatgcgacagtcctcaccaaatccttgatggagaaaactgcacactaatagatgctctattgggagaccctcattgtgatggcttccaaaataaggaatgggacctttttgttgaacgcagcaaagcctacagcaactgttacccttatgatgtgccggattatgtctcccttaggtcactagttgcctcatcaggcacgctggagtttaacaatgaaagcttcaattggactggagtcgctcagaatggaacaagctctgcttgcaaaaggagatctaataaaagtttctttagtagattgaattggttgcaccaattaaaatacaaatatccagcactgaacgtgactatgccaaacaatgaaaaatttgacaaattgtacatttggggggttcaccacccgggtacagacagtgaccaaatcagcctatatgctcaagcatcagggagagtcacagtctctaccaaaagaagccaacaaactgtaatcccgaatatcggatctggaccctgggtaaggggtgtctccagcagaataagcatctattggacaatagtaaaaccgggagacatacttttgattaacagcacagggaatctaattgctcctcggggttacttcaaaatacgaagtgggaaaagctcaataatgaggtcagatgcacccattggcaaatgcaattctgaatgcatcactccaaatggaagcattcccaatgacaaaccatttcaaaatgtaaacaggatcacatatggggcctgtcccagatatgttaagcaaaacactctgaaattggcaacagggatgcggaatgtgccagagaaacaaactagaggcatattcggtgcaatcgcgggcttcatagaaaatggttgggagggaatgatggacggttggtacggtttcaggcatcaaaattctgagggcacagggcaagcagcagatcttaaaagcactcaagcagcaatcaaccaaatcaacgggaaactgaataggttaatcgagaaaacgaacgagaaattccatcaaattgaaaaagaattctcagaagtagaagggagaattcaggacctcgagaaatatgttgaggacactaaaatagatctctggtcgtacaatgcggagcttcttgttgccctggagaaccaacatacaattgatctaactgactcagaaatgaacaaactgtttgaaagaacaaagaagcaactgagggaaaatgctgaggatatgggcaatggttgtttcaaaatataccacaaatgtgacaatgcctgcatagggtcaatcagaaatggaacttatgaccatgatgtatacagagacgaagcattgaacaaccggttccagatcaaaggtgttgagctgaagtcaggatacaaagattggatcctatggatttcctttgccatatcatgttttttgctttgtattgttttgctggggttcatcatgtgggcctgccaaaaaggcaacattaggtgcaacatttgcatttga

SEQ ID NO: 30816 - RNA, 1701 nt, synthetic construct; identical to SEQ ID NO: 30764
  misc_feature 1..1701: note = hemagglutinin__InfluenzaA__ABA18134
  source 1..1701: mol_type = other RNA

SEQ ID NO: 30817 - RNA, 1698 nt, synthetic construct
  misc_feature 1..1698: note = hemagglutinin__InfluenzaA__ABA18145
  source 1..1698: mol_type = other RNA
atgaaagtaaaactactggttctgttatgtacatttacagctacatatgcagacacaatatgtataggctaccatgccaacaactcaaccgatactgttgacacagtacttgagaagaatgtgacagtgacacactctgtcaacctacttgaggacagtcacaatggaaaactatgtctactaaaaggaatagccccactacaattgggtaattgcagcgttgccggatggatcttaggaaacccagaatgcgaattactgatttccaaggaatcatggtcctacattgtagaaacaccaaatcctgagaatggaacatgttacccagggtatttcgccgactatgaggaactgagggagcaattgagttcagtatcttcatttgagaggttcgaaatattccccaaagagagctcatggcccaaccacaccgtaaccggagtatcagcatcatgctcccataacgggaaaagcagtttttacagaaatttgctatggctgacggggaagaatggtttgtacccaaacctgagcaagtcctatgcaaacaacaaagagaaagaagtccttgtactatggggtgttcatcacccgcctaacataggggaccaaagggccctctatcatacagaaaatgcttatgtctctgtagtgtcttcacattatagcagaagattcaccccagaaatagccaaaagacccaaggtgagagatcaggaaggaagaatcaactactactggactctgctggaacccggggatacaataatatttgaggcaaatggaaatctaatagcgccaaggtatgctttcgcactgagtagaggctttggatcaggaatcatcacctcaaatgcaccaatggatgaatgtgatgcgaagtgtcaaacacctcagggagctataaacagcagtcttcctttccagaatgtacacccagtcacaataggagagtgtccaaagtatgtcaggagtgcaaaattaaggatggttacaggactaaggaacatcccatccattcaatccagaggtttgtttggagcaattgccggtttcattgaaggggggtggactggaatggtagatggttggtatggttatcatcatcagaatgagcaaggatctgggtatgctgcagatcaaaaaagcacacaaaatgccattaacgggattacaaacaaggtgaattctgtaattgagaaaatgaacactcaattcacagctgtgggcaaagaattcaacaaattggaaagaaggatggaaaacttaaataaaaaagttgatgatgggtttctagacatttggacatataatgcagaattgttggttctactggaaaatgaaaggactttggatttccatgactccaacgtgaagaatctgtatgagaaagtaaaaagccaattaaagaataatgccaaagaaataggaaacgggtgttttgaattctatcacaagtgtaacgatgaatgcatggagagtgtgaaaaatggaacttatgactatccaaaatattccgaagaatcaaagttaaacagggagaaaattgatggagtgaaattggaatcaatgggagtctatcagattctggcgatctactcaacagtcgccagttccctggttcttttggtctccctgggggcaatcagcttctggatgtgttccaatgggtctttgcagtgtagaatatgcatctaa

SEQ ID NO: 30818 - RNA, 1701 nt, synthetic construct; identical to SEQ ID NO: 30760
  misc_feature 1..1701: note = hemagglutinin__InfluenzaA__ABA18156
  source 1..1701: mol_type = other RNA

SEQ ID NO: 30819 - RNA, 1701 nt, synthetic construct
  misc_feature 1..1701: note = hemagglutinin__InfluenzaA__ABA26700
  source 1..1701: mol_type = other RNA
atgaagactatcattgctttgagctacattctatgtctggttttcgctcaaaaacttcccggaaatgacaacagcacggcaacgctgtgccttgggcaccatgcagtaccaaacggaacgatagtgaaaacaatcacgaatgaccaaattgaagttactaatgctactgagctggttcagagttcatcaacaggtggaatatgcaacagtcctcatcagatccttgatggagaaaactgcacactaatagatgctctattgggagaccctcagtgtgatggcttccaaaataagaaatgggacctttttgttgaacgcagcaaagcctacagcaactgttacccttatgatgtgccggattatgcctcccttaggtcactagttgcctcatccggcacactggagtttaacaatgaaagcttcaattggactggagtcactcaaaatggaacaagctctgcttgcaaaaggagatctaataacagtttctttagtagattgaattggttgacccacttaaaattcaaatacccagcattgaacgtgactatgccaaacaatgaaaaatttgacaaattgtacatttggggggttcaccacccgggtacggacaatgaccaaatcagcctatatgctcaagcaccaggaagaatcacagtctccaccaaaagaagccaacaaactgtaatcccgaatatcggatctagacccagggtaagggatatccccagcagaataagcatctattggacaatagtaaaaccgggagacatacttttgattaacagcacagggaatctaattgctcctcggggttacttcaaaatacgaagtgggaaaagctcaataatgagatcagatgcacccattggcaaatgcaattctgaatgcatcactccaaatggaagcattcccaatgacaaaccatttcaaaatgtaaacaggatcacatatggggcctgccccagatatgttaagcaaaacactctgaaattggcaacagggatgcgaaatgtaccagagaaacaaactagaggcatatttggcgcaatcgcgggtttcatagaaaatggttgggagggaatggtggatggttggtacggtttcaggcatcaaaattctgagggaataggacaagcagcagatctcaaaagcactcaagcagcaatcaaccaaatcaatgggaagctgaataggttgatcgggaaaaccaacgagaaattccatcagattgaaaaagaattctcagaagtagaagggagaattcaggaccttgagaaatatgttgaggacactaaaatagatctctggtcatacaacgcggagcttcttgttgccctggagaaccaacatacaattgatctaactgactcagaaatgaacaaactgtttgaaagaacaaagaagcaactgagggaaaatgctgaggatatgggcaatggttgtttcaaaatataccacaaatgtgacaatgcctgcatagggtcaatcagaaatggaacttatgaccatgatgtatacagagatgaagcattaaacaaccggttccagatcaaaggtgttgagctgaagtcaggatacaaagattggatcctatggatttcctttgccatatcatgttttttgctttgtgttgctttgttggggttcatcatgtgggcctgccaaaaaggcaacattaggtgcaacatttgcatttga

SEQ ID NO: 30820 - RNA, 1701 nt, synthetic construct
  misc_feature 1..1701: note = hemagglutinin__InfluenzaA__ABA26711
  source 1..1701: mol_type = other RNA
atgaagactatcattgctttgagctacattctatgtctggttttcgctcaaaaacttcccggaaatgacaacagcacggcaacgctgtgccttgggcaccatgcagtaccaaacggaacgatagtgaaaacaatcacgaatgaccaaattgaagttactaatgctactgagctggttcagagttcctcaacaggtggaatatgcgacagtcctcatcagatccttgatggagaaaactgcacactaatagatgctctattgggagaccctcagtgtgatggcttccaaaataagaaatgggacctttttgttgaacgcagcaaagcctacagcaactgttacccttatgatgtgccggattatgcctcccttaggtcactagttgcctcatccggcacactggagtttaacaatgaaagcttcaattggactggagtcactcaaaatggaacaagctctgcttgcaaaaggagatctaataacagtttctttagtagattgaattggttgacccacttaaaattcaaatacccagcattgaacgtgactatgccaaacaatgaaaaatttgacaaattgtacatttggggggttcaccacccgggtacggacaatgaccaaatcagcctatatgctcaagcatcaggaagaatcacagtctctaccaaaagaagccaacaaactgtaatcccgaatatcggatctagacccagggtaagggatatccccagcagaataagcatctattggacaatagtaaaaccgggagacatacttttgattaacagcacagggaatctaattgctcctcggggttacttcaaaatacgaagtgggaaaagctcaataatgagatcagatgcacccattggcaaatgcaagtctgaatgcatcactccaaatggaagcattcccaatgacaaaccatttcaaaatgtaaacaggatcacatatggggcctgtcccagatatgttaagcaaaacactctgaaattggcaacagggatgcgaaatgtaccagagaaacaaactagaggcatatttggcgcaatcgcgggtttcatagaaaatggttgggagggaatggtggatggttggtacggtttcaggcatcaaaattctgagggaataggacaagcagcagatctcaaaagcactcaagcagcaatcaaccaaatcaatgggaagctgaataggttgatcgggaaaaccaacgagaaattccatcagattgaaaaagaattctcagaagtagaagggagaattcaggacctcgagaaatatgtcgaggacactaaaatagatctctggtcatacaacgcggagcttcttgttgccctggagaaccaacatacaattgatctaactgactcagaaatgaacaaactgtttgaaagaacaaagaagcaattgagggaaaatgctgaggatatgggcaatggttgtttcaaaatataccacaaatgtgacaatgcctgcatagggtcaatcagaaatggaacttatgaccatgatgtatacagagatgaagcattaaacaaccggttccagatcaaaggtgttgagctgaagtcaggatacaaagattggatcctatggatttcctttgccatatcatgttttttgctttgtgttgctttgttggggttcatcatgtgggcctgccaaaaaggcaacattaggtgcaacatttgcatttga

SEQ ID NO: 30821 - RNA, 1701 nt, synthetic construct
  misc_feature 1..1701: note = hemagglutinin__InfluenzaA__ABA26722
  source 1..1701: mol_type = other RNA
atgaagactatcattgctttgagctacattctatgtctggttttcgctcaaaaacttcccggaaatgacaacagcacggcaacgctgtgccttgggcaccatgcagtaccaaacggaacaatagtgaaaacaatcacgaatgaccaaattgaagttactaatgctactgagctggttcagagttccccaacaggtggaatatgcgacagtcctcatcagatccttgatggagaaaactgcacactaatagatgctctattgggagaccctcagtgtgatggcttccaaaataagaaatgggacctttttgtcgaacgcagcaaagcccacagcaactgttacccttatgatgtgccggattatgcctcccttaggtcactagttgcctcatccggcacactggagtttaacaatgaaagcttcaattggactggagtcactcaaaatggaacaagttctgcttgcaaaaggagatctaataaaagtttctttagtagattgaattggttgacccacttaaaattcaaatacccagcattgaacgtgactatgccaaacaatgaaaaatttgacaaattgtacatttggggggttcaccacccgggtacggacaatgaccaaatcagcctatatgctcaagcatcaggaagaatcacagtctctaccaaaagaagccaacaaactgtaatcccgaatatcggatctagacccagggtaagggatgtccccagcagaataagcatctattggacaatagtaaaaccgggagacatacttttgattaacagcacagggaatctaattgctcctcggggttacttcaaaatacgaagtgggaaaagctcaataatgagatcagatgcacccattggcaaatgcaattctggatgcatcactccaaatggaagcattcccaatgacaaaccatttcaaaacgtaaacaggatcacatatggggcctgtcccagatatgttaagcaaaacactctgaaattggcaacagggatgcgaaacgtaccagagaaacaaactagaggcatatttggcgcaatcgcgggtttcatagaaaatggttgggagggaatggtggacggttggtacggtttcaggcatcaaaattctgagggaacaggacaagcagcagatctcaaaagcactcaagcagcaatcaaccaaatcaatgggaagctgaataggttgatcgggaaaacaaacgagaaattccatcaaattgaaaaagaattctcagaagtagaagggagaattcaggacctcgagaaatatgttgaggacactaaaatagatctctggtcatacaacgcggagcttcttgttgccctggagaaccaacatacaattgatctaactgactcagaaatgaacaaactgtttgaaagaacaaagaagcaactgagggaaaatgctgaggatatgggcaatggttgtttcaaaatataccacaaatgtgacaatgcctgcatagggtcaatcagaaatggaacttatgaccatgatgtatacagagatgaagcattaaacaaccggttccagatcaaaggtgttgagctgaagtcaggatacaaagattggatcctatggatttcctttgccatatcatgttttttgctttgtgttgctttgttggggttcatcatgtgggcctgccaaaaaggcaacattaggtgcaacatttgcatttga

SEQ ID NO: 30822 - RNA, 1701 nt, synthetic construct
  misc_feature 1..1701: note = hemagglutinin__InfluenzaA__ABA26733
  source 1..1701: mol_type = other RNA
atgaagactatcattgctttgagctacattctatgtctggttttcgctcaaaaacttcccggaaatgacaacagcacggcaacgctgtgccttgggcaccatgcagtaccaaacggaacgatagtgaaaacaatcacgaatgaccaaattgaagttactaatgctactgagctggttcagagttcctcaacaggtggaatatgcgacagtcctcatcagatccttgatggagaaaactgcacactaatagatgctctattgggagaccctcagtgtgatggcttccaaaataagaaatgggacctttttgttgaacgcagcaaagcctacagcaactgttacccttatgatgtgccggattatgcctcccttaggtcactagttgcctcatccggcacactggagtttaacaatgaaagcttcaattggactggagtcactcaaaatggaacaagctctgcttgcaaaaggagatctaataacagtttctttagtagattgaattggttgacccatttaaaattcaaatacccagcattgaacgtgactatgccaaacaatgaaaaatttgacaaattgtacatttggggggttcaccacccgggtacggacaatgaccaaatcagcctatatgctcaagcatcaggaagaatcacagtctctaccaaaagaagccaacaaactgtaatcccgaatatcggatctagacccagggtaagggatatccccagcagaataagcatctattggacaatagtaaaaccgggagacatacttttgattaacagcacagggaatctaattgctcctcggggttacttcaaaatacgaagtgggaaaagctcaataatgagatcagatgcacccattggcaaatgcaattctgaatgcatcactccaaatggaagcattcccaatgacaaaccatttcaaaatgtaaacaggatcacatatggggcctgtcccagatatgttaagcaaaacactctgaaattggcaacagggatgcgaaatgtaccagagaaacaaactagaggcatatttggcgcaatcgcgggtttcatagaaaatggttgggagggaatggtggatggttggtacggtttcaggcatcaaaattctgagggaataggacaagcagcagatctcaaaagcactcaagcagcaatcaaccaaatcaatgggaagctgaataggttgatcgggaaaaccaacgagaaattccatcagattgaaaaagaattctcagaagtagaagggagaattcaggacctcgagaaatatgttgaggacactaaaatagatctctggtcatacaacgcggagcttcttgttgccctggagaaccaacatacaattgatctaactgactcagaaatgaacaaactgtttgaaagaacaaagaagcaactgagggaaaatgctgaggatatgggcaatggttgtttcaaaatataccacaaatgtgacaatgcctgcatagggtcaatcagaaatggaacttatgaccatgatgtatacagagatgaagcattaaacaaccggttccagatcaaaggtgttgagctgaagtcaggatacaaagattggatcctatggatttcctttgccatatcatgttttttgctttgtgttgctttgttggggttcatcatgtgggcctgccaaaaaggcaacattaggtgcaacatttgcatttga

SEQ ID NO: 30823 - RNA, 1701 nt, synthetic construct; identical to SEQ ID NO: 30822
  misc_feature 1..1701: note = hemagglutinin__InfluenzaA__ABA26755
  source 1..1701: mol_type = other RNA

SEQ ID NO: 30824 - RNA, 1701 nt, synthetic construct
  misc_feature 1..1701: note = hemagglutinin__InfluenzaA__ABA26766
  source 1..1701: mol_type = other RNA
atgaagactatcattgctttgagctacattctatgtctggttttcgctcaaaaacttcccggaaatgacaacagcacggcaacactgtgccttgggcaccatgcagtaccaaacggaacgatagtgaaaacaatcacgaatgaccaaattgaagttactaatgctactgagctggttcagagttcctcaacaggtggaatatgcgacagtcctcatcagatccttgatggagaaaactgcacactaatagatgctctattgggagaccctcagtgtgatggcttccaaaataagaaatgggacctttttgttgaacgcagcaaagcctacagcaactgttacccttatgatgtgccggattatgcctcccttaggtcactagttgcctcatccggcacactggagtttaacaatgaaagcttcaattggactggagtcactcaaaatggaacaagctctgcttgcaaaaggagatctaataacagtttctttagtagattgaattggttgacccatttaaaattcaaatacccagcattgaacgtgactatgccaaacaatgaaaaatttgacaaattgtacatttggggggttcaccacccgggtacgaacaatgaccaaatcagcctatatgctcaagcatcaggaagaatcacagtctctaccaaaagaagccaacaaactgtaatcccgaatatcggatctagacccagggtaagggatatccccagcagaataagcatctattggacaatagtaaaaccgggagacatacttttgattaacagcacagggaatctaattgctcctcggggttacttcaaaatacgaagtgggaaaagctcaataatgagatcagatgcacccattggcaaatgcaattctgaatgcatcactccaaatggaagcattcccaatgacaaaccatttcaaaatgtaaacaggatcacatatggggcctgtcccagatatgttaagcaaaacactctgaaattggcaacagggatgcgaaatgtaccagagaaacaaactagaggcatatttggcgcaatcgcgggtttcatagaaaatggttgggagggaatggtggatggttggtacggtttcaggcatcaaaattctgagggaataggacaagcagcagatctcaaaagcactcaagcagcaatcaaccaaatcaatgggaagctgaataggttgatcgggaaaaccaacgagaaattccatcagattgaaaaagaattctcagaagtagaagggagaattcaggacctcgagaaatatgttgaggacactaaaatagatctctggtcatacaacgcggagcttcttgttgccctggagaaccaacatacaattgatctaactgactcagaaatgaacaaactgtttgaaagaacaaagaagcaactgagggaaaatgctgaggatatgggcaatggttgtttcaaaatataccacaaatgtgacaatgcctgcatagggtcaatcagaaatggaacttatgaccatgatgtatacagagatgaagcattaaacaaccggttccagatcaaaggtgttgagctgaagtcaggatacaaagattggatcctatggatttcctttgccatatcatgttttttgctttgtgttgctttgttggggttcatcatgtgggcctgccaaaaaggcaacattaggtgcaacatttgcatttga

SEQ ID NO: 30825 - RNA, 1701 nt, synthetic construct; identical to SEQ ID NO: 30824
  misc_feature 1..1701: note = hemagglutinin__InfluenzaA__ABA26788
  source 1..1701: mol_type = other RNA

SEQ ID NO: 30826 - RNA, 1701 nt, synthetic construct
  misc_feature 1..1701: note = hemagglutinin__InfluenzaA__ABA26799
  source 1..1701: mol_type = other RNA
atgaagactatcattgctttgagctacattctatgtctggttttcgctcaaaaacttcccggaaatgacaacagcacggcaacgctgtgccttgggcaccatgcagtaccaaacggaacgatagtgaaaacaatcacgaatgaccaaattgaagttactaatgctactgagctggttcagagttcctcaacaggtggaatatgcgacagtcctcatcagatccttgatggagaaaactgcacactaatagatgctctattgggagaccctcagtgtgatggcttccaaaataagaaatgggacctttttgttgaacgcagcaaagcctacagcaactgttacccttatgatgtgccggattatgcctcccttaggtcactagttgcctcatccggcacactggagtttaacaatgaaagcttcaattggactggagtcactcaaaatggaacaagctctgcttgcaaaaggagatctaataacagtttctttagtagattgaattggttgacccatttaaaattcaaatacccagcattgaacgtgactatgccaaacaatgaaaaatttgacaaattgtacatttggggggttcaccacccgggtacgaacaatgaccaaatcagcctatatgctcaagcatcaggaagaatcacagtctctaccaaaagaagccaacaaactgtaatcccgaatatcggatctagacccagggtaagggatatccccagcagaataagcatctattggacaatagtaaaaccgggagacatacttttgattaacagcacagggaatctaattgctcctcggggttacttcaaaatacgaagtgggaaaagctcaataatgagatcagatgcacccattggcaaatgcaattctgaatgcatcactccaaatggaagcattcccaatgacaaaccatttcaaaatgtaaacaggatcacatatggggcctgtcccagatatgttaagcaaaacactctgaaattggcaacagggatgcgaaatgtaccagagaaacaaactagaggcatatttggcgcaatcgcgggtttcatagaaaatggttgggagggaatggtggatggttggtacggtttcaggcatcaaaattctgagggaataggacaagcagcagatctcaaaagcactcaagcagcaatcaaccaaatcaatgggaagctgaataggttgatcgggaaaaccaacgagaaattccatcagattgaaaaagaattctcagaagtagaagggagaattcaggacctcgagaaatatgttgaggacactaaaatagatctctggtcatacaacgcggagcttcttgttgccctggagaaccaacatacaattgatctaactgactcagaaatgaacaaactgtttgaaagaacaaagaagcaactgagggaaaatgctgaggatatgggcaatggttgtttcaaaatataccacaaatgtgacaatgcctgcatagggtcaatcagaaatggaacttatgaccatgatgtatacagagatgaagcattaaacaaccggttccagatcaaaggtgttgagctgaagtcaggatacaaagattggatcctatggatttcctttgccatatcatgttttttgctttgtgttgctttgttggggttcatcatgtgggcctgccaaaaaggcaacattaggtgcaacatttgcatttga

SEQ ID NO: 30827 - RNA, 1698 nt, synthetic construct
  misc_feature 1..1698: note = hemagglutinin__InfluenzaA__ABA42247
  source 1..1698: mol_type = other RNA
atgaaagtaaaactactggttctgttatgtacatttacagctacatatgcagacacaatatgtataggctaccatgccaacaactcaaccgacactgttgacacagtacttgagaagaatgtgacagtgacacactctgtcaacctacttgaggacagtcacaatggaaaactatgtctactaaaaggaatagccccattacaattgggtaattgcagcgttgccggatggatcttaggaaacccagaatgcgaattactgatttccaaggaatcatggtcctacattgtagaaacaccaaatcctgagaatggaacatgttacccagggtatttcgccgactatgaggaactgagggagcaattgagttcagtatcttcatttgagaggttcgaaatattccccaaagagagctcatggcccaaccacaccgtaaccggagtatcagcatcatgctcccataacgggaaaagcagtttttacaaaaatttgctatggctgacggggaagaatggtttgtacccaaacctgagcaagtcctatgcaaacaacaaagagaaagaagtccttgtactatggggtgttcatcacccgcctaacataggggaccaaagggccctctatcatacagaaaatgcttatgtctctgtagtgtcttcacattatagcagaagattcaccccagaaatagccaaaagacccaaggtgagagatcaggaaggaagaatcaactactactggactctgctggaacccggggatacaataatatttgaggcaaatggaaatctaatagcgccaaggtatgctttcgcactgagtagaggctttggatcaggaatcatcacctcaaatgcaccaatggatgaatgtgatgcgaagtgtcaaacacctcagggagctataaacagcagtcttcctttccagaatgtacacccagtcacaataggagagtgtccaaagtatgtcaggagtgcaaaattaaggatggttacaggactaaggaacatcccatccattcaatccagaggtttgtttggagccattgccggtttcattgaaggggggtggactgggatggtagatggttggtatggttatcatcatcagaatgagcaaggatctgggtatgctgcagatcaaaaaagcacacaaaatgccattaacgggattacaaacaaggtgaattctgtaattgagaaaatgaacactcaattcacagctgtgggcaaagaattcaacaaattggaaagaaggatggaaaacttaaataaaaaagttgatgatgggtttctagacatttggacatataatgcagaattgttggttctactggaaaatgaaaggactttggatttccatgactccaacgtgaagaatctgtatgagaaagtaaaaagccaattaaagaataatgccaaagaaataggaaacgggtgttttgaattctatcacaagtgtaacgatgaatgcatggagagtgtgaaaaatggaacttatgactatccaaaatattccgaagaatcaaagttaaacagggagaaaattgatggagtgaaattggaatcaatgggagtctatcagattctggcgatctactcaacagtcgccagttccctggttcttttggtctccctgggggcaatcagcttctggatgtgttccaatgggtctttgcagtgtagaatatgcatctaa

SEQ ID NO: 30828 - RNA, 1698 nt, synthetic construct
  misc_feature 1..1698: note = hemagglutinin__InfluenzaA__ABA42258
  source 1..1698: mol_type = other RNA
atgaaagcaaaactactggtcctgttatgtacatttacagctacatacgcagacacaatatgtataggctaccatgccaacaactcaaccgacactgttgacacagtacttgagaagaatgtgacagtgacacactctgtcaacctacttgaggacagtcacaacggaaaactatgtctactaaaaggaatagccccactacaattgggtaattgcagcgttgccggatggatcttaggaaacccagaatgcgaattactgatttccaaggaatcatggtcctacattgtagaaacaccaaatcccgagaatggaacatgttacccagggtatttcgccgactatgaggaactgagggagcaattgagttcagtatcttcatttgagagattcgaaatattccccaaagggagctcatggcccaaccacaccgtaaccggagtatcagcatcatgctcccataatgggaaaagcagtttttacagaaatttgctatggctgacggggaagaatggtttgtacccaaacctgagcatgtcctatgtaaacaacaaagagaaagaagtccttgtgctatggggtgttcatcacccacctaacataggggaccaaagggccctctaccatacagaaaatgcttatgtctctgtagtgtcttcacattatagcagaagattcaccccagaaatagccaaaagacccaaagtaagagatcaggaaggaagaatcaactactactggactctgctggaacccggggacacaataatatttgaggcaaatggaaatctaatagcgccatggtatgctttcgcactgagtagaggctttggatcaggaatcatcacctcaaatgcaccaatggatgaatgtgatgcgaagtgtcaaacacctcagggagctataaacagtagtcttcctttccagaatgtacacccagttacaataggagagtgtccaaagtatgtcaggagtgcaaaattaaggatggttacaggactaaggaacatcccatccattcaatccagaggtttgtttggagccattgccggtttcattgaaggggggtggactggaatggtagatgggtggtatggttatcatcatcagaatgagcaaggatctggctatgctgcagatcaaaaaagcacacaaaatgccattaacgggattacaaacaaggtgaattctgtaattgagaaaatgaacactcaattcacagctgtgggcaaagaattcaacaaattagaaagaaggatggaaaacttaaataaaaaagttgatgatgggtttctagacatttggacatataatgcagaattgttggttctactggaaaatgaaaggactttggatttccatgactccaatgtgaagaatctgtatgagaaagtaaaaagccaattaaagaataatgccaaagaaataggaaacgggtgttttgaattctatcacaagtgtaacaatgaatgcatggaaagtgtgaaaaatggaacttatgactatccaaaatattccgaagaatcaaagttaaacagggagaaaattgatggagtaaaattggaatcaatgggagtctatcagattctggcgatctactcaactgtcgccagttccctggttcttttggtctccctgggggcaatcagcttctggatgtgttccaatgggtctttgcagtgtagaatatgcatctga

SEQ ID NO: 30829 - RNA, 1701 nt, synthetic construct
  misc_feature 1..1701: note = hemagglutinin__InfluenzaA__ABA42269
  source 1..1701: mol_type = other RNA
atgaagactatcattgctttgagctacattctatgtctggttttcgctcaaaaacttcccggaaatgacaacagcacggcaacgctgtgccttgggcaccatgcagtaccaaacggaacgatagtgaaaacaatcacgaatgaccaaattgaagttactaatgctactgagctggttcagagttcctcaacaggtggaatatgcgacagtcctcatcagatccttgatggagaaaactgcacactaatagatgctctattgggagaccctcagtgtgatggcttccaaaataagaaatgggacctttttattgaacgcagcaaagcctacagcaactgttacccttatgatgtgccggattatgcctcccttaggtcactagttgcctcatccggcacactggaatttaacaatgaaagcttcaattggactggagtcactcaaaatggaacaagctctgcttgcaaaaggagatctaataacagtttctttagtagattgaattggttgacccacttaaaattcaaatacccagcattgaacgtgactatgccaaacaatgaaaaatttgacaaattgtacatttggggggttcaccacccgggtacggacaatgaccaaatcagcctatatgctcaagcttcaggaagaatcacagtctctaccaaaagaagccaacaaactgtaatcccgaatatcggatctagacccagggtaagggatatccccagcaggataagcatctattggacaatagtaaaaccgggagacatacttttgattaacagcacagggaatctaattgctcctcggggttacttcaaaatacgaagtgggaaaagctcaataatgagatcagatgcacccattggcaaatgcaattctgaatgcatcactccaaatggaagcattcccaatgacaaaccatttcaaaatgtaaacaggatcacatatggggcctgtcccagatatgttaagcaaaacactctgaaattggcaacagggatgcgaaatgtaccagagaaacaaactagaggcatatttggcgcaatcgcgggtttcatagaaaatggttgggagggaatggtggatggttggtacggtttcaggcatcaaaattctgagggaataggacaagcagcagatctcaaaagcactcaagcagcaatcaaccaaatcaatgggaagctgaataggttgatcgggaaaaccaacgagaaattccatcagattgaaaaagaattctcagaagtagaagggagaattcaggacctcgagaaatatgttgaggacactaaaatagatctctggtcatacaacgcggagcttcttgttgccctggagaaccaacatacaattgatctaactgactcagaaatgaacaaactgtttgaaagaacaaagaagcaactgagggaaaatgctgaggatatgggcaatggttgtttcaaaatataccacaaatgtgacaatgcctgcatagggtcaatcagaaatggaacttatgaccatgatgtatacagagatgaggcattgaacaaccggttccagatcaaaggtgttgagctgaagtcaggatacaaagattggatcctatggatttcctttgccatatcatgttttttgctttgtgttgctttgttggggttcatcatgtgggcctgccaaaaaggcaacattaggtgcaacatttgcatttga

SEQ ID NO: 30830 - RNA, 1698 nt, synthetic construct
  misc_feature 1..1698: note = hemagglutinin__InfluenzaA__ABA42280
  source 1..1698: mol_type = other RNA
atgaaagtaaaactactgatcctgttatgtacatttacagctacatatgcagacacaatatgtataggctaccatgccaacaactcaaccgacactgttgacacagtacttgagaagaatgtgacagtgacacactctgtcaacctacttgaggacagtcacaatggaaaactgtgcctactaaaaggaatagcccccctacaattgggtaattgcagcgttgccggatggatcttaggaaacccagaatgcgaattactgatttccaaggaatcatggtcctacattgtagaaacaccaaatcctgagaatggagcatgttacccagggtatttcgccgactatgaggagctaagggagcaattgagttcagtatcttcatttgagagattcgaaatattccccaaagaaagctcatggcccaaccacaccgtaaccggagtatcagcatcatgctcccataatgggaaaagcagtttttacagaaatttgctatggctgacggggaagaatggtttgtacccaaacctgagcaagtcctatgcaaacaacaaagagaaagaagtccttatactatggggtgttcatcacccgcctaacataggggaccaaaggaccctctatcacacagaaaatgcttatgtctctgtagtgtcttcacattatagcagaagattcaccccagaaataaccaaaaggcccaaagtaagagatcaggaaggaagaatcaactactactggactctgctggaacccggggatacaataatatttgaggcaaatggaaatctaatagcgccatggtatgctttcgcactgagtagaggctttggatcaggaatcatcacctcaaatgcaccaatggatgaatgtgatgcgaagtgtcaaacacctcagggagctataaacagcagtcttcctttccagaatgtacacccagtcacaataggagagtgtccaaagtatgtcaggagtgcaaaattaaggatggttacaggactaaggaacatcccatccattcaatccagaggtttgtttggagccattgccggtttcattgaaggggggtggactggaatggtagatgggtggtatggttatcatcatcagaatgagcaaggatctggctatgctgcagatcaaaaaagcacacaaaatgccattaacgggattacaaacaaggtgaattctgtaattgagaaaatgaacactcaattcacagctgtgggcaaagaattcaacaaattggaaagaaggatggaaaacttaaataaaaaggttgatgatgggtttctagacatttggacatataatgcagaattgttggttctactggaaaatgaaaggactttggatttccacgactccaatgtgaagaatctgtacgagaaagtaaaaagccaattaaagaataatgccaaagaaataggaaatgggtgttttgaattctatcacaagtgtaacaatgaatgcatggagagtgtgaaaaatggaacttatgactatccaaaatattccgaagaatcaaagttaaacagggaaaaaattgatggagtgaaattggactcaatgggggtctatcagattctggcgatctactcaactgtcgccagttccctggttcttttggtctccctgggggcaatcagcttctggatgtgttccaatgggtctttgcagtgtagaatatgcatctga

SEQ ID NO: 30831 - RNA, 1701 nt, synthetic construct
  misc_feature 1..1701: note = hemagglutinin__InfluenzaA__ABA42291
  source 1..1701: mol_type = other RNA
atgaagactatcattgctttgagctacattctatgtctggttttcgctcaaaaacttcccggaaatgacaacagcacggcaacgctgtgccttgggcaccatgcagtaccaaacggaacgatagtgaaaacaatcacgaatgaccaaattgaagttactaatgctactgagctggttcaaagttcctcaacaggtggaatatgcgacagtcctcatcagatccttgatggagaaaactgcacactaatagatgctctattgggagaccctcagtgtgatggcttccaaaataagaaatgggacctttttgttgaacgcagcaaagcctacagcaactgttacccttatgatgtgccggattatgcctcccttaggtcactagttgcctcatccggcacactggagtttaacaatgaaagcttcaattggactggagtcactcaaaatggaacaagctctgcttgcaaaaggagatctaataacagtttctttagtagattgaattggttgacccacttaaaattcaaatacccagcattgaacgtgactatgccaaacaatgaaaaatttgacaaattgtacatttggggggttcaccacccgggtacggacaatgaccaaatcagcctatatgctcaagcatcaggaagaatcacagtctctaccaaaagaagccaacaaactgtaatcccgaacatcggatctagacccagggtaagggatatccccagcagaataagcatctattggacaatagtaaaaccgggagacatacttttgattaacagcacagggaacctaattgctcctcggggttacttcaaaatacgaagtgggaaaagctcaataatgagatcagatgcacccattggcaaatgcaaatctgaatgcatcactccaaatggaagcattcccaatgacaaaccatttcaaaatgtaaacaggatcacatatggggcctgtcccagatatgttaagcaaaacactctgaaattggcaacagggatgcgaaatgtaccagagaaacaaactagaggcatatttggcgcaatcgcgggtttcatagaaaatggttgggagggaatggtggatggttggtacggtttcaggcatcaaaattctgagggaataggacaagcagcagatctcaaaagcactcaagcagcaatcaaccaaatcaatgggaagctgaataggttgatcgggaaaaccaacgagaaattccatcagattgaaaaagaattctcagaagtagaagggagaattcaggacctcgagaaatatgtcgaggacactaaaacagatctctggtcatacaacgcggagcttcttgttgccctggagaaccaacatacaattgatctaactgactcagaaatgaacaaactgtttgaaagaacaaagaagcaactgagagaaaatgctgaggatatgggcaatggttgtttcaaaatataccacaaatgtgacaatgcctgcatagggtcaatcagaaatggaacttatgaccatgatgtatacagagatgaagcattaaacaaccggttccagatcaaaggtgttgagctgaagtcaggatacaaagattggatcctatggatttcctttgccatatcatgttttttgctttgtgttgctttgttggggttcatcatgtgggcctgccaaaaaggcaacattaggtgcaacatttgcatttga

SEQ ID NO: 30832 - RNA, 1701 nt, synthetic construct; identical to SEQ ID NO: 30587
  misc_feature 1..1701: note = hemagglutinin__InfluenzaA__ABA42302
  source 1..1701: mol_type = other RNA

SEQ ID NO: 30833 - RNA, 1701 nt, synthetic construct
  misc_feature 1..1701: note = hemagglutinin__InfluenzaA__ABA42313
  source 1..1701: mol_type = other RNA
atgaagactatcattgctttgagctacattttatgtctggttttcgctcaaaaacttcccggaaatgacaacagcacggcaacgctgtgcctggggcaccatgcagtgccaaacggaacgctagtgaaaacaatcacgaatgaccaaattgaagtgactaatgctactgagctggttcagagttcctcaacaggtagaatatgcgacagtcctcaccaaatccttgatggagaaaactgcacactaatagatgctctattgggagaccctcattgtgatggcttccaaaataaggaatgggacctttttgttgaacgcagcaaagcctacagcaactgttacccttatgatgtgccggattatgtctcccttaggtcactagttgcctcatcaggcacgctggagtttaacaatgaaagcttcaattggactggagtcgctcagaatggaacaagctctgcttgcaaaaggagatctgataaaagtttctttagtagattgaattggttgcaccaattaaaatacaaatatccagcactgaacgtgactatgccaaacaatgaaaaatttgacaaattgtacatttggggggttcaccacccgggtacagacagtgaccaaatcagcctatatgctcaagcatcagggagagtcacagtctctaccaaaagaagccaacaaactgtaatcccgaatatcggatctggaccctgggtaaggggtgtctccagcagaataagcatctattggacaatagtaaaaccgggagacatacttttgattaacagcacagggaatctaattgctcctcggggttacttcaaaatacgaagtgggaaaagctcaataatgaggtcagatgcacccattggcaaatgcaattctgaatgcatcactccaaatggaagcattcccaatgacaaaccatttcaaaatgtaaacaggatcacatatgggccctgtcccagatatgttaagcaaaacactctgaaattggcaacagggatgcggaatgtgccagagaaacaaactagaggcatattcggtgcaatcgcgggcttcatagaaaatggttgggagggaatgatggacggttggtacggtttcaggcatcaaaattctgagggcacagggcaagcagcagatcttaaaagcactcaagcagcaatcaaccaaatcaacgggaaactgaataggttaatcgagaaaacgaacgagaaattccatcaaattgaaaaggaattctcagaagtagaagggagaattcaggacctcgagaaatatgttgaggacactaaaatagatctctggtcgtacaatgcggagcttcttgttgccctggagaaccaacatacaattgatctaactgactcagaaatgaacaaactgtttgaaagaacaaagaagcaactgagggaaaatgctgaggatatgggcaatggttgtttcaaaatataccacaaatgtgacaatgcctgcatagggtcaatcagaaatggaacttatgaccatgatgtatacagagacgaagcattgaacaaccggttccagatcaaaggtgttgagctgaagtcaggatacaaagattggatcctatggatttcctttgccatatcatgttttttgctttgtattgttttgctggggttcatcatgtgggcctgccaaaaaggcaacattaggtgcaacatttgcatttga

SEQ ID NO: 30834 - RNA, 1701 nt, synthetic construct
  misc_feature 1..1701: note = hemagglutinin__InfluenzaA__ABA42346
  source 1..1701: mol_type = other RNA
atgaagactatcattgctttgagctacattttatgtctggttttcgctcaaaaacttcccggaaatgacaacagcacggcaacgctgtgcctggggcaccatgcagtgccaaacggaacgctagtgaaaacaatcacgaatgaccaaattgaagtgactaatgctactgagctggttcagagttcctcaacaggtagaatatgcgacagtcctcaccaaatccttgatggagaaaactgcacactaatagatgctctattgggagaccctcattgtgatggcttccaaaataaggaatgggacctttttgttgaacgcagcaaagcctatagcaactgttacccttatgatgtgccggattatgtctcccttaggtcactagttgcctcatcaggcacgctggagtttaacaatgaaagcttcaattggactggagtcgctcagaatggaacaagctctgcttgcaaaaggagatctgataaaagtttctttagtagattgaattggttgcaccaattaaaatacaaatatccagcactgaacgtgactatgccaaacaatgaaaaatttgacaaattgtacatttggggggttcaccacccgggtacagacagtgaccaaatcagcctatatgctcaagcatcagggagagtcacagtctctaccaaaagaagccaacaaactgtaatcccgaatatcggatctagaccctgggtaaggggtgtctccagcagaataagcatctattggacaatagtaaaaccgggagacatacttttgattaacagcacagggaatctaattgctcctcggggttacttcaaaatacgaagtgggaaaagctcaataatgaggtcagatgcacccattggcaaatgcaattctgaatgcatcactccaaatggaagcattcccaatgacaaaccatttcaaaatgtaaacagaatcacatatgggccctgtcccagatatgttaagcaaaacactctgaaattggcaacagggatgcggaatgtgccagagaaacaaactagaggcatattcggtgcaatcgcgggcttcatagaaaatggttgggagggaatgatggacggttggtacggtttcaggcatcaaaattctgagggcacagggcaagcagcagatcttaaaagcactcaagcagcaatcaaccaaatcaacgggaaactgaataggttaatcgagaaaacgaacgagaaattccatcaaattgaaaaggaattctcagaagtagaagggagaattcaggacctcgagaaatatgttgaggacactaaaatagatctctggtcgtacaatgcggagcttcttgttgccctggagaaccaacatacaattgatctaactgactcagaaatgaacaaactgtttgaaagaacaaagaagcaactgagggaaaatgctgaggatatgggcaatggttgtttcaaaatataccacaaatgtgacaatgcctgcatagggtcaatcagaaatggaacttatgaccatgatgtatacagagacgaagcattgaacaaccggttccagatcaaaggtgttgagctgaagtcaggatacaaagattggatcctatggatttcctttgccatatcatgttttttgctttgtattgttttgctggggttcatcatgtgggcctgccaaaaaggcaacattaggtgcaacatttgcatttga

SEQ ID NO: 30835 - RNA, 1701 nt, synthetic construct
  misc_feature 1..1701: note = hemagglutinin__InfluenzaA__ABA42357
  source 1..1701: mol_type = other RNA
atgaagactatcattgctttgagctacattttatgtctggttttcgctcaaaaacttcccggaaatgacaacagcacggcaacgctgtgcctggggcaccatgcagtgccaaacggaacgctagtgaaaacaatcacgaatgaccaaattgaagtgactaatgctactgagctggttcagagttcctcaacaggtagaatatgcgacagtcctcaccaaatccttgatggagaaaactgcacactaatagatgctctattgggagaccctcattgtgatggcttccaaaataaggaatgggacctttttgttgaacgcagcaaagcctacagcaactgttacccttatgatgtgccggattatgtctcccttaggtcactagttgcctcatcaggcacgctggagtttaacaatgaaagcttcaattggactggagtcgctcagaatggaacaagctctgcttgcaaaaggagatctgataaaagtttctttagtagattgaattggttgcaccaattaaaatacaaatatccagcactgaacgtgactatgccaaacaatgaaaaatttgacaaattgtacatttggggggttcaccacccgggtacagacagtgaccaaatcagcctatatgctcaagcatcagggagagtcacagtctctaccaaaagaagccaacaaactgtaatcccgaatatcggatctggaccctgggtaaggggtgtctccagcagaataagcatctattggacaatagtaaaaccgggagacatacttttgattaacagcacagggaatctaattgctcctcggggttacttcaaaatacgaagtgggaaaagctcaataatgaggtcagatgcacccattggcaaatgcaattctgaatgcatcactccaaatggaagcattcccaatgacaaaccatttcaaaatgtaaacaggatcacatatgggccctgtcccagatatgttaagcaaaacactctgaaattggcaacagggatgcggaatgtgccagagaaacaaactagaggcatattcggtgcaatcgcgggcttcatagaaaatggttgggagggaatgatggacggttggtacggtttcaggcatcaaaattctgagggcacagggcaagcagcagatcttaaaagcactcaagcagcaatcaaccaaatcaacgggaaactgaataggttaatcgagaaaacgaacgagaaattccatcaaattgaaaaagaattctcagaagtagaagggagaattcaggacctcgagaaatatgttgaggacactaaaatagatctctggtcgtacaatgcggagcttcttgttgccctggagaaccaacatacaattgatctaactgactcagaaatgaacaaactgtttgaaagaacaaagaagcaactgagggaaaatgctgaggatatgggcaatggttgtttcaaaatataccacaaatgtgacaatgcctgcatagggtcaatcagaaatggaacttatgaccatgatgtatacagagacgaagcattgaacaaccggttccagatcaaaggtgttgagctgaagtcaggatacaaagattggatcctatggatttcctttgccatatcatgttttttgctttgtattgttttgctggggttcatcatgtgggcctgccaaaaaggcaacattaggtgcaacatttgcatttga

SEQ ID NO: 30836 - RNA, 1701 nt, synthetic construct
  misc_feature 1..1701: note = hemagglutinin__InfluenzaA__ABA42379
  source 1..1701: mol_type = other RNA
atgaagactatcattgctttgagctacattttatgtctggttttcgctcaaaaacttcccggaaatgacaacagcacggcaacgctgtgcctggggcaccatgcagtgccaaacggaacgctagtgaaaacaatcacgaatgaccaaattgaagtgactaatgctactgagctggttcagagttcctcaacaggtagaatatgcgacagtcctcaccaaatccttgatggagaaaactgcacactaatagatgctctattgggagaccctcattgtgatggcttccaaaataaggaatgggacctttttgttgaacgcagcaaagcctacagcaactgttacccttatgatgtgccggattatgtctcccttaggtcactagttgcctcatcaggcacgctggagtttaacaatgaaagcttcaattggactggagtcgctcagaatggaacaagctctgcttgcaaaaggagatctgataaaagtttctttagtagattgaattggttgcaccaattaaaatacaaatatccagcactgaacgtgactatgccaaacaatgaaaaatttgacaaattgtacatttggggggttcaccacccgggtacagacagtgaccaaatcagcctatatgctcaagcatcagggagagtcacagtctctaccaaaagaagccaacaaactgtaatcccgaatatcggatctagaccctgggtaaggggtgtctccagcaaaataagcatctattggacaatagtaaaaccgggagacatacttttgattaacagcacagggaatctaattgctcctcggggttacttcaaaatacgaagtgggaaaagctcaataatgaggtcagatgcacccattggcaaatgcaattctgaatgcatcactccaaatggaagcattcccaatgacaaaccatttcaaaatgtaaacaggatcacatatgggccctgtcccagatatgttaagcaaaacactctgaaattggcaacagggatgcggaatgtgccagagaaacaaactagaggcatattcggtgcaatcgcgggcttcatagaaaatggttgggagggaatgatggacggttggtacggtttcaggcatcaaaattctgagggcacagggcaagcagcagatcttaaaagcactcaagcagcaatcaaccaaatcaacgggaaactgaataggttaatcgagaaaacgaacgagaaattccatcaaattgaaaaggaattctcagaagtagaagggagaattcaggacctcgagaaatatgttgaggacactaaaatagatctctggtcgtacaatgcggagcttcttgttgccctggagaaccaacatacaattgatctaactgactcagaaatgaacaaactgtttgaaagaacaaagaagcaactgagggaaaatgctgaggatatgggcaatggttgtttcaaaatataccacaaatgtgacaatgcctgcatagggtcaatcagaaatggaacttatgaccatgatgtatacagagacgaagcattgaacaaccggttccagatcaaaggtgttgagctgaagtcaggatacaaagattggatcctatggatttcctttgccatatcatgttttgtgctttgtattgttttgctggggttcatcatgtgggcctgccaaaaaggcaacattaggtgcaacatttgcatttga

SEQ ID NO: 30837 - RNA, 1701 nt, synthetic construct; identical to SEQ ID NO: 30584
  misc_feature 1..1701: note = hemagglutinin__InfluenzaA__ABA42390
  source 1..1701: mol_type = other RNA

SEQ ID NO: 30838 - RNA, 1701 nt, synthetic construct
  misc_feature 1..1701: note = hemagglutinin__InfluenzaA__ABA42401
  source 1..1701: mol_type = other RNA
atgaagactatcattgctttgagctacattttatgcctggttttcgctcaaaaacttcccggaaatgacaacagcacggcaacgctgtgcctggggcaccatgcagtgccaaacggaacgctagtgaaaacaatcacgaatgaccagattgaagtaactaatgctactgagctggttcagagttcctcaacaagtagaatatgcgacagtcctcaccaaatccttgatggagaaaactgcacactaatagatgctctattgggagaccctcattgtgatggcttccaaaataaggaatgggacctttttgttgaacgcagcaaagcctacagcaactgttacccttatgatgtgccggattatgtctcccttaggtcactagttgcctcatcaggcacgctggagtttaacaatgaaagcttcaattggactggagtcgctcagaatggaacaagctctgcttgcaaaaggagatctgataaaagtttctttagtagattgaattggttgcaccaattaaaatacaaatatccagcactgaacgtgactatgccaaacaatgaaaaatttgacaaattgtacatttggggggttcaccacccgggtacagacagtgaccaaatcagcctatatgctcaatcatcagggagagtcacagtctctaccaaaagaagccaacaaactgtaatcccgaatatcggatctggaccctgggtaaggggtgtctccagcagaataagcatctattggacaatagtaaaaccgggagacatacttttgattaacagcacagggaatctaattgctcctcggggttacttcaaaatacgaagtgggaaaagctcaataatgaggtcagatgcacccattggcaaatgcaattctaaatgcatcactccaaatggaagcattcccaatgacaaaccatttcaaaatgtaaacaggatcacatatggggcctgtcccagatatgttaagcaaaacactctgaaattggcaacagggatgcggaatgtaccagagaaacaaactagaggcatattcggtgcaatcgcgggcttcatagaaaatggttgggagggaatgatggacggttggtacggtttcaggcatcaaaattctgagggcacagggcaagcagcagatcttaaaagcactcaagcagcaatcaaccaaatcaacgggaaactgaataggttaatcgagaaaacgaacgagaaattccatcaaattgaaaaagaattctcagaagtagaagggagaattcaggacctcgagaaatatgttgaggacactaaaatagatctctggtcgtacaatgcggagcttcttgttgccctggagaaccaacatacaattgatctaactgactcagaaatgaacaaactgtttgaaagaacaaagaagcaactgagggaaaatgctgaggatatgggcaatggttgtttcaaaatataccacaaatgtgacaatgcctgcatagggtcaatcagaaatggaacttatgaccatgatgtatacagagacgaagcattgaacaaccggttccagatcaaaggtgttgagctgaagtcaggatacaaagattggatcctatggatttcctttgccatatcatgttttttgctttgtattgttttgctggggttcatcatgtgggcctgccaaaaaggcaacattaggtgcaacatttgcatttga

SEQ ID NO: 30839 - RNA, 1701 nt, synthetic construct
  misc_feature 1..1701: note = hemagglutinin__InfluenzaA__ABA42412
  source 1..1701: mol_type = other RNA
atgaagactatcattgctttgagctacattttatgtctggttttcgctcaaaaacttcccggaaatgacaacagcacggcaacgctgtgcctggggcaccatgcagtgccaaacggaacgctagtgaaaacaatcacgaatgaccaaattgaagtgactaatgctactgagctggttcagagttcctcaacaggtagaatatgcgacagtcctcaccaaatccttgatggagaaaactgcacactaatagatgctctattgggagaccctcattgtgatggcttccaaaataaggaatgggacctttttgttgaacgcagcaaagcctacagcaactgttacccttatgatgtgccggattatgtctcccttaggtcactagttgcctcatcaggcacgctggagtttaacaatgaaagcttcaattggactggagtcgctcagaatggaacaagctctgcttgcaaaaggagatctgataaaagtttctttagtagattgaattggttgcaccaattaaaatacaaatatccagcactgaacgtgactatgccaaacaatgaaaaatttgacaaattgtacatttggggggttcaccacccgggtacagacagtgaccaaatcagcctatatgctcaagcatcagggagagtcacagtctctaccaaaagaagccaacaaactgtaatcccgaatatcggatctagaccctgggtaaggggtgtctccagcaaaataagcatctattggacaatagtaaaaccgggagacatacttttgattaacagcacagggaatctaattgctcctcggggttacttcaaaatacgaagtgggaaaagctcaataatgaggtcagatgcacccattggcaaatgcaattctgaatgcatcactccaagtggaagcattcccaatgacaaaccatttcaaaatgtaaacaggatcacatatgggccctgtcccagatatgttaagcaaaacactctgaaattggcaacagggatgcggaatgtgccagagaaacaaactagaggcatattcggtgcaatcgcgggcttcatagaaaatggttgggagggaatgatggacggttggtacggtttcaggcatcaaaattctgagggcacagggcaagcagcagatcttaaaagcactcaagcagcaatcaaccaaatcaacgggaaactgaataggttaatcgagaaaacgaacgagaaattccatcaaattgaaaaggaattctcagaagtagaagggagaattcaggacctcgagaaatatgttgaggacactaaaatagatctctggtcgtacaatgcggagcttcttgttgccctggagaaccaacatacaattgatctaactgactcagaaatgaacaaactgtttgaaagaacaaagaagcaactgagggaaaatgctgaggatatgggcaatggttgtttcaaaatataccacaaatgtgacaatgcctgcatagggtcaatcagaaatggaacttatgaccatgatgtatacagagacgaagcattgaacaaccggttccagatcaaaggtgttgagctgaagtcaggatacaaagattggatcctatggatttcctttgccatatcatgttttttgctttgtattgttttgctggggttcatcatgtgggcctgccaaaaaggcaacattaggtgcaacatttgcatttga

SEQ ID NO: 30840 - RNA, 1701 nt, synthetic construct
  misc_feature 1..1701: note = hemagglutinin__InfluenzaA__ABA42443
  source 1..1701: mol_type = other RNA
atgaagactatcattgctttgagctacattttatgcctggttttcgctcaaaaacttcccggaaatgacaacagcacggcaacgctgtgcctggggcaccatgcagtgccaaacggaacgctagtgaaaacaatcacgaatgaccaaattgaagtaactaatgctactgagctggttcagagttcctcaacaagtagaatatgcgacagtcctcaccaaatccttgatggagaaaactgcacactaatagatgctctattgggagaccctcattgtgatggcttccaaaataaggaatgggacctttttgttgaacgcagcaaagcctacagcaactgttacccttatgatgtgccggattatgtctcccttaggtcactagttgcctcatcaggcacgctggagtttaacaatgaaagcttcaattggactggagtcgctcagaatggaacaagctctgcttgcaaaaggagatctgataaaagtttctttagtagattgaattggttgcaccaattaaaatacaaatatccagcactgaacgtgactatgccaaacaatgaaaaatttgacaaattgtacatttggggggttcaccacccgggtacagacagtgaccaaatcagcctatatgctcaagcatcagggagagtcacagtctctaccaaaaggagccaacaaactgtaatcccgaatatcggatctagaccctgggtaaggggtgtctccagcagaataagcatctattggacaatagtaaaaccgggagacatacttttgattaacagcacagggaatctaattgctcctcggggttacttcaaaatacgaagtgggaaaagctcaataatgaggtcagatgcacccattggcaaatgcaattctgaatgcatcactccaaatggaagcattcccaatgacaaaccatttcaaaatgtaaacaggatcacatatggggcctgtcccagatatgttaagcaaaacactctgaaattggcaacagggatgcggaatgtaccagagaaacaaactagaggcatattcggtgcaatcgcgggcttcatagaaaatggttgggagggaatgatggacggttggtacggtttcaggcatcaaaattctgagggcacagggcaagcagcagatcttaaaagcactcaagcagcaatcaaccaaatcaacgggaaactgaataggttaatcgagaaaacgaacgagaaattccatcaaattgaaaaagaattctcagaagtagaagggagaattcaggacctcgagaaatatgttgaggacactaaaatagatctctggtcgtacaatgcggagcttcttgttgccctggagaaccaacatacaattgatctaactgactcagaaatgaacaaactgtttgaaagaacaaagaagcaactgagggaaaatgctgaggatatgggcaatggttgtttcaaaatataccacaaatgtgacaatgcctgcatagggtcaatcagaaatggaacttatgaccatgatgtatacagagacgaagcattgaacaaccggttccagatcaaaggtgttgagctgaagtcaggatacaaagattggatcctatggatttcctttgccatatcatgttttttgctttgtattgttttgctggggttcatcatgtgggcctgccaaaaaggcaacattaggtgcaacatttgcatttga

SEQ ID NO: 30841 - RNA, 1701 nt, synthetic construct
  misc_feature 1..1701: note = hemagglutinin__InfluenzaA__ABA42454
  source 1..1701: mol_type = other RNA
atgaagactatcattgctttgagctacattttatgtctggttttcgctcaaaaacttcccggaaatgacaacagcacggcaacgctgtgcctggggcaccatgcagtgccaaacggaacgctagtgaaaacaatcacgaatgaccaaattgaagtgactaatgctactgagctggttcagagttcctcaacaggtagaatatgcgacagtcctcaccaaatccttgatggagaaaactgcacactaatagatgctctattgggagaccctcattgtgatggcttccaaaataaggaatgggacctttttgttgaacgcagcaaagcctacagcaactgttacccttatgatgtgccggattatgtttcccttaggtcactagttgcctcatcaggcacgctggagtttaacaatgaaagcttcaattggactggagtcgctcagaatggaacaagctctgcttgcaaaaggagatctgataaaagtttctttagtagattgaattggttgcaccaattaaaatacaaatatccagcactgaacgtgactatgccaaacaatgaaaaatttgacaaattgtacatttggggggttcaccacccgggtacagacagtgaccaaatcagcctatatgctcaagcatcagggagagtcacagtctctaccaaaagaagccaacaaactgtaatcccgaatatcggatctagaccctgggtaaggggtgtctccagcagaataagcatctattggacaatagtaaaaccgggagacatacttttgattaacagcacagggaatctaattgctcctcggggttacttcaaaatacgaagtgggaaaagctcaataatgaggtcagatgcacccattggcaaatgcaattctgaatgcatcactccaaatggaagcattcccaatgacaaaccatttcaaaatgtaaacaggatcacatatgggccctgtcccagatatgttaagcaaaacactctgaaattggcaacagggatgcggaatgtgccagagaaacaaactagaggcatattcggtgcaatcgcgggcttcatagaaaatggttgggagggaatgatggacggttggtacggtttcaggcatcaaaattctgagggcacagggcaagcagcagatcttaaaagcactcaagcagcaatcaaccaaatcaacgggaaactgaataggttaatcgagaaaacgaacgagaaattccatcaaattgaaaaagaattctcagaagtagaagggagaattcaggacctcgagaaatatgttgaggacactaaaatagatctctggtcgtacaatgcggagcttcttgttgccctggagaaccaacatacaattgatctaactgactcagaaatgaacaaactgtttgaaagaacaaagaagcaactgagggaaaatgctgaggatatgggcaatggttgtttcaaaatataccacaaatgtgacaatgcctgcatagggtcaatcagaaatggaacttatgaccatgatgtatacagagacgaagcattgaacaaccggttccagatcaaaggtgttgagctgaagtcaggatacaaagattggatcctatggatttcctttgccatatcatgttttttgctttgtattgttttgctggggttcatcatgtgggcctgccaaaaaggcaacattaggtgcaacatttgcatttga

SEQ ID NO: 30842 - RNA, 1701 nt, synthetic construct
  misc_feature 1..1701: note = hemagglutinin__InfluenzaA__ABA42465
  source 1..1701: mol_type = other RNA
atgaagactatcattgctttgagctacattttatgcctggttttcgctcaaaaacttcccggaaatgacaacagcacggcaacgctgtgcctggggcaccatgcagtgccaaacggaacgctagtgaaaacaatcacgaatgaccaaattgaagtaactaatgctactgagctggttcagagttcctcaacaagtagaatatgcgacagtcctcaccaaatccttgatggagaaaactgcacactaatagatgctctattgggagaccctcattgtgatggcttccaaaataaggaatgggacctttttgttgaacgcagcaaagcctacagcaactgttacccttatgatgtgccggattatgtctcccttaggtcactagttgcctcatcaggcacgctggagtttaacaatgaaagcttcaattggactggagtcgctcagaatggaacaagctctgcttgcaaaaggagatctgataaaagtttctttagtagattgaattggttgcaccaattaaaatacaaatatccagcactgaacgtgactatgccaaacaatgaaaaatttgacaaattgtacatttggggggttcaccacccgggtacagacagtgaccaaatcagtctatatgctcaagcatcagggagagtcacagtctctaccaaaagaagccaacaaactgtaatcccgaatatcggatctagaccctggggaaggggtgtctccagcagaataagcatctattggacaatagtaaaaccgggagacatacttttgattaacagcacagggaatctaattgctcctcggggttacttcaaaatacgaagtgggaaaagctcaataatgaggtcagatgcacccattggcaaatgcaattctgaatgcatcactccaaatggaagcattcccaatgacaaaccatttcaaaatgtaaacaggatcacatatggggcctgtcccagatatgttaagcaaaacactctgaaattggcaacagggatgcggaatgtaccagagaaacaaactagaggcatattcggtgcaatcgcgggcttcatagaaaatggttgggagggaatgatggacggttggtacggtttcaggcatcaaaattctgagggcacagggcaagcagcagatcttaaaagcactcaagcagcaatcaaccaaatcaacgggaaactgaataggttaatcgagaaaacgaacgagaaattccatcaaattgaaaaagaattctcagaagtagaagggagaattcaggacctcgagaaatatgttgaggacactaaaatagatctctggtcgtacaatgcggagcttcttgttgccctggagaaccaacatacaattgatctaactgactcagaaatgaacaaactgtttgaaagaacaaagaagcaactgagggaaaatgctgaggatatgggcaatggttgtttcaaaatataccacaaatgtgacaatgcctgcatagggtcaatcagaaatggaacttatgaccatgatgtatacagagacgaagcattgaacaaccggttccagatcaaaggtgttgagctgaagtcaggatacaaagattggatcctatggatttcctttgccatatcatgttttttgctttgtattgttttgctggggttcatcatgtgggcctgccaaaaaggcaacattaggtgcaacatttgcatttga

SEQ ID NO: 30843 - RNA, 1701 nt, synthetic construct
  misc_feature 1..1701: note = hemagglutinin__InfluenzaA__ABA42476
  source 1..1701: mol_type = other RNA
atgaagactatcattgctttgagctacattttatgtctggttttcgctcaaaaacttcccggaaatgacaacagcacggcaacgctgtgcctggggcaccatgcagtgccaaacggaacgctagtgaaaacaatcacgaatgaccaaattgaagtgactaatgctactgagctggttcagagttcctcaacaggtagaatatgcgacagtcctcaccaaatccttgatggagaaaactgcacactaatagatgctctattgggagaccctcattgtgatggcttccaaaataaggaatgggacctttttgttgaacgcagcaaagcctacagcaactgttacccttatgatgtgccggattatgtctcccttaggtcactagttgcctcatcaggcacgctggagtttaacaatgaaagcttcaattggactggagtcgctcagaatggaacaagctctgcttgcaaaaggagatctgataaaagtttctttagtagattgaattggttgcaccaattaaaatacaaatatccagcactgaacgtgactatgccaaacaatgaaaaatttgacaaattgtacatttggggggttcaccacccgggtacagacagtgaccaaatcagcctatatgctcaagcatcagggagagtcacagtctctaccaaaagaagccaacaaactgtaatcccgaatatcggatctagaccctgggtaaggggtgtctccagcagaataagcatctattggacaatagtaaaaccgggagacatacttttgattaacagcacagggaatctaattgctcctcggggttacttcaaaatacgaagtgggaaaagctcaataatgaggtcagatgcacccattggcaaatgcaattctgaatgcatcactccaaatggaagcattcccaatgacaaaccatttcaaaatgtaaacaggatcacatatgggccctgtcccagatatgttaagcaaaacactctgaaattggcaacagggatgcggaatgtgccagagaaacaaactagaggcatattcggtgcaatcgcgggcttcatagaaaatggttgggagggaatgatggacggttggtacggtttcaggcatcaaaattctgagggcacagggcaagcagcagatcttaaaagcactcaagcagcaatcaaccaaatcaacgggaaactgaataggttaatcgagaaaacgaacgagaaattccatcaaattgaaaaggaattctcagaagtagaagggagaattcaggacctcgagaaatatgttgaggacactaaaatagatctctggtcgtacaatgcggagcttcttgttgccctggagaaccaacatacaattgatctaactgactcagaaatgaacaaactgtttgaaagaacaaagaagcaactgagggaaaatgctgaggatatgggcaatggttgtttcaaaatataccacaaatgtgacaatgcctgcatagggtcaatcagaaatggaacttatgaccatgatgtatacagaaacgaagcattgaacaaccggttccagatcaaaggtgttgagctgaagtcaggatacaaagattggatcctatggatttcctttgccatatcatgttttttgctttgtattgttttgctggggttcatcatgtgggcctgccaaaaaggcaacattaggtgcaacatttgcatttga

SEQ ID NO: 30844 - RNA, 1701 nt, synthetic construct
  misc_feature 1..1701: note = hemagglutinin__InfluenzaA__ABA42498
  source 1..1701: mol_type = other RNA
atgaagactatcattgctttgagctacattttatgcctggttttcgctcaaaaacttcccggaaatgacaacagcacggcaacgctgtgcctggggcaccatgcagtgccaaacggaacgctagtgaaaacaatcacgaatgaccaaattgaagtaactaatgctactgagctggttcagagttcctcaacaagtagaatatgcgacagtcctcaccaaatccttgatggagaaaactgcacactaatagatgctctattgggagaccctcattgtgatggcttccaaaataaggaatgggacctttttgttgaacgcagcaaagcctacagcaactgttacccttatgatgtgccggattatgtctcccttaggtcactagttgcctcatcaggcacgctggagtttaacaatgaaagcttcaattggactggagtcgctcagaatggaacaagctctgcttgcaaaaggagatctgataaaagtttctttagtagattgaattggttgcaccaattaaaatacaaatatccagcactgaacgtgactatgccaaacaatgaaaaatttgacaaattgtacatttggggggttcaccacccgggtacagacagtgaccaaatcagcctatatgctcaagcatcagggagagtcacagtctctaccaaaagaagccaacaaactgtaatcccgaatatcggatctagaccctgggtaaggggtgtctccagcataataagcatctattggacaatagtaaaaccgggagacatacttttgattaacagcacagggaatctaattgctcctcggggttacttcaaaatacgaagtgggaaaagctcaataatgaggtcagatgcacccattggcaaatgcaattctgaatgcatcactccaaatggaagcattcccaatgacaaaccatttcaaaatgtaaacaggatcacatatggggcctgtcccagatatgttaagcaaaacactctgaaattggcaacagggatgcggaatgtaccagagaaacaaactagaggcatattcggtgcaatcgcgggcttcatagaaaatggttgggagggaatgatggacggttggtacggtttcaggcatcaaaattctgagggcacagggcaagcagcagatcttaaaagcactcaagcagcaatcaaccaaatcaacgggaaactgaataggttaatcgagaaaacgaacgagaaattccatcaaattgaaaaagaattctcagaagtagaagggagaattcaggacctcgagaaatatgttgaggacactaaaatagatctctggtcgtacaatgcggagcttcttgttgccctggagaaccaacatacaattgatctaactgactcagaaatgaacaaactgtttgaaagaacaaagaagcaactgagggaaaatgctgaggatatgggcaatggttgtttcaaaatataccacaaatgtgacaatgcctgcatagggtcaatcagaaatggaacttatgaccatgatgtatacagagacgaagcattgaacaaccggttccagatcaaaggtgttgagctgaagtcaggatacaaagattggatcctatggatttcctttgccatatcatgttttttgctttgtattgttttgctggggttcatcatgtgggcctgccaaaaaggcaacattaggtgcaacatttgcatttga

SEQ ID NO: 30845 - RNA, 1701 nt, synthetic construct
  misc_feature 1..1701: note = hemagglutinin__InfluenzaA__ABA42509
  source 1..1701: mol_type = other RNA
atgaagactatcattgctttgagctacattttatgtctggttttcgctcaaaaacttcccgtaaatgacaacagcacggcaacgctgtgcctgggacaccatgcagtgccaaacggaacgctagtgaaaacaatcacgaatgaccacattgaagtgactaatgctactgagctggttcagagttcctcaacaggtagaatatgcgacagtcctcaccaaatccttgatggagaaaactgcacactaatagatgctctattgggagaccctcattgtgatggcttccaaaataaggaatgggacctttttgttgaacgcagcacagcctacagcaactgttacccttatgatgtgccggattatgcctcccttaggtcactagttgcctcatccggcacactggagtttaacaatgaaagcttcaattggactggagtcgctcagaatggaacaagctctgcttgcaaaaggagatctattaaaagtttctttagtagattgaattggttgcaccaattaaaatacaaatatccagcactgaacgtgactatgccaaacaatgaaaaatttgacaaattgtacatttggggggttcaccacccgagtacggacagtgaccaaatcagtctatatgctcaagcatcagggagagtcacagtctctaccaaaagaagccaacaaactgtaatcccgaatatcggatctagaccctgggtaaggggtgtctccagcagaataagcatctattggacaatagtaaaaccgggagacatacttttgattaacagcacagggaatctaattgctcctcggggttacttcaaaatacgaagtgggaaaagctcaataatgaggtcaaatgcacccattggcaaatgcaattctgaatgcatcactccaaatggaagcattcccaatgacaaaccatttcaaaatgtaaacaggatcacatatggggcctgtcccagatatgttaagcaaaacactctgaaattggcaacagggatgcggaatgtaccagagaaacaaactagaggcatattcggcgcaatcgcgggtttcatagaaaatggttgggaaggaatggtggacggttggtacggtttcaggcatcaaaattctgagggcacaggacaagcagcagatcttaaaagcactcaagcagcaatcaaccaaatcaacgggaaactgaataggttaatcgagaaaacaaacgagaaattccatcaaattgaaaaagaattctcagaagtagaagggagaattcaggacctcgagaaatatgttgaggacactaaaatagatctctggtcgtacaacgcggagcttcttgttgccctggagaaccaacatacaattgatctaactgactcagaaatgaacaaactgtttgaaagaacaaggaagcaactgagggaaaatgctgaggatatgggcaatggttgtttcaaaatataccacaaatgtgacaatgcctgcatagggtcaatcagaaatggaacttatgaccatgatgtatacagagacgaagcattaaacaaccggttccagatcaaaggtgttgagctgaagtcaggatacaaagattggatcctatggatttcctttgccatatcatgttttttgctttgtgttgttttgctggggttcatcatgtgggcctgccaaaaaggcaacattaggtgcaacatttgcatttga

SEQ ID NO: 30846 - RNA, 1701 nt, synthetic construct
  misc_feature 1..1701: note = hemagglutinin__InfluenzaA__ABA42520
  source 1..1701: mol_type = other RNA
atgaagactatcattgctttgagctacattttatgtctggttttcgctcaaaaacttcccgtaaatgacaacagcacggcaacgctgtgcctgggacaccatgcagtgccaaacggaacgctagtgaaaacaatcacgaatgactacattgaagtgactaatgctactgagctggttcagagttcctcaacaggtagaatatgtgacagtcctcaccaaatccttgatggagaaaactgcacactaatagatgctctattgggagaccctcattgtgatggcttccaaaataaggaatgggacctttttgttgaacgcagcacagcctacagcaactgttacccttatgatgtgccggattatgcctcccttaggtcactagttgcctcatccggcacactggagtttaacaatgaaagcttcaattggactggagtcgctcagaatggaacaagctctgcttgcaaaaggagatctattaaaagtttctttagtagattgaattggttgcaccaattaaaatacaaatatccagcactgaacgtgactatgccaaacaatgaaaaatttgacaaattgtacatttggggggttcaccacccgagtacggacagtgaccaaatcagcctatatgctcaagcatcagggagagtcacagtctctaccaaaagaagccaacaaactgtaatcccgaatatcggatctagaccctgggtaaggggtgtctccagcataataagcatctattggacaatagtaaaaccgggagacatacttttgattaacagcacagggaatctaattgctcctcggggttactttaaaatacgaagtgggaaaagctcaataatgaggtcaaatgcacccattggcaaatgcaattctgaatgcatcactccaaatggaagcattcccaatgacaaaccatttcaaaatgtaaacaggatcacatatggggcctgtcccagatatgttaagcaaaacactctgaaattggcaacagggatgcggaatgtaccagagaaacaaactagaggcatattcggcgcaatcgcgggtttcatagaaaatggttgggagggaatggtggacggttggtacggtttcaggcatcaaaattctgagggcacaggacaagcagcagatcttaaaagcactcaagcagcaatcaaccaaatcaacgggaaactgaataggttaatcgagaaaacaaacgagaaattccatcaaattgaaaaagaattctcagaagtagaagggagaattcaggacctcgagaaatatgttgaggacactaaaatagatctctggtcgtacaacgcggagcttcttgttgccctggagaaccaacatacaattgatctaactgactcagaaatgaacaaactgtttgaaagaacaaggaagcaactgagggaaaatgctgaggatatgggcaatggttgtttcaaaatataccacaaatgtgacaatgcctgcatagggtcaatcagaaatggaacttatgaccatgatgtatacagagacgaagcattaaacaaccggttccagatcaaaggtgttgagctgaagtcaggatacaaagattggatcctatggatttcctttgccatatcatgttttttgctttgtgttgttttgctggggttcatcatgtgggcctgccaaaaaggcaacattaggtgcaacatttgcatttga

SEQ ID NO: 30847 - RNA, 1701 nt, synthetic construct
  misc_feature 1..1701: note = hemagglutinin__InfluenzaA__ABA42531
  source 1..1701: mol_type = other RNA
atgaagactatcattgctttgagctacattttatgtctggttttcgctcaaaaacttcccgtaaatgacaacagcacggcaacgctgtgcctgggacaccatgcagtgccaaacggaacgctagtgaaaacaatcacgaatgaccacattgaggtgactaatgctactgagctggttcagagttcctcaacaggtagaatatgcgacagtcctcaccaaatccttgatggagaaaactgcacactaatagatgctctattgggagaccctcactgtgatggcttccaaaataaggaatgggacctttttgttgaacgcagcacagcctacagcaactgttacctttatgatgtgccggattatgcctcccttaggtcactagttgcctcatccggcacactggagtttaacaatgaaagcttcaattggactggagtcgctcagaatggaacaagctctgcttgcaaaaggagatctattaaaagtttctttagtagattgaattggttgcaccaattaaaatacaaatatccagcactgaacgtgactatgccaaacaatgaaaaatttgacaaattgtacatttggggggttcaccacccgagtacggacagtgaccaaatcagcctatatgctcaagcatcagggagagtcacagtctctaccaaaagaagccaacaaactgtaatcccgaatatcggatctagaccctgggtaaggggtgtctccagcagaataagcatctattggacaatagtaaaaccgggagacatacttttgattaacagcacagggaatctaattgctcctcggggttactttaaaatacgaagtgggaaaagctcaataatgaggtcaaatgcacccattggcaaatgcaattctgaatgcatcactccaaatggaagcattcccaatgacaaaccatttcaaaatgtaaacaggatcacatatggggcctgtcccagatatgttaagcaaaacactctgaaattggcaacagggatgcggaatgtaccagagaaacaaactagaggcatattcggcgcaatcgcgggtttcatagaaaatggttgggagggaatggtggacggttggtacggtttcaggcatcaaaattctgagggcacaggacaagcagcagatcttaaaagcactcaagcagcaatcaaccaaatcaacgggaaactgaataggttaatcgagaaaacaaacgagaaattccatcaaattgaaaaagaattctcagaagtagaagggagaattcaggacctcgagaaatatgttgaggacactaaaatagatctctggtcgtacaacgcggagcttcttgttgccctggagaaccaacatacaattgatctaactgactcagaaatgaacaaactgtttgaaagaacaaggaagcaactgagggaaaatgctgaggatatgggcaatggttgtttcaaaatataccacaaatgtgacaatgcctgcatagggtcaatcagaaatggaacttatgaccatgatgtatacagagacgaagcattaaacaaccggttccagatcaaaggtgttgagctgaagtcaggatacaaagattggatcctatggatttcctttgccatatcatgttttttgctttgtgttgttttgctggggttcatcatgtgggcctgccaaaaaggcaacattaggtgcaacatttgcatttga

SEQ ID NO: 30848 - RNA, 1701 nt, synthetic construct
  misc_feature 1..1701: note = hemagglutinin__InfluenzaA__ABA42542
  source 1..1701: mol_type = other RNA
atgaagactatcattgctttgagctacattttatgtctggttttcgctcaaaaacttcccgtaaatgacaacagcacggcaacgctgtgcctgggacaccatgcagtgccaaacggaacgctagtgaaaacaatcacgaatgaccacattgaagtgactaatgctactgagctggttcagagttcctcaacaggtagaatatgcgacagtcctcaccaaatccttgatggagaaaactgcacactaatagatgctctattgggagaccctcattgtgatggcttccaaaataaggaatgggacctttttgttgaacgcagcacagcctacagcaactgttacccttatgatgtgccggattatgcctcccttaggtcactagttgcctcatccggcacactggagtttaacaatgaaagcttcaattggactggagtcgctcagaatggaacaagctctgcttgcaaaaggagatctattaaaagtttctttagtagattgaattggttgcaccaattaaaatacaaatatccagcactgaacgtgactatgccaaacaatgaaaaatttgacaaattgtacatttggggggttcaccacccgagtacggacagtgaccaaatcagcctatatgctcaagcatcagggagagtcacagtctctaccaaaagaagccaacaaactgtaatcccgaatatcggatctagaccctgggtaaggggtgtctccagcagaataagcatctattggacaatagtaaaaccgggagacatacttttgattaacagcacagggaacctaattgctcctcggggttacttcaaaatacgaagtgggaaaagctcaataatgaggtcaaatgcacccattggcaaatgcaattctgaatgcatcactccaaatggaagcattcccaatgacaaaccatttcaaaatgtaaacaggatcacatatggggcctgtcccagatatgttaagcaaaacactctgaaattggcaacagggatgcggaatgtaccagagaaacaaactagaggcatattcggcgcaatcgcgggtttcatagaaaatggttgggaaggaatggtggacggttggtacggtttcaggcatcaaaattctgagggcacaggacaagcagcagatcttaaaagcactcaagcagcaatcaaccaaatcaacgggaaactgaataggttaatcgagaaaacaaacgagaaattccatcaaattgaaaaagaattctcagaagtagaagggagaattcaggacctcgagaaatatgttgaggacactaaaatagatctctggtcgtacaacgcggagcttcttgttgccctggagaaccaacatacaattgatctaactgactcagaaatgaacaaactgtttgaaagaacaaggaagcaactgagggaaaatgctgaggatatgggcaatggttgtttcaaaatataccacaaatgtgacaatgcctgcatagggtcaatcagaaatggaacttatgaccatgatgtatacagagacgaagcattaaacaaccggttccagatcaaaggtgttgagctgaagtcaggatacaaagattggatcctatggatttcctttgccatatcatgttttttgctttgtgttgttttgctggggttcatcatgtgggcctgccaaaaaggcaacattaggtgcaacatttgcatttga

SEQ ID NO: 30849 - RNA, 1701 nt, synthetic construct
  misc_feature 1..1701: note = hemagglutinin__InfluenzaA__ABA42553
  source 1..1701: mol_type = other RNA
atgaagactatcattgctttgagctacattttatgtctggttttcgctcaaaaacttcccgtaaatgacaacagcacggcaacgctgtgcctgggacaccatgcagtgccaaacggaacgctagtgaaaacaatcacgaatgaccacattgaagtgactaatgctactgagctggttcagagttcctcaacaggtagaatatgcgacagtcctcaccaaatccttgatggagaaaactgcacactaatagatgctctattgggagaccctcattgtgatggcttccaaaataaggaatgggacctttttgttgaacgcagcacagcccacagcaactgttacccttatgatgtgccggattatgcctcccttaggtcactagttgcctcatccggcacactggagtttaacaatgaaagcttcaattggactggagtcgctcagaatggaacaagctctgcttgcaaaaggagatctattaaaagtttctttagtagattgaattggttgcaccaattaaaatacaaatatccagcactgaacgtgactatgccaaacaatgaaaaatttgacaaattgtacatttggggggttcaccacccgagtacggacagtgaccaaatcagcctatatgctcaagcatcagggagagtcacagtctctaccaaaagaagccaacaaactgtaatcccgaatatcggatctagaccctgggtaaggggtgtctccagcagaataagcatctattggacaatagtaaaaccgggagacatacttttgattaacagcacagggaatctaattgctcctcggggttactttaaaatacgaagtgggaaaagctcaataatgaggtcaaatgcacccattggcaaatgcaattctgaatgcatcactccaaatggaagcattcccaatgacaaaccatttcaaaatgtaaacaggatcacatatggggcctgtcccagatatgttaagcaaaacactctgaaattggcaacagggatgcggaatgtaccagagaaacaaactagaggcatattcggcgcaatcgcgggtttcatagaaaatggttgggagggaatggtggacggttggtacggtttcaggcatcaaaattctgagggcacaggacaagcagcagatcttaaaagcactcaagcagcaatcaaccaaatcaacgggaaactgaataggttaatcgagaaaacaaacgagaaattccatcaaattgaaaaagaattctcagaagtagaagggagaattcaggacctcgagaaatatgttgaggacactaaaatagatctctggtcgtacaacgcggagcttcttgttgccctggagaaccaacatacaattgatctaactgactcagaaatgaacaaactgtttgaaagaacaaggaagcaactgagggaaaatgctgaggatatgggcaatggttgtttcaaaatataccacaaatgtgacaatgcctgcatagggtcaatcagaaatggaacttatgaccatgatgtatacagagacgaagcattaaacaaccggttccagatcaaaggcgttgagctgaagtcaggatacaaagattggatcctatggatttcctttgccatatcatgttttttgctttgtgttgttttgctggggttcatcatgtgggcctgccaaaaaggcaacattaggtgcaacatttgcatttga

SEQ ID NO: 30850 - RNA, 1701 nt, synthetic construct
  misc_feature 1..1701: note = hemagglutinin__InfluenzaA__ABA42564
  source 1..1701: mol_type = other RNA
atgaagactatcattgctttgagctacattttatgtctggttttcgctcaaaaacttcccgtaaatgacaacagcacggcaacgctgtgcctgggacaccatgcagtgccaaacggaacgctagtgaaaacaatcacgaatgaccacattgaagtgactaatgctactgagctggttcagagttcctcaacaggtagaatatgcgacagtcctcaccaaatccttgatggagaaaactgcacactaatagatgctctattgggagaccctcattgtgatggcttccagaataaggaatgggacctttttgttgaacgcagcacagcctacagcaactgttacccttatgatgtgccggattatgcctcccttaggtcactagttgcctcatccggcacactggagtttaacaatgaaagcttcaattggactggagtcgctcagaatggaacaagctctgcttgcaaaaggagatctattaaaagtttctttagtagattgaattggttgcaccaattaaaatacaaatatccagcactgaacgtgactatgccaaacaatgaaaaatttgacaaattgtacatttggggggttcaccacccgagtacggacagtgaccaaatcagcctatatgctcaagcatcagggagagtcacagtctctaccaaaagaagccaacaaactgtaatcccgaatatcggatctagaccctgggtaaggggtgtctccagcagaataagcatctattggacaatagtaaaaccgggagacatacttttgattaacagcacagggaatctaattgctcctcggggttactttaaaatacgaagtgggaaaagctcaataatgaggtcaaatgcacccattggcaaatgcaattctgaatgcatcactccaaatggaagcattcccaatgacaaaccatttcaaaatgtaaacaggatcacatatggggcctgtcccagatatgttaagcaaaacactctgaaattggcaacagggatgcggaatgtaccagagaaacaaactagaggcatattcggcgcaatcgcgggtttcatagaaaatggttgggagggaatggtggacggttggtacggtttcaggcatcaaaattctgagggcacaggacaagcagcagatcttaaaagcactcaagcagcaatcaaccaaatcaacgggaaactgaataggttaatcgagaaaacaaacgagaaattccatcaaattgaaaaagaattctcagaagtagaagggagaattcaggacctcgagaaatatgttgaggacactaaaatagatctctggtcgtacaacgcggagcttcttgttgccctggagaaccaacatacaattgatctaactgactcagaaatgaacaaactgtttgaaagaacaaggaagcaactgagggaaaatgctgaggatatgggcaatggttgtttcaaaatataccacaaatgtgacaatgcctgcatagggtcaatcagaaatggaacttatgaccatgatgtatacagagacgaagcattaaacaaccggttccagatcaaaggtgttgagctgaagtcaggatacaaagattggatcctatggatttcctttgccatatcatgttttttgctttgtgttgttttgctggggttcatcatgtgggcctgccaaaaaggcaacattaggtgcaacatttgcatttga

SEQ ID NO: 30851 - RNA, 1701 nt, synthetic construct
  misc_feature 1..1701: note = hemagglutinin__InfluenzaA__ABA42928
  source 1..1701: mol_type = other RNA
atgaagactatcattgctttgagctacattctatgtctggttttcgctcaaaaacttcccgtaaatgacaacagcacggcaacgctgtgcctgggacaccatgcagtgccaaacggaacgctagtgaaaacaatcacgaatgaccacattgaagtgactaatgctactgagctggttcagagttcctcaacaggtagaatatgcgacagtcctcaccaaatccttgatggagaaaactgcacactaatagatgctctattgggagaccctcattgtgatggcttccagaataaggaatgggacctttttgttgaacgcagcacagcctacagcaactgttacccttatgatgtgccggattatgcctcccttaggtcactagttgcctcatccggcacactggagtttaacaatgaaagcttcaattggactggagtcgctcagaatggaacaagctctgcttgcaaaaggagatctattaaaagtttctttagtagattgaattggttgcaccaattaaaatacaaatatccagcactgaacgtgactatgccaaacaatgaaaaatttgacaaattgtacatttggggggttcaccacccgagtacggacagtgaccaaatcagcctatatgctcaagcatcagggagagtcacagtctctaccaaaagaagccaacaaactgtaatcccgaatatcggatctagaccctgggtaaggggtgtctccagcaaaataagcatctattggacaatagtaaaaccgggagacatacttttgattaacagcacagggaatctaattgctcctcggggttactttaaaatacgaagtgggaaaagctcaataatgaggtcaaatgcacccattggcaaatgcaattctgaatgcatcactccaaatggaagcattcccaatgacaaaccatttcaaaatgtaaacaggatcacatatggggcctgtcccagatatgttaagcaaaacactctgaaattggcaacagggatgcggaatgtaccagagaaacaaactagaggcatattcggcgcaatcgcgggtttcatagaaaatggttgggagggaatggtgaacggttggtacggtttcaggcatcaaaattctgagggcacaggacaagcagcagatcttaaaagcactcaagcagcaatcaaccaaatcaacgggaaactgaataggttaatcgagaaaacaaacgagaaattccatcaaattgaaaaagaattctcagaagtagaagggagaattcaggacctcgagaaatatgttgaggacactaaaatagatctctggtcgtacaacgcggagcttcttgttgccctggagaaccaacatacaattgatctaactgactcagaaatgaacaaactgtttgaaagaacaaggaagcaactgagggaaaatgctgaggatatgggcaatggttgtttcaaaatataccacaaatgtgacaatgcctgcatagggtcaatcagaaatggaacttatgaccatgatgtatacagagacgaagcattaaacaaccggttccagatcaaaggtgttgagctgaagtcaggatacaaagattggatcctatggatttcctttgccatatcatgttttttgctttgtgttgttttgctggggttcatcatgtgggcctgccaaaaaggcaacattaggtgcaacatttgcatttga

SEQ ID NO: 30852 - RNA, 1701 nt, synthetic construct; identical to SEQ ID NO: 30850
  misc_feature 1..1701: note = hemagglutinin__InfluenzaA__ABA42939
  source 1..1701: mol_type = other RNA

SEQ ID NO: 30853 - RNA, 1701 nt, synthetic construct
  misc_feature 1..1701: note = hemagglutinin__InfluenzaA__ABA42978
  source 1..1701: mol_type = other RNA
atgaagactatcattgctttgagctacattttatgtctggttttcgctcaaaaacttcccgtaaatgacaacagcacggcaacgctgtgcctgggacaccatgcagtgccaaacggaacgctagtgaaaacaatcacgaatgaccacattgaagtgactaatgctactgagctggttcagagttcctcaacaggtagaatatgcgacagtcctcaccaaatccttgatggagaaaactgcacactaatagatgctctattgggagaccctcattgtgatggcttccaaaataaggaatgggacctttttgttgaacgcagcacagcctacagcaactgttacccttatgatgtgccggattatgcctcccttaggtcactagttgcctcatccggcacactggagtttaacaatgaaagcttcaattggactggagtcgctcagaatggaacaagctctgcttgcaaaaggagatctattaaaagtttctttagtagattgaattggttgcaccaattaaaatacaaatatccagcactgaacgtgactattccaaacaatgaaaaatttgacaaattgtacatttggggggttcaccacccgagtacggacagtgaccaaatcagcctatatgctcaagcatcagggagagtcacagtctctaccaaaagaagccaacaaactgtaatcccgaatatcggatctagaccctgggtaaggggtgtctccagcagaataagcatctattggacaatagtaaaaccgggagacatacttttgattaacagcacagggaatctaattgctcctcggggttactttaaaatacgaagtgggaaaagctcaataatgaggtcaaatgcacccattggcaaatgcaattctgaatgcatcactccaaatggaagcattcccaatgacaaaccatttcaaaatgtaaacaggatcacatatggggcctgtcccagatatgttaagcaaaacactctgaaattggcaacagggatgcggaatgtaccagagaaacaaactagaggcatattcggcgcaatcgcgggtttcatagaaaatggttgggagggaatggtggacggttggtacggtttcaggcatcaaaattctgagggcacaggacaagcagcagatcttaaaagcactcaagcagcaatcaaccaaatcaacgggaaactgaataggttaatcgagaaaacaaacgagaaattccatcaaattgaaaaagaattctcagaagtagaagggagaattcaggacctcgagaaatatgttgaggacactaaaatagatctctggtcgtacaacgcggagcttcttgttgccctggagaaccaacatacaattgatctaactgactcagaaatgaacaaactgtttgaaagaacaaggaagcaactgagggaaaatgctgaggatatgggcaatggttgtttcaaaatataccacaaatgtgacaatgcctgcatagggtcaatcagaaatggaacttatgaccatgatgtatacagagacgaagcattaaacaaccggttccagatcaaaggtgttgagctgaagtcaggatacaaagattggatcctatggatttcctttgccatatcatgttttttgctttgtgttgttttgctggggttcatcatgtgggcctgccaaaaaggcaacattaggtgcaacatttgcatttga

SEQ ID NO: 30854 - RNA, 1701 nt, synthetic construct
  misc_feature 1..1701: note = hemagglutinin__InfluenzaA__ABA43167
  source 1..1701: mol_type = other RNA
atgaagactatcattgctttgagctacattctatgtctggttttcgctcaaaaacttcccggaaatgacaacagcacggcaacgctgtgccttgggcaccatgcagtaccaaacggaacgatagtgaaaacaatcacgaatgaccaaattgaagttactaatgctactgagctggttcagagttcctcaacaggtggaatatgcgacagtcctcatcagatccttgatggagaaaactgcacactaatagatgctctattgggagaccctcagtgtgatggcttccaaaataagaaatgggacctttttgttgaacgcagcaaagcctacagcaactgttacccttatgatgtgccggattatgcctcccttaggtcactagttgcctcatccggcacactggagtttaacaatgaaagcttcaattggactggagtcactcaaaatggaacaagctctgcttgcaaaaggagatctaataacagtttctttagtaggttgaattggttgacccacttaaaattcaaatacccagcattgaacgtgactatgccaaacaatgaaaaatttgacaaattgtacatttggggggttcaccacccgggtacggacaatgaccaaatcagcctatatgctcaagcatcaggaagaatcacagtctctaccaaaagaagccaacaaactgtaatcccgaatatcggatctagacccagggtaagggatatccccagcagaataagcatctattggacaatagtaaaaccgggagacatacttttgattaacagcacagggaatctaattgctcctcggggttacttcaaaatacgaagtgggaaaagctcaataatgagatcagatgcacccattggcaaatgcaattctgaatgcatcactccaaatggaagcattcccaatgacaaaccatttcaaaatgtaaacaggatcacatatggggcctgtcccagatatgttaagcaaaacactctgaaattggcaacagggatgcgaaatgtaccagagaaacaaactagaggcatatttggtgcaatcgcgggtttcatagaaaatggttgggagggaatggtggatggttggtacggtttcaggcatcaaaattctgagggaataggacaagcagcagatctcaaaagcactcaagcagcaatcaaccaaatcaatgggaagctgaataggttgatcgggaaaaccaacgagaaattccatcagattgaaaaagaattctcagaagtagaagggagaattcaggacctcgagaaatatgttgaggacactaaaatagatctctggtcatacaacgcggagcttcttgttgccctggagaaccaacatacaattgatctaactgactcagaaatgaacaaactgtttgaaagaacaaagaagcaactgagggaaaatgctgaggatatgggcaatggttgtttcaaaatataccacaaatgtgacaatgcctgcatagggtcaatcagaaatggaacttatgaccatgatgtatacagagatgaagcattaaacaaccggttccagatcaaaggtgttgagctgaagtcaggatacaaagattggatcctatggatttcctttgccatatcatgttttttgctttgtgttgctttgttggggttcatcatgtgggcctgccaaaaaggcaacattaggtgcaacatttgcatttga

SEQ ID NO: 30855 - RNA, 1701 nt, synthetic construct
  misc_feature 1..1701: note = hemagglutinin__InfluenzaA__ABA43178
  source 1..1701: mol_type = other RNA
atgaagactatcattgctttgagctacattctatgtctggttttcgcccaaaaacttcccggaaatgacaacagcacggcaacgctgtgccttgggcaccatgcagtaccaaacggaacgatagtgaaaacaatcacgaatgaccaaattgaagttactaatgctactgagctggttcagagttcctcaacaggtggcatatgcgacagtcctcatcagatccttgatggagaaaactgcacactaatagatgctctattgggagaccctcagtgtgatggcttccaaaataagaaatgggacctttttgttgaacgcagcaaagcctacagcaactgttacccttatgatgtgccggattatgcctcccttaggtcactagttgcctcatccggcacactggagtttaacaatgaaagcttcaattggactggagtcactcaaaatggaacaagctctgcttgcaaaaggagatctaataacagtttctttagtagattgaattggttgacccacttaaaattcaaatacccagcattgaacgtgactatgccaaacaatgaaaaatttgacaaattgtacatttggggggttcaccacccgggtacggacaatgaccaaatcagcctatatgctcaagcttcaggaagaatcacagtctctaccaaaagaagccaacaaactgtaatcccgaatatcggatctagacccagggtaagggatatccccagcagaataagcatctattggacaatagtaaaaccgggagacatacttttgattaacagcacagggaatctaattgctcctcggggttacttcaaaatacgaagtgggaaaagctcaataatgagatcagatgcacccattggcaaatgcaattctgaatgcatcactccaaatggaagcattcccaatgacaaaccatttcaaaatgtaaacaggatcacatatggggcctgtcccagatatgttaagcaaaacactctgaaattggcaacagggatgcgaaatgtaccagagaaacaaactagaggcatatttggcgcaatcgcgggtttcatagaaaatggttgggagggaatggtggatggttggtacggtttcaggcatcaaaattctgagggaataggacaagcagcagatctcaaaagcactcaagcagcaatcaaccaaatcaatgggaagctgaatagattgatcgggaaaaccaacgagaaattccatcagattgaaaaagaattctcagaagtagaagggagaattcaggacctcgagaaatatgttgaggacactaaaatagatctctggtcatacaacgcggagcttcttgttgccctggagaaccaacatacaattgatctaactgactcagaaatgaacaaactgtttgaaagaacaaagaagcaactgagggaaaatgctgaggatatgggcaatggttgtttcaaaatataccacaaatgtgacaatgcctgcatagggtcaatcagaaatggaacttatgaccatgatgtatacagagatgaagcattaaacaaccggttccagatcaaaggtgttgagctgaagtcaggatacaaagattggatcctatggatttcctttgccatatcatgttttttgctttgtattgctttgttggggttcatcatgtgggcctgccaaaaaggcaacattaggtgcaacatttgcatttga

SEQ ID NO: 30856 - RNA, 1698 nt, synthetic construct
  misc_feature 1..1698: note = hemagglutinin__InfluenzaA__ABA43189
  source 1..1698: mol_type = other RNA
atgaaagcaaaactactggtcctgttatgtacatttacagctacatacgcagacacaatatgtgtaggctaccatgccaacaactcaaccgacactgttgacacagtacttgagaagaatgtgacagtgacacactctgtcaacctacttgaggacagtcacaatggaaaactatgtctactaaaaggaatagccccactacaattgggtaattgcagcgttgccggatggatcttaggaaacccagaatgcgaattactgatttccaaggaatcatggtcctacattgtagaaacaccaaatcccgagaatggaacatgttacccagggtatttcgccgactatgaggaactgagggagcaattgagttcagtatcttcatttgagagattcgaaatattccccaaagggagctcatggcccaaccacaccgtaaccggagtatcagcatcatgctcccataatgggaaaagcagtttttacagaaatttgctatggctgacggggaagaatggtttgtacccaaacctgagcatgtcatatgtaaacaacaaagagaaagaagtccttgtgctatggggtgttcatcacccacctaacataggggaccaaagggccctctaccatacagaaaatgcttatgtctctgtagtgtcttcacattatagcagaagattcaccccagaaatagccaaaagacccaaagtaagagatcaggaaggaagaatcaactactactggactctgctggaacccggggacacaataatatttgaggcaaatggaaatctaatagcgccatggtatgctttcgcactgagtagaggctttggatcaggaatcatcacctcaaatgcaccaatggatgaatgtgatgcgaagtgtcaaacacctcagggagctataaacagtagtcttcctttccagaatgtacacccagttacaataggagagtgtccaaagtatgtcaggagtgcaaaattaaggatggttacaggactaaggaacatcccatccattcaatccagaggtttgtttggagccattgccggtttcattgaaggggggtggactggaatggtagatgggtggtatggttatcatcatcagaatgagcaaggatctggctatgctgcagatcaaaaaagcacacaaaatgccattaacgggattacaaacaaggtgaattctgtaattgagaaaatgaacactcaattcacagctgtgggcaaagaattcaacaaattagaaagaaggatggaaaacttaaataaaaaagttgatgatgggtttctagacatttggacatataatgcagaattgttggttctactggaaaatgaaaggactttggatttccatgactccaatgtgaagaatctgtatgagaaagtaaaaagccaattaaagaataatgccaaagaaataggaaacgggtgttttgaattctatcacaagtgtaacaatgaatgcatggaaagtgtgaaaaatggaacttatgactatccaaaatattccgaagaatcaaagttaaacagggagaaaattgatggagtaaaattggaatcaatgggagtctatcagattctggcgatctactcaactgtcgccagttccctggttcttttggtctccctgggggcaatcagcttctggatgtgttccaatgggtctttgcagtgtagaatatgcatctga

SEQ ID NO: 30857 - RNA, 1701 nt, synthetic construct
  misc_feature 1..1701: note = hemagglutinin__InfluenzaA__ABA43200
  source 1..1701: mol_type = other RNA
atgaagactatcattgctttgagctacattctatgtctggttttcgctcaaaaacttcccggaaatgacaacagcacggcaacgctgtgccttgggcaccatgcagtaccaaacggaacgatagtgaaaacaatcacgaatgaccaaattgaagttactaatgctactgagctggttcagagttcctcaacaggtggaatatgcgacagtcctcatcagatccttgatggagaaaactgcacactaatagatgctctattgggagaccctcagtgtgatggcttccaaaataagaaatgggacctttttgttgaacgcagcaaagcctacagcaactgttacccttatgatgtgccggattatgcctcccttaggtcactagttgcctcatccggcacactggagtttaacaatgaaagcttcaattggactggagtcactcaaaatggaacaagctctgcttgcaaaaggagatctaataacagtttctttagtagattgaattggttgacccacttaaaattcaaatacccagcattgaacgtgactatgccaaacaatgaaaaatttgacaaattgtacatttggggggttcaccacccgggtacggacaatgaccaaattagcctatatgctcaagcttcaggaagaatcacagtctctaccaaaagaagccaacaaactgtaatcccgaatatcggatctagacccagggtaagggatatccccagcagaataagcatctattggacaatagtaaaaccgggagacatacttttgattaacagcacagggaatctaattgctcctcggggttacttcaaaatacgaagtgggaaaagctcaataatgagatcagatgcacccattggcaaatgcaattctgaatgcatcactccaaatggaagcattcccaatgacaaaccatttcaaaatgtaaacaggatcacatatggggcctgtcccagatatgttaagcaaaacactctgaaattggcaacagggatgcgaaatgtaccagagaaacaaactagaggcatatttggcgcaatcgcgggtttcatagaaaatggttgggagggaatggtggatggttggtacggtttcaggcatcaaaattctgagggaataggacaagcagcagatctcaaaagcactcaagcagcaatcaaccaaatcaatgggaagctgaataggttgatcgggaaaaccaacgagaaattccatcagattgaaaaagaattctcagaagtagaagggagaattcaggacctcgagaaatatgttgaggacactaaaatagatctctggtcatacaacgcggagcttcttgttgtcctggagaaccaacatacaattgatctaactgactcagaaatgaacaaactgtttgaaagaacaaagaagcaactgagggaaaatgctgaggatatgggcaatggttgtttcaaaatataccacaaatgtgacaatgcctgcatagggtcaatcagaaatggaacttatgaccatgatgtatacagagatgaagcattaaacaaccggttccagatcaaaggtgttgagctgaagtcaggatacaaagattggatcctatggatttcctttgccatatcatgttttttgctttgtgttgttttgttggggttcatcatgtgggcctgccaaaaaggcaacattaggtgcaacatttgcatttga

SEQ ID NO: 30858 - RNA, 1701 nt, synthetic construct
  misc_feature 1..1701: note = hemagglutinin__InfluenzaA__ABA43336
  source 1..1701: mol_type = other RNA
atgaagactatcattgctttgagctacattttctgtctggttttcgcccaaaaacttcccggaaatgacaacagcacagcaacgctgtgcctgggacatcatgcagtgccaaacggaacgctagtgaaaacaatcacgaatgatcaaattgaagtgactaatgctactgagttggttcagaattcctcaacaggtagaatatgcgacagtcctcaccgaatccttgatggaaaaaactgcacactgatagatgctctattgggagaccctcattgtgatggcttccaaaataaggaatgggacctttttgttgaacgcagcaaagcttacagcaactgttacccttatgatgtgccggattatgcctcccttaggtcactagttgcctcatcaggcaccctggagtttatcaatgaagacttcaattggactggagtcgctcagagtgggggaagctatgcttgcaaaaggggatcagttaacagtttcttcagtagattgaattggttgcacgaatcagaatacaaatatccagcgctgaacgtgactatgccaaacaatggcaaatttgacaaattgtacgtttggggggttcaccacccgatcacggacagagaacaaaccaaactatatgttcgagcatcagggagagtcacagtctctaccaaaagaagccagcaaactgtaatcccgaatatcgggtctagaccctgggtaaggggtctgtccagtagaataagcatctattggacaatagtaaaaccgggagacatactgttgattaatagcaccgggaacctaattgctcctcggggttacttcaaaatacgaactggaaaaagctcaataatgaggtcagatgcacccattggcacctgcagttctgaatgcatcaccccaaatggaagcattcccaatgacaaaccctttcaaaatgtaaacaggatcacatatggggcatgtcccagatatgttaagcaaaacactctgaaattggcaacagggatgcggaatgtaccagaaaaacaaactaggggcatattcggcgcaatcgcaggtttcatagaaaatggttgggagggaatggtagacggttggtacggtttcaggcatcaaaattctgagggcacaggacaagcagcagatcttaaaagcactcaagcagcaatcgaccaaatcaacgggaaactgaataggttaatcgagaaaacgaacgagaaattccatcaaatcgaaaaggaattctcagaagtagaagggagaattcaggacctcgagaaatatgttgaagacactaaaatagatctctggtcttacaacgcggagcttcttgtcgccctggagaaccaacatacaattgatctgactgactcagaaatgaacaaactgtttgaaaaaacaagaaagcaactgagggaaaatgctgaggacatgggcaatggttgcttcaagatataccacaaatgtgacaatgcctgcatagggtcaatcagaaatggaacttatgaccatgatgtatacagagacgaagcattaaacaaccggttccagatcaaaggagttgagctgaagtcaggatacaaagactggatcctatggatttcctttgccatatcatgctttttgctttgtgttgttttgctggggttcatcatgtgggcctgccaaaaaggcaacattaggtgcaacatttgcatttga

SEQ ID NO: 30859 - RNA, 1707 nt, synthetic construct
  misc_feature 1..1707: note = hemagglutinin__InfluenzaA__ABA54915
  source 1..1707: mol_type = other RNA
atggagaaagtagtgcttcttcttgcaacagccagtcttgttaaaagtgatcagatttgcattggttaccatgcaaacaactcgacagagcaggttgacacaataatggaaaagaacgttactgttacacatgcccaagacatactggaaaagacacacaacgggaaactctgcgatctagatggagtgaagcctctaattttgagagattgtagtgtagctggatggctcctcggaaatcctatgtgtgacgaattcatcaatgtgccggaatggtcttacatagtggagaaggccagtccagccaatgacctctgttacccaggggatttcaacgactatgaagaactgaaacacctattgagcagaataaaccactttgagaaaattcagatcatccccaaaagttcttggtccaatcatgaagcctcatcaggggtgagcgcagcatgtccataccatgggaagccctcctttttcagaaatgtggtatggcttatcaaaaagaacagtgcatacccaacaataaagaggagctacaataataccaaccaagaagatcttttggtactgtgggggattcaccatcctaatgatgcggcagagcagacaaagctctatcaaaacccaaccacctatatttccgttggaacatcaacactaaaccagagattggtcccaaaaatagctactagatccaaagtaaacggacaaagtggaagaatggagttcttctggacaattttaaagccgaatgatgccataaatttcgagagtaatggaaatttcattgctccagaatatgcatacaaaattgtcaagaaaggggactcagcaattatgaaaagtgaattggaatatggtaactgcaacaccaagtgtcaaactccaatgggggcgataaactctagtatgccattccacaacatacaccccctcacaatcggggaatgccccaaatatgtgaaatcaaacagattagtccttgcgactggactcagaaatacccctcaaagagagagaagaagaaaaaagagaggactatttggagctatagcaggttttatagagggaggatggcaaggaatggtagatggttggtatggataccaccatagcaatgagcaggggagtggatacgctgcagacaaagaatccactcaaaaggcaatagatggagtcaccaataaggtcaactcgatcattgacaaaatgaacactcagtttgaggccgttggaagggaatttaataatttagaaaggaggatagaaaatttaaacaagaagatggaagacggattcctagatgtctggacttataatgctgaacttctggttctcatggaaaatgagagaactctagactttcatgactcaaatgtcaagaacctttacaacaaggtccgactacagcttagggataatgcaaaggagctgggtaatggttgtttcgagttctatcacaaatgtgataatgaatgtatggaaagtgtaaaaaacgggacgtatgactacccgcagtattcagaagaagcaagactaaacagagaggaaataagtggagtaaaattggaatcaatgggaacttaccaaatactgtcaatttattcaacagtggcgagttccctagcactggcaatcatggtagctggtctatctttatggatgtgctccaatgggtcgttacaatgcagaatttgcatttaa

SEQ ID NO: 30860 - RNA, 1698 nt, synthetic construct
  misc_feature 1..1698: note = hemagglutinin__InfluenzaA__ABA87080
  source 1..1698: mol_type = other RNA
atgaaagtaaaactactggtcctgttatgtacatttacagctacatatgcagacacaatatgtataggctaccatgccaacaactcaaccgacactgttgacacagtacttgagaagaatgtgacagtgacacactctgtcaacctacttgaggacagtcacaatggaaaactatgtctactaaaaggaatagccccactacaattgggtaattgcagcgttgccggatggatcttaggaaacccagaatgcgaattactgatttccaaggaatcatggtcctacattatagaaacaccaaatcctgagaatggaacatgttacccagggtatttcgccgactatgaggaactgagggagcaattgagttcagtatcttcatttgagaggttcgaaatattccccaaagaaagctcatggcccaaccacaccgtaaccggagtatcagcatcatgctcccataatgggaaaagcagtttttacagaaatttgctatggctgacggggaagaatggtttgtacccaaacctgagcaagtcctatgcaaacaacaaagagaaagaagtccttgtactatggggtgttcatcacccgcctaacatgggggaccaaagggccctctatcatacagaaaatgcttatgtctctgtagtgtcttcacattatagcagaagattcaccccagaaatagccaaaagacccaaagtaagagatcaggaaggaagaatcaactactactggactctgctggaacccggggatacaataatatttgaggcaaatggaaatctaatagcgccaaggtatgctttcgcactgagtagaggctttggatcaggaatcatcacctcaaatgcaccaatggatgaatgtgatgcgaagtgtcaaacacctcagggagctataaacagcagtcttcctttccagaatgtacacccagtcacaataggagagtgtccaaagtatgtcaggagtgcaaaattaaggatggttacaggactaaggaacatcccatccattcaatccagaggtttgtttggagccattgccggtttcattgaaggggggtggactggaatggtagatggttggtatggttatcatcatcagaatgagcaaggatctggctatgctgcagatcaaaaaagcacacaaaatgccattaacgggattacaaacaaggtgaattctgtaattgagaaaatgaacactcaattcacagctgtgggcaaagaattcaacaaattggaaagaaggatggaaaacttgaataaaaaagttgatgatgggtttctagacatttggacatataatgcagaattgttggttctactggaaaatgaaaggactttggatttccatgactccaatgtgaagaatctgtatgagaaagtaaaaagccaattaaagaataatgccaaagaaataggaaacgggtgttttgaattctatcacaagtgtaacgatgaatgcatggagagtgtgaaaaatggaacttatgactatccaaaatattccgaagaatcaaagttaaacagggagaaaattgatggagtgaaattggaatcaatgggagtctatcagattctggcgatctactcaacagtcgccagttccctggttcttttggtctccctgggggcaatcagcttctggatgtgttccaatgggtctttgcagtgtagaatatgcatctaa

SEQ ID NO: 30861 - RNA, 1698 nt, synthetic construct
  misc_feature 1..1698: note = hemagglutinin__InfluenzaA__ABA87091
  source 1..1698: mol_type = other RNA
atgaaagcaaaactactggtcctgttatgtacatttacagctacatacgcagacacaatatgtataggctaccatgccaacaactcaaccgacactgttgacacagtacttgagaagaatgtgacagtgacacactctgtcaacctacttgaggacagtcacaatggaaaactatgtctactaaaaggaatagccccactacaattgggtaattgcagcgttgccggatggatcttaggaaacccagaatgcgaattactgatttccaaggaatcatggtcctacattgtagaaacaccaaatcccgagaatggaacatgttacccagggtatttcgccgactatgaggaactgagggagcaattgagttcagtatcttcatttgagagattcgaaatattccccaaaggaagctcatggcccaaccacaccgtaaccggagtatcagcatcatgctcccataatgggaaaagcagtttttacagaaatttgctatggctgacggggaagaatggtttgtacccaaacctgagcatgtcctatgtaaacaacaaagagaaagaagtccttgtgctatggggtgttcatcacccacctaacataggggaccaaagggccctctaccatacagagaatgcttatgtctctgtagtgtcttcacattatagcagaagattcaccccagaaatagccaaaagacccaaagtaagagatcaggaaggaagaatcaactactactggactctgctggaacccggggacacaataatatttgaggcaaatggaaatctaatagcgccatggtatgctttcgcactgagtagaggctttggatcaggaatcatcacctcaaatgcaccaatggatgaatgtgatgcgaagtgtcaaacacctcagggagctataaacagtagtcttcctttccagaatgtacacccagttacaataggagagtgtccaaagtatgtcaggagtgcaaaattaaggatggttacaggactaaggaacatcccatccattcaatccagaggtttgtttggagccattgccggtttcattgaaggggggtggactggaatggtagatgggtggtatggttatcatcatcagaatgagcaaggatctggctatgctgcagatcaaaaaagcacacaaaatgccattaacgggattacaaacaaggtgaattctgtaattgagaaaatgaacactcaattcacagctgtgggcaaagaattcaacaaattagaaagaaggatggaaaacttaaataaaaaagttgatgatgggtttctagacatttggacatataatgcagaattgttggttctactggaaaatgaaaggactttggatttccatgactccaatgtgaagaatctgtatgagaaagtaaaaagccaattaaagaataatgccaaagaaataggaaacgggtgttttgaattctatcacaagtgtaacaatgaatgcatggaaagtgtgaaaaatggaacttatgactatccaaaatattccgaagaatcaaagttaaacagggagaaaattgatggagtaaaattggaatcaatgggagtctatcagattctggcgatctactcaactgtcgccagttccctggttcttttggtctccctgggggcaatcagcttctggatgtgttccaatgggtctttgcagtgtagaatatgcatctga

SEQ ID NO: 30862 - RNA, 1698 nt, synthetic construct
  misc_feature 1..1698: note = hemagglutinin__InfluenzaA__ABA87231
  source 1..1698: mol_type = other RNA
atgaaagcaaaactactggtcctgttatgtacatttacagctacatacgcagacacaatatgtataggctaccatgccaacaactcaaccgacactgttgacacagtacttgagaagaatgtgacagtgacacactctgtcaacctacttgaggacagtcacaatggaaaactatgtctactaaaaggaatagccccactacaattgggtaattgcagcgttgccggatggatcttaggaaaccccgaatgcgaattactgatttccaaggaatcatggtcctacattgtagaaacaccaaatcccgagaatggaacatgttacccagggtatttcgccgactatgaggaattgagggagcaattgagttcagtatcttcatttgagagattcgaaatattccccaaaggaagctcatggcccaaccacaccgtaaccggagtatcagcatcatgctcccataatgggaaaagcagtttttacagaaatttgctatggctgacggggaagaatggtttgtacccaaacctgagcatgtcctatgtaaacaacaaagagaaagaagtccttgtgctatggggtgttcatcacccacctaacataggggaccaaagggccctctaccatacagagaatgcttatgtctctgtagtgtcttcacattatagcagaagattcaccccagaaatagccaaaagacccaaagtaagagatcaggaaggaagaatcaactactactggactctgctggaacccggggacacaataatatttgaggcaaatggaaatctaatagcgccatggtatgctttcgcactgagtagaggctttggatcaggaatcatcacctcaaatgcaccaatggatgaatgtgatgcgaagtgtcaaacacctcagggagctataaacagtagtcttcctttccagaatgtacacccagttacaataggagagtgtccaaagtatgtcaggagtgcaaaattaaggatggttacaggactaaggaacatcccatccattcaatccagaggtttgtttggagccattgccggtttcattgaaggggggtggactggaatggtagatgggtggtatggttatcatcatcagaatgagcaaggatctggctatgctgcagatcaaaaaagcacacaaaatgccattaacgggattacaaacaaggtgaattctgtaattgagaaaatgaacactcaattcacagctgtgggcaaagaattcaacaaattagaaagaaggatggaaaacttaaataaaaaagttgatgatgggtttctagacatttggacatataatgcagaattgttggttctactggaaaatgaaaggactttggatttccatgactccaatgtgaagaatctgtatgagaaagtaaaaagccaattaaagaataatgccaaagaaataggaaacgggtgttttgaattctatcacaagtgtaacaatgaatgcatggaaagtgtgaaaaatggaacttatgactatccaaaatattccgaagaatcaaagttaaacagggagaaaattgatggagtaaaattggaatcaatgggagtctatcagattctggcgatctactcaactgtcgccagttccctggttcttttggtctccctgggggcaatcagcttctggatgtgttccaatgggtctttgcagtgtagaatatgcatctga

SEQ ID NO: 30863 - RNA, 1701 nt, synthetic construct
  misc_feature 1..1701: note = hemagglutinin__InfluenzaA__ABA87242
  source 1..1701: mol_type = other RNA
atgaagactatcattgctttgagctacattctatgtctggttttcgctcaaaaacttcccggaaatgacaacagcacggcaacgctgtgccttgggcaccatgcagtaccaaacggaacgatagtgaaaacaatcacgaatgaccaaattgaagttactaatgctactgagctggttcagagttcctcaacaggtggaatatgcgacagtcctcatcagatccttgatggagaaaactgcacactaatagatgctctattgggagaccctcagtgtgatggcttccaaaataagaaatgggacctttttattgaacgcagcaaagcctacagcaactgttacccttatgatgtgccggattatgcctcccttaggtcactagttgcctcatccggcacactggaatttaacaatgaaagcttcaattggactggagtcactcaaaatggaacaagctctgcttgcaaaaggagatctaataacagtttctttagtagattgaattggttgacccacttaaaattcaaatacccagcattgaacgtgactatgccaaacaatgaaaaatttgacaaattgtacatttggggagttcaccacccgggtacggacaatgaccaaatcagcctatatgctcaagcttcaggaagaatcacagtctctaccaaaagaagccaacaaactgtaatcccgaatatcggatctagacccagggtaagggatatccccagcagaataagcatctattggacaatagtaaaaccgggagacatacttttgattaacagcacagggaatctaattgctcctcggggttacttcaaaatacgaagtgggaaaagctcaataatgagatcagatgcacccattggcaaatgcaattctgaatgcatcactccaaatggaagcattcccaatgacaaaccatttcaaaatgtaaacaggatcacatatggggcctgtcccagatatgttaagcaaaacactctgaaattggcaacagggatgcgaaatgtaccagagaaacaaactagaggcatatttggcgcaatcgcgggtttcatagaaaatggttgggagggaatggtggatggttggtacggtttcaggcatcaaaattctgagggaataggacaagcagcagatctcaaaagcactcaagcagcaatcaaccaaatcaatgggaagctgaataggttgatcgggaaaaccaacgagaaattccatcagattgaaaaagaattctcagaagtagaagggagaattcaggacctcgagaaatatgttgaggacactaaaatagatctctggtcatacaacgcggagcttcttgttgccctggagaaccaacatacaattgatctaactgactcagaaatgaacaaactgtttgaaagaacaaagaagcaactgagggaaaatgctgaggatatgggcaatggttgtttcaaaatataccacaaatgtgacaatgcctgcatagggtcaatcagaaatggaacttatgaccatgatgtatacagagatgaggcattgaacaaccggttccagatcaaaggtgttgagctgaagtcaggatacaaagattggatcctatggatttcctttgccatatcatgttttttgctttgtgttgctttgttggggttcatcatgtgggcctgccaaaaaggcaacattaggtgcaacatttgcatttga

SEQ ID NO: 30864 - RNA, 1701 nt, synthetic construct; identical to SEQ ID NO: 30783
  misc_feature 1..1701: note = hemagglutinin__InfluenzaA__ABA87253
  source 1..1701: mol_type = other RNA

SEQ ID NO: 30865 - RNA, 1698 nt, synthetic construct
  misc_feature 1..1698: note = hemagglutinin__InfluenzaA__ABB02781
  source 1..1698: mol_type = other RNA
atgaaagtaaaactactgatcctgttatgtacatttacagctacatatgcagacacaatatgtataggctaccatgccaacaactcaaccgacactgttgacacagtacttgagaagaatgtgacagtgacacactctgtcaacctacttgaggacagtcacaatggaaaactgtgcctactaaaaggaatagcccccctacaattgggtaattgcagcgttgccggatggatcttaggaaacccagaatgcgaattactgatttccaaggaatcatggtcctacattgtagaaacaccaaatcctgagaatggagcatgttacccagggtatttcgccgactatgaggagctaagggagcaattgagttcagtatcttcatttgagagattcgaaatattccccaaagaaagctcatggcccaaccacaccgtaaccggagtatcagcatcatgctcccataatgggaaaagcagtttttacagaaatttgctatggctgacggggaagaatggtttgtacccaaacctgagcaagtcctatgcaaacaacaaagagaaagaagtccttatactatggggtgttcatcacccgcctaacataggggaccaaaggaccctctatcacacagaaaatgcttatgtctctgtagtgtcttcacattatagcagaagattcaccccagaaataaccaaaaggcccaaagtaagagatcaggaaggaagaatcaactactactggactctgctggaacccggggatacaataatatttgaggcaaatggaaatctaatagcgccatggtatgctttcgcactgagtagaggctttggatcaggaatcatcacctcaaatgcaccaatggatgaatgtgatgcgaagtgtcaaacacctcagggagctataaacagcagtcttcctttccagaatgtacacccagtcacaataggagagtgtccaaagtatgtcaggagtgcaaaattaaggatggttacaggactaaggaacatcccatccattcaatccagaggtttgtttggagccattgccggtttcattgaaggggggtggactggaatggtagatgggtggtatggttatcatcatcagaatgagcaaggatctggctatgctgcagatcaaaaaagcacacaaaatgccattaacgggattacaaacaaggtgaattctgtaattgagaaaatgaacactcaattcacagctgtgggcaaagaattcaacaaattggaaagaaggatggaaaacttaaataaaaaggttgatgatgggtttctagacatttggacatataatgcagaattgttggttctactggaaaatgaaaggactttggatttccacgactccaatgtgaagaatctgtacgagaaagtaaaaagccaattaaagaataatgccaaagaaataggaaatgggtgttttgaattctatcacaagtgtaacaatgaatgcatggagagtgtgaaaaatggaacttatgactatccaaaatattccgaagaatcaaagttaaacagggaaaaaattgatggagtgaaattggactcaatgggggtctatcagattctggcgatctactcaactgtcgccagttccctggttcttttggtctccctgggggcaatcagcttctggatgtgttccaatgggtctttgcagtgtagagtatgcatctga

SEQ ID NO: 30866 - RNA, 1698 nt, synthetic construct; identical to SEQ ID NO: 30805
  misc_feature 1..1698: note = hemagglutinin__InfluenzaA__ABB02792
  source 1..1698: mol_type = other RNA

SEQ ID NO: 30867 - RNA, 1698 nt, synthetic construct
  misc_feature 1..1698: note = hemagglutinin__InfluenzaA__ABB02803
  source 1..1698: mol_type = other RNA
atgaaagtaaaactactggttctgttatgtacatttacagctacatatgcagacacaatatgtataggctaccatgccaacaactcaaccgatactgttgacacagtacttgagaagaatgtgacagtgacacactctgtcaacctacttgaggacagtcacaatggaaaactatgtctactaaaaggaatagccccactacaattgggtaattgcagcgttgccggatggatcttaggaaacccagaatgcgaattactgatttccaaggaatcatggtcctacattgtagaaacaccaaatcctgagaatggaacatgttacccagggtatttcgccgactatgaggaactgagggagcaattgagttcagtatcttcatttgagaggttcgaaatattccccaaagagagctcatggcccaaccacaccgtaaccggagtatcagcatcatgctcccataacgggaaaagcagtttttacagaaatttgctatggctgacggggaagaatggtttgtacccaaacctgagcaagtcctatgcaaacaacaaagagaaagaagtccttgtactatggggtgttcatcacccgcctaacataggggaccaaagggccctctatcatacagaaaatgcttatgtctctgtagtgtcttcacattatagcagaagattcaccccagaaatagccaaaagacccaaggtgagagatcaggaaggaagaatcaactactactggactctgctggaacccggggatacaataatatttgaggcaaatggaaatctaatagcgccaaggtatgctttcgcactgagtagaggctttggatcaggaatcatcacctcaaatgcaccaatggatgaatgtgatgcgaagtgtcaaacacctcagggagctataaacagcagtctccctttccagaatgtacacccagtcacaataggagagtgtccaaagtatgtcaggagtgcaaaattaaggatggttacaggactaaggaacatcccatccattcaatccagaggtttgtttggagccattgccggtttcattgaaggggggtggactggaatggtagatggttggtatggttatcatcatcagaatgagcaaggatctgggtatgctgcagatcaaaaaagcacacaaaatgccattaacgggattacaaacaaggtgaattctgtaattgagaaaatgaacactcaattcacagctgtgggcaaagaattcaacaaattggaaagaaggatggaaaacttaaataaaaaagttgatgatgggtttctagacatttggacatataatgcagaattgttggttctactggaaaatgaaaggactttggatttccatgactccaacgtgaagaatctgtatgagaaagtaaaaagccaattaaagaataatgccaaagaaataggaaacgggtgttttgaattctatcacaagtgtaacgatgaatgcatggagagtgtgaaaaatggaacttatgactatccaaaatattccgaagaatcaaagttaaacagggagaaaattgatggagtgaaattggaatcaatgggagtctatcagattctggcgatctactcaacagtcgccagttccctggttcttttggtctccctgggggcaatcagcttctggatgtgttccaatgggtctttgcagtgtagaatatgcatctaa

SEQ ID NO: 30868 - RNA, 1698 nt, synthetic construct
  misc_feature 1..1698: note = hemagglutinin__InfluenzaA__ABB02814
  source 1..1698: mol_type = other RNA
atgaaagcaaaactactggtcctgttatgtacatttacagctacatacgcagacacaatatgtataggctaccatgccaacaactcaacagacactgttgacacagtacttgagaagaatgtgacagtgacacactctgtcaacctacttgaggacagtcacaatggaaaactatgtctactaaaaggaatagccccactacaattgggtaattgcagcgttgccggatggatcttaggaaacccagaatgcgaattactgatttccaaggaatcatggtcctacattgtagaaacaccaaatcccgagaatggaacatgttacccagggtatttcgccgactatgaggaactgagggagcaattgagttcagtatcttcatttgagagattcgaaatattccccaaaggaagctcatggcccaaccacaccgtaaccggagtatcagcatcatgctcccataatgggaaaagcagtttttacagaaatttgctatggctgacggggaagaatggtttgtacccaaacctgagcatgtcctatgtaaacaacaaagagaaagaagtccttgtgctatggggtgttcatcacccacctaacataggggaccaaagggccctctaccatacagaaaatgcttatgtctctgtagtgtcttcacattatagcagaagattcaccccagaaatagccaaaagacccaaagtaagagatcaggaaggaagaatcaactactactggactctgctggaacccggggacacaataatatttgaggcaaatggaaatctaatagcgccatggtatgctttcgcactgagtagaggctttggatcaggaatcatcacctcaaatgcaccaatggatgaatgtgatgcgaagtgtcaaacacctcagggagctataaacagtagtcttcctttccagaatgtacacccagttacaataggagagtgtccaaagtatgtcaggagtgcaaaattaaggatggttacaggactaaggaacatcccatccattcaatccagaggtttgtttggagccattgccggtttcattgaaggggggtggactggaatggtagatgggtggtatggttatcatcatcagaatgagcaaggatctggctatgctgcagatcaaaaaagcacacaaaatgccattaacgggattacaaacaaggtgaattctgtaattgagaaaatgaacactcaattcacagctgtgggcaaagaattcaacaaattagaaagaaggatggaaaacttaaataaaaaagttgatgatgggtttctagacatttggacatataatgcagaattgttggttctactggaaaatgaaaggactttggatttccatgactccaatgtgaagaatctgtatgagaaagtaaaaagccaattaaagaataatgccaaagaaataggaaacgggtgttttgaattctatcacaagtgtgacaatgaatgcatggaaagtgtgaaaaatggaacttatgactatccaaaatattccgaagaatcaaagttaaacagggagaaaattgatggagtaaaattggaatcaatgggagtctatcagattctggcgatctactcaactgtcgccagttccctggttcttttggtctccctgggggcaatcagcttctggatgtgttccaatgggtctttgcagtgtagaatatgcatctga

SEQ ID NO: 30869 - RNA, 1698 nt, synthetic construct
  misc_feature 1..1698: note = hemagglutinin__InfluenzaA__ABB02825
  source 1..1698: mol_type = other RNA
atgaaagcaaaactactggtcctgttatgtacatttacagctacatacgcagacacaatatgtataggctaccatgccaacaactcaacagacactgttgacacagtacttgagaagaatgtgacagtgacacactctgtcaacctacttgaggacagtcacaatggaaaactatgtctactaaaaggaatagccccactacaattgggtaattgcagcgttgccggatggatcttaggaaacccagaatgcgaattactgatttccaaggaatcatggtcctacattgtagaaacaccaaatcccgagaatggaacatgttacccagggtatttcgccgactatgaggaactgagggagcaattgagttcagtatcttcatttgagagattcgaaatattccccaaaggaagctcatggcccaaccacaccgtaaccggagtatcagcatcatgctcccataatgggaaaagcagtttttacagaaatttgctatggctgacggggaagaatggtttgtacccaaacctgagcatgtcctatgtaaacaacaaagagaaagaagtccttgtgctatggggtgttcatcacccacctaacataggggaccaaagggccctctaccatacagaaaatgcttatgtctctgtagtgtcttcacattatagcagaagattcaccccagaaatagccaaaagacccaaagtaagagatcaggaaggaagaatcaactactactggactctgctggaacccggggacacaataatatttgaggcaaatggaaatctaatagcgccatggtatgctttcgcactgagtagaggctttggatcaggaatcatcacctcaaatgcaccaatggatgaatgcgatgcgaagtgtcaaacacctcagggagctataaacagtagtcttcctttccagaatgtacacccagttacaataggagagtgtccaaagtatgtcaggagtgcaaaattaaggatggttacaggactaaggaacatcccatccattcaatccagaggtttgtttggagccattgccggtttcattgaaggggggtggactggaatggtagatgggtggtatggttatcatcatcagaatgagcaaggatctggctatgctgcagatcaaaaaagcacacaaaatgccattaacgggattacaaacaaggtgaattctgtaattgagaaaatgaacactcaattcacagctgtgggcaaagaattcaacaaattagaaagaaggatggaaaacttaaataaaaaagttgatgatgggtttctagacatttggacatataatgcagaattgttggttctactggaaaatgaaaggactttggatttccatgactccaatgtgaagaatctgtatgagaaagtaaaaagccaattaaagaataatgccaaagaaataggaaacgggtgttttgaattctatcacaagtgtgacaatgaatgcatggaaagtgtgaaaaatggaacttatgactatccaaaatattccgaagaatcaaagttaaacagggagagaattgatggagtaaaattggaatcaatgggagtctatcagattctggcgatctactcaactgtcgccagttccctggttcttttggtctccctgggggcaatcagcttctggatgtgttccaatgggtctttgcagtgtagaatatgcatctga

SEQ ID NO: 30870 - RNA, 1701 nt, synthetic construct
  misc_feature 1..1701: note = hemagglutinin__InfluenzaA__ABB02836
  source 1..1701: mol_type = other RNA
atgaagactatcattgctttgagctacattctatgtctggttttcgctcaaaaacttcccggaaatgacaacagcacggcaacgctgtgccttgggcaccatgcagtaccaaacggaacgatagtgaaaacaatcacgaatgaccaaattgaagttactaatgctactgagctggttcagagttcctcaacaggtggaatatgcgacagtcctcatcagatccttgatggagaaaactgcacactaatagatgctctattgggagaccctcagtgtgatggcttccaaaataagaaatgggacctttttgttgaacgcagcaaagcctacagcaactgttacccttatgatgtgccggattatgcctcccttaggtcactagttgcctcatccggcacactggagtttaacaatgaaagcttcaattggactggagtcactcaaaatggaacaagctctgcttgcaaaaggagatctaataacagtttctttagtagattgaattggttgacccacttaaaattcaaatacccagcattgaacgtgactatgccaaacaatgaaaaatttgacaaattgtacatttggggggttcaccacccgggtacggacaatgaccaaatcagcctatatgctcaagcatcaggaagaatcacagtctctaccaaaagaaaccaacaaactgtaatcccgaacatcggatctagacccagggtaagggatatccccagcagaataagcatctattggacaatagtaaaaccgggagacatacttttgattaacagcacagggaatctaattgctcctcggggttacttcaaaatacgaagtgggaaaagctcaataatgagatcagatgcacccattggcaaatgcaagtctgaatgcatcactccaaatggaagcattcccaatgacaaaccatttcaaaatgtaaacaggatcacatatggggcctgtcccagatatgttaagcaaaacactctgaaattggcaacagggatgcgaaatgtaccagagaaacaaactagaggcatatttggcgcaatcgcgggtttcatagaaaatggttgggagggaatggtggatggttggtacggtttcaggcatcaaaattctgagggaataggacaagcagcagatctcaaaagcactcaagcagcaatcaaccaaatcaatgggaagctgaataggttgatcgggaaaaccaacgagaaattccatcagattgaaaaagaattctcagaagtagaagggagaattcaggacctcgagaaatatgtcgaggacactaaaatagatctctggtcatacaacgcggagcttcttgttgccctggagaaccaacatacaattgatctaactgactcagaaatgaacaaactgtttgaaagaacaaagaagcaactgagggaaaatgctgaggatatgggcaatggttgtttcaaaatataccacaaatgtgacaatgcctgcatagggtcaatcagaaatggaacttatgaccatgatgtatacagagatgaggcattaaacaaccggttccagatcaaaggtgttgagctgaagtcaggatacaaagattggatcctatggatttcctttgccatatcatgttttttgctttgtgttgctttgttggggttcatcatgtgggcctgccaaaaaggcaacattaggtgcaacatttgcatttga

SEQ ID NO: 30871 - RNA, 1701 nt, synthetic construct
  misc_feature 1..1701: note = hemagglutinin__InfluenzaA__ABB02847
  source 1..1701: mol_type = other RNA
atgaagactatcattgctttgagctacattctatgtctggttttcgctcaaaaacttcccggaaatgacaacagcacggcaacgctgtgccttgggcaccatgcagtaccaaacggaacgatagtgaaaacaatcacgaatgaccaaattgaagttactaatgctactgagctggttcagagttcctcaacaggtggaatatgcgacagtcctcatcagatccttgatggagaaaactgcacactaatagatgctctattgggagaccctcagtgtgatggcttccaaaataagaaatgggacctttttgttgaacgcagcaaagcctacagcaactgttacccttatgatgtgccggattatgcctcccttaggtcactagttgcctcatccggcacactggagtttaacaatgaaagcttcaattggattggagtcactcaaaatggaacaagctctgcttgcaaaaggagatctaataacagtttctttagtagattgaattggttgacccacttaaaattcaaatacccagcattgaacgtgactatgccaaacaatgaaaaatttgacaaattgtacatttggggggttcaccacccgggtacggacaatgaccaaattagcctatatgctcaagcttcaggaagaatcacagtctctaccaaaagaagccaacaaactgtaatcccgaatatcggatctagacccagggtaagggatatccccagcagaataagcatctattggacaatagtaaaaccgggagacatacttttgattaacagcacagggaatctaattgctcctcggggttacttcaaaatacgaagtgggaaaagctcaataatgagatcagatgcacccattggcaaatgcaattctgaatgcatcactccaaatggaagcattcccaatgacaaaccatttcaaaatgtaaacaggatcacatatggggcctgtcccagatatgttaagcaaaacactctgaaattggcaacagggatgcgaaatgtaccagagaaacaaactagaggcatatttggcgcaatcgcgggtttcatagaaaatggttgggagggaatggtggatggttggtacggtttcaggcatcaaaattctgagggaataggacaagcagcagatctcaaaagcactcaagcagcaatcaaccaaatcaatgggaagctgaataggttgatcgggaaaaccaacgagaaattccatcagattgaaaaagaattctcagaagtagaagggagaattcaggacctcgagaaatatgttgaggacactaaaatagatctctggtcatacaacgcggagcttcttgttgccctggagaaccaacatacaattgatctaactgactcagaaatgaacaaactgtttgaaagaacaaagaagcaactgagggaaaatgctgaggatatgggcaatggttgtttcaaaatataccacaaatgtgacaatgcctgcatagggtcaatcagaaatggaacttatgaccatgatgtatacagagatgaagcattaaacaaccggttccagatcaaaggtgttgagctgaagtcaggatacaaagattggatcctatggatttcctttgccatatcatgttttttgctttgtgttgttttgttggggttcatcatgtgggcctgccaaaaaggcaacattaggtgcaacatttgcatttga

SEQ ID NO: 30872 - RNA, 1701 nt, synthetic construct
  misc_feature 1..1701: note = hemagglutinin__InfluenzaA__ABB02858
  source 1..1701: mol_type = other RNA
atgaagactatcattgctttgagctacattttatgcctggttttcgctcaaaaacttcccggaaatgacaacagcacggcaacgctgtgcctggggcaccatgcagtgccaaacggaacgctagtgaaaacaatcacgaatgaccaaattgaagtaactaatgctactgagctggttcagagttcctcaacaagtagaatatgcgacagtcctcaccaaatccttgatggagaaaactgcacactaatagatgctctattgggagaccctcattgtgatggcttccaaaataaggaatgggacctttttgttgaacgcagcaaagcctacagcaactgttacccttatgatgtgccggattatgtctcccttaggtcactagttgcctcatcaggcacgctggagtttaacaatgaaagcttcaattggactggagtcgctcagaatggaacaagctctgcttgcaaaaggagatctgataaaagtttctttagtagattgaattggttgcaccaattaaaatacaaatatccagcactgaacgtgactatgccaaacaatgaaaaatttgacaaattgtacatttggggggttcaccacccgggtacagacagtgaccaaatcagcctatatgctcaagcatcagggagagtcacagtctctaccaaaagaagccaacaaactgtaatcccgaatatcggatctagaccctgggtaaggggtgtctccagcagaataagcatctattggacaatagtaaaaccgggagacatacttttgattaacagcacagggaatctaattgctcctcggggttacttcaaaatacgaagtgggaaaagctcaataatgaggtcagatgcacccattggcaaatgcaattctgaatgcatcactccaaatggaagcattcccaatgacaaaccatttcaaaatgtaaacaggatcacatatggggcctgtcccagatatgttaagcaaaacactctgaaattggcaacagggatgcggaatgtaccagagaaacaaactagaggcatattcggtgcaatcgcgggcttcatagaaaatggttgggagggaatgatggacggttggtacggtttcaggcatcaaaattctgagggcacagggcaagcagcagatcttaaaagcactcaagcagcaatcaaccaaatcaacgggaaactgaataggttaatcgagaaaacgaacgagaaattccatcaaattgaaaaagaattctcagaagtagaagggagaattcaggacctcgagaaatatgttgaggacactaaaatagatctctggtcgtacaatgcggagcttcttgttgccctggagaaccaacatacaattgatctaactgactcagaaatgaacaaactgtttgaaagaacaaagaagcaactgagggaaaatgctgaggatatgggcaatggttgtttcaaaatataccacaaatgtgacaatgcctgcatagggtcaatcagaaatggaacttatgaccatgatgtatacagagacgaagcattgaacaaccggttccagatcaaaggtgttgagctgaagtcagggtacaaagattggatcctatggatttcctttgccatatcatgttttttgctttgtattgttttgctggggttcatcatgtgggcctgccaaaaaggcaacattaggtgcaacatttgcatttga

SEQ ID NO: 30873 - RNA, 1701 nt, synthetic construct
  misc_feature 1..1701: note = hemagglutinin__InfluenzaA__ABB02869
  source 1..1701: mol_type = other RNA
atgaagactatcattgctttgagctacattttatgtctggttttcgctcaaaaacttcccgtaaatgacaacagcacggcaacgctgtgcctgggacaccatgcagtgccaaacggaacgctagtgaaaacaatcacgaatgaccacattgaagtgactaatgctactgagctggttcagagttcctcaacaggtagaatatgcgacagtcctcaccaaatccttgatggagaaaactgcacactaatagatgctctattgggagaccctcattgtgatggcttccaaaataaggaatgggacctttttgttgaacgcagcacagcctacagcaactgttacccttatgatgtgccggattatgcctcccttaggtcactagttgcctcatccggcacactggagtttaacaatgaaagcttcaattggactggagtcgctcagaatggaacaagctctgcttgcaaaaggagatctattaaaagtttctttagtagattgaattggttgcaccaattaaaatacaaatatccagcactgaacgtgactatgccaaacaatgaaaaatttgacaaattgtacatttggggggttcaccacccgagtacggacagtgaccaaatcagcctatatgctcaagcatcagggagagtcacagtctctaccaaaagaagccaacaaactgtaatcccgaatatcggatctagaccctgggtaaggggtgtctccagcagaataagcatctattggacaatagtaaaaccgggagacatacttttgattaacagcacagggaatctaattgctcctcggggttacttcaaaatacgaagtgggaaaagctcaataatgaggtcaaatgcacccattggcaaatgcaattctgaatgcatcactccaaatggaagcattcccaatgacaaaccatttcaaaatgtaaacaggatcacatatggggcctgtcccagatatgttaagcaaaacactctgaaattggcaacagggatgcggaatgtaccagagaaacaaactagaggcatattcggcgcaatcgcgggtttcgtagaaaatggttgggaaggaatggtggacggttggtacggtttcaggcatcaaaattctgagggcacaggacaagcagcagatcttaaaagcactcaagcagcaatcaaccaaatcaacgggaaactgaataggttaatcgagaaaacaaacgagaaattccatcaaattgaaaaagaattctcagaagtagaagggagaattcaggacctcgagaaatatgttgaggacactaaaatagatctctggtcgtacaacgcggagcttcttgttgccctggagaaccaacatacaattgatctaactgactcagaaatgaacaaactgtttgaaagaacaaggaagcaactgagggaaaatgctgaggatatgggcaatggttgtttcaaaatataccacaaatgtgacaatgcctgcatagggtcaatcagaaatggaacttatgaccatgatgtatacagagacgaagcattaaacaaccggttccagatcaaaggtgttgagctgaagtcaggatacaaagattggatcctatggatttcctttgccatatcatgttttttgctttgtgttgttttgctggggttcatcatgtgggcctgccaaaaaggcaacattaggtgcaacatttgcatttga

SEQ ID NO: 30874 - RNA, 1701 nt, synthetic construct
  misc_feature 1..1701: note = hemagglutinin__InfluenzaA__ABB02880
  source 1..1701: mol_type = other RNA
atgaagactatcattgctttgagctacattttatgtctggttttcgctcaaaaacttcccgtaaatgacaacagcacggcaacgctgtgcctgggacaccatgcagtgccaaacggaacgctagtgaaaacaatcacgaatgaccacattgaagtgactaatgctactgagctggttcagagttcctcaacaggtagaatatgcgacagtcctcaccaaatccttgatggagaaaactgcacactaatagatgctctattgggagaccctcattgtgatggcttccaaaataaggaatgggacctttttgttgaacgcagcacagcctacagcaactgttacccttatgatgtgccggattatgcctcccttaggtcactagttgcctcatccggcacactggagtttaacaatgaaagcttcaattggactggagtcgctcagaatggaacaagctctgcttgcaaaaggagatctattaaaagtttctttagtagattgaattggttgcaccaattaaaatacaaatatccagcactgaacgtgactatgccaaacaatgaaaaatttgacaaattgtacatttggggggttcaccacccgagtacggacagtgaccaaatcagcctatatgctcaagcatcagggagagtcacagtctctaccaaaagaagccaacaaactgtaatcccgaatatcggatctagaccctgggtaaggggtgtctccagcagaataagcatctattggacaatagtaaaaccgggagacatacttttgattaacagcacagggaatctaattgctcctcggggttacttcaaaatacgaagtgggaaaagctcaataatgaggtcaaatgcacccattggcaaatgcaattctgaatgcatcactccaaatggaagcattcccaatgacaaaccatttcaaaatgtaaacaggatcacatatggggcctgtcccagatatgttaagcaaaacactctgaaattggcaacagggatgcggaatgtaccagagaaacaaactagaggcatattcggcgcaatcgcgggtttcatagaaaatggttgggaaggaatggtggacggttggtacggtttcaggcatcaaaattctgagggcacaggacaagcagcagatcttaaaagcactcaagcagcaatcaaccaaatcaacaggaaactgaataggttaatcgagaaaacaaacgagaaattccatcaaattgaaaaagaattctcagaagtagaagggagaattcaggacctcgagaaatatgttgaggacactaaaatagatctctggtcgtacaacgcggagcttcttgttgccctggagaaccaacatacaattgatctaactgactcagaaatgaacaaactgtttgaaagaacaaggaagcaactgagggaaaatgctgaggatatgggcaatggttgtttcaaaatataccacaaatgtgacaatgcctgcatagggtcaatcagaaatggaacttatgaccatgatgtatacagagacgaagcattaaacaaccggttccagatcaaaggtgttgagctgaagtcaggatacaaagattggatcctatggatttcctttgccatatcatgttttttgctttgtgttgttttgctggggttcatcatgtgggcctgccaaaaaggcaacattaggtgcaacatttgcatttga

SEQ ID NO: 30875 - RNA, 1701 nt, synthetic construct
  misc_feature 1..1701: note = hemagglutinin__InfluenzaA__ABB02891
  source 1..1701: mol_type = other RNA
atgaagactatcattgctttgagctacattttatgtctggttttcgctcaaaaacttcccgtaaatgacaacagcacggcaacgctgtgcctgggacaccatgcagtgccaaacggaacgctagtgaaaacaatcacgaatgaccacattgaagtgactaatgctactgagctggttcagagttcctcaacaggtagaatatgcgacagtcctcaccaaatccttgatggagaaaactgcacactaatagatgctctattgggagaccctcattgtgatggcttccaaaataaggaatgggacctttttgttgaacgcagcacagcctacagcaactgttacccttatgatgtgccggattatgcctcccttaggtcactagttgcctcatccggcacactggagtttaacaatgaaagcttcaattggactggagtcgctcagaatggaacaagctctgcttgcaaaaggagatctattaaaagtttctttagtagattgaattggttgcaccaattaaaatacaaatatccagcactgaacgtgactatgccaaacaatgaaaaatttgacaaattgtacatttggggggttcaccacccgagtacggacagtgaccaaatcagcctatatgctcaagcatcagggagagtcacagtctctaccaaaagaagccaacaaactgtaatcccgaatatcggatctagaccctgggtaaggggtgtctccagcataataagcatctattggacaatagtaaaaccgggagacatacttttgattaacagcacagggaatctaattgctcctcggggttactttaaaatacgaagtgggaaaagctcaataatgaggtcaaatgcacccattggcgaatgcaattctgaatgcatcactccaaatggaagcattcccaatgacaaaccatttcaaaatgtaaacaggatcacatatggggcctgtcccagatatgttaagcaaaacactctgaaattggcaacagggatgcggaatgtaccagagaaacaaactagaggcatattcggcgcaatcgcgggtttcatagaaaatggttgggagggaatggtggacggttggtacggtttcaggcatcaaaattctgagggcacaggacaagcagcagatcttaaaagcactcaagcagcaatcaaccaaatcaacgggaaactgaataggttaatcgagaaaacaaacgagaaattccatcaaattgaaaaagaattctcagaagtagaagggagaattcaggacctcgagaaatatgttgaggacactaaaatagatctctggtcgtacaacgcggagcttcttgttgccctggagaaccaacatacaattgatctaactgactcagaaatgaacaaactgtttgaaagaacaaggaagcaactgagggaaaatgctgaggatatgggcaatggttgtttcaaaatataccacaaatgtgacaatgcctgcatagggtcaatcagaaatggaacttatgaccatgatgtatacagagacgaagcattaaacaaccggttccagatcaaaggtgttgagctgaagtcaggatacaaagattggatcctatggatttcctttgccatatcatgttttttgctttgtgttgttttgctggggttcatcatgtgggcctgccaaaaaggcaacattaggtgcaacatttgcatttga

SEQ ID NO: 30876 - RNA, 1701 nt, synthetic construct
  misc_feature 1..1701: note = hemagglutinin__InfluenzaA__ABB02902
  source 1..1701: mol_type = other RNA
atgaagactatcattgctttgagctacattttatgtctggttttcgctcaaaaacttcccgtaaatgacaacagcacggcaacgctgtgcctgggacaccatgcagtgccaaacggaacgctagtgaaaacaatcacgaatgaccacattgaagtgactaatgctactgagctggttcagagttcctcaacaggtagaatatgcgacagtcctcaccaaatccttgatggagaaaactgcacactaatagatgctctattgggagaccctcattgtgatggcttccaaaataaggaatgggacctttttgttgaacgcagcacagcctacagcaactgttacccttatgatgtgccggattatgcctcccttaggtcactagttgcctcatccggcacactggagtttaacaatgaaagcttcaattggactggagtcgctcagaatggaacaagctctgcttgcaaaaggagatctattaaaagtttctttagtagattgaattggttgcaccaattaaaatacaaatatccagcactgaacgtgactatgccaaacaatgaaaaatttgacaaattgtacatttggggggttcaccacccgagtacggacagtgaccaaatcagcctatatgctcaagcatcagggagagtcacagtctctaccaaaagaagccaacaaactgtaatcccgaatatcggatctagaccctgggtaaggggtgtctccagcagaataagcatctattggacaatagtaaaaccgggagacatacttttgattaacagcacagggaatctaattgctcctcggggttactttaaaatacgaagtgggaaaagctcaataatgaggtcaaatgcacccattggcaaatgcaattctgaatgcatcactccaaatggaagcattcccaatgacaaaccatttcaaaatgtaaacaggatcacatatggggcctgtcccagatatgttaagcaaaacactctgaaattggcaacagggatgcggaatgtaccagagaaacaaactagaggcatattcggcgcaatcgcgggtttcatagaaaatggttgggagggaatgatggacggttggtacggtttcaggcatcaaaattctgagggcacaggacaagcagcagatcttaaaagcactcaagcagcaatcaaccaaatcaacgggaaactgaataggttaatcgagaaaacaaacgagaaattccatcaaattgaaaaagaattctcagaagtagaagggagaattcaggacctcgagaaatatgttgaggacactaaaatagatctctggtcgtacaacgcggagcttcttgttgccctggagaaccaacatacaattgatctaactgactcagaaatgaacaaactgtttgaaagaacaaggaagcaactgagggaaaatgctgaggatatgggcaatggttgtttcaaaatataccacaaatgtgacaatgcctgcatagggtcaatcagaaatggaacttatgaccatgatgtatacagagacgaagcattaaacaaccggttccagatcaaaggtgttgagctgaagtcaggatacaaagattggatcctatggatttcctttgccatatcatgttttttgctttgtgttgttttgctggggttcatcatgtgggcctgccaaaaaggcaacattaggtgcaacatttgcatttga

SEQ ID NO: 30877 - RNA, 1698 nt, synthetic construct
  misc_feature 1..1698: note = hemagglutinin__InfluenzaA__ABB02913
  source 1..1698: mol_type = other RNA
atgaaagcaaaactactggtcctgttatgtacatttacagctacatacgcagacacaatatgtataggctaccatgccaacaactcaaccgacactgttgacacagtacttgagaagaatgtgacagtgacacactctgtcaacctacttgaggacagtcacaatggaaaactatgtctactaaaaggaatagccccactacaattgggtaattgcagcgttgccggatggatcttaggaaacccagaatgcgaattactgatttccaaggaatcatggtcctacattgtagaaacaccaaatcctgagaatggaacatgttacccagggtatttcgccgactatgaggaactgagggagcaattgagttcagtatcttcatttgagagattcgaaatattccccaaaggaagctcatggcccaaccacaccgtaaccggagtatcagcatcatgctcccataatgggaaaagcagtttttacagaaatttgctatggctgacggggaagaatggtttgtacccaaatctgagcatgtcctatgtaaacaacaaagagaaagaagtccttgtgctatggggtgttcatcgcccacctaacataggggaccaaagggccctctaccatacagaaaatgcttatgtctctgtagtgtcttcacattatagcagaagattcaccccagaaatagccaaaagacccaaagtaagagatcaggaaggaagaatcaactactactggactctgctggaacccggggacacaataatatttgaggcaaatggaaatctaatagcgccatggtatgctttcgcactgagtagaggctttggatcaggaatcatcacctcaaatgcaccaatggatgaatgtgatgcgaagtgtcaaacacctcagggagctataaacagtagtcttcctttccagaatgtacacccagttacaataggagagtgtccaaagtatgtcaggagtgcaaaattaaggatggttacaggactaaggaacatcccatccattcaatccagaggtttgtttggagccattgccggtttcattgaaggggggtggactggaatggtagatgggtggtatggttatcatcatcagaatgagcaaggatctggctatgctgcagatcaaaaaagcacacaaaatgccattaacaggattacaaacaaggtgaattctgtaattgagaaaatgaacactcaattcacagctgtgggcaaagaattcaacaaattagaaagaaggatggaaaacttaaataaaaaggttgatgatgggtttctagacatttggacatataatgcagaattgttggttctactggaaaatgaaaggactttggatttccatgactccaatgtgaagaatctgtatgagaaagtaaaaagccaattaaagaataatgccaaagaaataggaaacgggtgttttgaattctatcacaagtgtaacaatgaatgcatggaaagtgtgaaaaatggaacttatgactatccgaaatattccgaagaatcaaagttaaacagggagaaaattgatggagtaaaattggaatcaatgggagtctatcagattctggcgatctactcaactgtcgctagttccctggttcttttggtctccctgggggcaatcagcttctggatgtgttccaatgggtctttgcagtgtagaatatgcatctga

SEQ ID NO: 30878 - RNA, 1698 nt, synthetic construct
  misc_feature 1..1698: note = hemagglutinin__InfluenzaA__ABB02924
  source 1..1698: mol_type = other RNA
atgaaagtaaaactactggtcctgttatgtacatttacagctacatatgcagacacaatatgtataggctaccatgccaacaactcaaccgacactgttgacacagtacttgagaagaatgtgacagtgacacactctgtcaacctacttgaggacagtcacaatggaaaactatgtctactaaaaggaatagccccactacaattgggtaattgcagcgttgccggatggatcttaggaaacccagaatgcgaattactgatttccaaggaatcatggtcctacattgtagaaacaccaaatcctgagaatggaacatgttacccagggtatttcgccgactatgaggaactgagggagcaattgagttcagtatcttcatttgagaggttcgaaatattccccaaagaaagctcatggcccaaccacaccgtaaccggagtatcagcatcatgctcccataatgggaaaagcagtttttacagaaatttgctatggctgacggggaagaatggtttgtacccaaacctgagcaagtcctatgcaaacaacaaagagaaagaagtccttgtactatggggtgttcatcacccgcctaacataggggaccaaagggccctctatcatacagaaaatgcttatgtctctgtagtgtcttcacattatagcagaagattcaccccagaaatagccaaaagacccaaagtaagagatcaggaaggaagaatcaactactactggactctgctggaacccggggatacaataatatttgaggcaaatggaaatctaatagcgccaaggtatgctttcgcactgagtagaggctttggatcaggaatcatcacctcaaatgcaccaatggatgaatgtgatgcgaagtgtcaaacacctcagggagctataaacagcagtcttcctttccagaatgtacacccagtcacaataggagagtgtccaaagtatgtcaggagtgcaaaattaaggatggttacaggactaaggaacatcccatccattcaatccagaggtttgtttggagccattgccggtttcattgaaggggggtggactggaatggtagatggttggtatggttatcatcatcagaatgagcaaggatctggctatgctgcagatcaaaaaagcacacaaaatgccattaacgggattacaaacaaggtgaatgctgtaattgagaaaatgaacactcaattcacagctgtgggcaaagaattcaacaaattggaaagaaggatggaaaacttaaataaaaaagttgatgatgggtttctagacatttggacatataatgcagaattgttggttctactggaaaatgaaaggactttggatttccatgactccaatgtgaagaatctgtatgagaaagtaaaaagccaattaaagaataatgccaaagaaataggaaacgggtgttttgaattctatcacaagtgtaacgatgaatgcatggagagtgtgaaaaatggaacttatgactatccaaaatattccgaagaatcaaagttaaacagggagaaaattgatggagtgaaattggaatcaatgggagtctatcagattctggcgatctactcaacagtcgccagttccctggttcttttggtctccctgggggcaatcagcttctggatgtgttccaatgggtctttgcagtgtagaatatgcatctga

SEQ ID NO: 30879 - RNA, 1698 nt, synthetic construct
  misc_feature 1..1698: note = hemagglutinin__InfluenzaA__ABB02936
  source 1..1698: mol_type = other RNA
atgaaagcaaaactactggtcctgttatgtacatttacagctacatacgcagacacaatatgtataggctaccatgccaacaactcaaccgacactgttgacacagtacttgagaagaatgtgacagtgacacactctgtcaacctacttgaggacagtcacaatggaaaactatgtctactaaaaggaatagccccactacaattgggtaattgcagcgttgccggatggatcttaggaaacccagaatgcgaattactgatttccaaggaatcatggtcctacattgtagaaacaccaaatcccgagaatggaacatgttacccagggcatttcgccgactatgaggaactgagggagcaattgagttcagtatcttcatttgagagattcgaaatattccccaaagggagctcatggcccaaccacaccgtaaccggagtatcagcatcatgctcccataatgggaaaagcagtttttacagaaatttgctatggctgacggggaagaatggtttgtacccaaacctgagcatgtcctatgtaaacaacaaagagaaagaagtccttgtgctatggggtgttcatcacccacctaacataggggaccaaagggccctctaccatacagaaaatgcttatgtctctgtagtgtcttcacattatagcagaagattcaccccagaaatagccaaaagacccaaagtaagagatcaggaaggaagaatcaactactactggactctgctggaacccggggacacaataatatttgaggcaaatggaaatctaatagcgccatggtatgctttcgcactgagtagaggctttggatcaggaatcatcacctcaaatgcaccaatggatgaatgtgatgcgaagtgtcaaacacctcagggagctataaacagtagtcttcctttccagaatgtacacccagttacaataggagagtgtccaaagtatgtcaggagtgcaaaattaaggatggttacaggactaaggaacatcccatccattcaatccagaggtttgtttggagccattgccggtttcattgaaggggggtggactggaatggtagatgggtggtatggttatcatcatcagaatgagcaaggatctggctatgctgcagatcaaaaaagcacacaaaatgccattaacgggattacaaacaaggtgaattctgtaattgagaaaatgaacactcaattcacagctgtgggcaaagaattcaacaaattagaaagaaggatggaaaacttaaataaaaaagttgatgatgggtttctagacatttggacatataatgcagaattgttggttctactggaaaatgaaaggactttggatttccatgactccaatgtgaagaatctgtatgagaaagtaaaaagccaattaaagaataatgccaaagaaataggaaacgggtgttttgaattctatcacaagtgtaacaatgaatgcatggaaagtgtgaaaaatggaacttatgactatccaaaatattccgaagaatcaaagttaaacagggagaaaattgatggagtaaaattggaatcaatgggagtctatcagattctggcgatctactcaactgtcgccagttccctggttcttttggtctccctgggggcaatcagcttctggatgtgttccaatgggtctttgcagtgtagaatatgcatctga

SEQ ID NO: 30880 - RNA, 1701 nt, synthetic construct
  misc_feature 1..1701: note = hemagglutinin__InfluenzaA__ABB02947
  source 1..1701: mol_type = other RNA
atgaagactatcattgctttgagctacattttatgtctggttttcgctcaaaaaattcccggaaatgacaacagcacggcaacgctgtgcctgggacaccatgcagtgccaaacggaacgctagtgaaaacaatcacgaatgaccaaattgaagtgactaatgctactgagctggttcagagttcctcaacaggtagaatatgcgacagtcctcaccgaatccttgatggagaaaactgcacactgatagatgctctattgggagaccctcattgtgatggcttccaaaataaggaatgggacctttttgttgaacgcagcaaagcctacagcaactgttacccttatgatgtgcaggattatgcctcccttaggtcactagttgcctcatccggcaccctggagtttaacaatgaaagcttcaattggactggagtcgctcagaatggaacaagctatgcttgcaaaaggagatctattaaaagtttctttagtagattgaattggttgcaccaattaaaatacaaatatccagcactgaacgtgactatgccaaacaatgacaaatttgacaaattgtacatttggggggttcaccacccgagtacggacagtgaccaaaccagcctatatgctcaagcatcagggagagtcacagtctctaccaaaagaagccaacaaactgtaatcccgaatatcggatctagaccctgggtaaggggtgtctccagcagaataagcatctattggacaatagtaaaaccgggagacatacttttgattaacagcacagggaatctaattgctcctcggggttacttcaaaatacgaagtgggaaaagctcaataatgaggtcagatgcacccattggcaaatgcaattcagaatgcatcactccaaatggaagcattcccaatgacaaaccatttcaaaatgtaaacaggatcacatatggggcctgtcccagatatgttaagcaaaacactctgaaattggcaacagggatgcggaatgtaccagagaaacaaactagaggcatattcggcgcaatcgcaggtttcatagaaaatggttgggagggaatggtggacggttggtacggtttcaggcatcaaaattctgagggcacaggacaagcagcagatcttaaaagcactcaagcagcaatcaaccaaatcaacgggaaactgaataggttaatcgagaaaacgaacgagaaattccatcaaattgaaaaagaattctcagaagtagaagggagaattcaggacctcgagaaatatgttgaggacactaaaatagatctctggtcgtacaacgcggagcttcttgttgccctggagaaccaacatacaattgatctaactgactcagaaatgaacaaactgtttgaaagaacaaggaagcaactgagggaaaatgctgaggatatgggcaatggttgtttcaaaatataccacaaatgtgacaatgcctgcatagggtcaatcagaaatggaacttatgaccatgatgtatacagagacgaagcattaaacaaccggttccagatcaaaggtgttgagctgaagtcaggatacaaagattggatcctatggatttcctttgccatatcatgttttttgctttgtgttgttttgctggggttcatcatgtgggcctgccaaaaaggcaacattaggtgcaacatttgcatttga

SEQ ID NO: 30881 - RNA, 1701 nt, synthetic construct; identical to SEQ ID NO: 30694
  misc_feature 1..1701: note = hemagglutinin__InfluenzaA__ABB02958
  source 1..1701: mol_type = other RNA

SEQ ID NO: 30882 - RNA, 1701 nt, synthetic construct; identical to SEQ ID NO: 30694
  misc_feature 1..1701: note = hemagglutinin__InfluenzaA__ABB02969
  source 1..1701: mol_type = other RNA

SEQ ID NO: 30883 - RNA, 1701 nt, synthetic construct
  misc_feature 1..1701: note = hemagglutinin__InfluenzaA__ABB02980
  source 1..1701: mol_type = other RNA
atgaagactatcattgctttgagctacattttatgtctggttttcgctcaaaaacttcccggaaatgacaacagcacggcaacgctgtgcctggggcaccatgcagtgccaaacggaacgctagtgaaaacaatcacgaatgaccaaattgaagtgactaatgctactgagctggttcagagttcctcaacaggtagaatatgcgacagtcctcaccaaatccttgatggagaaaactgcacactaatagatgctctattgggagaccctcattgtgatggcttccaaaataaggaatgggacctttttgttgaacgcagcaaagcctacagcaactgttacccttatgatgtgccggattatgcctcccttaggtcactagttgcctcatccggcacactggagtttaacaatgaaagcttcaattggactggagtcgctcagaatggaacaagctctgcttgcaaaaggagatctaataaaagtttctttagtagattgaattggttgcaccaattaaaatacaaatatccagcactgaacgtgactatgccaaacaatgaaaaatttgacaaattgtacatttggggggttcaccacccgagtacggacagtgaccaaatcagcctatatgctcaagcatcagggagagtcacagtctctaccaaaagaagccaacaaactgtaatcccgaatatcggatctagaccctgggtaaggggtgtctccagcataataagcatctattggacaatagtaaaaccgggagacatacttttgattaacagcacagggaatctaattgctcctcggggttacttcaaaatacgaagtgggaaaagctcaataatgaggtcagatgcacccattggcaaatgcaattctgaatgcatcactccaaatggaagcattcccaatgacaaaccatttcaaaatgtaaacaggatcacatatggggcctgtcccagatatgttaagcaaaacactctgaaattggcaacagggatgcggaatgtaccagagaaacaaactagaggcatattcggcgcaatcgcgggtttcatagaaaatggttgggagggaatggtggacggttggtacggtttcaggcatcaaaattctgagggtacaggacaagcagcagatcttaaaagcactcaagcagcaatcaaccaaatcaacgggaaactgaataggttaatcgagaaaacgaacgagaaattccatcaaattgaaaaagaattctcagaagtagaagggagaattcaggacctcgagaaatatgttgaggacactaaaatagatctctggtcgtacaacgcggagcttcttgttgccctggagaaccaacatacaattgatctaactgactcagaaatgaacaaactgtttgaaagaacaaagaagcaactgagggaaaatgctgaggatatgggcaatggttgtttcaaaatataccacaaatgtgacaatgcctgcatagggtcaatcagaaatggaacttatgaccatgatgtatacagagacgaagcattaaacaaccggttccagatcaaaggtgttgagctgaagtcaggatacaaagattggatcctatggatttcctttgccatatcatgttttttgctttgtgttgttttgctggggttcatcatgtgggcctgccaaaaaggcaacattaggtgcaacatttgcatttga

SEQ ID NO: 30884 - RNA, 1701 nt, synthetic construct
  misc_feature 1..1701: note = hemagglutinin__InfluenzaA__ABB02991
  source 1..1701: mol_type = other RNA
atgaagactatcattgctttgagctacattttatgtctggttttcgctcaaaaacttcccggaaatgacaacagcacggcaacgctgtgcctggggcaccatgcagtgccaaacggaacgctagtgaaaacaatcacgaatgaccaaattgaagtgactaatgctactgagctggttcagagttcctcaacaggtagaatatgcgacaatcctcaccaaatccttgatggagaaaactgcacactaatagatgctctattgggagaccctcattgtgatggcttccaaaataaggaatgggacctttttgttgaacgcagcaaagcctacagcaactgttacccttatgatgtgccggattatgcctcccttaggtcactagttgcctcatccggcacactggagtttaacaatgaaagcttcaattggactggagtcgctcagaatggaacaagctctgcttgcaaaaggagatctaataaaagtttctttagtagattgaattggttgcaccaattaaaatacaaatatccagcactgaacgtgactatgccaaacaatgaaaaatttgacaaattgtacatttggggggttcaccacccgagtacggacagtgaccaaatcagcctatatgctcaagcatcagggagagtcacagtctctaccaaaagaagccaacaaactgtaatcccgaatatcggatctagaccctgggtaaggggtgtctccagcataataagcatctattggacaatagtaaaaccgggagacatacttttgattaacagcacagggaatctaattgctcctcggggttacttcaaaatacgaagtgggaaaagctcaataatgaggtcagatgcacccattggcaaatgcaattctgaatgcatcactccaaatggaagcattcccaatgacaaaccatttcaaaatgtaaacaggatcacatatggggcctgtcccagatatgttaagcaaaacactctgaaattggcaacagggatgcggaatgtaccagagaaacaaactagaggcatattcggcgcaatcgcgggtttcatagaaaatggttgggagggaatggtggacggttggtacggtttcaggcatcaaaattctgagggcacaggacaagcagcagatcttaaaagcactcaagcagcaatcaaccaaatcaacgggaaactgaataggttaatcgagaaaacgaacgagaaattccatcaaattgaaaaagaattctcagaagtagaagggagaattcaggacctcgagaaatatgttgaggacactaaaatagatctctggtcgtacaacgcggagcttcttgttgccctggagaaccaacatacaattgatctaactgactcagaaatgaacaaactgtttgaaagaacaaagaagcaactgagggaaaatgctgaggatatgggcaatggttgtttcaaaatataccacaaatgtgacaatgcctgcatagggtcaatcagaaatggaacttatgaccatgatgtatacagagacgaagcattaaacaaccggttccagatcaaaggtgttgagctgaagtcaggatacaaagattggatcctatggatttcctttgccatatcatgttttttgctttgtgttgttttgctggggttcatcatgtgggcctgccaaaaaggcaacattaggtgcaacatttgcatttga

SEQ ID NO: 30885 - RNA, 1701 nt, synthetic construct
  misc_feature 1..1701: note = hemagglutinin__InfluenzaA__ABB03002
  source 1..1701: mol_type = other RNA
atgaagactatcattgctttgagctacattttatgtctggttttcgctcaaaaacttcccggaaatgacaacagcacggcaacgctgtgcctggggcaccatgcagtgccaaacggaacgctagtgaaaacaatcacgaatgaccaaattgaagtgactaatgctactgagctggttcagagttcctcaacaggtagaatatgcaacagtcctcaccaaatccttgatggagaaaactgcacactaatagatgctctattgggagaccctcattgtgatggcttccaaaataaggaatgggacctttttgttgaacgcagcaaagcctacagcaactgttacccttatgatgtgccggattatgcctcccttaggtcactagttgcctcatccggcacactggagttcaacaatgaaagcttcaattggactggagtcgctcagaatggaacaagctctgcttgcaaaaggagatctaataaaagtttctttagtagattgaattggttgcaccaattaaaatacaaatatccagcactgaacgtgactatgccaaacaatgaaaaatttgacaaattgtacatttggggggttcaccacccgagtacggacagtgaccaaatcagcctatatgctcaagcatcagggagagtcacagtctctaccaaaagaagccaacaaactgtaatcccgaatatcggatctggaccctgggtaaggggtgtctccagcagaataagcatctattggacaatagtaaaaccgggagacatacttttgattaacagcacagggaatctaattgctcctcggggttacttcaaaatacgaagtgggaaaagctcaataatgaggtcagatgcacccattggcaaatgcaattctgaatgcatcactccaaatggaagcattcccaatgacaaaccatttcaaaatgtaaacaggatcacatatggggcctgtcccagatatgttaagcaaaacactctgaaattggcaacagggatgcggaatgtaccagagaaacaaactagaggcatattcggcgcaatcgcgggtttcatagaaaatggttgggagggaatggtggacggttggtacggtttcaggcatcaaaattctgagggcacaggacaagcagcagatcttaaaagcactcaagcagcaatcaaccaaatcaacgggaaactgaataggttaatcgagaaaacgaacgagaaattccatcaaattgaaaaagaattctcagaagtagaagggagaattcaggacctcgagaaatatgttgaggacactaaaatagatctctggtcgtacaacgcggagcttcttgttgccctggagaaccaacatacaattgatctaactgactcagaaatgaacaaactgtttgaaagaacaaagaagcaactgagggaaaatgctgaggatatgggcaatggttgtttcaaaatataccacaaatgtgacaatgcctgcatagggtcaatcagaaatggaacttatgaccatgatgtatacagagacgaagcattaaacaaccggttccagatcaaaggtgttgagctgaagtcaggatacaaagattggatcctatggatttcctttgccatatcatgttttttgctttgtgttgttttgctggggttcatcatgtgggcctgccaaaaaggcaacattaggtgcaacatttgcatttga

SEQ ID NO: 30886 - RNA, 1701 nt, synthetic construct
  misc_feature 1..1701: note = hemagglutinin__InfluenzaA__ABB03013
  source 1..1701: mol_type = other RNA
atgaagactatcattgctttgagctacattttatgcctggttttcgctcaaaaacttcccggaaatgacaacagcacggcaacgctgtgcctgggacaccatgcagtgccaaacggaacgctagtgaaaacaatcacgagtgaccaaattgaagtgactaatgctactgagctggttcagagttcctcaacaggtagaatatgcgacagtcctcaccgaatccttgatggagaaaactgcacactgatagatgctctattgggagaccctcattgtgatggcttccaaaataaggaatgggacctttttgttgaacgcagcaaagcctacagcaactgttacccttatgatgtgccggattatgcctcccttaggtcactagttgcctcatccggcaccctggagtttaacaatgaaagcttcaattggactggagtcgctcagaatggaacaagctttgcttgcaaaaggagatctattaaaagtttctttagtagattgaattggttgcaccaattaaaatacaaatatccagcactgaacgtgactatgccaaacaatgacaaatttgacaaattgtacatttggggggttcaccacccgggtacggacagtgaccaaaccagcctatatgctcaagcatcagggagagtcacagtctctaccaaaagaagccaacaaactgtaatcccgaatatcggatctggaccctgggtaaggggtgtttccagcagaataagcatctattggacaatagtgaaaccgggagacatacttctgatcaacagcacagggaatctaattgctcctcggggttacttcaaaatacgaagtgggaaaagctcaataatgaggtcagatgcacccattggcaaatgcaattctgaatgcatcactccaaatggaagcattcccaatgacaaaccatttcaaaatgtaaacaggatcacatatggggcctgtcccagatatgttaagcaaaacactctgaaattggcaacagggatgcggaatgtaccagagaaacaaactagaggcatattcggcgcaatcgcaggtttcatagaaaatggttgggagggaatggtagacggttggtacggtttcaggcatcaaaattctgagggcacaggacaagcagcagatcttaaaagcactcaagcagcaatcaaccaaatcaacgggaaactgaataggttaatcgagaaaacgaacgagaaattccatcaaattgaaaaagaattcacagaagtagaagggagaattcaggacctcgagaaatatgttgaggacactaaaatagatctctggtcgtacaacgcggagcttcttgttgccctggagaaccaacatacaattgatctaactgactcagaaatgaacaaactgtttgaaagaacaaggaagcaactgagggaaaatgctgaggatatgggcaatggttgtttcaaaatataccacaaatgtgacaatgcctgcatagggtcaatcagaaatggaacttatgaccatgatgtatacagagacgaagcattaaacaaccggttccagatcaaaggtgttgagctgaagtcaggatacaaagattggatcctatggatttcctttgccacatcatgttttttgctttgtgttgttttgctggggttcatcatgtgggcctgccaaaaaggcaacattaggtgcaacatttgcatttga

SEQ ID NO: 30887 - RNA, 1701 nt, synthetic construct
  misc_feature 1..1701: note = hemagglutinin__InfluenzaA__ABB03024
  source 1..1701: mol_type = other RNA
atgaagactatcattgctttgagctacattttatgtctggttttcgctcaaaaacttcccggaaatgacaacagcacggcaacgctgtgcctggggcaccatgcagtgccaaacggaacgctagtgaaaacaatcacgaatgaccaaattgaagtgactaatgctactgagctggttcagagttcctcaacaggtagaatatgcgacagtcctcaccaaatccttgatggagaaaactgcacactaatagatgctctattgggagaccctcattgtgatggcttccaaaataaggaatgggacctttttgttgaacgcagcaaagcctacagcaactgttacccttatgatgtgccggattatgcctcccttaggtcactagttgcctcatccggcacactggagttcaacaatgaaagcttcaattggactggagtcgctcagaatggaacaagctctgcttgcaaaaggagatctaataaaagtttctttagtagattgaattggttgcaccaattaaaatacaaatatccagcactgaacgtgactatgccaaacaatgaaaaatttgacaaattgtacatttggggggttcaccacccgagtacggacagtgaccaaatcagcctatatgctcaagcatcagggagagtcacagtctctaccaaaagaagccaacaaactgtaatcccgaatatcggatctagaccctggataaggggtgtctccagcagaataagcatctattggacaatagtaaaaccgggagacatacttttgattaacagcacagggaatctaattgctcctcggggttacttcaaaatacgaagtgggaaaagctcaataatgaggtcagatgcacccattggcaaatgcaattctgaatgcatcactccaaatggaagcattcccaatgacaaaccatttcaaaatgtaaacaggatcacatatggggcctgtcccagatatgttaagcaaaacactctgaaattggcaacagggatgcggaatgtaccagagaaacaaactagaggcatattcggcgcaatcgcgggtttcatagaaaatggttgggagggaatggtggacggttggtacggtttcaggcatcaaaattctgagggcacaggacaagcagcagatcttaaaagcactcaagcagcaatcaaccaaattaacgggaaactgaataggttaatcgagaaaacgaacgagaaattccatcaaattgaaaaagaattctcagaagtagaagggagaattcaggacctcgagaaatatgttgaggacactaaaatagatctctggtcgtacaacgcggagcttcttgttgccctggagaaccaacatacaattgatctaactgactcagaaatgaacaaactgtttgaaagaacaaagaagcaactgagggaaaatgctgaggatatgggcaatggttgtttcaaaatataccacaaatgtgacaatgcctgcatagggtcaatcagaaatggaacttatgaccatgatgtatacagagacgaagcattaaacaaccggttccagatcaaaggtgttgagctgaagtcaggatacaaagattggatcctatggatttcctttgccatatcatgttttttgctttgtgttgttttgctggggttcatcatgtgggcctgccaaaaaggcaacattaggtgcaacatttgcatttga

SEQ ID NO: 30888 - RNA, 1701 nt, synthetic construct
  misc_feature 1..1701: note = hemagglutinin__InfluenzaA__ABB03035
  source 1..1701: mol_type = other RNA
atgaagactatcattgctttgagctacattttatgcctggttttcgctcaaaaacttcccggaaatgacaacagcacggcaacgctgtgcctgggacaccatgcagtgccaaacggaacgctagtgaaaacaatcacgagtgaccaaattgaagtgactaatgctactgagctggttcagagttcctcaacaggtagaatatgcgacagtcctcaccgaatccttgatggagaaaactgcacactgatagatgctctattgggagaccctcattgtgatggcttccaaaataaggaatgggacctttttgttgaacgcagcaaagcctacagcaactgttacccttatgatgtgccggattatgcctcccttaggtcactagttgcctcatccggcaccctggagtttaacaatgaaagcttcaattggactggagtcgctcagaatggaacaagctttgcttgcaaaaggagatctattaaaagtttctttagtagattgaattggttgcaccaattaaaatacaaatatccagcactgaacgtggctatgccaaacaatgacaaatttgacaaattgtacatttggggggttcaccacccgggtacggacagtgaccaaaccagcctatatgctcaagcatcagggagagtcacagtctctaccaaaagaagccaacaaactgtaatcccgaatatcggatctagaccctgggtaaggggtgtttccagcagaataagcatctattggacaatagtgaaaccgggagacatacttctgatcaacagcacagggaatctaattgctcctcggggttacttcaaaatacgaagtgggaaaagctcaataatgaggtcagatgcacccattggcaaatgcaattctgaatgcatcactccaaatggaagcattcccaatgacaaaccatttcaaaatgtaaacaggatcacatatggggcctgtcccagatatgttaagcaaaacactctgaaattggcaacagggatgcggaatgtaccagagaaacaaactagaggcatattcggcgcaatcgcaggtttcatagaaaatggttgggagggaatggtagacggttggtacggtttcaggcatcaaaattctgagggcacaggacaagcagcagatcttaaaagcactcaagcagcaatcaaccaaatcaacgggaaactgaataggttaatcgagaaaacgaacgagaaattccatcaaattgaaaaagaattcacagaagtagaagggagaattcaggacctcgagaaatatgttgaggacactaaaatagatctctggtcgtacaacgcggagcttcttgttgccctggagaaccaacatacaattgatctaactgactcagaaatgaacaaactgtttgaaagaacaaggaagcaactgagggaaaatgctgaggatatgggcaatggttgtttcaaaatataccacaaatgtgacaatgcctgcatagggtcaatcagaaatggaacttatgaccatgatgtatacagagacgaagcattaaacaaccggttccagatcaaaggtgttgagctgaagtcaggatacaaagattggatcctatggatttcctttgccacatcatgttttttgctttgtgttgttttgctggggttcatcatgtgggcctgccaaaagggcaacattaggtgcaacatttgcatttga

SEQ ID NO: 30889 - RNA, 1701 nt, synthetic construct
  misc_feature 1..1701: note = hemagglutinin__InfluenzaA__ABB03046
  source 1..1701: mol_type = other RNA
atgaagactatcattgctttgagctacattttatgtctggttttcgctcaaaaacttcccggaaatgacaacagcacggcaacgctgtgcctggggcaccatgcagtgccaaacggaacgctagtgaaaacaatcacgaatgaccaaattgaagtgactaatgctactgagctggttcagagttcctcaacaggtagaatatgcgacagtcctcaccaaatccttgatggagaaaactgcacactaatagatgctctattgggagaccctcattgtgatggcttccaaaataaggaatgggacctttttgttgaacgcagcaaagcctacagcaactgttacccttatgatgtgccggattatgcctcccttaggtcactagttgcctcatccggcacactggagtttaacaatgaaagcttcaattggactggagtcgctcagaatggaacaagctctgcttgcaaaaggagatctaataaaagtttctttagtagattgaattggttgcaccaattaaaatacaaatatccagcactgaacgtgactatgccaaacaatgaaaaatttgacaaattgtacatttggggggttcaccacccgagtacggacagtgaccaaatcagcctatatgctcaagcatcagggagagtcacagtctctaccaaaagaagccaacaaactgtaatcccgaatatcggatctagaccctgggtaaggggtgtctccagcggaataagcatctattggacaatagtaaaaccgggagacatacttttgattaacagcacagggaatctaattgctcctcggggttacttcaaaatacgaagtgggaaaagctcaataatgaggtcagatgcacccattggcaaatgcaattctgaatgcatcactccaaatggaagcattcccaatgacaaaccatttcaaaatgtaaacaggatcacatatggggcctgtcccagatatgttaagcaaaacactctgaaattggcaacagggatgcggaatgtaccagagaaacaaactagaggcatattcggcgcaatcgcgggtttcatagaaaatggttgggagggaatggtggacggttggtacggtttcaggcatcaaaattctgagggcacaggacaagcagcagatcttaaaagcactcaagcagcaatcaaccaaatcaacgggaaactgaataggttaatcgagaaaacgaacgagaaattccatcaaattgaaaaagaattctcagaagtagaagggagaattcaggacctcgagaaatatgttgaggacactaaaatagatctctggtcgtacaacgcggagcttcttgttgccctggagaaccaacatacaattgatctaactgactcagaaatgaacaaactgtttgaaagaacaaagaagcaactgagggaaaatgctgaggatatgggcaatggttgtttcaaaatataccacaaatgtgacaatgcctgcatagggtcaatcagaaatggaacttatgaccatgatgtatacagagacgaagcattaaacaaccggttccagatcaaaggtgttgagctgaagtcaggatacaaagattggatcctatggatttcctttgccatatcatgttttttgctttgtgttgctttgctggggttcatcatgtgggcctgccaaaaaggcaacattaggtgcaacatttgcatttga

SEQ ID NO: 30890 - RNA, 1701 nt, synthetic construct
  misc_feature 1..1701: note = hemagglutinin__InfluenzaA__ABB03057
  source 1..1701: mol_type = other RNA
atgaagactatcattgctttgagctacattctatgtctggttttcgctcaagaacttcccggaaatgacaacagcacggcaacgctgtgccttgggcaccatgcagtaccaaacggaacgatagtgaaaacaatcacgaatgaccaaattgaagttactaatgctactgagctggttcagagttcctcaacaggtggaatatgcgacagtcctcatcagatccttgatggagaaaactgcacactaatagatgctctattgggagaccctcagtgtgatggcttccaaaataagaaatgggacctttttgttgaacgcagcaaagcctacagcaactgttacccttatgatgtgccggattatgcctcccttaggtcactagttgcctcatccggcacactggagtttaacaatgaaagcttcaattggacaggagtcactcaaaatggaacaagctctgcttgcaaaaggagatctaataacagtttctttagtagattgaattggttgacccacttaaaattcaaatacccagcattgaacgtgactatgccaaacaatgaaaaatttgacaaattgtacatttggggggttcaccacccgggtacggacaatgaccaaaccagcctatatgctcaagcatcaggaagaatcacagtctctaccaaaagaagccaacaaactgtaatcccgaatatcggatctagacccagggtaagggatatccccagcagaataagcatctattggacaatagtaaaaccgggagacatacttttgattaacagcacagggaatctaattgctcctcggggttacttcaaaatacgaagtgggaaaagctcaataatgagatcagatgcacccattggcaaatgcaattctgaatgcatcactccaaatggaagcattcccaatgacaaaccatttcaaaatgtaaacaggatcacatatggggcctgtcccagatatgttaagcaaaacactctgaaattggcaacagggatgcgaaatgtaccagagaaacaaactagaggcatatttggcgcaatcgcgggtttcatagaaaatggttgggagggaatggtggatggttggtacggttttaggcatcaaaattctgagggaataggacaagcagcagatctcaaaagcactcaagcagcaatcaaccaaatcaatgggaagctgaataggttgatcggaaaaaccaacgaaaaattccatcagattgaaaaagaattctcagaagtagaagggagaattcaggacctcgagaaatatgttgaggacactaaaatagatctctggtcatacaacgcggagcttcttgttgccctggagaaccaacatacaattgatctaactgactcagaaatgaacaaactgttcgaaagaacaaagaagcaactgagggaaaatgctgaggatatgggcaatggttgtttcaaaatataccacaaatgtgacaatgcctgcatagggtcaatcagaaatggaacttatgaccatgatgtatacagagatgaagcattaaacaaccggttccagatcaaaggtgttgagctgaagttaggatacaaagattggatcctatggatttcctttgccatatcatgttttttgctttgtgttgctttgttggggttcatcatgtgggcctgccaaaaaggcaacattaggtgcaacatttgcatttga

SEQ ID NO: 30891 - RNA, 1701 nt, synthetic construct
  misc_feature 1..1701: note = hemagglutinin__InfluenzaA__ABB03068
  source 1..1701: mol_type = other RNA
atgaagactatcattgctttgagctacattctatgtctggttttcgctcaagaacttcccggaaatgacaacagcacggcaacgctgtgccttgggcaccatgcagtaccaaacggaacgatagtgaaaacaatcacaaatgaccaaattgaagttactaatgctactgagctggttcagagttcctcaacaggtggaatatgcgacagtcctcatcagatccttgatggagaaaactgcacactaatagatgctctattgggagaccctcagtgtgatggcttccaaaataagaaatgggacctttttgttgaacgcagcaaagcctacagcaactgttacccttatgatgtgccggattatgcctcccttaggtcactagttgcctcatccggcacactggagtttaacaatgaaagcttcaattggactggagtcactcaaaatggaacaagctctgcttgcaaaaggagatctaataacagtttctttagtagattgaattggttgacccacttaaaattcaaatacccagcattgaacgtgactatgccaaacaatgaaaaatttgacaaattgtacatttggggggttcaccacccgggtacggacaatgaccaaaccagcctatatgctcaagcatcaggaagaatcacagtctctaccaaaagaagccaacaaactgtaatcccgaatatcggatctagacccagggtaagggatatccccagcagaataagcatctattggacaatagtaaaaccgggagacatacttttgattaacagcacagggaatctaattgctcctcggggttacttcaaaatacgaagtgggaaaagctcaataatgagatcagatgcacccattggcaaatgcaattctgaatgcatcactccaaatggaagcattcccaatgacaaaccatttcaaaatgtaaacaggatcacatatggggcctgtcccagatatgttaagcaaaacactctgaaattggcaacagggatgcgaaatgtaccagagaaacaaactagaggcatatttggcgcaatcgcgggtttcatagaaaatggttgggagggaatggtggatggttggtacggttttagacatcaaaattctgagggaataggacaagcagcagatctcaaaagcactcaagcagcaatcaaccaaatcaatgggaagctgaataggttgatcggaaaaaccaacgagaaattccatcagattgaaaaagaattctcagaagtagaagggagaattcaggacctcgagaaatatgttgaggacactaaaatagatctctggtcatacaacgcggagcttcttgttgccctggagaaccaacatacaattgatctaactgactcagaaatgaacaaactgttcgaaagaacaaagaagcaactgagggaaaatgctgaggatatgggcaatggttgcttcaaaatataccacaaatgtgacaatgcctgcatagggtcaatcagaaatggaacttatgaccatgatgtatacagagatgaagcattaaacaaccggttccagatcaaaggtgttgagctgaagtcaggatacaaagattggatcctatggatttcctttgccatatcatgttttttgctttgtgttgctttgttggggttcatcatgtgggcctgccaaaaaggcaacattaggtgcaacatttgcatttga

SEQ ID NO: 30892 - RNA, 1701 nt, synthetic construct
  misc_feature 1..1701: note = hemagglutinin__InfluenzaA__ABB03079
  source 1..1701: mol_type = other RNA
atgaagactatcattgctttgagctacattctatgtctggttttcgctcaaaaacttcccggaaatgacaacagcacggcaacgctgtgccttgggcaccatgcagtaccaaacggaacgatagtgaaaacaatcacgaatgaccaaattgaagttactaatgctactgagctggttcagagttcctcaacaggtggaatatgcgacagtcctcatcagatccttgatggagaaaactgcacactaatagatgctctattgggagaccctcagtgtgatggcttccaaaataagaaatgggacctttttgttgaacgcagcaaagcctacagcaactgttacccttatgatgtgccggattatgcctcccttaggtcactagttgcctcatccggcacactggagtttaacaatgaaagcttcaattggactggagtcactcaaaatggaacaagctctgcttgcaaaaggagatctaataacagtttctttagtagattgaattggttgacccacttaaaattcaaatacccagcattgaacgtgactatgccaaacaatgaaaaatttgacaaattgtacatttggggggttcaccacccgggtacggacaatgaccaaatcagcctatatgctcaagcatcaggaagaatcacagtctctaccaaaagaagccaacaaactgtaatcccgaatatcggatctagacccagggtaagggatatccccagcagaataagcatctattggacaatagtaaaaccgggagacatacttttgattaacagcacagggaatctaattgctcctcggggttacttcaaaatacgaagtgggaaaagctcaataatgagatcagatgcacccattggcaaatgcaattctgaatgcatcactccaaatggaagcattcccaatgacaaaccatttcaaaatgtaaacaggatcacatatggggcctgtcccagatatgttaagcaaaacactctgaaattggcaacagggatgcgaaatgtaccagagaaacaaactagaggcatatttggcgcaattgcgggtttcatagaaaatggttgggagggaatggttgatggttggtacggtttcaggcatcaaaattctgagggaataggacaagcagcagatctcaaaagcactcaagcagcaatcaaccaaatcaatgggaagctgaataggttgatcggaaaaaccaacgagaaattccatcagattgaaaaagaattctcagaagtagaagggagaattcaggacctcgagaaatatgttgaggacactaaaatagatctctggtcatacaacgcggagcttcttgttgccctggagaaccaacatacaattgatctaactgactcagaaatgaacaaactgtttgaaagaacaaagaagcaactgagggaaaatgctgaggatatgggcaatggttgtttcaaaatataccacaaatgtgacaatgcctgcatagggtcaatcagaaatggaacttatgaccatgatgtatacagagatgaagcattaaacaaccggttccagatcaaaggtgttgagctgaagtcaggatacaaagattggatcctatggatttcctttgccatatcatgttttttgctttgtgttgctttgttggggttcatcatgtgggcctgccaaaaaggcaacattaggtgcaacatttgcatttga

SEQ ID NO: 30893 - RNA, 1701 nt, synthetic construct
  misc_feature 1..1701: note = hemagglutinin__InfluenzaA__ABB03090
  source 1..1701: mol_type = other RNA
atgaagactatcattgctttgagctacattctatgtctggttttcgctcaaaaacttcccggaaatgacaacagcacggcaacgctgtgccttgggcaccatgcagtaccaaacggaacgatagtgaaaacaatcacgaatgaccaaattgaagttactaatgctactgagctggttcagagttcctcaacaggtggaatatgcgacagtcctcatcagatccttgatggagaaaactgcacactaatagatgctctattgggagaccctcagtgtgatggcttccaaaataagaaatgggacctttttgttgaacgcagcaaagcctacagcaactgttacccttatgatgtgccggattatgcctcccttaggtcactagttgcctcatccggcacactggagtttaacaatgaaagcttcaattggactggagtcactcaaaatggaacaagctctgcttgcaaaaggagatctaataacagtttctttagtagattgaattggttgacccacttaaaattcaaatacccagcattgaacgtgaccatgccaaacaatgaaaaatttgacaaattgtacatttggggggttcaccacccgggtacggacaatgaccaaatcagcctatatgctcaagcatcaggaagaatcacagtctctaccaaaagaagccaacaaactgtaatcccgaatatcggatctagacccagggtaagggatatccccagcagaataagcatctattggacaatagtaaaaccgggagacatacttttgattaacagcacagggaatctaattgctcctcggggttacttcaaaatacgaagtgggaaaagctcaataatgagatcagatgcacccattggcaaatgcaattctgaatgcatcactccaaatggaagcattcccaatgacaaaccatttcaaaatgtaaacaggatcacatatggggcctgtcccagatatgttaagcaaaacactctgaaattggcaacagggatgcgaaatgtaccagagaaacaaactagaggcatatttggcgcaatcgcgggtttcatagaaaatggttgggagggaatggtggatggttggtacggtttcaggcatcaaaattctgagggaatagggcaagcagcagatctcaaaagcactcaagcagcaataaaccaaatcaatgggaagctgaataggttgatcggaaaaaccaacgagaaattccatcagattgaaaaagaattctcagaagtagaagggagaattcaggacctcgagaaatatgttgaggacactaaaatagatctctggtcatacaacgcggagcttcttgttgccctggagaaccaacatacaattgatctaactgactcagaaatgaacaaactgtttgaaagaacaaagaagcaactgagggaaaatgctgaggatatgggcaatggttgtttcaaaatataccacaaatgtgacaatgcctgcatagggtcaatcagaaatggaacttatgaccatgatgtatacagagatgaagcattaaacaaccggttccagatcaaaggtgttgagctgaagtcaggatacaaagattggatcctatggatttcctttgccatatcatgttttttgctttgtgttgctttgttggggttcatcatgtgggcctgccaaaaaggcaacattaggtgcaacatttgcatttga

SEQ ID NO: 30894 - RNA, 1698 nt, synthetic construct
  misc_feature 1..1698: note = hemagglutinin__InfluenzaA__ABB03101
  source 1..1698: mol_type = other RNA
atgaaagtaaaactactgatcctgttatgtacatttacagctacatatgcagacacaatatgtataggctaccatgccaacaactcaaccgacactgttgacacagtacttgagaagaatgtgacagtgacacactctgtcaacctacttgaggacagtcacaatggaaaactgtgcctactaaaaggaatagcccccctacaattgggtaattgcagcgttgccggatggatcttaggaaacccagaatgcgaattactgatttccaaggaatcatggtcctacattgtagaaacaccaaatcctgagaatggagcatgttacccagggtatttcgccgactatgaggagctaagggagcaattgagttcagtatcttcatttgagagattcgaaatattccccaaaaaaagctcatggcccaaccacaccgtaaccggagtatcagcatcatgctcccataatgggaaaagcagtttttacagaaatttgctatggctgacggggaagaatggtttgtacccaaacctgagcaagtcctatgcaaacaacaaagagaaagaagtccttatactatggggtgttcatcacccgcctaacataggggaccaaaggaccctctatcacacagaaaatgcttatgtctctgtagtgtcttcacattatagcagaagattcaccccagaaataaccaaaaggcccaaagtaagagatcaggaaggaagaatcaactactactggactctgctggaacccggggatacaataatatttgagacaaatggaaatctaatagcgccatggtatgctttcgcactgagtagaggctttggatcaggaatcatcacctcaaatgcaccaatggatgaatgtgatgcgaagtgtcaaacacctcagggagctataaacagcagtcttcctttccagaatgtacacccagtcacaataggagagtgtccaaagtatgtcaggagtgcaaaattaaggatggttacaggactaaggaacatcccatccattcaatccagaggtttgtttggagccattgccggtttcattgaaggggggtggactggaatggtagatgggtggtatggttatcatcatcagaatgagcaaggatctggctatgctgcagatcaaaaaagcacacaaaatgccattaacgggattacaaacaaggtgaattctgtaattgagaaaatgaacactcaattcacagctgtgggcaaagaattcaacaaattggaaagaaggatggaaaacttaaataaaaaggttgatgatgggtttctagacatttggacatataatgcagaattgttggttctactggaaaatgaaaggactttggatttccacgactccaatgtgaagaatctgtacgagaaagtaaaaagccaattaaagaataatgccaaagaaataggaaatgggtgttttgaattctatcacaagtgtaacaatgaatgcatggagagtgtgaaaaatggaacttatgactatccaaaatattccgaagaatcaaagttaaacagggaaaaaattgatggagtgaaattggactcaatgggggtctatcagattctggcgatctactcaactgtcgccagttccctggttcttttggtctccctgggggcaatcagcttctggatgtgttccaatgggtctttgcagtgtagaatatgcatctga

SEQ ID NO: 30895 - RNA, 1701 nt, synthetic construct
  misc_feature 1..1701: note = hemagglutinin__InfluenzaA__ABB03112
  source 1..1701: mol_type = other RNA
atgaagactatcattgctttgagctacattctatgtctggttttcgctcaaaagcttcccggaaatgacaacagcacggcaacgctgtgccttgggcaccatgcagtaccaaacggaacgatagtgaaaacaatcacgaatgaccaaattgaagttactaatgctactgagctggttcagagttcctcaacaggtggaatatgcgacagtcctcatcagatccttgatggagaaaactgcacactaatagatgctctattgggagaccctcagtgtgatggcttccaaaataagaaatgggacctttttgttgaacgcagcaaagcctacagcaactgttacccttatgatgtgccggattatgcctcccttaggtcactagttgcctcatccggcacactggagtttaacaatgaaagcttcaattggactggagtcactcagaatggaacaagctctgcttgcaaaaggagatctaataaaagtttctttagtagattgaattggttgacccacttaaaatacaaatacccagcattgaacgtgactatgccaaacaatgaaaaatttgacaaattgtacatttggggggttcaccacccgggtacggacagtgaccaaatcagcctatatgctcaagcatcaggaagaatcacagtctctaccaaaagaagccaacaaactgtaatcccgaatatcggatctagacccagggtaagggatgtctccagcagaataagcatctattggacaatagtaaaaccgggagacatacttttgattaacagcacagggaatctaattgctcctcggggttacttcaaaatacgaagtgggaaaagctcaataatgagatcagatgcacccattggcaaatgcaattctgaatgcatcactccaaatggaagcattcccaatgacaaaccatttcaaaatgtaaacaagatcacatatggggcctgtcccagatatgttaagcaaaacactctgaaattggcaacagggatgcgaaatgtaccagagaaacaaactagaggcatatttggcgcaatcgcgggtttcatagaaaatggttgggagggaatggtggacggttggtacggtttcaggcatcaaaattctgagggcacaggacaagcagcagatctcaaaagcactcaagcagcaatcaaccaaatcaatgggaaactgaataggttaatcgggaaaacaaacgagaaattccatcagattgaaaaagaattctcagaagtagaagggagaattcaggacctcgagaaatatgttgaggacactaaaatagatctctggtcatacaacgcggagcttcttgttgccctggagaaccaacatacaattgatctaactgactcagaaatgaacaaactgtttgaaagaacaaagaagcaactgagggaaaatgctgaggatatgggcaatggttgtttcaaaatataccacaaatgtgacaatacctgcatagagtcaatcagaaatggaacttatgaccatgatgtatacagagatgaagcattaaacaaccggttccagatcaaaggtgttgagctgaagtcaggatacaaagattggattctatggatttcctttgccatatcatgttttttgctttgtgttgctttgttggggttcatcatgtgggcctgccaaaaaggcaacattaggtgcaacatttgcatttga

SEQ ID NO: 30896 - RNA, 1698 nt, synthetic construct
  misc_feature 1..1698: note = hemagglutinin__InfluenzaA__ABB03123
  source 1..1698: mol_type = other RNA
atgaaagtaaaactactggttctgttatgtacatttacagctacatatgcagacacaatatgtatagggtaccatgccaacaactcaaccgacactgttgacacagtacttgagaagaatgtgacagtgacacactttgtcaacctacttgaggacagtcacaatggaaaactatgtctactaaaaggaatagccccactacaattgggtaattgcagcgttgccggatggatcttaggaaacccagaatgcgaattactgatttccaaggaatcatggtcctacattgtagaaacaccaaatcctgagaatggaacatgttacccagggtatttcgccgactatgaggaactgagggagcaattgagttcagtatcttcatttgagaggttcgaaatattccccaaagagagctcatggcccaaccacaccgtaaccggagtatcagcatcatgctcccataacgggaaaagcagtttttacagaaatttgctatggctgacggggaagaatggtttgtacccaaacctgagcaagtcctatgcaaacaacaaagagaaagaagtccttgtactatggggtgttcatcacccgcctaacataggggaccaaagggccctctatcatacagaaaatgcttatgtctctgtagtgtcttcacattatagcagaagattcaccccagaaatagccaaaagacccaaggtgagagatcaggaaggaagaatcaactactactggactctgctggaacccggggatacaataatatttgaggcaaatggaaatctaatagcgccaaggtatgctttcgcactgagtagaggctttggatcaggaatcatcacctcaaatgcaccaatggatgaatgtgatgcgaagtgtcaaacacctcagggagctataaacagcagtcttcctttccagaatgtacacccagtcacaataggagagtgtccaaagtatgtcaggagtgcaaaattaaggatggttacaggactaaggaacatcccatccattcaatccagaggtttgtttggagccattgccggtttcattgaaggggggtggactggaatggtagatggttggtatggttatcatcatcagaatgagcaaggatctgggtatgctgcagatcaaaaaagcacacaaaatgccattaacgggattacaaacaaggtgaattctgtaattgagaaaatgaacactcaattcacagctgtgggcaaagaattcaacaaattggaaagaaggatggaaaacttaaataaaaaagttgatgatgggtttctagacatttggacatataatgcagaattgttggttctactggaaaatgaaaggactttggatttccatgactccaacgtgaagaatctgtatgagaaagtaaaaagccaattaaagaataatgccaaagaaataggaaacgggtgttttgaattctatcacaagtgtaacgatgaatgcatggagagtgtgaaaaatggaacttatgactatccaaaatattccgaagaatcaaagttaaacagagagaaaattgatggagtgaaattggaatcaatgggagtctatcagattctggcgatctactcaacagtcgccagttccctggttcttttggtctccctgggggcaatcagcttctggatgtgttccaatgggtctttgcagtgtagaatatgcatctaa

SEQ ID NO: 30897 - RNA, 1698 nt, synthetic construct
  misc_feature 1..1698: note = hemagglutinin__InfluenzaA__ABB03134
  source 1..1698: mol_type = other RNA
atgaaagtaaaactactgatcctgttatgtacatttacagctacatatgcagacacaatatgtataggctaccatgccaacaactcaaccgacactgttgacacagtacttgagaagaatgtgacagtgacacactctgtcaacctacttgaggacagtcacaatggaaaactatgtctactaaaaggaatagcccccctacaattgggtaattgcagcgttgccggatggatcttaggaaacccagaatgcgaattactgatttccaaggaatcatggtcctacattgtagaaacaccaaatcctgagaatggaacatgttacccagggtatttcgccgactatgaggagctaagggagcaattgagttcagtatcttcatttgagagattcgaaatattccccaaagaaagctcatggcccaaccacaccgtaaccggagtatcagcatcatgctcccataatgggaaaagcagtttttacagaaatttgctatggctgacggagaagaatggtttgtacccaaccctgagcaagtcctatgcaaacaacaaagagaaagaagtccttatactatggggtgttcatcacccgcctaacataggggaccaaaggaccctctatcatacagaaaatgcttatgtctctgtagtgtcttcacattatagcagaagattcaccccagaaataaccaaaaggcccaaagtaagagatcaggaaggaagaatcaactactactggactctgctggaacccggggatacaataatatttgaggcaaatggaaatctaatagcgccatggtatgctttcgcactgagtagaggctttggatcaggaatcatcacctcaaatgcaccaatggatgaatgtgatgcgaagtgtcaaacacctcagggagctataaacagcagtcttcctttccagaatgtacacccagtcacaataggagagtgtccaaagtatgtcaggagtgcaaaattaaggatggttacaggactaaggaacatcccatccattcaatccagaggtttgtttggagccattgccggtttcattgaaggggggtggactggaatggtagacgggtggtatggttatcatcatcagaatgagcaaggatctggctatgctgcagatcaaaaaagcacacaaaacgccattaacgggattacaaacaaggtgaattctgtaattgagaaaatgaacactcaattcacagctgtgggcaaagaattcaacaaattggaaagaaggatggaaaacttaaataaaaaagttgatgatgggtttctagacatttggacatataatgcagaattgttggttctactggaaaatgaaaggactttggatttccacgactccaatgtgaagaatctgtatgagaaagtaaaaagccaattaaagaataatgccaaagaaataggaaatgggtgttttgaattctatcacaagtgtaacaatgaatgcatggagagtgtgaaaaatggaacttatgactatccaaaatattccgaagaatcaaagttaaacagggaaaaaatcgatggagtgaaattggaatcaatgggagtctatcagattctggcgatctactcaactgtcgccagttccctggttcttttggtctccctgggggcaatcagcttctggatgtgttccaatgggtctttgcagtgtagaatatgcatctga

SEQ ID NO: 30898 - RNA, 1698 nt, synthetic construct
  misc_feature 1..1698: note = hemagglutinin__InfluenzaA__ABB03145
  source 1..1698: mol_type = other RNA
atgaaagtgaaactactggttctgttatgtacatttacagctacatatgcagacacaatatgtataggctaccatgccaacaactcaaccgacactgttgacacagtacttgagaagaatgtgacagtgacacactctgtcaacctacttgaggacagtcacaatggaaaactatgtctactaaaaggaatagccccactacaattgggtaattgcagcgttgccggatggatcttaggaaacccagaatgcgaattactgatttccaaggaatcatggtcctacattgtagaaacaccaaatcctgagaatggaacatgttacccagggtatttcgccgactatgaggaactgagggagcaattgagttcagtatcttcatttgagaggttcgaaatattccccaaagagagctcatggcccaaccacaccgtaaccggagtatcagcatcatgctcccataacgggaaaagcagtttttacagaaatttgctatggctgacggggaagaatggtttgtacccaaacctgagcaagtcctatgcaaacaacaaagagaaagaagtccttgtactatggggtgttcaccacccgcctaacataggggaccaaagggccctctatcatacagaaaatgcttatgtctctgtagtgtcttcacattatagcagaagattcaccccagaaatagccaaaagacccaaggtgagagatcaggaaggaagaatcaactactactggactctgctggaacccggggatacaataatatttgaggcaaatggaaatctaatagcgccaaggtatgctttcgcactgagtagaggctttggatcaggaatcatcacctcaaatgcaccaatggatgaatgtgatgcgaagtgtcaaacacctcagggagctataaacagcagtcttcctttccagaatgtacacccagtcacaataggagagtgtccaaagtatgtcaggagtgcaaaattaaggatggttacaggactaaggaacatcccatccattcaatccagaggtttgtttggagccattgccggtttcattgaaggggggtggactggaatggtggatggttggtatggttatcatcatcagaatgagcaaggatctgggtatgctgcagatcaaaaaagcacacaaaatgccattaacgggattacaaacaaggtgaattctgtaattgagaaaatgaacactcaattcacagctgtgggcaaagaattcaacaaattggaaagaaggatggaaaacttaaataaaaaagttgatgatgggtttctagacatttggacatataatgcagaattgttggttctactggaaaatgaaaggactttggatttccatgactccaacgtgaagaatctgtatgagaaagtaaaaagccaattaaagaataatgccaaagaaataggaaacgggtgttttgaattctatcacaagtgtaacgatgaatgcatggagagtgtgaaaaatggaacttatgactatccaaaatattccgaagaatcaaagttaaacagggagaaaattgatggagtgaaattggaatcaatgggagtctatcagattctggcgatctactcaacagtcgccagttccctggttcttttggtctccctgggggcaatcagcttctggatgtgttccaatgggtctttgcagtgtagaatatgcatctaa

SEQ ID NO: 30899 - RNA, 1701 nt, synthetic construct
  misc_feature 1..1701: note = hemagglutinin__InfluenzaA__ABB04283
  source 1..1701: mol_type = other RNA
atgaagactatcattgctttgagctacattttctgtctggttttcgcccaaaaccttcccggaaatgacaacagcacagcaacgctgtgcctgggacatcatgcagtgccaaacggaacgctagtgaaaacaatcacgaatgatcagattgaagtgactaatgctactgagctggttcagagttcctcaacaggtagaatatgcgacagtcctcaccgaatccttgatgggaaaaactgcacactgatagatgctctattgggagaccctcattgtgatggctttcaaaatgagaaatgggacctttttgttgaacgcagcaaagctttcagcaactgttacccttatgatgtgccagattatgcctcccttaggtcactagttgcctcgtcaggcaccctggagtttatcaatgaaggcttcaattggactggggtcactcagagtgggggaagctatgcttgcaaaaggggatctgataaaagtttcttcagtagactgaactggttgtacgaatcagaaagcaaatatccagcgctgaacgtgactatgccaaacaatggcaattttgacaaactgtacatttggggggttcatcacccgagcacggacaaagaacaaaccaacctatatgttcgagcatcagggagagtcacagtctctaccaagagaagccagcaaactataatcccgaatatcgggcctagaccctgggtaaggggcctgtctagtagaataagtatctattggacaatagtaaaaccgggagacatactgttaattaatagtagtgggaacctaattgctcctcggggttatttcaaaatacgcactggaaaaagctcaataatgaggtcagatgcacctattggcacctgcagttctgaatgcatcactccaaatggaagcattcccaatgacaagcccttccaaaacgtaaacaagatcacatatggggcatgtcccaagtatgttaagcaaaacactctgaaattggcaacagggatgcggaatataccagagaaacaaactagaggcatattcggcgcaatagcaggtttcatagaaaatggttgggagggaatggtagacggctggtacggtttcaggcatcaaaattctgagggcacaggacaagcagcagatcttaaaagcactcaagcagcaatcgaccaaatcaatgggaaactgaatagggtaatcgagaaaacgaacgagaaattccatcaaatcgaaaaggaattctcagaagtagaagggagaattcaggacctcgagaaatacgttgaagacactaaaatagatctctggtcttacaacgcggagcttcttgtcgctctggagaaccaacatacaattgatctgactgactcggaaatgaacaaactgtttgaaaaaacaaggaggcaactgagggaaaatgctgaggacatgggcaatggttgcttcaaaatataccacaaatgtgacaatgcttgcatagggtcaatcagaaatggaacttatgaccatgatgtatacagagacgaagcattaaacaaccggtttcagatcaaaggtgttgagctgaagtcaggatacaaagactggatcctgtggatttcctttgccatatcatgctttttgctttgtgttgttttgctggggttcatcatgtgggcctgccaaaaaggcaacattaggtgcaacatttgcatttga

SEQ ID NO: 30900 - RNA, 1701 nt, synthetic construct
  misc_feature 1..1701: note = hemagglutinin__InfluenzaA__ABB04294
  source 1..1701: mol_type = other RNA
atgaagactatcattgctttgagctacattttctgtctggttctcggccaagaccttccagggaatgacaacagcacagcaacgctgtgcctgggacatcatgcggtgccaaacggaacgctagtgaaaacaatcacgaatgatcagattgaagtgactaatgctactgagctggttcagagttcctcaacgggtaaaatatgcaacaatcctcatcgaatccttgatggaataaactgcacactgatagatgctctattgggggaccctcattgtgatggctttcaaaatgagaaatgggaccttttcgttgaacgcagcaaagctttcagcaactgttacccttatgatgtgccagattatgcctcccttaggtcactagttgcctcgtcaggcactctggagtttatcaatgaaggcttcaattggactggggtcactcagaatgggggaagcaatgcttgcaaaaggggacctgatagcggttttttcagtagactgaactggttgtacaaatcaggaagcacatatccagtgctgaacgtgactatgccaaacaatgacaattttgacaaactatacatttggggggttcaccacccgagcacggaccaagaacaaaccaacctatatgttcaagcatcagggagagtcacagtctccaccaagagaagccagcaaactataatcccgaatatcgggtctagaccctgggtaaggggtctgtctagtagaataagcatctattggacaatagttaaaccgggagacatactggtaattaatagtaatgggaacctaattgctcctcggggttacttcaaaatgcgcactgggaaaagctcaataatgaggtcagatgcacctattggcacctgcatttctgaatgcatcactccaaatggaagcattcccaatgacaagccctttcaaaacgtaaacaagatcacatatggggcatgtcccaagtatgttaagcaaaacactctgaagttggcaacaggaatgcggaatgtaccagagaaacaaactagaggcatattcggcgcaatagcaggtttcatagaaaatggttgggagggaatgatagacggttggtacggtttcaggcatcaaaattctgagggcacaggacaagcagcagatcttaaaagcactcaagcagccatcgaccaaatcaatgggaaactgaatagggtaatcgagaagacgaacgagaaattccatcaaatcgaaaaggaattctcagaagtagaagggagaattcaggacctcgagaaatatgttgaagacactaaaatagatctctggtcttacaatgcggagcttcttgtcgctctggagaaccaacatacaattgatctgactgactcggaaatgaacaaactgtttgaaaaaacaaggaggcaactgagggaaaatgctgaggacatgggcaatggttgcttcaaaatataccacaaatgtgacaatgcttgcatagggtcaatcagaaatgggacttatgaccatgatgtatacagagacgaagcattaaacaaccggtttcagatcaaaggtgttgaactgaagtcaggatacaaagactggatcctgtggatttcctttgccatatcatgctttttgctttgtgttgttttgctggggttcatcatgtgggcctgccagaaaggcaacattaggtgcaacatttgcatttga

SEQ ID NO: 30901 - RNA, 1701 nt, synthetic construct
  misc_feature 1..1701: note = hemagglutinin__InfluenzaA__ABB04305
  source 1..1701: mol_type = other RNA
atgaagactatcattgctttgagctacattttctgtctggttttcgcccaaaaacttcccgaaaatgacaacagcacagcaacgctgtgcttgggacatcatgcagtgccaaacggaacgctagtgaaaacaatcacgaatgatcagattgaagtgactaatgctactgagctggttcagagttcctcaacaggtagaatatgcgacagtcctcaccgaatccttgatgggaaaaactgcacactgatagatgctctattgggagaccctcattgtgatggcttccaaaatgagaaatgggacctttttgttgaacgcagcaaagctttcagcaactgttacccttatgatgtgccggattatgcctcccttaggtcactagttgcctcatcaggcaccctggagtttatcaatgaaggcttcaattggactggagtcactcagagtgggggaagctatgcttgcaaaaggggatctgttaacagtttcttcagtagattgaattggttgtacaaatcagaaagcaaatatccagtgctgaacgtgactatgccaaataatggcaaatttgacaaattgtacatttggggggttcaccacccgagcacggacaaagaacaaaccaacctatatgttcgagcatcagggaaagtcacagtctctaccaagagaagccagcaaactgtaatcccgaatatcgggtctagaccctgggtaaggggtctgtctagtagaataagtatctattggacaatagtaaaaccgggagacatactgttaattaatagcactggaaacctaattgctcctcggggttacttcaaaatacgcactgggaaaagctcaataatgaggtcagatgcacctattggcacctgcagttctgaatgcatcactccaaatggaagcattcccaatgacaaaccctttcaaaatgtaaacaagatcacatatggagcatgtcccaggtatgttaagcaaaacactctgaagttggcaacagggatgcggaatgtaccagagaaacaaactagaggcatattcggcgcaatagcaggtttcatagaaaatggttgggagggaatggtagacggttggtacggtttcaggcatcaaaattctgagggcacaggacaagcagcagatcttaaaagcactcaagcagcaatcgaccaaatcaacgggaaactgaacaggttaatcgagaaaacgaacgagaagttccatcaaatcgaaaaggaattctcagaagtagaagggagaattcaggacctcgagaaatatgttgaagacactaaaatagatctctggtcttacaacgcggagcttcttgtcgccctggagaaccaacatacaattgatctgactgattcagaaatgaacaaactgtttgaaaaaacaaggaaacaactgagggaaaatgctgaggacatgggcaatggttgcttcaaaatataccacaaatgtgacaatgcttgcatagggtcaatcagaaatggaacttatgaccatgatgtatacagagacgaagcattaaacaaccggtttcagatcaaaggtgttgagctgaagtcaggatacaaagactggatcctatggatttcctttgccatatcatgctttttgctttgtgttgttttgctggggttcatcatgtgggcctgccaaaaaggcaacattaggtgcaacatttgcatttga

SEQ ID NO: 30902 - RNA, 1701 nt, synthetic construct
  misc_feature 1..1701: note = hemagglutinin__InfluenzaA__ABB04316
  source 1..1701: mol_type = other RNA
atgaagactatcattgctttgagctacattttctgtctggttttcgcccaaaaacttcccggaaatgacaacagcacagcaacgctgtgcctgggacatcatgcagtgccaaacggaacgctagtgaaaacaatcacgaatgatcagattgaagtgactaatgctactgagctggttcagagttcctcaacaggtagaatatgcgacagtcctcaccgaatccttgatgggaaaaactgcacattgatagatgctctattgggagaccctcattgtgatggcttccaaaatgagaaatgggacctttttgttgaacgcagcaaagcttacagcaactgttacccttatgatgtgccggattatgcttcccttagatcactagttgcctcatcaggcaccctggagtttatcaatgaagacttcaattggactggagtcactcagagtgggggaagctatgcttgcaaaaggggatctgttaaaagtttcttcagtagattgaattggttgcacgaatcagaatacaaatatccagcgctgaacgtgactatgccaaacaatggcaaatttgacaaattgtacatttggggggttcaccacccgagcacggacagagaacaaaccaacctatatgttcgagcatcagggagagtcacagtctctaccaagagaagccagcaaactgtaatcccgaatatcgggtctagaccctgggtaaggggcctgtccagtagaataagcatctattggacaatagtaaaaccgggagacatactgttgattaatagcaccgggaacctaattgctcctcggggttacttcaaaatacgcactgggaaaagctcaataatgaggtcagatgcacctattggcacctgcagttctgaatgcatcactccaaatggaagcattcccaatgacaaaccctttcaaaatgtaaacaagatcacatatggggcatgtcccaggtatgttaagcaaaacactctgaaattggcaacagggatgcggaatgtaccagagaaacaaactagaggcatattcggcgcaatagcaggtttcatcgaaaatggttgggagggaatggtagacggttggtacggtttcaggcatcaaaattctgaaggcacaggacaagcagcagatcttaaaagcactcaagcagcaatcgaccaaatcaacgggaaactgaataggttaatcgagaaaacgaacgagaaattccatcaaatcgaaaaggaattctcagaagtagaagggagaattcaggacctcgagaaatatgttgaagacactaaaatagatctctggtcttacaacgcggagcttcttgtcgccctggagaaccaacatacaattgatctgactgactcagaaatgaacaaactgtttgaaaaaacaaggaagcaactgagggaaaatgctgaggacatgggcaatggttgcttcaagatataccacaaatgtgacaatgcctgcatagggtcaatcagaaatggaacttatgaccatgatgtatacagagacgaagcattaaacaaccggttccagatcaaaggtgttgagctgaagtcaggatacaaaaactggatcctatggatttcctttgccatatcatgctttttgctttgtgttgttttgctggggttcatcatgtgggcctgccaaaaaggcaacattaggtgcaacatttgcatttga

SEQ ID NO: 30903 - RNA, 1701 nt, synthetic construct
  misc_feature 1..1701: note = hemagglutinin__InfluenzaA__ABB04327
  source 1..1701: mol_type = other RNA
atgaagactatcattgctttgagctacattttctgtctggttttcgcccaaaaacttcccggaaatgacaacagcacagcaacgctgtgcctgggacatcatgcagtgccaaacggaacgctagtgaaaacaatcacgaatgatcagattgaagtgactaatgctactgagctggttcagagttcctcaacaggtagaatatgcgacagtcctcaccgaatccttgatggaaaaaactgcacactgatagatgctctattgggagaccctcattgtgatggcttccaaaatgagaaatgggacctttttgttgaacgcagcaaagctttcagcaactgttacccttatgatgtgccggattatgcctcccttaggtcactagttgcctcatcaggcaccctggagtttatcaatgaaggcttcaattggactggagtcactcagagcgggggaagctatgcttgcaaaaggggatctgttaacagtttcttcagtagattgaattggttgtacaaatcagaatacaaatatccagcgctgaacgtgactatgccaaacaatggcaaatttgacaaattgtacatttggggggttcaccacccgagcacggaaaaagaacaaaccaacctatatgttcgagcatcagggagagtcacagtctctaccaagagaagccagcaaactgtaatcccgaatatcgggtctataccctgggtaaggggtctgtccagtagaataagcatctattggacaatagtaaaaccgggagacatactgttgattaatagcactgggaacctaattgctcctcggggttacttcaaaatacgcactgggaaaagctcaataatgaggtcagatgcacctattggcacctgcagttctgaatgcatcactccaaatggaagcattcccaatgacaaaccctttcaaaatgtaaacaagatcacatatggggcatgtcccaggtatgttaagcaaaacactctgaaattggcaacagggatgcggaatgtaccagagaaacaaactagaggcatattcggcgcaatagcaggtttcatagaaaatggttgggagggaatggtagacggttggtacggtttcaggcatcaaaattctgagggcacaggacaagcagcagatcttaaaagcactcaagcagcaatcgaccaaatcaacgggaaactgaataggttaatcgagaaaacgaacgagaaattccatcaaatcgaaaaggaattctcagaagtagaagggagaattcaggacctcgagaaatatgttgaagacactaaaatagatctctggtcttacaacgcggagcttcttgtcgccctggagaaccaacatacaattgatctgactgactcagaaatgaacaaactgtttgaaaaaacaaggaagcaactgagggaaaatgctgaggacatgggcaatggttgcttcaaaatataccacaaatgtgacaatgcttgcatagggtcaatcagaaatggaacttatgaccatgatgtatacagagacgaagcattaaacaaccggtttcagatcaaaggtgttgagctgaagtcaggatacaaagactggatcctatggatttcctttgccatatcatgctttttgctttgtgttgttttgctggggttcatcatgtgggcctgccaaaaaggcaacattaggtgcaacatttgcatttga

SEQ ID NO: 30904 - RNA, 1701 nt, synthetic construct
  misc_feature 1..1701: note = hemagglutinin__InfluenzaA__ABB04338
  source 1..1701: mol_type = other RNA
atgaagactatcattgctttgagctacattttctgtctggttctcggccaagactttccaggaaatgacaacagcacagcaacgctgtgcctgggacatcatgcggtgccaaacggaacactagtgaaaacaatcacaaatgatcagattgaagtgactaatgctactgagctggttcagagttcctcaacggggaaaatatgcaacaatcctcatcgaatccttgatggaatagactgcacactgatagatgctctattgggggaccctcattgtgatggctttcaaaatgagacatgggaccttttcgttgaacgcagcaaagctttcagcaactgttacccttatgatgtgccagattatgcctcccttaggtcactagttgcctcgtcaggcactctggagtttatcaatgaaggcttcacttggactggggtcactcagaatgggggaagcaatgcttgcaaaaggggacctgatagcggttttttcagtagactgaactggttgtacaaatcaggaagcacatatccagtgctgaacgtgactatgccaaacaatgacaattttgacaaactatacatttggggggttcaccacccgagcacggaccaagaacaaaccagcctatatgttcaagcatcagggagagtcacagtctctaccaagagaagccagcaaactataatcccgaatatcgggtctagaccctgggtaaggggtctgtctagtagaataagcatctattggacaatagttaaaccaggagacatactggtacttaatagtaatgggaacctaattgctcctcggggttatttcaaaatgcgcactgggaaaagctcaataatgaggtcagatgcacctattggcacctgcatttctgaatgcatcactccaaatggaagcattcccaatgacaagccctttcaaaacgtaaacaagatcacatatggggcatgtcccaagtatgttaagcaaaacaccctgaagttggcaacagggatgcggaatgtaccagagaaacaaactagaggcctattcggcgcaatagcaggtttcatagaaaatggttgggagggaatgatagacggttggtacggtttcaggcatcaaaattctgagggcacaggacaagcagcagatcttaaaagcactcaagcagccatcgaccaaatcaatgggaaactgaatagggtaatcgagaagacgaacgagaaattccatcaaatcgaaaaggaattctcagaagtagaagggagaattcaggacctcgaaaaatacgttgaagacactaaaatagatctctggtcttacaatgcggagcttcttgtcgctctggagaaccaacatacaattgatctgactgactcggaaatgaacaaactgtttgaaaaaacaaggaggcaactgagggaaaatgctgaggacatgggcaatggttgcttcaaaatataccacaaatgtgacaatgcttgcatagggtcaatcagaaatgggacttatgaccatgatgtatacagagacgaagcattaaacaaccggtttcagatcaaaggtgttgaactgaagtcaggatacaaagactggatcctgtggatttcctttgccatatcatgctttttgctttgtgttgttttactggggttcatcatgtgggcctgccagaaaggcaacattaggtgcaacatttgcatttga

SEQ ID NO: 30905 - RNA, 1701 nt, synthetic construct
  misc_feature 1..1701: note = hemagglutinin__InfluenzaA__ABB04349
  source 1..1701: mol_type = other RNA
atgaagactatcattgctttgagctacattttctgtctggttttcgcccaaaaacttcccggaaatgacaacagcacagcaacgctgtgcttgggacatcatgcagtgccaaacggaacgctagtgaaaacaatcacgaatgatcagattgaagtgactaatgctactgagctggttcagagttcctcaacaggtagaatatgcgacagtcctcaccgaatccttgatgggaaaaactgcacactgatagatgctctattgggagaccctcattgtgatggcttccaaaatgagaaatgggacctttttgttgaacgcagcaaagctttcagcaactgttacccttatgatgtgccggattatgcctcccttaggtcactagttgcctcatcaggcaccttggagtttatcaatgaaggcttcaattggactggagtcactcagagtgggggaagctatgcttgcaaaaggggatctgttaacagtttcttcagtagattgaattggttgtacaaatcagaaagcaaatatccagtgctgaacgtgactatgccaaataatggcaaatttgacaaattgtacatttggggggttcaccacccgagcacggacaaagaacaaaccaacctatatgttcgagcatcagggaaagtcacagtctctaccaagagaagccagcaaactgtaatcccgaatatcgggtctagaccctgggtaaggggtctgtctagtagaataagtatctattggacaatagtaaaaccgggagacatactgttaattaatagcactggaaacctaattgctcctcggggttacttcaaaatacgcactgggaaaagctcaataatgaggtcagatgcacctattggcacctgcaattctgaatgcatcactccaaatggaagcattcccaatgacaaaccctttcaaaatgtaaacaagatcacatatggagcatgtcccaggtatgttaagcaaaacactctgaagttggcaacagggatgcggaatgtaccagagaaacaaactagaggcatattcggcgcaatagcaggtttcatagaaaatggttgggagggaatggtagacggttggtacggtttcaggcatcaaaattctgagggcacaggacaagcagcagatcttaaaagcactcaagcagcaatcgaccaaatcaacgggaaactgaacaggttaatcgagaaaacgaacgagaaattccatcaaatcgaaaaggaattctcagaagtagaagggagaattcaggacctcgagaaatatgttgaagacactaaaatagatctctggtcttacaacgcggagcttcttgtcgccctggagaaccaacatacaattgatctgactgattcagaaatgaacaaactgtttgaaaaaacaaggaaacaactgagggaaaatgctgaggacatgggcaatggttgcttcaaaatataccacaaatgtgacaatgcttgcatagggtcaatcagaaatggaacttatgaccatgatgtatacagagacgaagcattaaacaaccggtttcagatcaaaggtgttgagctgaagtcaggatacaaagactggatcctatggatttcctttgccatatcatgctttttgctttgtgttgttttgctggggttcatcatgtgggcctgccaaaaaggcaacattaggtgcaacatttgcatttga

SEQ ID NO: 30906 - RNA, 1701 nt, synthetic construct
  misc_feature 1..1701: note = hemagglutinin__InfluenzaA__ABB04360
  source 1..1701: mol_type = other RNA
atgaagactatcattgctttgagctacattttctgtctggttttcgcccaaaaacttcccggaaatgacaacagcacagcaacgctgtgcctgggacatcatgcagtgccaaacggaacgctagtgaaaacaatcacgaatgatcagattgaagtgactaatgctactgagctggttcagagttcctcaacaggtagaatatgcgacagtcctcaccgaatccttgatggaaaaaactgcacactgatagatgctctattgggagaccctcattgtgatggcttccaaaatgagaaatgggacctttttgttgaacgcagcaaagcttacagcaactgttacccttatgatgtgccggattatgcctcccttaggtcactagttgcctcatcaggcaccctggagtttatcaatgaagacttcaattggactggagtcactcagagtgggggaagctatgcttgcaaaaggggatctgttaacagtttcttcagtagattgaattggttgcacaaatcagaatacaaatatccagcgctgaacgtgactatgccaaacaatggcaaatttgacaaattgtacatttggggggttcaccacccgagcacggacagagaacaaaccaacctatatgttcgagcatcagggagagtcacagtctctaccaagagaagccagcaaactgtaatcccgaatatcgggtctagaccctgggtaaggggtctgtccagtagaataagcatctattggacaatagtaaaaccgggagacatactgttgattaatagcaccgggaacctaattgctcctcggggttacttcaaaatacgcactgggaaaagctcaataatgaggtcagatgcacctattggcacctgcagctctgaatgcatcactccaaatggaagcattcccaatgacaaaccctttcaaaatgtaaacaagatcacatatggggcatgtcccaggtatgttaagcaaaacactctgaaattggcaacagggatgcggaatgtaccagagaaacaaactagaggcatattcggcgcaatagcaggtttcatagaaaatggttgggagggaatggtagacggttggtacggtttcaggcatcaaaattctgagggcacaggacaagcagcagatcttaaaagcactcaagcagcaatcgaccaaatcaacgggaaactaaataggttaatcgagaaaacgaacgagaaattccatcaaatcgaaaaggaattctcagaagtagaagggagaattcaggacctcgagaaatatgttgaagacactaaaatagatctctggtcttacaacgcggagcttcttgtcgccctggagaaccaacatacaattgatctgactgactcagaaatgaacaaactgtttgaaaaaacaaggaagcaactgagggaaaatgctgaggacatgggcaatggttgcttcaagatataccacaaatgtgacaatgcctgcatagggtcaatcagaaatggaacttatgaccatgatgtatacagagacgaagcattaaacaaccggttccagatcaaaggtgttgagctgaagtcaggatacaaagactggatcttatggatttcctttgccatatcatgctttttgctttgtgttgttttgctggggttcatcatgtgggcctgccaaaaaggcaacattaggtgcaacatttgcatttga

SEQ ID NO: 30907 - RNA, 1701 nt, synthetic construct
  misc_feature 1..1701: note = hemagglutinin__InfluenzaA__ABB04371
  source 1..1701: mol_type = other RNA
atgaagaccatcattgctttgagctacattttctatctggctctcggccaagaccttccaggaaatgacaacagcaaagcaacgctgtgcctgggacatcatgcggtgccaaacggaacactagtgaaaacaatcacagatgatcagactgaagtgactaatgctactgagctagttcagagctcctcaacggggaaaatatgcaacaatcctcatcgaatccttgatggaatggactgcacactgatagatgctctattgggggaccctcattgtgatgtttttcaaaatgagacatgggaccttttcgttgaacgcagcaaagctttcagcaactgttacccttatgatgtgccagattatgcctcccttagatcactagttgcctcgtcaggcactatggagtttatcactgagggtttcacttggactgaggtcactcagaatgggggaagcaatgcttgcaaaaggggacctgatagcggttttttcagtagactgaactggttgaccaaatcaggaagaacatatccagtgctgaacgtgactatgccaaacaatgacaattttgacaaactatacatttggggggttcaccacccgagcacggaccaagaacaaaccaacctgtatgttcaaacatcagggagagtcacagtctctaccaggagaagccagcaaactataatcccgaatatcggatccagaccctgggtaaggggtctgtctagtagaataagcatctattggacaatagttaagccgggagacgtactggtaattaatagtaatgggaacctaatcgctcctcggggttatttcaaaatgcgcactgggaaaagctcaataatgaggtcagatgcacctattgatacctgtatttctgaatgcatcactccaaatggaagcattcccaatgataaaccctttcaaaacgtaaacaagatcacatatggagcatgccccaaatatgttaagcaaaacaccctgaagttggcaacaggaatgcggaatgtaccagagaaacagactagaggcctattcggcgcaatagcaggcttcatagaaaatggttgggagggaatgatagacggttggtacggtttcaggcatcaaaattctgagggcacaggacaagcagcagatcttaaaagcactcaagcagccattgaccaaatcaatgggaaattgaacaggataatcgagaagacgaacgagaaattccatcaaatagaaaaggaattctcagaagtagaagggagaattcaggacctcgagaaatacgttgaagacactaaaatagatctatggtcttacaatgcagagcttcttgttgctctggagaatcaacatacaattgatctgactgactcggaaatgaacaaactgtttgaaaaaacaagaaggcaactgagggaaaatgctgaagacatgggcaatggttgcttcaaaatataccacaaatgtgacaacgcttgcatagagtcaatcagaaatgggacttatgaccatgatgtatacagagacgaagcattaaacaacaggtttcaaatcaaaggtgttgaactgaagtctggatacaaagactggatcctgtggatttcctttgccatatcatgctttttgctttgtgttgttttgctggggttcatcatgtgggcctgccagagaggcaacattaggtgcaacatttgcatttga

SEQ ID NO: 30908 - RNA, 1701 nt, synthetic construct
  misc_feature 1..1701: note = hemagglutinin__InfluenzaA__ABB04906
  source 1..1701: mol_type = other RNA
atgaagactatcattgctttgagctacattttatgtctggttttcgcccaaaaacttcccggaaatgacaacagcacagcaacgctgtgcctggggcatcatgcagtgccaaacggaactctagtgaaaacaatcacgaatgatcaaattgaagtgactaatgctactgagctggttcagagttcctcaacaggtagaatatgcgacagtcctcaccgaatcctcgatggaaaaaactgcacactgatagatgctctattgggagaccctcattgtgatggcttccaaaataaggaatgggacctttttgttgaacgcagcaaagcttacagcaattgttacccttatgatgtgccagattatgcctcccttaggtcactagttgcctcatcaggcaccctggagtttatcaatgaagactttaattggactggagtcgctcagaatggggacagctatgcttgcaaaaggggatctgttaaaagtttctttagtagattgaattggttgcacaaatcagaatacaaatatccagcgctgaacgtgactatgccaaacaatgacaaatttgacaagttgtacatttggggggttcaccacccgagcacggacagagaacaaaccagcctatatattcgagcatcagggaaagtcacagtctctaccaaaagaagccaacaaactgtaatcccgaatatcgggtccagaccctgggtaaggggtctgtccagtagaataagcatctattggacaatagtaaaaccgggagacatacttttgattaatagcaccgggaatctaattgctcctcggggttacttcaaaatacggactgggaaaagctcgataatgaggtcagatgcacccattggcacctgcagttctgaatgcatcactccaaatggaagcatccccaatgacaaaccttttcaaaatgtaaacaggatcacatatggggcatgtcccagatatgttaagcaaaacactctgaaattggcaacagggatgcggaatgtaccagagaaacaaactagaggcatattcggcgcaattgcaggtttcatagaaaatggttgggagggaatggtagacggttggtacggtttcaggcatcaaaattctgaaggcacaggacaagcagcagatcttaaaagcactcaagcagcaatcgaccaaatcaacgggaaactgaataggttaatcgagaaaacgaacgagaaattccatcaaatcgaaaaggaattctcagaagtagaagggagaattcaggacctcgagaaatatgttgaagacactaaaatagatctctggtcttacaacgcggagcttcttgttgccctggagaaccaacatacaattgatctgactgactcagaaatgaacaaactgtttgaaaaaacaaggaagcaactgagggaaaatgctgaggacatgggcaatggttgcttcaaaatataccacaaatgtgacaatgcctgcatagggtcaatcagaaatggaacttatgaccatgatgtatacagagacgaagcattaaacaaccggttccagatcaaaggtgttgagctgaagtcaggatacaaagattggatcctatggatttcctttgccatatcatgctttttgctttgtgttgttttgctggggttcatcatgtgggcctgccaaaaaggcaacattaggtgcaacatttgcatttga

SEQ ID NO: 30909 - RNA, 1701 nt, synthetic construct
  misc_feature 1..1701: note = hemagglutinin__InfluenzaA__ABB04917
  source 1..1701: mol_type = other RNA
atgaagactatcattgctttgagctacattttctgtctggttttcgcccaaaaacttcccggaaatgacaacagcacagcaacgctgtgcttgggacatcatgcagtgccaaacggaacgctagtgaaaacaatcacgaatgatcagattgaagtgactaatgctactgagctggttcagatttcctcaacaggtagaatatgcgacagtcctcaccgaatccttgatgggaaaaactgcacactgatagatgctctattgggagaccctcattgtgatggcttccaaaatgagaaatgggacctttttgttgaacgcagcaaagctttcagcaactgttacccttatgatgtgccggattatgcctcccttaggtcactagttgcctcatcaggcaccctggagtttatcaatgaaggcttcaattggactggagtcactcagagtgggggaagctatacttgcaaaaggggatctgttaacagtttcttcagtagattgaattggttgtacgaatcagaaagcaaatatccagtgctgaacgtgactatgccaaacaatggcaaatttgacaaattgtacatttggggggttcaccacccgagcacggacaaagaacaaaccaacctatatgttcgagcatcagggagagtcacagtctctaccaagagaagccagcaaactgtaatcccgaatatcgggtctagaccctgggtaaggggtctgtctagtagaataagtatctattggacaatagtaaaaccgggagacatactgttaattaatagcactgggaacctaattgctcctcggggttacttcaaaatacgcactgggaaaagctcaataatgaggtcagatgcacctattggcacctgcagttctgaatgcatcactccaaatggaagtattcccaatgacaaaccctttcaaaatgtaaacaagatcacatatggggcatgtcccaggtatgttaagcaaaacactctgaagttggcaacagggatgcggaatgtaccagagaaacaaactagaggcatattcggcgcaatagcaggtttcatagaaaatggttgggagggaatggtagacggttggtacggtttcaggcatcaaaattctgagggcacaggacaagcagcagatcttaaaagcactcaagcagcaatcgaccaaatcaacgggaaactgaataggttaatcgagaaaacgaacgagaaattccatcaaatcgaaaaggaattctcagaagtagaagggagaattcaggacctcgagaaatatgttgaagacactaaaatagatctctggtcttacaacgcggagcttcttgtcgccctggagaaccaacatacaattgatctgactgattcagaaatgaacaaactgtttgaaaaaacaaggaagcaactgagggaaaatgctgaggacatgggcaatggttgcttcaaaatataccacaaatgtgacaatgcttgcatagggtcaatcagaaatggaacttatgaccatgatgtatacagagacgaagcattaaacaaccggtttcagatcaaaggtgttgagctgaagtcaggatacaaagactggatcctatggatttcctttgccatatcatgctttttgctttgtgttgttttgctggggttcatcatgtgggcctgccaaaaaggcaacattaggtgcaacatttgcatttga

SEQ ID NO: 30910 - RNA, 1701 nt, synthetic construct
  misc_feature 1..1701: note = hemagglutinin__InfluenzaA__ABB04928
  source 1..1701: mol_type = other RNA
atgaagactatcattgctttgagctacattttctgtctggttttcgcccaagaccttccaggaaatgacaacagcacagcaacgctgtgcctgggacatcatgcggtgccaaacggaacgctagtgaaaacaatcacgaatgatcagattgaagtgactaatgctactgagctggttcagagttcctcaacgggtaaaatatgcaacaatcctcatcgaatccttgatggaataaactgcacactgatagatgctctattgggggaccctcattgtgatggctttcaaaatgagaaatgggaccttttcgttgaacgcagcaaagctttcagcaactgttacccttatgatgtgccagattatgcctcccttaggtcactagttgcctcgtcaggcactctggagtttatcaatgaaggcttcaattggattggggtcactcagaatgggggaagcaatgcttgcaaaaggggaactgatagcggttttttcagtagactgaactggttgtacaaatcaggaagcacatatccagtgcagaacgtgaccatgccaaacaatgacaattctgacaaactatacatttggggggttcaccacccgagcacggacaaagaacaaaccgatctatatgttcaagcatcagggaaagtcacagtctccaccaagagaagccagcaaactataatcccgaatgtcgggtctagaccctgggtaaggggtctgtctagtagaataagcatctattggacaatagttaaaccgggagacatactggtaattaatagtaatgggaacctaattgctcctcggggttacttcaaaatgcgcactgggaaaagctcaataatgaggtcagatgcacctattggcacctgcagctctgaatgcatcactccaaatggaagcattcccaatgacaagccctttcaaaacgtaaacaagatcacatatggggcatgtcccaagtatgttaagcaaaacactctgaagttggcaacagggatgcggaatgtaccagagaaacagactagaggcatattcggcgcaatagcaggtttcatagaaaatggttgggagggaatgatagacggttggtacggtttcaggcatcaaaattctgagggcacaggacaagcagcagatcttaaaagcactcaagcagccatcgaccaaatcaatgggaaactgaatagggtaatcgagaagacgaacgagaaattccatcaaatcgaaaaggaattctcagaagtagaagggagaattcaggacctcgagaaatacgttgaagacactaaaatagatctctggtcttacaatgcagagcttcttgtcgctctggagaaccaacatacaattgatctgactgactcggaaatgaacaaactgtttgaaaaaacaaggaggcaactgagggaaaatgctgaggacatgggcaatggttgcttcaaaatataccacaaatgtgacaatgcttgcatagggtcaatcagaaatgggacttatgaccatgatgtatacagagacgaagcattaaacaaccggtttcagatcaaaggtgttgaactgaagtcaggatacaaagactggatcctgtggatttcctttgccatatcatgctttttgctttgtgttgttttgctggggttcatcatgtgggcctgccagaaaggcaacattaggtgcaacatttgcatttga

SEQ ID NO: 30911 - RNA, 1701 nt, synthetic construct
  misc_feature 1..1701: note = hemagglutinin__InfluenzaA__ABB04939
  source 1..1701: mol_type = other RNA
atgaagactatcattgctttgagctacattttctgtctggttttcgcccaaaaacttcccggaaatgacaacagcacagcaacgctgtgcttgggacatcatgcagtgccaaacggaacgctagtgaaaacaatcacgaatgatcagattgaagtgactaatgctactgagctggttcagagttcctcaacaggtagaatatgcgacagtcctcaccgaatccttgatgggaaaaactgcacactgatagatgctctattgggagaccctcattgtgatggcttccaaaatgagaaatgggacctttttgttgaacgcagcaaagctttcagcaactgttacccttatgatgtgccggattatgcctcccttaggtcactagttgcctcatcaggcaccctggagtttatcaatgaaggcttcaattggactggagtcactcagagtgggggaagctatacttgcaaaaggggatctgttaacagtttcttcagtagattgaattggttgtacgaatcagaaagcaaatatccagtgctgaacgtgactatgccaaacaatggcaaatttgacaaattgtacatttggggggttcaccacccgagcacggacaaagaacaaaccaacctatatgttcgagcatcagggagagtcacagtctctaccaagagaagccagcaaactgtaatcccgaatatcgggtctagaccctgggtaaggggtctgtctagtagaataagtatctattggacaatagtaaaaccgggagacatactgttaattaatagcattgggaacctaattgctcctcggggttacttcaaaatacgcactgggaaaagctcaataatgaggtcagatgcacctattggcatctgcagttctgaatgcatcactccaaatggaagcattcccaatgacaaaccctttcaaaatgtaaacaagatcacatatggggcatgtcccaggtatgttaagcaaaacactctgaagttggcaacagggatgcggaatgtaccagagaaacaaactagaggcatattcggcgcaatagcaggtttcatagaaaatggttgggagggaatggtagacggttggtacggtttcaggcatcaaaattctgagggcacaggacaagcagcagatcttaaaagcactcaagcagcagtcgaccaaatcaacgggaaactgaataggttaatcgagaaaacgaacgagaaattccatcaaatcgaaaaggaattctcagaagtagaagggagaattcaggacctcgagaaatatgttgaagacactaaaatagatctctggtcttacaacgcggagcttcttgtcgccctggagaaccaacatacaattgatctgactgattcagaaatgaacaaactgtttgaaaaaacaaggaagcaactgagggaaaatgctgaggacatgggcaatggttgcttcaaaatataccacaaatgtgacaatgcttgcatagggtcaatcagaaatggaacttatgaccatgatgtatacagagacgaagcattaaacaaccggtttcagatcaaaggtgttgagctgaagtcaggatacaaagactggatcctatggatttcctttgccatatcatgctttttgctttgtgttgttttgctggggttcatcatgtgggcctgccaaaaaggcaacattaggtgcaacatttgcatttga

SEQ ID NO: 30912 - RNA, 1701 nt, synthetic construct
  misc_feature 1..1701: note = hemagglutinin__InfluenzaA__ABB04950
  source 1..1701: mol_type = other RNA
atgaagactatcattgctttgagctacattttctgtctggttttcgcccaaaaacttcccggaaatgacaacagcacagcaacgctgtgcttgggacatcatgcagtgccaaacggaacgctagtgaaaacaatcacgaatgatcagattgaggtgactaatgctactgagctggttcagagctcctcaacaggtagaatatgcgacagtcctcaccgaatccttgatgggaaaaactgcacactgatagatgctctattgggagaccctcattgtgatggcttccaaaatgagaaatgggacctttttgttgaacgcagcaaagctttcagcaactgttacccttatgatgtgccggattatgcctcccttaggtcactagttgcctcatcaggcaccctggagtttatcaatgaaggcttcaattggactggagtcactcagagtgggggaagctatacttgcaaaaggggatctgttaacagtttcttcagtagattgaattggttgtacgaatcagaaagcaaatatccagtgctgaacgtgactatgccaaataatggcaaatttgacaaattgtacatttggggggttcaccacccgagcacggacaaagaacaaaccaacctatatgttcgagcatcagggaaagtcacagtctctaccaagagaagccagcaaactgtaatcccgaatatcgggtctagaccctgggtaaggggtctgtctagtagaataagtatctattggacaatagtaaaaccgggagacatactgttaattaatagcactggaaacctaattgctcctcggggttacttcaaaatacgcactgggaaaagctcaataatgaggtcagatgcacctattggcacctgcagttctgaatgcatcactccaaatggaagcattcccaatgacaaaccctttcaaaatgtaaacaagatcacatatggagcatgtcccaggtatgttaagcaaaacactctgaagttggcaacagggatgcggaatgtaccagagaaacaaactagaggcatattcggcgcaatagcaggtttcatagaaaatggttgggagggaatggtagacggttggtacggtttcaggcatcaaaattctgagggcacaggacaagcagcagatcttaaaagcactcaagcagcaatcgaccaaatcaacgggaaactgaacaggttaatcgagaaaacgaacgagaaattccatcaaatcgaaaaggaattctcagaagtagaagggagaattcaggacctcgagaaatatgttgaagacactaaaatagatctctggtcttacaacgcggagcttcttgtcgccctggagaaccaacatacaattgatctgactgattcagaaatgaacaaactgtttgaaaaaacaaggaaacaactgagggaaaatgctgaggacatgggcaatggttgcttcaaaatataccacaaatgtgacaatgcttgcatagggtcaatcagaaatggaacttatgaccatgatgtatacagagacgaagcattaaacaaccggtttcagatcaaaggtgttgagctgaagtcaggatacaaagactggatcctatggatttcctttgccatatcatgctttttgctttgtgttgttttgctggggttcatcatgtgggcctgccaaaaaggcaacattaggtgcaacatttgcatttga

SEQ ID NO: 30913 - RNA, 1701 nt, synthetic construct
  misc_feature 1..1701: note = hemagglutinin__InfluenzaA__ABB04983
  source 1..1701: mol_type = other RNA
atgaagactatcattgctttgagctacattttatgtctggttttcgctcaaaaacttcccggaaatgacaacagcacggcaacactgtgcctggggcaccatgcagtgccaaacggaacgctagtgaaaacaatcacgaatgaccaaattgaagtgactaatgctactgagctggttcagagttcctcaacagatagaatatgcgacagtcctcaccaaatccttgatggagaaaactgcacactaatagatgctctattgggagaccctcattgtgatggcttccaaaataaggaatgggacctttttgttgaacgcagcaaagcctacagcaactgttacccttatgatgtgccggattatgtctcccttaggtcactagttgcctcatcaggcacgctggagtttaacaatgaaagcttcaattggactggagtcgctcagaatggaacaagctctgcttgcaaaaggagatctgataaaagtttctttagtagattgaattggttgcaccaattaaaatacaaatatccagcactgaacgtgactatgccaaacaatgaaaaatttgacaaattgtacatttggggggttcaccacccgggtacagacagtgaccaaatcagcttatatgctcaagcatcagggagagtcacagtctctaccaaaagaagccaacaaactgtaatcccgaatatcggatctagaccctgggtaaggggtgtctccagcagaataagcatctattggacaatagtaaaaccgggagacatacttttgattaacagcacagggaatctaattgctcctcggggttacttcaaaatacgaagtgggaaaagctcaataatgaggtcagatgcacccattggcaaatgcaattctgaatgcatcactccaaatggaagcattcccaatgacaaaccatttcaaaatgtaaacaggatcacatatgggccctgtcccagatatgttaagcaaaacactctgaaattggcaacagggatgcggaatgtgccagagaaacaaactagaggcatattcggtgcaatcgcgggcttcatagaaaatggttgggagggaatgatggacggttggtacggtttcaggcatcaaaattctgagggcacagggcaagcagcagatcttaaaagcactcaagcagcaatcaaccaaatcaacgggaaactgaataggttaatcgaaaaaacgaacgagaaattccatcaaattgaaaaagaattctcagaagtagaagggagaattcaggacctcgagaaatatgttgaggacactaaaatagatctctggtcgtacaatgcggagcttcttgttgccctggagaaccaacatacaattgatctaactgactcagaaatgaacaaactgtttgaaagaacaaagaagcaactgagggaaaatgctgaggatatgggcaatggttgtttcaaaatataccacaaatgtgacaatgcctgcatagggtcaatcagaaatggaacttatgaccatgatgtatacagagacgaagcattgaacaaccggttccagatcaaaggtgttgagctgaagtcaggatacaaagattggatcctatggatttcctttgccatatcatgttttttgctttgtattgttttgctggggttcatcatgtgggcctgccaaaaaggcaacattaggtgcaacatttgcatttga

SEQ ID NO: 30914 - RNA, 1701 nt, synthetic construct
  misc_feature 1..1701: note = hemagglutinin__InfluenzaA__ABB04994
  source 1..1701: mol_type = other RNA
atgaagactatcattgctttgagctacattttatgtctggttttcgctcaaaaacttcccgtaaatgacaacagcacggcaacgctgtgcctgggacaccatgcagtgccaaacggaacgctagtgaaaacaatcacgaatgaccacattgaagtgactaatgctactgagctggttcagagttcctcaacaggtagaatatgcgacagtcctcaccaaatccttgatggagaaaactgcacactaatagatgctctattgggagaccctcattgtgatggcttccagaataaggaatgggacctttttgttgaacgcagcacagcctacagcaactgttacccttatgatgtgccggattatgcctcccttaggtcactagttgcctcatccggcacactggagtttaacaatgaaagcttcaattggactggagtcgctcagaatggaacaagctctgcttgcaaaaggagatctattaaaagtttctttagtagattgaattggttgcaccaattaaaatacaaatatccagcactgaacgtgactatgccaaacaatgaaaaatttgacaaattgtacatttggggggttcaccacccgagtacggacagtgaccaaatcagcctatatgctcaagcatcagggagagtcacagtctctaccaaaagaagccaacaaactgtaatcccgaatatcggatctagaccctgggtaaggggtgtctccagcataataagcatctattggacaatagtaaaaccgggagacatacttttgattaacagcacagggaatctaattgctcctcggggttactttaaaatacgaagtgggaaaagctcaataatgaggtcaaatgcacccattggcaaatgcaattctgaatgcatcactccaaatggaagcattcccaatgacaaaccatttcaaaatgtaaacaggatcacatatggggcctgtcccagatatgttaagcaaaacactctgaaattggcaacagggatgcggaatgtaccagagaaacaaactagaggcatattcggcgcaatcgcgggtttcatagaaaatggttgggagggaatggtggacggttggtacggtttcaggcatcaaaattctgagggcacaggacaagcagcagatcttaaaagcactcaagcagcaatcaaccaaatcaacgggaaactgaataggttaatcgagaaaacaaacgagaaattccatcaaattgaaaaagaattctcagaagtagaagggagaattcaggacctcgagaaatatgttgaggacactaaaatagatctctggtcgtacaacgcggagcttcttgttgccctggagaaccaacatacaattgatctaactgactcagaaatgaacaaactgtttgaaagaacaaggaagcaactgagggaaaatgctgaggatatgggcaatggttgtttcaaaatataccacaaatgtgacaatgcctgcatagggtcaatcagaaatggaacttatgaccatgatgtatacagagacgaagcattaaacaaccggttccagatcaaaggtgttgagctgaagtcaggatacaaagattggatcctatggatttcctttgccatatcatgttttttgctttgtgttgttttgctggggttcatcatgtgggcctgccaaaaaggcaacattaggtgcaacatttgcatttga

SEQ ID NO: 30915 - RNA, 1701 nt, synthetic construct
  misc_feature 1..1701: note = hemagglutinin__InfluenzaA__ABB05005
  source 1..1701: mol_type = other RNA
atgaagactatcattgctttgagccacattttatgtctggttttcgctcaaaaacttcccgtaaatgacaacagcacggcaacgctgtgcctgggacaccatgcagtgccaaacggaacgctagtgaaaacaatcacgaatgaccacattgaagtgactaatgctactgagctggttcagagttcctcaacaggtagaatatgcgacagtcctcaccaaatccttgatggagaaaactgcacactaatagatgctctattgggagaccctcattgtgatggcttccaaaataaggaatgggacctttttgttgaacgcagcacagcctacagcaactgttacccttatgatgtgccggattatgcctcccttaggtcactagttgcctcatccggcacactggagtttaacaatgaaagcttcaattggactggagtcgctcagaatggaacaagctctgcttgcaaaaggagatctattaaaagtttctttagtagattgaattggttgcaccaattaaaatacaaatatccagcactgaacgtgactatgccaaacaatgaaaaatttgacaaattgtacatttggggggttcaccacccgagtacggacagtgaccaaatcagcctatatgctcaagcatcagggagagtcacagtctctaccaaaagaagccaacaaactgtaatcccggatatcggatctagaccctgggtaaggggtgtctccagcagaataagcatctattggacaatagtaaaaccgggagacatacttttgattaacagcacagggaatctaattgctcctcggggttacttcaaaatacgaagtgggaaaagctcaataatgaggtcaaatgcacccattggcaaatgcaattctgaatgcatcactccaaatggaagcgttcccaatgacaaaccatttcaaaatgtaaacaggatcacatatggggcctgtcccagatatgttaagcaaaacactctgaaattggcaacagggatgcggaatgtaccagagaaacaaactagaggcatattcggcgcaatcgcgggtttcatagaaaatggttgggaaggaatggtggacggttggtacggtttcaggcatcaaaattctgagggcacaggacaagcagcagatcttaaaagcactcaagcagcaatcaaccaaatcaacgggaaactgaataggttaatcgagaaaacaaacgagaaattccatcaaattgaaaaagaattctcagaagtagaagggagaattcaggacctcgagaaatatgttgaggacactaaaatagatctctggtcgtacaacgcggagcttcttgttgccctggagaaccaacatacaattgatctaactgactcagaaatgaacaaactgtttgaaagaacaaggaagcaactgagggaaaatgctgaggatatgggcaatggttgtttcaaaatataccacaaatgtgacaatgcctgcatagggtcaatcagaaatggaacttatgaccatgatgtatacagagacgaagcattaaacaaccggttccagatcaaaggtgttgagctgaagtcaggatacaaagattggatcctatggatttcctttgccatatcatgttttttgctttgtgttgttttgctggggttcatcatgtgggcctgccaaaaaggcaacattaggtgcaacatttgcatttga

SEQ ID NO: 30916 - RNA, 1701 nt, synthetic construct
  misc_feature 1..1701: note = hemagglutinin__InfluenzaA__ABB05183
  source 1..1701: mol_type = other RNA
atgaagactatcattgctttgagctacattttatgtctggttttcgctcaaaaacttcccgtaaatgacaacagcacggcaacgctgtgcctgggacaccatgcagtgccaaacggaacgctagtgaaaacaatcacgaatgaacacattgaagtgactaatgctactgagctggttcagagttcctcaacaggtagaatatgcgacagtcctcaccaaatccttgatggagaaaactgcacactaatagatgctctattgggagaccctcattgtgatggcttccaaaataaggaatgggacctttttgttgaacgcagcacagcctacagcaactgttacccttatgatgtgccggattatgcctcccttaggtcactagttgcctcatccggcacactggagtttaacaatgaaagcttcaattggactggagtcgctcagaatggaacaagctctgcttgcaaaaggagatctattaaaagtttctttagtagattgaattggttgcaccaattaaaatacaaatatccagcactgaacgtgactatgccaaacaatgaaaaatttgacaaattgtacatttggggggttcaccacccgagtacggacagtgaccaaatcagcctatatgctcaagcatcagggagagtcacagtctctaccaaaagaagccaacaaactgtaatcccgaatatcggatctagaccctgggtaaggggtgtctccagcagaataagcatctattggacaatagtaaaaccgggagacatacttttgattaacagcacagggaatctaattgctcctcggggttactttaaaatacgaagtgggaaaagctcaataatgaggtcaaatgcacccattggcaaatgcaattctgaatgcatcactccaaatggaagcattcccaatgacaaaccatttcaaaatgtaaacaggatcacatatggggcctgtcccagatatgttaagcaaaacactctgaaattggcaacagggatgcggaatgtaccagagaaacaaactagaggcatattcggcgcaatcgcgggtttcatagaaaatggttgggagggaatggtggacggttggtacggtttcaggcatcaaaattctgagggcacaggacaagcagcagatcttaaaagcactcaagcagcaatcaaccaaatcaacgggaaactgaataggttaatcgagaaaacaaacgagaaattccatcaaattgaaaaagaattctcagaagtagaagggagaattcaggacctcgagaaatatgttgaggacactaaaatagatctctggtcgtacaacgcggagcttcttgttgccctggagaaccaacatacaattgatctaactgactcagaaatgaacaaactgtttgaaagaacaaggaagcaactgagggaaaatgctgaggatatgggcaatggttgtttcaaagtataccacaaatgtgacaatgcctgcatagggtcaatcagaaatggaacttatgaccatgatgtatacagagacgaagcattaaacaaccggttccagatcaaaggtgttgagctgaagtcaggatacaaagattggatcctatggatttcctttgccatatcatgttttttgctttgtgttgttttgctggggttcatcatgtgggcctgccaaaaaggcaacattaggtgcaacatttgcatttga

SEQ ID NO: 30917 - RNA, 1701 nt, synthetic construct
  misc_feature 1..1701: note = hemagglutinin__InfluenzaA__ABB05194
  source 1..1701: mol_type = other RNA
atgaagactatcattgctttgagctacattttatgtctggttttcgctcaaaaacttcccggaaatgacaacagcacggcaacgctgtgcctggggcaccatgcagtgccaaacggaacgctagtgaaaacaatcacgaatgaccaaattgaagtgactaatgctactgagctggttcagagttcctcaacaggtagaatatgcgacagtcctcaccaaatccttgatggagaaaactgcacactaatagatgctctattgggagaccctcattgtgatggcttccaaaataaggaatgggaccttttcgttgaacgcagcaaagcctacagcaactgttacccttatgatgtgccggattatgcctctcttaggtcactagttgcctcatccggcacactggagtttaacaatgaaagcttcaattggactggagtcgctcagaatggaacaagctctgcttgcaaaaggaggtctaataaaagtttctttagtagattgaattggttgcaccaattgaaatacaaatacccagcactgaacgtgattatgccaaacaatgaaaaatttgacaaattgtacatttggggggttcaccacccgagtacggacagtgaccaaatcagcctatatgctcaagcatcagggagagtcacagtctctaccaaaagaagccaacagactgtaatcccgaatatcggatctagaccctgggtaaggggtgtctccagcagaataagcatctattggacaatagtaaaaccgggagacatacttttgattaacagcacagggaatctaattgctcctcggggttacttcaaaatacgaagtgggaaaagctcagtaatgaggtcagatgcatccattggcaaatgcaattctgaatgcatcactccaaatggaagcattcccaatgacaaaccatttcaaaatgtaaacaggatcacatatggggcctgtcccagatatgttaagcaaaacactctgaaattggcaacagggatgcggaatgtaccagagaaacaaactagaggcatattcggtgcaatcgcgggtttcatagaaaatggttgggagggaatggtggacggttggtacggtttcaggcatcaaaattctgagggcacaggacaagcagcagatcttaaaagcactcaagcagcaatcaaccaaatcaacgggaaactgaataggttaatcgagaaaacgaacgagaaattccatcaaattgaaaaagaattctcagaagtagaagggagaattcagaacctcgagaaatatgttgaggacactaaaatagatctctggtcgtacaacgcggagcttcttgttgccctggagaaccaacatacaattgatctaactgactcagaaatgaacaaactgtttgaaagaacaaagaagcaactgagggaaaatgctgaggatatgggcaatggctgtttcaaaatataccacaaatgtgacaatgcctgcatagggtcaatcagaaatggaacttatgaccatgatgtatacagagacgaagcattaaacaaccggttccagatcaaaggtgttgagctgaagtcaggatacaaagattggatcctatggatttcctttgccatatcatgttttttgctttgtgttgttttgctggggttcatcatgtgggcctgccaaaaaggcaacattaggtgcaacatttgcatttga

SEQ ID NO: 30918 - RNA, 1701 nt, synthetic construct
  misc_feature 1..1701: note = hemagglutinin__InfluenzaA__ABB05205
  source 1..1701: mol_type = other RNA
atgaagactatcattgctttgagctacattttatgtctggttttcgctcaaaaacttcccggaaatgacaacagcacggcaacgctgtgcctggggcaccatgcagtgccaaacggaacgctagtgaaaacaatcacgaatgaccaaattgaagtgactaatgctactgagctggttcagagttcctcaacaggtagaatatgcgacagtcctcaccaaatccttgatggagaaaactgcacactaatagatgctctattgggagaccctcattgtgatggcttccaaaataaggaatgggacctttttgttgaacgcagcaacgcctacagcaactgttacccttatgatgtgccggattatgcctcccttaggtcactagttgcctcatccggcacactggaatttaacagtgaaagcttcaattggactggagtcgctcagaatggaacaagctctgcttgcaaaaggagatctaataaaagtttctttagtagattgaattggttgcaccaattaaaatacaaatatccagcactgaacgtgactatgccaaacaatgaaaaatttgacaaattgtacatttggggggttcaccacccgggtacggacagtgaccaaatcagcctatatgctcaagcatcagggagagtcacagtctctaccaaaagaagccaacaaactgtaatcccgaatatcggatctagaccctgggtaaggggtgtctccagcagaataagcatctattggacaatagtaaaaccgggagacatacttttgattaacagcacagggaatctaattgctcctcggggttacttcaaaatacgaagtgggaaaagctcaataatgaggtcagatgcacccattggcaaatgcaattctgaatgcatcactccaaatggaagcattcccaataacaaaccatttcaaaatgtaaacaggatcacatatggggcctgtcccagatatgttaagcaaaacactctgaaattggcaacagggatgcggaatgtaccagagaaacaaactagaggcatattcggcgcaatcgcgggtttcatagaaaatggttgggagggaatggtggacggttggtacggtttcaggcatcaaaattctgagggcacaggacaagcagcagatcttaaaagcactcaagcagcaatcaaccaaatcaacgggaagctgaataggttaatcgagaaaacgaacgagaaattccatcaaattgaaaaagaattctcagaagtagaagggagaattcaggacctcgagaaatatgttgaggacactaaaatagatctctggtcgtacaacgcggagcttcttgttgccctggagaaccaacacacaattgatctaactgactcagaaatgaacaaactgtttgaaagaacaaagaagcaactgagggaaaatgctgaggatatgggcaatggttgtttcaaaatataccacaaatgtgacaatgcctgcatagggtcaatcagaaatggaacttatgaccatgatgtatacagagacgaagcattaaacaaccggttccagatcaaaggtgttgagctgaagtcaggatacaaagattggatcctatggatttcctttgccatatcatgttttttgctttgtgttgttttgctggggttcatcatgtgggcctgccaaaaaggcaacattaggtgcaacatttgcatttga

SEQ ID NO: 30919 - RNA, 1701 nt, synthetic construct
  misc_feature 1..1701: note = hemagglutinin__InfluenzaA__ABB05216
  source 1..1701: mol_type = other RNA
atgaagactatcattgctttgagctacattttgtgtctggttttcgctcaaaaacttcccgtaaatgacaacagcacggcaacgctgtgcctgggacaccatgcagtgccaaacggaacgctagtgaaaacaatcacgaatgaccacattgaagtgactaatgctactgagctggttcagagttcctcaacaggtagaatatgcgacagtcctcaccaaatccttgatggagaaaactgcacactaatagatgctctattgggagaccctcattgtgatggcttccaaaataaggaatgggacctttttgttgaacgcagcacagcctacagcaactgttacccttatgatgtgccggattatgcctcccttaggtcactagttgcctcatccggcacactggagtttaacaatgaaagcttcaattggactggagtcgctcagaatggaacaagctctgcttgcaaaaggagatctattaaaagtttctttagtagattgaattggttgcaccaattaaaatacaaatatccagcactgaacgtgactatgccaaacaatgaaaaatttgacaaattgtacatttggggggttcaccacccgagtacggacagtgaccaaatcagcctatatgctcaagcatcagggagagtcacagtctctaccaaaagaagccaacaaactgtaatcccgaatatcggatctagaccctgggtaaggggtgtctccagcagaataagcatctattggacaatagtaaaaccgggagacatacttttgattaacagcacagggaatctaattgctcctcggggttacttcaaaatacgaagtgggaaaagctcaataatgaggtcaaatgcacccattggcaaatgcaattctgaatgcatcactccaaatggaagcattcccaatgacaaaccatttcaaaatgtaaacaggatcacatatggggcctgtcccagatatgttaagcaaaacactctgaaattggcaacagggatgcggaatgtaccagagaaacaaactagaggcatattcggcgcaatcgcgggtttcatagaaaatggttgggaaggaatggtggacggttggtacggtttcaggcatcaaaattctgagggcacaggacaagcagcagatcttaaaagcactcaagcagcaatcaaccaaatcaacgggaaactgaataggttaatcgagaaaacaaacgagaaattccatcaaattgaaaaagaattctcagaagtagaagggagaattcaggacctcgagaaatatgttgaggacactaaaatagatctctggtcgtacaacgcggagcttcttgttgccctggagaaccaacatacaattgatctaactgactcagaaatgaacaaactgtttgaaagaacaaggaagcaactgagggaaaatgctgaggatatgggcaatggttgtttcaaaatataccacaaatgtgacaatgcctgcatagggtcaatcagaaatggaacttatgaccatgatgtatacagagacgaagcattaaacaaccggtttcagatcaaaggtgttgagctgaagtcaggatacaaagattggatcctatggatttcctttgccatatcatgttttttgctttgtgttgttttgctggggttcatcatgtgggcctgccaaaaaggcaacattaggtgcaacatttgcatttga

SEQ ID NO: 30920 - RNA, 1701 nt, synthetic construct
  misc_feature 1..1701: note = hemagglutinin__InfluenzaA__ABB46392
  source 1..1701: mol_type = other RNA
atgaagactatcattgctttgagctacattttctgtctggctttcgcccaagaccttccaggaaatgacaacagcacagcaacgctgtgcctgggacatcatgcggtgccaaacggaacgctagtgaaaacaatcacgaatgatcagattgaagtgactaatgctactgaactggttcagagttcctcaacgggtaaaatatgcgacaatcctcatcgaatccttgatggaataaactgcacactgatagatgctctattgggggaccctcattgtgatggctttcaaaatgagaaatgggaccttttcgttgaacgcagcaaagctttcagcaactgttacccttatgatgtgccagattatgcctcccttaggtcactagttgcctcgtcaggcaccctggagtttatcaatgaaggcttcaattggactggggtcactcagaatgggggaagcagtgcttgcaaaaggggacctgataacggttttttcagtagactgaactggttgtacaaatcaggaagcacatatccagtgcagaacgtgaccatgccaaacaatgacaattctgacaaactatacatttggggggttcaccacccgaacacggacaaagaacaaaccgacctatatgttcaagcatcagggaaagtcacagtctccaccaagagaagccagcaaactataatcccgaatgtcgggtctagaccctgggtaaggggtctgtctagtagagtaagcatctattggacaatagttaaaccgggagacatactggtaattaatagtaatggaaacctaattgctcctcggggttacttcaaaatgcgcactgggaaaagctcaataatgaggtcagatgcacctattggcacctgcagctctgaatgcatcactccaaatggaagcattcccaatgacaagccctttcaaaacgtaaacaagatcacatatggggcatgtcccaagtatgttaagcaaaacactctgaagttggcaacagggatgcggaatgtaccagagaaacaaactagaggcatattcggcgcaatagcaggtttcatagaaaatggttgggagggaatgatagacggttggtacggtttcaggcatcaaaattctgagggcacaggacaagcagcagatcttaaaagcactcaaacagccatcgaccaaatcaatgggaaactgaatagggtaatcgagaagacgaacgagaaattccatcaaatcgaaaaggaattctcagaagtagaagggagaattcaggacctcgagaaatacgttgaagacactaaaatagatctctggtcttacaatgcggagcttcttgtcgctctggagaaccaacatacaattgatctgactgactcggaaatgaacaaactgtttgaaaaaacaaggaggcaactgagggaaaatgctgaggacatgggcaatggttgcttcaaaatataccacaaatgtgacaatgcttgcatagggtcaatcagaaatgggacttatgaccatgatgtatacagagacgaagcattaaacaaccggtttcagatcaaaggtgttgaactgaagtcaggatacaaagactggatcctgtggatttcctttgccatatcatgctttttgctttgtgttgttttgctggggttcatcatgtgggcctgccagaagggcaacattaggtgcaacatttgcatttga

SEQ ID NO: 30921 - RNA, 1701 nt, synthetic construct
  misc_feature 1..1701: note = hemagglutinin__InfluenzaA__ABB46414
  source 1..1701: mol_type = other RNA
atgaagactatcattgctttgagctacattttatgtctggttttcgctcaaaaacttcccggaaatgacaacagcacggcaacgctgtgcctgggacaccatgcagtgccaaacggaacgctagtgaaaacaatcacgaatgaccaaattgaagtgactaatgctactgagctggttcagagttcctcaacaggtagaatatgcgacagtcctcaccgaatccttgatggagaaaactgcacactgatagatgctctattgggagaccctcattgtgatggcttccaaaataaggaatgggacctttttgttgaacgcagcaaagcctacagcaactgttacccttatgatgtgccggattatgcctcccttaggtcactagttgcctcatccggcaccctggagtttaacaatgaaagcttcaattggactggagtcgctcagaatggaacaagctctgcttgcaaaaggagatctattaaaagtttctttagtagattgaattggttgcaccaattaaaatacaaatatccagcactgaatgtgactatgccaaacaatgacaaatttgacaaattgtacatttggggggttcaccacccgagtacggacagtgaccaaaccagcctatatgctcaagcatcagggagagtcacagtctctaccaaaagaagccaacaaactgtaatcccgaatatcggatctagaccctgggtaaggggtgtctccagcagaataagcatctattggacaatagtaaaaccgggagacatacttttgattaacagcacagggaatctaattgctcctcggggttacttcaaaatacgaagtgggaaaagctcaataatgaggtcagatgcacccattggcaaatgcaattctgaatgcatcactccaaatggaagcattcccaatgacaaaccatttcaaaatgtaaacaggatcacatatggggcctgtcccagatatgttaagcaaaacactctgaaattggcaacagggatgcggaatgtaccagagaaacaaactagaggcatattcggtgcaatcgcgggtttcatagaaaatggttgggagggaatggtggacggttggtacggtttcaggcatcaaaattctgagggcacaggacaagcagcagatcttaaaagcactcaagcagcaatcaaccaaatcaacgggaaactgaataggttaatcgagaaaacgaacgagaaattccatcaaattgaaaaagaattctcagaagtagaagggagaattcaggacctcgagaaatatgttgaggacactaaaatagatctctggtcgtacaacgcggagcttcttgttgccctggagaaccaacatacaattgatctaactgactcagaaatgaacaaactgtttgaaagaacaaggaagcaactgagggaaaatgctgaggatatgggcaatggttgtttcaaaatataccacaaatgtgacaatgcctgcatagggtcaatcagaaatggaacttatgaccatgatgtatacagagacgaagcattaaacaaccggttccagatcaaaggtgttgagctgaagtcaggatacaaagattggatcctatggatttcctttgccatatcatgttttttgttttgtgttgttttgctggggttcatcatgtgggcctgccaaaaaggcaacattaggtgcaacatttgcatttga

SEQ ID NO: 30922 - RNA, 1701 nt, synthetic construct
  misc_feature 1..1701: note = hemagglutinin__InfluenzaA__ABB46425
  source 1..1701: mol_type = other RNA
atgaagactatcattgctttgagctacattttatgtctggttttcgctcaaaaacttcccggaaatgacaacagcacggcaacgctgtgcctgggacaccatgcagtgccaaacggaacgctagtgaaaacaatcacgagtgaccaaattgaagtgactaatgctactgagctggttcagagttcctcaacaggtaaaatatgcgacagccctcaccgaatccttgatggagaaaactgcacactgatagatgctctattgggagaccctcattgtgatggcttccaaaataaggaatgggacctttttgttgaacgcagcaaagcctacagcaactgttacccttatgatgtgccggattatgcctcccttaggtcactagttgcctcatccggcaccctggagtttaacaatgaaagcttcaattggactggagtcgctcagaatggaacaagctttgcttgcaaaaggagatctattaaaagtttctttagtagattgaattggttgcaccaattaaaatacaaatatccagcactgaacgtgactatgccaaacaatgacaaatttgacaaattgtacatttggggggttcaccacccgagtacggacagtgaccaaaccagcctatatgctcaagcatcagggagagtcacagtctctaccaaaagaagccaacaaactgtaatcccgaatatcggatctagaccctgggtaaggggtgtctccagcagaataagcatctattggacaatagtaaaaccgggagacatacttctgattaacagcacagggaatctaattgctcctcggggttacttcaaaatacgaagtgggaaaagctcaataatgaggtcagatgcacccattggcaaatgcaattctgaatgcatcactccaaatggaagcatccccaatgacaaaccatttcaaaatgtaaacaggatcacatatggggcctgtcccagatatgttaagcaaaacactctgaaattggcaacagggatgcggaatgtaccagagaaacaaactagaggcatattcggcgcaatcgcaggtttcatagaaaatggttgggagggaatggtagacggttggtacggtttcaggcatcaaaattctgagggcacaggacaagcagcagatcttaaaagcactcaagcagcaatcaatcaaatcaacgggaaactgaataggttaatcgagaaaacgaacgagaaattccatcaaattgaaaaagaattctcagaagtagaagggagaattcaggacctcgagaaatatgttgaggacactaaaatagatctctggtcgtacaacgcggagcttcttgttgccctggagaaccaacatacaattgatctaactgactcagaaatgaacaaactgtttgaaagaacaaggaagcaactgagggaaaatgctgaggatatgggcaatggttgtttcaaaatataccacaaatgtgacaatgcctgcatagggtcaatcagaaatggaacttatgaccatgatgtatacagagacgaagcattaaacaaccggttccagatcaaaggtgttgagctgaagtcaggatacaaagattggatcctatggatttcctttgccatatcatgttttttgctttgtgttgttttgctggggttcatcatgtgggcctgccaaaaaggcaacattaggtgcaacatttgcatttga

SEQ ID NO: 30923 - RNA, 1701 nt, synthetic construct
  misc_feature 1..1701: note = hemagglutinin__InfluenzaA__ABB46436
  source 1..1701: mol_type = other RNA
atgaagactatcattgctttgagctacattctatgtctggttttcgctcaaaaacttcccggaaatgacaacagcacggcaacgctgtgccttgggcaccatgcagtaccaaacggaacgatagtgaaaacaatcacgaatgaccaaattgaagttactaatgctactgagctggttcagagttcctcaacaggtggaatatgcgacagtcctcatcagatccttgatggagaaaactgcacactaatagatgctctattgggagaccctcagtgtgatggcttccaaaataagaaatgggacctttttgttgaacgcagcaaagcctacagcaactgttacccttatgatgtgccggattatgcctcccttaggtcactagttgcctcatccggcacactggagtttaacaatgaaagcttcaattggactggagtcactcaaaatggaacaagctctgcttgcaaaaggagatctaataacagtttctttagtagattgaattggttgacccacttaaaattcaaatacccagcattgaacgtgactatgccaaacaatgaaaaatatgacaaattgtacatttggggggttcaccacccgggtacggacaatgaccaaatcagcctatatgctcaagcatcaggaagaatcacagtctctaccaaaagaagccaacaaactgtaatcccgaatatcggatctagacccagggtaagggatatcccaagcaggataagcatctattggacaatagtaaaaccgggagacatacttttgattaacagcacagggaatctaattgctcctcggggttacttcaaaatacgaagtgggaaaagctcaataatgagatcagatgcacccattggcaaatgcaattctgaatgcatcactccaaatggaagcattcccaatgacaaaccatttcaaaatgtaaacaggatcacatatggagcctgtcccagatatgttaagcaaaacactctgaaattggcaacagggatgcgaaatgtaccagagaaacaaactagaggcatatttggcgcaatcgcgggtttcatagaaaatggttgggagggaatggtggatggttggtacggtttcaggcatcaaaattctgagggaataggacaagcagcagatctcaaaagcactcaagcagcaatcaaccaaatcaatgggaagctgaataggttgatcgggaaaaccaacgagaaattccatcagattgaaaaagaattctcagaagtagaagggagaattcaggacctcgagaaatatgttgaggacactaaaatagatctctggtcatacaacgcggagcttcttgttgccctggagaaccaacatacaattgatctaactgactcagaaatgaacaaactgtttgaaagaacaaagaagcaactgagggaaaatgctgaggatatgggcaatggttgtttcaaaatataccacaaatgtgacaatgcctgcatagggtcaatcagaaatggaacttatgaccatgatgtatacagagatgaagcattaaacaaccggttccagatcaaaggtgttgagctgaagtcaggatacaaagattggatcctatggatttcctttgccatatcatgttttttgctttgtgttgctttgttggggttcatcatgtgggcctgccaaaaaggcaacattaggtgcaacatttgcatttga

SEQ ID NO: 30924 - RNA, 1701 nt, synthetic construct; identical to SEQ ID NO: 30857
  misc_feature 1..1701: note = hemagglutinin__InfluenzaA__ABB46447
  source 1..1701: mol_type = other RNA

SEQ ID NO: 30925 - RNA, 1701 nt, synthetic construct
  misc_feature 1..1701: note = hemagglutinin__InfluenzaA__ABB46458
  source 1..1701: mol_type = other RNA
atgaagactatcattgctttgagctacattctatgtctggttttcgctcaaaaacttcccggaaatgacaacagcacggcaacgctgtgccttgggcaccatgcagtaccaaacggaacgatagtgaaaacaatcacgaatgaccaaattgaagttactaatgctactgagctggttcagagttcctcaacaggtggaatatgcgacagtcctcatcagatccttgatggagaaaactgcacactaatagatgctctattgggagaccctcagtgtgatggcttccaaaataagaaatgggacctttttgttgaacgcagcaaagcctacagcaactgttacccttatgatgtgccggattatgcctcccttaggtcactagttgcctcatccggcacactggagtttaacaatgaaagcttcaattggactggagtcactcaaaatggaacaagctctgcttgcaaaaggagatctaataacagtttctttagtagattgaattggttgacccacttaaaattcaaatacccagcattgaacgtgactatgccaaacaatgaaaaatttgacaaattgtacatttggggggttcaccacccgggtacggacaatgaccaaatcagcctatatgctcaagcatcaggaagaatcacagtctctaccaaaagaaaccaacaaactgtaatcccgaacatcggatctagacccagggtaagggatatccccagcagaataagcatctattggacaatagtaaaaccgggagacatacttttgattaacagcacagggaatctaattgctcctcggggttacttcaaaatacgaagtgggaaaagctcaataatgagatcagatgcacccattggcaaatgcaagtctgaatgcatcactccaaatggaagcattcccaatgacaaaccatttcaaaatgtaaacaggatcacatatggggcctgtcccagatatgttaagcaaaacactctgaaattggcaacagggatgcgaaatgtaccagagaaacaaactagaggcatatttggcgcaatcgcgggtttcatagaaaatggttgggagggaatggtggatggttggtacggtttcaggcatcaaaattctgagggaataggacaagcagcagatctcaaaagcactcaagcagcaatcaaccaaatcaatgggaagctgaataggttgatcgggaaaaccaacgagaaattccatcagattgaaaaagaattctcagaagtagaagggagaattcaggacctcgagaaatatgtcgaggacactaaaatagatctctggtcatacaacgcggagcttcttgttgccctggagaaccaacatacaattgatctaactgactcagaaatgaacaaactgtttgaaagaacaaagaagcaactgagggaaaatgctgaggatatgggcaatggttgtttcaaaatataccacaaatgtgacaatgcctgcatagggtcaatcagaaatggaacttatgaccatgatgtatacagagatgaagcattaaacaaccggttccagatcaaaggtgttgagctgaagtcaggatacaaagattggatcctatggatttcctttgccatatcatgttttttgctttgtgttgctttgttggggttcatcatgtgggggtgccaaaaaggcaacattaggtgcaacatttgcatttga

SEQ ID NO: 30926 - RNA, 1701 nt, synthetic construct
  misc_feature 1..1701: note = hemagglutinin__InfluenzaA__ABB51961
  source 1..1701: mol_type = other RNA
atgaagactatcattgctttaagctacattctatgtctggttttcgctcaaaagcttcccggaaatgacaacagcacggcaacgctgtgccttgggcaccatgcagtaccaaacggaacgatagtgaaaacaatcacgaatgaccaaattgaagttactaatgctactgagctggttcagagtttctcaacaggtgggatatgcgacagtcctcatcagatccttgatggagaaaactgcacactaatagatgctctattgggagaccctcagtgtgatggcttccaaaataagaaatgggacctttttgttgaacgcagcaaagcctacagcaactgttacccttatgatgtgccggattatgcctgcgtgaggtcactagttgcctcatccggcacactggagtttaacaatgaaagcttcaattgggctggagtcactcagaatggaacaagctctgcttgcaaaaggagatctaataaaagtttctttagtagattgaattggttgacccacttaaaatacaaatacccagcattgaacgtgactatgccaaacaatgaaaaatttgacaaattgtacatttggggggttcaccacccgggtacggacagtgaccaaatcagcctatatgctcaagcatcaggaagaatcacagtctctacccaaagatgcaaacaacttgtaatcccgaatatcggatctagacccagggtaagggatgtctccagcagaataagcatctattggacaatagtaaacccgggagacatacttttgattaacagcacagggaatctaattgctcctcggggttacttcaaaatacgaagtgggaaaagctcaataatgagatcagatgcacccattggcaaatgcaattctgaatgcatcactccaaatggaagcattcccaatgacaaaccatttcaaaatgtaaacaggatcacatatggggcctgtcccagatatgttaagcaaaacactctgaaattggcaacagggatgcgaaatgtaccagagaaacaaactagaggcatatttggcgcaatcgcgggtttcatagaaaatggttgggagggaatggtggacggttggtacggtttcaggcatcaaaattctgagggcacaggacaagcagcagatctcaaaagcactcaagcagcaatcaaccaaatcaatgggaaactgaataggttaatcgggaaaacaaacgagaaattccatcagattgaaaaagaattctcagaagtagaagggagaattcaagacctcgagaaatatgttgaggacactaaaatagatctctggtcatacaacgcggagcttcttgttgccctggaaaaccaacatacaattgatctaactgactcagaaatgaacaaactgtttgaaagaacaaagaagcaactgagggaaaatgctgaggatatgggcaatggttgtttcaaaatataccacaaatgcgacaatgcctgcatagagtcaatcagaaatggaacttatgaccatgatgtatacagagatgaagcattaaacaaccggttccagatcaaaggtgttgagctgaagtcaggatacaaagattggatcctatggatttcctttgccatatcatgttttttgctttgtgttgctttgttggggttcatcatgtgggcctgccaaaaaggcaacattaggtgcaacatttgcatttga

SEQ ID NO: 30927 - RNA, 1698 nt, synthetic construct
  misc_feature 1..1698: note = hemagglutinin__InfluenzaA__ABB51962
  source 1..1698: mol_type = other RNA
atgaaagcaaaactactggtcctgttatgtacatttacagctacatacgcagacacaatatgtataggctaccatgccaacaactcaaccgacactgttgacacagtacttgagaagaatgtgacagtgacacactctgtcaacctacttgaggacagtcacaatggaaaactatgtctactaaaaggaatagccccactacaattgggtaattgcagcgttgccggatggatcttaggaaacccagaatgcgaattactgatttccaaggaatcatggtcctacattgtagaaacaccaaatcccgagaatggaacatgttacccagggtatttcgccgactatgaggaactgagggagcaattgagttcagtatcttcatttgaaagattcgaaatattccccaaaggaagctcatggcccaaccacaccgtgaccggagtatcagcatcatgctcccataatgggaaaagcagtttctacagaaatttgctatggctgacggggaaaaatggtttgtatccaaacctgagcatgtcctatgtaaacaacaaagagaaagaagtccttgtgctatggggtgttcatcacccacctaacatagggaaccaaagggccctctaccatacagaaaatgcttatgtctctgtagtgtcttcacattatagcagaagattcaccccagaaatagccaaaagacccaaagtaagagatcaagaaggaagaatcaactactactggactctgctggaacccggggacacaataatatttgaggcaaatggaaatctaatagcgccatggtatgctttcgcaatgagtagaggctttggatcaggaatcagcacctcaaatgcaccaatgggtgaatgtgatgcgaaatttcaaacacctcagggaggtataaacattagtcttcctttccagaatgtacacccagttacaataggagagtgtccaaattatgtcaggagtgcaaaattaaggatggttacaggactaaggaacatcccatccattcaatccagaggtttgtttggagccattgccggtttcattgaaggggggtggactggaatggtagatgggtggtatggttatcatcatcagaatgagcaaggatctggctatgctgcagatcaaaaaagcacacaaaatgccattaacgggattacaaacaaggtgaattctgtaattgagaaaatgaacactcaattcacagctgtgggcaaagaattcaacaaattagaaagaaggatggaaaacttaaataaaaaagttgatgatgggtttctagacatttggacatataatgcagaattgttggttctactggaaaatgaaaggactttggatttccatgactccaatgtgaagaatctgtatgagaaagtaaaaagccaattaaagaataatgccaaagaaataggaaacgggtgttctgaattctatcacaagtgtaacaatgaatgcatggaaagtgtgaaaaatggaacttatgactatccaaaatattccgaagaatcaaagttaaacagggagaaaattgatggagtaaaattggaatcaatgggagtctatcagattctggcgatctactcaactgtcgccagttccctggttcttttggtctccctgggggcaatcagcttctggatgtgttccaatgggtctttgcagtgtagaatatgcatctga

SEQ ID NO: 30928 - RNA, 1701 nt, synthetic construct
  misc_feature 1..1701: note = hemagglutinin__InfluenzaA__ABB51963
  source 1..1701: mol_type = other RNA
atgaagactatcattgctttgagctacattctatgtctggttttcgctcaaaaacttcccggaaatgacaacagcacggcaacgctgtgccttgggcaccatgcagtaccaaacggaacgatagtgaaaacaatcacgaatgaccgaattgaagttactaatgctactgagctggttcagagttcctcaacaggtggaatatgcgacagtcctcatcagatccttgatggagaaaactgcacactaatagatgctctattgggagaccctcagtgtgatggcttccaaaataagaaatgggacctttttgttgaacgcagcaaagcctacagcaactgttacccttatgatgtgccggattatgcctcccttaggtcactagttgcctcatccggcacactggagtttaacaatgaaagcttcaattggactggagtcactcaaaatggaacaagctctgcttgcaaaaggagatctaataacagtttctttagtagattgaattggttgacccacttaaaattcaaatacccagcattgaacgtgactatgccaaacaatgaaaaatttgacaaattgtacatttggggggttcaccacccgggtacggacaatgaccaaatcagcctatatgctcaagcatcaggaagaatcacagtctctaccaaaagaagccaacaaactgtaatcccgaatatcggatctagacccagggtaaggcatatccccagcagaataagcatctattggacaatagtaaatccgggagacatacttttgattaacagcacagggaatctaattgctcctcggggttacttcaaaatacgaagtgggaaaagctcaataatgagatcagatgcacccattggcaaatgcaattctgaatgcatcactccaaatggaagcattcccaatgacaaaccatttcaaaatgtaaacaggatcacatatggggcctgtcccagatatgttaagcaaaacactctgaaattggcaacagggatgcgaaatgtaccagagaaacaaaatagaggcatatttggcgcaatcgcgggtttcatagaaaatggttgggagggaatggtggatggttggtacggtttcaggcatcaaaattctgagggaataggacaagcagcagatctcaaaagcactcaagcagcaatcaaccaaatcaatgagaagctgaataggttgatcgggaaaaccaacgagaaattccatcagattgaaaaagaattctcagaagtagaagggagaattcaggacctcgagaaatatgtcgaggacactaaaatagatctctggtcatacaatgcggagcttcttgttgccctggagaaccaacatacaattgatctaactgactcagaaatgaacaaactgtttgaaagaacaaagaagcaactgagggaaaatgctgaggatatgggcaatggttgtttcaaagtataccacaaatgtgacaatgcctgcatagggtcaatcagaaatggaacttatgaccataatgtatacagagatgaagcattaaacaaccggttccagatcaaaggtgttgagctgaagtcaggatacaaagattggatcctatggatttcctttgccatatcatgttttttgctttgtgttgctttgttggggttcatcatgtgggcctgccaaaaaggcaacattaggtgcaacatttgcatttga

SEQ ID NO: 30929 - RNA, 1701 nt, synthetic construct
  misc_feature 1..1701: note = Hemagglutinin__InfluenzaA__ABB51964
  source 1..1701: mol_type = other RNA
atgaagactatcattgctttgagctacattctatgtctggttttcgctcaaaaacttcccggaaatgacaacagcacggcaacgctgtgccttgggcaccatgcagtaccaaacggaacgatagtgaaaacaatcacgaatgaccaaattgaagttactaatgctactgagctggttcagagttcctcaacaggtggaatatgcgacagtcctcatcagatccttgatggagaaaactgcacactaatagatgctctattgggagaccctcagtgtgatggcttccaaaataagaaatgggacctttttgttgaacgcagcaaagcctacagcaactgttacccttatgatgtgccggattatgcctcccttaggtcactagttgcctcatccggcacactggagtttaacaatgaaagcttcaattggactggagtcactcaaaatggaacaagctctgcttgcaaaaggagatctaataacagtttctttagtagattgaattggttgacccatttaaaattcaaatacccagcattgaacgtgactatgccaaacaatgaaaaatttgacaaattgtacatttggggggttcaccacccgggtacgaacaatgaccaaatcagcctatatgctcaagcatcaggaagaatcacagtctctaccaaaagaagccaacaaactgtaatcccgaatatcggatctagacccagggtaagggatatccccagcagaataagcatctattggacaatagtaaaaccgggagacatacttttgattaacagcacagggaatctaattgctcctcggggttacttcaaaatacgaagtgggaaaagctcaataatgagatcagatgcacccattggcaaatgcaattctgaatgcatcactccaaatggaagcattcccaatgacaaaccatttcaaaatgtaaacaggatcacatacggggcctgtcccagatatgttaagcaaaacactctgaaattggcaacagggatgcgaaatgtaccagagaaacaaactagaggcatatttggcgcaatcgcgggtttcatagaaaatggttgggagggaatggtggatggttggtacggtttcaggcatcaaaattctgagggaataggacaagcagcagatctcaaaagcactcaagcagcaatcaaccaaatcaatgggaagctgaataggttgatcgggaaaaccaacgagaaattccatcagattgaaaaagaattctcagaagtagaagggagaattcaggacctcgagaaatatgttgaggacactaaaatagatctctggtcatacaacgcggagcttcttgttgccctggagaaccaacatacaattgatctaactgactcagaaatgaacaaactgtttgaaagaacaaagaagcaactgagggaaaatgctgaggatatgggcaatggttgtttcaaaatataccacaaatgtgacaatgcctgcatagggtcaatcagaaatggaacttatgaccatgatgtatacagagatgaagcattaaacaaccggttccagatcaaaggtgttgagctgaagtcaggatacaaagattggatcctatggatttcctttgccatatcatgttttttgctttgtgttgctttgttggggttcatcatgtgggcctgccaaaaaggcaacattaggtgcaacatttgcatttga

SEQ ID NO: 30930 - RNA, 1698 nt, synthetic construct
  misc_feature 1..1698: note = hemagglutinin__InfluenzaA__ABB53603
  source 1..1698: mol_type = other RNA
atgaaagtaaaactactgatcctgttatgtacatttacagctacatatgcagacacaatatgtataggctaccatgccaacaactcaaccgacactgttgacacagtacttgagaagaatgtgacagtgacacactctgtcaacctacttgaggacagtcacaatggaaaactgtgcctactaaaaggaatagcccccctacaattgggtaattgcagcgttgccggatggatcttaggaaacccagaatgcgaattactgatttccaaggaatcatggtcctacattgtagaaacaccaaatcctgagaatggagcatgttacccagggtatttcgccgactatgaggagctaagggagcaattgagttcagtatcttcatttgagagattcgaaatattccccaaagaaagctcatggcccaaccacaccgtaaccggagtatcagcatcatgctcccataatgggaaaagcagtttttacagaaatttgctatggctgacggggaagaatggtttgtacccaaacctgagcaagtcctatgcaaacaacaaaaagaaagaagtcctcatactatggggtgttcatcacccgcctaacatagggaaccaaaggaccctctattacacagaaaatgcttatgtctctgtagtgtcttcacattatagcagaagattcaccccagaaataaccaaaaggcccaaagtaagagatcaggaaggaagaatcaactactactggactctgctggaacccggggatacaataatatttgaggcaaatggaaatctaatagcgccatggtatgctttcgcactgagtagaggctttggatcaggaatcatcacctcaaatgcaccaatggatgaatgtgatgcgaagtgtcaaacacctcagggagctataaacagcagtcttcctttccagaatgtacacccagtcacaataggagagtgtccaaagtatgtcaggagtgcaaaattaaggatggttacaggactaaggaacatcccatccattcaatccagaggtttgtttggagccattgccggtttcattgaaggggggtggactggaatggtagatgggtggtatggttatcatcatcagaatgagcaaggatctggctatgctgcagatcaaaaaagcacacaaaatgccattaacgggattacaaacaaggtgaattctgtaattgagaaaatgaacactcaattcacagctgtgggcaaagaattcaacaaattggaaagaaggatggaaaacttaaataaaaaggttgatgatgggtttctagacatttggacatataatgcagaattgttggttctactggaaaatgaaaggactttggatttccacgactccaatgtgaagaatctgtacgagaaagtaaaaagccaattaaagaataatgccaaagaaataggaaatgggtgttttgaattctatcacaagtgtaacaatgaatgcatggagagtgtgaaaaatggaacttatgactatccaaaatattccgaagaatcaaagttaaacagggaaaaaattgatggagtgaaattggactcaatgggggtctatcagattctggcgatctactcaactgtcgccagttccctggttcttttggtctccctgggggcaatcagcttctggatgtgttccaatgggtctttgcagtgtagaatatgcatctga

SEQ ID NO: 30931 - RNA, 1701 nt, synthetic construct
  misc_feature 1..1701: note = hemagglutinin__InfluenzaA__ABB53614
  source 1..1701: mol_type = other RNA
atgaagactatcattgctttgagctacattctatgtctggttttcgctcaaaaacttcccggaaatgacaacagcacggcaacgctgtgccttgggcaccatgcagtaccaaacggaacgatagtgaaaacaatcacgaatgaccaaattgaagttactaatgctactgagctggttcagagttcctcaacaggtggaatatgcgacagtcctcatcagatccttgatggagaaaactgcacactaatagatgctctattgggagaccctcagtgtgatggcttccaaaataagaaatgggacctttttattgaacgcagcaaagcctacagcaactgttacccttatgatgtgccggattatgcctcccttaggtcactagttgcctcatccggcacactggaatttaacaatgaaagcttcaattggactggagtcactcaaaatggaacaagctctgcttgcaaaaggagatctaataacagtttctttagtagattgaattggttgacccacttaaaattcaaatacccagcattgaacgtgactatgccaaacaatgaaaaatttgacaaattgtacatttggggggttcaccacccgggtacggacaatgaccaaatcagcctatatgctcaagcttcaggaagaatcacagtctctaccaaaagaagccaacaaactgtaatcccgaatatcggatctagacccagggtaagagatatccccagcagaataagcatctattggacaatagtaaaaccgggagacatacttttgattaacagcacagggaatctaattgctcctcggggttacttcaaaatacgaagtgggaaaagctcaataatgagatcagatgcacccattggcaaatgcaattctgaatgcatcactccaaatggaagcattcccaatgacaaaccatttcaaaatgtaaacaggatcacatatggggcctgtcccagatatgttaagcaaaacactctgaaattggcaacagggatgcgaaatgtaccagagaaacaaactagaggcatatttggcgcaatcgcgggtttcatagaaaatggttgggagggaatggtggatggttggtacggtttcaggcatcaaaattctgagggaataggacaagcagcagatctcaaaagcactcaagcagcaatcaaccaaatcaatgggaagctgaataggttgatcgggaaaaccaacgagaaattccatcagattgaaaaagaattctcagaagtagaagggagaattcaggacctcgagaaatatgttgaggacactaaaatagatctctggtcatacaacgcggagcttcttgttgccctggagaaccaacatacaattgatctaactgactcagaaatgaacaaactgtttgaaagaacaaagaagcaactgagggaaaatgctgaggatatgggcaatggttgtttcaaaatataccacaaatgtgacaatgcctgcatagggtcaatcagaaatggaacttatgaccatgatgtatacagagatgaagcattgaacaaccggttccagatcaaaggtgttgagctgaagtcaggatacaaagattggatcctatggatttcctttgccatatcatgttttttgctttgtgttgctttgttggggttcatcatgtgggcctgccaaaaaggcaacattaggtgcaacatttgcatttga

SEQ ID NO: 30932 - RNA, 1701 nt, synthetic construct; identical to SEQ ID NO: 30764
  misc_feature 1..1701: note = hemagglutinin__InfluenzaA__ABB53625
  source 1..1701: mol_type = other RNA

SEQ ID NO: 30933 - RNA, 1701 nt, synthetic construct; identical to SEQ ID NO: 30826
  misc_feature 1..1701: note = hemagglutinin__InfluenzaA__ABB53652
  source 1..1701: mol_type = other RNA

SEQ ID NO: 30934 - RNA, 1701 nt, synthetic construct
  misc_feature 1..1701: note = hemagglutinin__InfluenzaA__ABB53663
  source 1..1701: mol_type = other RNA
atgaagactatctttgctttgagctacattctatgtctggttttcgctcaaaaacttcccggaaatgacaacagcacggcaacgctgtgccttgggcaccatgcagtaccaaacggaacgatagtgaaaacaatcacgaatgaccaaattgaagttactaatgctactgagctggttcagagttcctcaacaggtggaatatgcgacagtcctcatcagatccttgatggagaaaactgcacactaatagatgctctattgggagaccctcagtgtgatggcttccaaaataagaaatgggacctttttgttgaacgcagcaaagcccacagcaactgttacccttatgatgtgccggattatgcctcccttaggtcactagttgcctcatccggcacactggagtttaacaatgaaagcttcaattggactggagtcactcaaaatggaacaagctctgcttgcaaaaggagatctaataacagtttctttagtagattgaattggttgacccacttaaaattcaaatacccagcattgaacgtgactatgccaaacaatgaaaattttgacaaattgtacatttggggagttcaccacccgggtacggacaatgaccaaatcagcctatatgctcaagcatcaggaagaatcacagtctctaccaaaagaagccaacaaactgtaatcccgaatatcggatctagacccagggtaagggatatccccagcagaataagcatctattggacaatagtaaaaccgggagacatacttttgattaacagcacagggaatctaattgctcctcggggttacttcaaaatacgaagtgggaaaagctcaataatgagatcagatgcacccattggcaaatgcaattctgaatgcatcactccaaatggaagcattcccaatgacaaaccatttcaaaatgtaaacaggatcacatatggggcctgtcccagatatgttaagcaaaacactctgaaattggcaacagggatgcgaaatgtaccagagaaacaaactagaggcatatttggcgcaatcgcgggtttcatagaaaatggttgggagggaatggtggatggttggtacggtttcaggcatcaaaattctgagggaataggacaagcagcagatctcaaaagcactcaagcagcaatcaaccaaatcaatgggaagctgaataggttgatcgggaaaaccaacgagaaattccatcagattgaaaaagaattctcagaagtagaagggagaattcaggacctcgagaaatatgttgaggacactaaaatagatctctggtcatacaacgcggagcttcttgttgccctggagaaccaacatacaattgatctaactgactcagaaatgaacaaactgtttgaaagaacaaagaagcaactgagggaaaatgctgaggatatgggcaatggttgtttcaaaatataccacaaatgtgacaatgcctgcatagggtcaatcagaaatggaacttatgaccatgatgtatacagagatgaagcattaaacaaccggttccagatcaaaggtgttgagctgaagtcaggatacaaagattggatcctatggatttcctttgccatatcatgttttttgctttgtgttgctttgttggggttcatcatgtgggcctgccaaaaaggcaacattaggtgcaacatttgcatttga

SEQ ID NO: 30935 - RNA, 1701 nt, synthetic construct
  misc_feature 1..1701: note = hemagglutinin__InfluenzaA__ABB53685
  source 1..1701: mol_type = other RNA
atgaagactatcattgctttgagctacattctatgtctggttttcgctcaaaaacttcccggaaatgacaacagcacggcaacgctgtgccttgggcaccatgcagtaccaaacggaacgatagtgaaaacaatcacgaatgaccaaattgaagttactaatgctactgagctggttcagagttcctcaacaggtggaatatgcgacagtcctcatcagatccttgatggagaaaactgcacactaatagatgctctattgggagaccctcagtgtgatggcttccaaaataagaaatgggacctttttattgaacgcagcaaagcctacagcaactgttacccttatgatgtgccggattatgcctcccttaggtcactagttgcctcatccggcacactggaatttaacaatgaaagcttcaattggactggagtcactcaaaatggaacaagctctgcttgcaaaaggagatctaataacagtttctttagtagattgaattggttgacccacttaaaattcaaatacccagcattgaacgtgactatgccaaacaatgaaaaatttgacaaattgtacatttggggggttcaccacccgggtacggacaatgaccaaatcagcctatatgctcaagcttcaggaagaatcacagtctctaccaaaagaagccaacaaactgtaatcccgaatatcggatctagacccagggtaagggatatccccagcagaataagcatctattggacaatagtaaaaccgggagacatacttttgattaacagcacagggaatctaattgctcctcggggttacttcaaaatacgaagtgggaaaagctcaataatgagatcagatgcacccattggcaaatgcaattctgaatgcatcactccaaatggaagcattcccaatgacaaaccatttcaaaatgtaaacaggatcacatatggggcctgtcccagatatgttaagcaaaacactctgaaattggcaacagggatgcgaaatgtaccagagaaacaaactagaggcatatttggcgcaatcgcgggtttcatagaaaatggttgggagggaatggtggatggttggtacggtttcaggcatcaaaattctgagggaataggacaagcagcagatctcaaaagcactcaagcagcaatcaaccaaatcaatgggaagctgaataggttgatcgggaaaaccaacgagaaattccatcagattgaaaaagaattctcagaagtagaagggagaattcaggacctcgagaaatatgttgaggacactaaaatagatctctggtcatacaacgcggagcttcttgttgccctggagaaccaacatacaattgatctaactgactcagaaatgaacaaactgtttgaaagaacaaagaagcaactgagggaaaatgctgaggatatgggcaatggttgtttcaaaatataccacaaatgtgacaatgcctgcatagggtcaatcagaaatggaacttatgaccatgatgtatacagagatgaagcattgaacaaccggttccagatcaaaggtgttgagctgaagtcaggatacaaagattggatcctatggatttcctttgccatatcatgttttttgctttgtgttgctttgttggggttcatcatgtgggcctgccaaaaaggcaacattaggtgcaacatttgcatttga

SEQ ID NO: 30936 - RNA, 1701 nt, synthetic construct
  misc_feature 1..1701: note = hemagglutinin__InfluenzaA__ABB53696
  source 1..1701: mol_type = other RNA
atgaagactatcattgctttgagctacattttatgtctggttttcgctcaaaaacttcccggaaatgacaacagcacggcaacgctgtgcctggggcaccatgcagtgccaaacggaacgctagtgaaaacaatcacgaatgaccaaattgaagtgactaatgctactgagctggttcagagttcctcaacaggtagaatatgcgacagtcctcaccaaatccttgatggagaaaactgcacactaatagatgctctattgggagaccctcattgtgatggcttccaaaataaggaatgggacctttttgttgaacgcagcaaagcctacagcaactgttacccttatgatgtgccggattatgcctcccttaggtcactagttgcctcatccggcacactggagtttaacaatgaaagcttcaattggactggagtcgctcagaatggaacaagctctgcttgcaaaaggagatctaataaaagtttctttagtagattgaattggttgcaccaattaaaatacaaatatccagcactgaacgtgactatgccaaacaatgaaaaatttgacaaattgtacatttggggggttcaccacccgagtacggacagtgaccaaatcagcctatatgctcaagcatcagggagagtcacagtctctaccaaaagaagccaacaaactgtaatcccgaatatcggatctagaccctgggtaaggggtgtctccagcagaataagcatctattggacaatagtaaaaccgggagacatacttttgattaacagcacagggaatctaattgctcctcggggttacttcaaaatacgaagtgggaaaagctcaataatgaggtcagatgcacccattggcaaatgcaattctgaatgcatcactccaaatggaagcattcccaatgacaaaccatttcaaaatgtaaacaggatcacatatggggcctgtcccagatatgttaagcaaaacactctgaaattggcaacagggatgcggaatgtaccagagaaacaaactagaggcatattcggcgcaatcgcgggtttcatagaaaatggttgggagggaatggtggacggttggtacggtttcaggcatcaaaattctgagggcacaggacaagcagcagatcttaaaagcactcaagcagcaatcaaccaaatcaacgggaaactgaataggttaatcgagaaaacgaacgagaaattccatcaaattgaaaaagaattctcagaagtagaagggagaattcaggacctcgagaaatatgttgaggacactaaaatagatctctggtcgtacaacgcggagcttcttgttgccctggagaaccaacatacaattgatctaactgactcagaaatgaacaaactgtttgaaagaacaaagaagcaactgagggaaaatgctgaggatatgggcaatggttgtttcaaaatataccacaaatgtgacaatgcctgcatagggtcaatcagaaatggaacttatgaccatgatgtatacagagacgaagcattaaacaaccggttccagatcaaaggtgttgagctgaagtcaggatacaaagattggatcctatggatttcctttgccatatcatgttttttgctttgtattgctttgctggggttcatcatgtgggcctgccaaaaaggcaacattaggtgcaacgtttgcatttga

SEQ ID NO: 30937 - RNA, 1698 nt, synthetic construct
  misc_feature 1..1698: note = hemagglutinin__InfluenzaA__ABB53707
  source 1..1698: mol_type = other RNA
atgaaagcaaaactactggtcctgttatgtacatttacagctacatacgcagacacaatatgtataggctaccatgccaacaactcaaccgacactgttgacacagtacttgagaagaatgtgacagtgacacactctgtcaacctacttgaggacagtcacaatggaaaactatgtctactaaaaggaatagccccactacaattgggtaattgcagcgttgccggatggatcttaggaaacccagaatgcgaattactgatttccaaggaatcatggtcctacattgtagaaacaccaaatcccgagaatggaacatgttacccagggtatttcgccgactatgaggaactgagggagcaattgagttcagtatcttcatttgagagattcgaaatattccccaaagggagctcatggcccaaccacaccgtaaccggagtatcagcatcatgctcccataatgggaaaagcagtttttacagaaatttgctatggctgacggggaagaatggtttgtacccaaacctgagcatgtcctatgtaaacaacaaagagaaagaagtccttgtgctatggggtgttcatcacccacctaacataggggaccaaagggccctctaccatacagaaaatgcttatgtctctgtagtgtcttcacattatagcagaagattcaccccagaaatagccaaaagacccaaagtaagagatcaggaaggaagaatcaactactactggactctgctggaacccggggacacaataatatttgaggcaaatggaaatctaatagcgccatggtatgctttcgcactgagtagaggctttggatcaggaatcatcacctcaaatgcaccaatggatgaatgtgatgcgaagtgtcaaacacctcagggagctataaacagtagtcttcctttccagaatgtacacccagttacaataggagagtgtccaaagtatgtcaggagtgcaaaattaaggatggttacaggactaaggaacatcccatccattcaatccagaggtttgtttggagccattgccggtttcattgaaggggggtggactggaatggtagatgggtggtatggttatcatcatcagaatgagcaaggatctggctatgctgcagatcaaaaaagcacacaaaatgccattaacgggattacaaacaaggtgaattctgtaattgagaaaatgaacactcaattcacagctgtgggcaaagaattcaacaaattagaaagaaggatggaaaacttaaataaaaaagttgatgatgggtttctagacatttggacatataatgcagaattgttggttctactggaaaatgaaaggactttggatttccatgactccaatgtgaagaatctgtatgagaaagtaaaaagccaattaaagaataatgccaaagaaataggaaacgggtgttttgaattctatcacaagtgtaacaatgaatgcatggaaagtgtgaaaaatggaacttatgactatccaaaatattccgaagaatcaaagttaaacagggagaaaattgatggagtaaaattggaatcaatgggagtctatcagattctggcgatctactcaactgtcgccagttccctggttcttttggtctccctgggggcaatcagcttctggatgtgttccaatgggtctttgcagtgtagaatatgcatctga

SEQ ID NO: 30938 - RNA, 1701 nt, synthetic construct; identical to SEQ ID NO: 30892
  misc_feature 1..1701: note = hemagglutinin__InfluenzaA__ABB53718
  source 1..1701: mol_type = other RNA

SEQ ID NO: 30939 - RNA, 1698 nt, synthetic construct
  misc_feature 1..1698: note = hemagglutinin__InfluenzaA__ABB53740
  source 1..1698: mol_type = other RNA
atgaaagtaaaactactggtcctgttatgtacatttacagctacatatgcagacacaatatgtataggctaccatgccaacaactcaaccgacactgttgacacagtacttgagaagaatgtgacagtgacacactctgtcaacctacttgaggacagtcacaatggaaaactatgtctactaaaaggaatagctccactacaattgggtaattgcagcgttgccggatggatcttaggaaacccagaatgcgaattactgatttccaaggaatcatggtcctacattgtagaaacaccaaatcctgagaatggaacatgttacccagggtatttcgccgactatgaggaactgagggagcaattgagttcagtatcttcatttgagaggttcgaaatattccccaaagaaagctcatggcccaatcacaccgtaaccggagtatcagcatcatgctcccataatgggaaaagcagtttttacagaaatttgctatggctgacggggaagaatggcctgtacccaaacctgagcaagtcctatgcaaacaacaaagagaaagaagtccttgtactatggggtgttcatcacccgcctaacatgggggaccaaagggccctctatcatacagaaaatgcttatgtctctgtagtgtcttcacattatagcagaagattcaccccagaaatagccaaaagacccaaagtaagagatcaggaaggaagaatcaactactactggactctgctggaacccggggagacaataatatttgaggcaaatggaaatctaatagcgccaaggtatgctttcgcactgagtagaggctttggatcaggaatcatcacctcaaatgcaccaatggatgaatgtgatgcgaagtgtcaaacacctcagggagctataaacagcagtcttcctttccagaatgtacacccagtcacaataggagagtgtccaaagtatgtcaggagtacaaaattaaggatggttacaggactaaggaacatcccatccattcaatccagaggtttgtttggagccattgccggtttcattgaaggggggtggactggaatggtagatggttggtatggttatcatcatcagaatgagcaaggatctggctatgctgcagatcaaaaaagcacacaaaatgccattaacgggattacaaacaaggtgaattctgtaattgagaaaatgaacactcaattcacagctgtgggcaaagaattcaacaaattggaaagaaggatggaaaacttaaataaaaaagttgatgatgggtttctagacatttggacatataatgcagaattgttggttctactggaaaatgaaaggactttggatttccatgactccaatgtgaagaatctgtatgagaaagtaaaaagccaattaaagaacaatgccaaagaaataggaaacgggtgttttgaattctatcacaagtgtaacgatgaatgcatggagagtgtgaaaaatggaacttatgactatccaaaatattccgaagaatcaaagttaaacagggagaaaattgatggagtgaaattggaatcaatgggagtctatcagattctggcgatctactcaacagtcgccagttccctggttcttttggtctccctgggggcaatcagcttctggatgtgttccaatgggtctttgcagtgtagaatatgcatctaa

SEQ ID NO: 30940 - RNA, 1701 nt, synthetic construct
  misc_feature 1..1701: note = hemagglutinin__InfluenzaA__ABB53751
  source 1..1701: mol_type = other RNA
atgaagactatcattgctttgagctacatttcctgtctggttttcgcccaaaaccttcccggaaatgacaacagcacagcaacgctgtgcctgggacatcatgcagtgccaaacggaacgctagtgaaaacaatcacgaatgaccagattgaagtgactaatgctactgagctggttcagagttcctcaacaggtagaatatgcgacagtcctcacagaatccttgatgggaaaaactgcacactgatagatgctctattgggagaccctcattgtgatggctttcaaaatgagaaatgggacctttttgttgaacgcagcaaagctttcagcaactgttacccttatgatgtgccagattatgcctcccttaggtcactagttgcctcgtcaggcaccctggagtttatcaatgaaggcttcaattggactggagtcactcagagtgggggaagctatgcttgcaaaaggggatctgataacagtttcttcagtagactgaactggttgtacaaatcagaaagcaaatatccagtgctgaacgtgactatgccaaacaatggcaattttgacaaactgtacatttggggggttcaccacccgagcacggacaaagaacaaaccaacctatatgttcgagcatcagggagagtcacagtctctaccaagagaagccagcaaactataatcccgaatatcgggtctagaccctgggtaaggggtctgtctagtggaataagtatctattggacaatagtaaaaccgggagacatactgttaattaatagtaatgggaacctaattgctcctcggggttacttcaaaatacgcactgggaaaagctcaatattgaggtcagatgcacctattggcacctgcagttctgaatgcatcactccaaatggaagcattcccaatgacaagccctttcaaaacgtaaacaagatcacatatggggcatgtccaaagtatgttaagcaaaacactctaaagttggcaacagggatgcggaatgtaccagagaaacaaactagaggcatattcggcgcaatagcaggtttcatagaaaatggttgggagggaatggtagatggctggtacggtttcaggcatcaaaattctgagggcacaggacaagcagcagatcttaaaagcactcaagcagcaatcgaccaaatcaatgggaaactgaatagggtaatcgagaaaacgaacgagaaattccatcaaatcgaaaaggaattctcagaagtagaaggaagaattcaggacctcgagaaatacgttgaagacactaaaatagatctctggtcttacaacgcggagcttcttgtcgctctggagaaccaacatacaattgatctgactgactcggaaatgaacaaactgtttgaaaaaacaaggaggcaactgagggaaaatgctgaggacatgggcaatggttgcttcaaaatataccacaaatgtgacaatgcttgcatagggtcaatcagaaatggaacttatgaccatgatgtatacagagacgaagcattaaacaaccggtttcagatcaaaggtgttgagctgaagtcaggatacaaagactggatcctgtggatttcctttgccatatcatgctttttgctttgtgttgttttgctggggttcatcatgtgggcctgccaaaaaggcaacattaggtgcaacatttgcatttga

SEQ ID NO: 30941 - RNA, 1701 nt, synthetic construct
  misc_feature 1..1701: note = hemagglutinin__InfluenzaA__ABB60007
  source 1..1701: mol_type = other RNA
atgaagactatcattgctttgagctacattttatgtctggttttcgctcaaaaacttcccggaaatgacaacagcacggcaacgctgtgcctgggacaccatgcagtgccaaacggaacgctagtgaaaacaatcacgaatgaccaaattgaagtgactaatgctactgagctggttcagagttcctcaacagatagaatatgcgacagtcctcaccgaatccttgatggagaaaactgcacactgatagatgctctattgggagaccctcattgtgatggcttccaaaataaggaatgggacctttttgttgaacgcagcaaagcctacagcaactgttacccttatgatgtgccggattatgcctcccttaggtcactagttgcctcatccggcaccctggagtttaacaatgaaagcttcaattggactggagtcgctcagaatggaacaagctatgcttgcaaaaggagatctattaaaagtttctttagtagattgaattggttgcaccaattaaaatacaaatatccagcactgaacgtgactatgccaaacaatgacaaatttgacaaattgtacatttggggggttcaccacccgagtacggacagtgaccaaaccagcctatatgctcaagcatcagggagagtcacagtctctaccaaaagaagccaacaaactgtaatcccgaatatcggatctagaccctgggtaaggggtgtctccagcagaataagcatctattggacaatagtaaaaccgggagacatacttttgattaacagcacagggaatctaattgctcctcggggttacttcaaaatacgaagtgggaaaagctcaataatgaggtcagatgcacccattggcaaatgcaattctgaatgcatcactccaaatggaagcattcccaatgacaaaccatttcaaaatgtaaacaggatcacatatggggcctgtcccagatatgttaagcaaaacactctgaaattggcaacagggatgcggaatgtaccagagaaacaaactagaggcatattcggcgcaatcgcaggtttcatagaaaatggttgggagggaatggtagacggttggtacggtttcaggcatcaaaattctgagggcacaggacaagcagcagatcttaaaagcactcaagcagcaatcaaccaaatcaacgggaaactgaataggttaatcgagaaaacgaacgagaaattccatcaaattgaaaaagaattctcagaagtagaagggagaattcaggacctcgagaaatatgttgaggacactaaaatagatctctggtcgtacaacgcggagcttcttgttgccctggagaaccaacatacaattgatctaactgactcagaaatgaacaaactgtttgaaagaacaaggaagcaactgagggaaaatgctgaggatatgggcaatggttgtttcaaaatataccacaaatgtgacaatgcctgcatagggtcaatcagaaatggaacttatgaccatgatgtatacagagatgaagcattaaacaaccggttccagatcaaaggtgttgagcttaagtcaggatacaaagattggatcctatggatttcctttgccatatcatgttttttgctttgtgttgttttgctggggttcatcatgtgggcctgccaaaaaggcaacattaggtgcaacatttgcatttga

SEQ ID NO: 30942 - RNA, 1701 nt, synthetic construct
  misc_feature 1..1701: note = hemagglutinin__InfluenzaA__ABB77853
  source 1..1701: mol_type = other RNA
atgaagactatcattgctttgagctacatttcatgtctggttttcgctcaaaaacttcccggaaatgacaacagcacggcaacgctgtgcctgggacaccatgcagtgccaaacggaacgctagtgaaaacaatcacgaatgaccaaattgaagtgactaatgctactgagctggttcagagttcctcaacaggtagaatatgcgacagtcctcaccgaatccttgatggagaaaactgcacactgatagatgctctattgggagaccctcattgtgatggcttccaaaataaggaatgggacctttttgttgaacgcagcaaagcctacagcaactgttacccttatgatgtgccggattatgcctcccttaggtcactagttgcctcatccggcactctggagtttaacaatgaaagcttcaattggactggagtcgctcagaatggaacaagctatgcttgcaaaaggagatctattaaaagtttctttagtagattgaattggttgcaccaattaaaatacaaatatccagcactgaacgtgactatgccaaacaatgacaaatttgacaaattgtacatttggggggttcaccacccgagtacggacagtgaccaaaccagcctatatgctcaagcatcagggagagtcacagtctctaccaaaagaagccaacaaactgtaatcccgaatatcggatctagaccctgggtaaggggtgtctccagcagaataagcatctattggacaatagtaaaaccgggagacatacttttgattaacagcacagggaatctaattgctcctcggggttacttcaaaatacgaagtgggaaaagctcaataatgaggtcagatgcacccattggcaaatgcaattctgaatgcatcactccagatggaagcattcccaatgacaaaccatttcaaaatgtaaacaggatcacatatggggcctgtcccagatatgttaagcaaaacactctgaaattggcaacagggatgcggaatgtaccagagaaacaaactagaggcatattcggcgcaatcgcaggtttcatagaaaatggttgggagggaatggtagacggttggtacggtttcaggcatcaaaattctgagggcacaggacaagcagcagatcttaaaagcactcaagcagcaatcaaccaaatcaacgggaaactgaataggttaatcgagaaaacgaacgagaaattccatcaaattgaaaaagaattctcagaagtagaagggagaattcaggacctcgagaaatatgttgaggacactaaaatagatctctggtcgtacaacgcggagcttcttgttgccctggagaaccaacatacaattgatctaactgactcagaaatgaacaaactgtttgaaagaacaaggaagcaactgagggaaaatgctgaggatatgggcaatggttgtttcaaaatataccacaaatgtgacaatgcctgcatagggtcaatcagaaatggaacttatgaccatgatgtatacagagacgaagcattaaacaaccggttccagatcaaaggtgttgagctgaagtcaggatacaaagattggatcctatggatttcctttgccatatcatgttttttgctttgtgttgttttgctggggttcatcatgtgggcctgccaaaaaggcaacattaggtgcaacatttgcatttga

SEQ ID NO: 30943 - RNA, 1701 nt, synthetic construct
  misc_feature 1..1701: note = hemagglutinin__InfluenzaA__ABB79731
  source 1..1701: mol_type = other RNA
atgaagactatcattgctttgagctacattctatgtctggttttcgctcaagaacttcccggaaatgacaacagcacggcaacgctgtgccttgggcaccatgcagtaccaaacggaacgatagtgaaaacaatcacgaatgaccaaattgaagttactaatgctactgagctggttcagaattcctcaacaggtggaatatgcgacagtcctcatcagatccttgatggagaaaactgcacactaatagatgctctattgggagaccctcagtgtgatggcttccaaaataagaaatgggacctttttgttgaacgcagcaaagcctacagcaactgttacccttatgatgtgccggattatgcctcccttaggtcactagttgcctcatccggcacactggagtttaacaatgaaagcttcaattggactggagtcactcaaaatggaacaagctctgcttgcaaaaggagatctaataacagtttctttagtagattgaattggttgacccacttaaaattcaaatacccagcattgaacgtgactatgccaaacaatgaaaaatttgacaaattgtacatttggggggttcaccacccgggtacggacaatgaccaaaccagcctatatgctcaagcatcaggaagaatcacagtctctaccaaaagaagccaacaaactgtaatcccgaatatcggatctagacccagggtaagggatatccccagcagaataagcatctattggacaatagtaaaaccgggagacatacttttgattaacagcacagggaatctaattgctcctcggggttacttcaaaatacgaagtgggaaaagctcaataatgagatcagatgcacccattggcaaatgcaattctgaatgcatcactccaaatggaagcattcccaatgacaaaccatttcaaaatgtaaacaggatcacatatggggcctgtcccagatatgttaagcaaaacactctgaaattggcaacagggatgcgaaatgtaccagagaaacaaactagaggcatatttggcgcaatcgcgggtttcatagaaaatggttgggagggaatggtggatggttggtacggttttaggcatcaaaattctgagggaataggacaagcagcagatctcaaaagcactcaagcagcaatcaaccaaatcaatgggaagctgaataggttgatcggaaaaaccaacgagaaattccatcagattgaaaaagaattctcagaagtagaagggagaattcaggacctcgagaaatatgttgaggacactaaaatagatctctggtcatacaacgcggagcttcttgttgccctggagaaccaacatacaattgatctaactgactcagaaatgaacaaactgttcgaaagaacaaagaagcaactgagggaaaatgctgaggatatgggcaatggttgtttcaaaatataccacaaatgtgacaatgcctgcatagggtcaatcagaaatggaacttatgaccatgatgtatacagagatgaagcattaaacaaccggttccagatcaaaggtgttgagctgaagtcaggatacaaagattggatcctatggatttcctttgccatatcatgttttttgctttgtgttgctttgttggggttcatcatgtgggcctgccaaaaaggcaacattaggtgcaacatttgcatttga

SEQ ID NO: 30944 - RNA, 1701 nt, synthetic construct
  misc_feature 1..1701: note = hemagglutinin__InfluenzaA__ABB79788
  source 1..1701: mol_type = other RNA
atgaagactatcattgctttgagctacattttctgtctggttttcgcccaaaaacttcccggaaatgacaacagcacagcaacgctgtgcttgggacatcatgcagtgccaaacggaacgctagtgaaaacaatcacgaatgatcaaattgaagtgactaatgctactgagctggttcagagttcctcaacaggtagaatatgcgacagtcctcaccgaatccttgatgggaaaaactgcacactgatagatgctctattgggagaccctcattgtgatggcttccaaaatgagaaatgggacctttttgttgaacgcagcaaagctttcagcaactgttacccttatgatgtgccggattatgcctcccttaggtcactagttgcctcatcaggcaccctggagtttatcaatgaaggcttcaattggactggagtcactcagagtgggggaagctatgcttgcaaaaggggatctgttaacagtttcttcagtagattgaattggttgtacgaatcagaaagcaaatatccagtgctgaacgtgactatgccaaacaatggcaaatttgacaaattgtacatttggggggttcaccacccgatcacggacaaagaacaaaccaacctatatgttcgagcatcagggagagtcacagtctctaccaagagaagccagcaaactgtaatcccgaatatcgggtctagaccctgggtaaggggtctgtctagtagaataagtatctattggacaatagtaaaaccgggagacatactgttaattaatagcactgggaacctaattgctcctcggggttacttcaaaatacgcactgggaaaagctcaataatgaggtcagatgcacctattggcacctgcagttctgaatgcatcactccaaatggaagcattcccaatgacaaaccctttcaaaatgtaaacaagatcacatatggggcatgtcccaggtatgttaagcaaaacactctgaagttggcaacagggatgcggaatgtaccagagaaacaaactagaggcatattcggcgcaatagcaggtttcatagaaaatggttgggagggaatggtagacggttggtacggtttcaggcatcaaaattctgagggcacaggacaagcagcagatcttaaaagcactcaagcagcaatcgaccaaatcaacgggaaactgaataggttaatcgagaaaacgaacgagaaattccatcaaatcgaaaaggaattctcagaagtagaagggagaattcaggacctcgagaaatatgttgaagacactaaaatagatctctggtcttacaacgcggagcttcttgtcgccctggagaaccaacatacaattgatctgactgattcagaaatgaacaaactgtttgaaaaaacaaggaagcaactgagggaaaatgctgaggacatgggcaatggttgcttcaaaatataccacaaatgtgacaatgcttgcatagggtcaatcagaaatggaacttatgaccatgatgtatacagagacgaagcattaaacaaccggtttcagatcaaaggtgttgagctgaagtcaggatacaaagactggatcctatggatttcctttgccatatcatgctttttgctttgtgttgttttgctggggttcatcatgtgggcctgccaaaaaggcaacattaggtgcaacatttgcatttga

SEQ ID NO: 30945 - RNA, 1701 nt, synthetic construct
  misc_feature 1..1701: note = hemagglutinin__InfluenzaA__ABB79799
  source 1..1701: mol_type = other RNA
atgaagactatcattgctttgagctacattttctgtctggttttcgcccaaaaacttcccggaaatgacaacagcacagcaacgctgtgcttgggacatcatgcagtgccaaacggaacgctagtgaaaacaatcacgaatgatcagattgaagtgactaatgctactgagctggttcagagttcctcaacaggtagaatatgcgacagtcctcaccgaatccttgatgggaaaaactgcacactgatagatgctctattgggagaccctcattgtgatggcttccaaaatgagaaatgggacctttttgttgaacgcagtaaagctttcagcaactgttacccttatgatgtgccggattatgcctcccttaggtcactagttgcctcatcaggcaccctggagtttatcaatgaaggcttcaattggactggagtcactcagagtgggggaagctatgcttgcaaaaggggatctgttaacagtttcttcagtagattgaattggttgtacgaatcagaaagcaaatatccagtgctgaacgtgactatgccaaacaatggcaaatttgacaaattgtacatttggggggttcaccacccgagcacggacaaagaacaaaccaacctatatgttcgagcatcagggaaagtcacagtctctaccaagagaagccagcaaactgtaatcccgaatatcgggtctagaccctgggtaaggggtctgtctagtagaataagtatctattggacaatagtaaaaccgggagacatactgttaattaatagcactggaaacctaattgctcctcggggttacttcaaaatacgcactgggaaaagctcaataatgaggtcagatgcacctattggcacctgcagttctgaatgcatcactccgaatggaagcattcccaatgacaaaccctttcaaaatgtaaacaagatcacatatggagcatgtcccaggtatgttaagcaaaacactctgaagttggcaacagggatgcggaatgtaccagagaagcaaactagaggcatattcggcgcaatagcaggtttcatagaaaatggttgggagggaatggtagacggttggtacggtttcaggcatcaaaattctgagggcacaggacaagcagcagatcttaaaagcactcaagcagcaatcgaccaaatcaacgggaaactgaacaggttaatcgagaaaacgaacgagaaattccatcaaatcgaaaaggaattctcagaagtagaagggagaattcaggacctcgagaaatatgttgaagacactaaaatagatctctggtcttacaacgcggagcttcttgtcgccctggagaaccaacatacaattgatctgactgattcagaaatgaacaaactgtttgaaaaaacaaggaagcaactgagggaaaatgctgaggacatgggcaatggttgcttcaaaatataccacaaatgtgacaatgcttgcatagggtcaatcagaaatggaacttatgaccatgatgtatacagagacgaagcattaaacaaccggtttcagatcaaaggtgttgagctgaagtcaggatacaaagactggatcctatggatttcctttgccatatcatgctttttgctttgtgttgttttgctggggttcatcatgtgggcctgccaaaaaggcaacattaggtgcaacatttgcatttga

SEQ ID NO: 30946 - RNA, 1701 nt, synthetic construct
  misc_feature 1..1701: note = hemagglutinin__InfluenzaA__ABB79810
  source 1..1701: mol_type = other RNA
atgaagactatcattgctttgagctacattttatgtctggttttcgctcaaaaacttcccggaaatgacaacagcacagcaacgctgtgcctgggacatcatgcagtgccaaacggaacgctagtgaaaacaatcacgaatgatcaaattgaagtgactaatgctactgagctggttcagagttcctcaacaggtagactatgcgacagtcctcaccgaatccttgatggaaaaaactgcacactgatagatgctctattgggagaccctcattgtgatggcttccaaaataaggaatgggacctttttgttgaacgcagcaaagcttacagcaactgttacccttatgatgtgccggattatgcctcccttaggtcactagttgcctcatcaggcaccctggagtttatcaatgaagacttcaattggactggagtcgctcaggatgggggaagctatgcttgcagaaggggatctgttaacagtttctttagtagattgaattggttgcacaaattagaatacaaatatccagcgctgaacgtgactatgccaaacaatggcaaatttgacaaattgtacatttggggggttcaccacccgagcacggacagtgaccaaaccagcctatatgttcgagcatcagggagagtcacagtctctaccaaaagaagccaacaaactgtaatcccgaatatcgggtctagaccctgggtaaggggtcagtccagtagaataagcatctattggacaatagtaaaaccgggagacatacttttgattgatagcacagggaatctaattgctcctcggggttacttcaaaatacgaaatgggaaaagctcaataatgagatcagatgcacccattggcaactgcagttctgaatgcatcactccaaatggaagcattcccaatgacaaaccttttcaaaatgtaaacaggatcacatatggggcctgccccagatatgttaagcaacacactctgaaattggcaacagggatgcggaatgtaccagagaaacaaactagaggcatattcggcgcaatcgcaggtttcatagaaaatggttgggagggaatggtagacggttggtacggtttcaggcatcaaaattctgagggcacaggacaagcagcagatcttaaaagcactcaagcagcaatcgaccaaatcaacgggaaactgaataggttaatcgagaaaacgaacgagaaattccatcaaatcgaaaaagaattctcagaagtagaagggagaattcaggacctcgagaaatatgttgaagacactaaaatagatctctggtcttacaacgcggagcttcttgttgccctggagaaccaacatacaattgatctaacggactcagaaatgaacaaactgtttgaaagaacaaggaagcaactgagggaaaatgctgaggacatgggcaatggttgcttcaaaatataccacaaatgtgacaatgcctgcatagggtcaatcagaaatggaacttatgaccatgatgtatacagagacgaagcattaaacaaccggttccagatcaaaggtgttgagctaaagtcaggatacaaagattggatcctatggatttcctttgccatatcatgctttttgctttgtgttgttttgctggggttcatcatgtgggcctgccaaaaaggcaacattaggtgcaacatttgcatttga

SEQ ID NO: 30947 - RNA, 1701 nt, synthetic construct
  misc_feature 1..1701: note = hemagglutinin__InfluenzaA__ABB79957
  source 1..1701: mol_type = other RNA
atgaagactatcattgctttgagctacattttatgtctggttttcgctcaaaaacttcccggaaatgacaacagcacagcaacgctgtgcctgggacatcatgcagtgccaaacggaacgctagtgaaaacaatcacgaatgatcaaattgaagtgactaatgctactgagctggttcagagttcctcaacaggtagactatgcgacagtcctcaccgaatccttgatggaaaaaactgcacactgatagatgctctattgggagaccctcattgtgatggcttccaaaataaggaatgggacctttttgttgaacgcagcaaagcttacagcaactgttacccttatgatgtgccggattatgcctcccttaggtcactagttgcctcatcaggcaccctggagtttatcaatgaagacttcaattggactggagtcgctcaggatgggggaagctatgcttgcagaaggggatctgttaacagtttctttagtagattgaattggttgcacaaattagaatacaaatatccagcgctgaacgtgactatgccaaacaatggcaaatttgacaaattgtacatttggggggttcaccacccgagcacggacagtgaccaaaccagcctatatgttcgagcatcagggagagtcacagtctctaccaaaagaagccaacaaactgtaatcccgaatatcgggtctagaccctgggtaaggggtcagtccagtagaataggcatctattggacaatagtaaaaccgggagacatacttttgattaatagcacagggaatctaattgctcctcggggttacttcaaaatacgaaatgggaaaagctcaataatgagatcagatgcacccattggcaactgcagttctgaatgcatcactccaaatggaagcattcccaatgacaaaccttttcaaaatgtaaacaggatcacatatggggcctgccccagatatgttaagcaacacactctgaaattggcaacagggatgcggaatgtaccagagaaacaaactagaggcatattcggcgcaatcgcaggtttcatagaaaatggttgggagggaatggtagacggttggtacggtttcaggcatcaaaattctgagggcacaggacaagcagcagatcttaaaagcactcaagcagcaatcgaccaaatcaacgggaaactgaataggttaatcgagaaaacgaacgagaaattccatcaaatcgaaaaagaattctcagaagtagaagggagaattcaggacctcgagaaatatgttgaagacactaaaatagatctctggtcttacaacgcggagcttcttgttgccctggagaaccaacatacaattgatctaacggactcagaaatgaacaaactgtttgaaagaacaaggaagcaactgagggaaaatgctgaggacatgggcaatggttgcttcaaaatataccacaaatgtgacaatgcctgcatagggtcaatcagaaatggaacttatgaccatgatgtatacagagacgaagcattaaacaaccggttccagatcaaaggtgttgagctaaagtcaggatacaaagattggatcctatggatttcctttgccatatcatgctttttgctttgtgttgttttgctggggttcatcatgtgggcctgccaaaaaggcaacattaggtgcaacatttgcatttga

SEQ ID NO: 30948 - RNA, 1701 nt, synthetic construct
  misc_feature 1..1701: note = hemagglutinin__InfluenzaA__ABB79968
  source 1..1701: mol_type = other RNA
atgaagactatcattgctttgagctacattttatgtctggttttcgctcaaaaacttcccggaaatgacaacagcacagcaacgctgtgcctgggacatcatgcagtgccaaacggaacgctagtgaaaacaatcacgaatgatcaaattgaagtgactaatgctactgagctggttcagagttcctcaacaggtagactatgcgacagtcctcaccgaatccttgatggaaaaaactgcacactgatagatgctctattgggagaccctcattgtgatggcttccaaaataaggaatgggacctttttgttgaacgcagcaaagcttacagcaactgttacccttatgatgtgccggattatgcctcccttaggtcactagttgcctcatcaggcaccctggagtttatcaatgaagacttcaattggactggagtcgctcaggatgggggaagctatgcttgcagaaggggatctgttaacagtttctttagtagattgaattggttgcacaaattagaatacaaatatccagcgctgaacgtgactatgccaaacaatggcaaatttgacaaattgtacatttggggggttcaccacccgagcacggacagtgaccaaaccagcctatatgttcgagcatcagggagagtcacagtctctaccaaaagaagccaacaaactgtaatcccgaatatcgggtctagaccctgggtaaggggtcagtccagtagaataagcatctattggacaatagtaaaaccgggagacatacttttgattaatagcacagggaatctaattgctcctcggggttacttcaaaatacgaaatgggaaaagctcaataatgagatcagatgcacccattggcaactgcagttctgaatgcatcactccaaatggaagcattcccaatgacaaaccttttcaaaatgtaaacaggatcacatatggggcctgccccagatatgttaagcaacacactctgaaattggcaacagggatgcggaatgtaccagagaaacaaactagaggcatattcggcgcaatcgcaggtttcatagaaaatggttgggagggaatggtagacggttggtacggtttcaggcatcaaaattctgagggcacaggacaagcagcagatcttaaaagcactcaagcagcaatcgaccaaatcaacgggaaactgaataggttaatcgagaaaacgaacgagaaattccatcaaatcgaaaaagaattctcagaagtagaagggagaattcaggacctcgagaaatatgttgaagacactaaaatagatctctggtcttacaacgcggagcttcttgttgccctggagaaccaacatacaattgatctaacggactcagaaatgaacaaactgtttgaaagaacaaggaagcaactgagggaaaatgctgaggacatgggcaatggttgcttcaaaatataccacaaatgtgacaatgcctgcatagggtcaatcagaaatggaacttatgaccatgatgtatacagagacgaagcattaaacaaccggttccagatcaaaggtgttgagctaaagtcaggatacaaagattggatcctatggatttcctttgccatatcatgctttttgctttgtgttgttttgctggggttcatcatgtgggcctgccaaaaaggcaacattaggtgcaacatttgcatttga

SEQ ID NO: 30949 - RNA, 1698 nt, synthetic construct
  misc_feature 1..1698: note = hemagglutinin__InfluenzaA__ABB79979
  source 1..1698: mol_type = other RNA
atgaaagcaaaactactggtcctgttatgtacatttacagctacatacgcagacacaatatgtataggctaccatgccaacaactcaaccgacactgttgacacagtacttgagaagaatgtgacagtgacacactctgtcaacctacttgaggacagtcacaacggaaaactatgtctactaaaaggaatagccccactacaattgggtaattgcagcgttgccggatggatcttaggaaacccagaatgcgaattactgatttccaaggaatcatggtcctacattgtagaaacaccaaatcccgagaatggaacatgttacccagggtatttcgccgactatgaggaactgagggagcaattgagttcagtatcttcatttgagagattcgaaatattccccaaagggagctcatggcccaaccacaccgtaaccggagtatcagcatcatgctcccataatgggaaaagcagtttttacagaaatttgctatggctgacggggaagaatggtttgtacccaaacctgagcatgtcctatgtaaacaacaaagagaaagaagtccttgtgctatggggtgttcatcacccacctaacataggggaccaaagggccctctaccatacagaaaatgcttatgtctctgtagtgtcttcacattatagcagaagattcaccccagaaatagccaaaagacccaaagtaagagatcaggaaggaagaatcaactaccactggactctgctggaacccggggacacaataatatttgaggcaaatggaaatctaatagcgccatggtatgctttcgcactgagtagaggctttggatcaggaatcatcacctcaaatgcaccaatggatgaatgtgatgcgaagtgtcaaacacctcagggagctataaacagtagtcttcctttccagaatgtacacccagttacaataggagagtgtccaaagtatgtcaggagtgcaaaattaaggatggttacaggactaaggaacatcccatccattcaatccagaggtttgtttggagccattgccggtttcattgaaggggggtggactggaatggtagatgggtggtatggttatcatcatcagaatgagcaaggatctggctatgctgcagatcaaaaaagcacacaaaatgccattaacgggattacaaacaaggtgaattctgtaattgagaaaatgaacactcaattcacagctgtgggcaaagaattcaacaaattagaaagaaggatggaaaacttaaataaaaaagttgatgatgggtttctagacatttggacatataatgcagaattgttggttctactggaaaatgaaaggactttggatttccatgactccaatgtgaagaatctgtatgagaaagtaaaaagccaattaaagaataatgccaaagaaataggaaacgggtgttttgaattctatcacaagtgtaacaatgaatgcatggaaagtgtgaaaaatggaacttatgactatccaaaatattccgaagaatcaaagttaaacagggagaaaattgatggagtaaaattggaatcaatgggagtctatcagattctggcgatctactcaactgtcgccagttccctggttcttttggtctccctgggggcaatcagcttctggatgtgttccaatgggtctttgcagtgtagaatatgcatctga

SEQ ID NO: 30950 - RNA, 1698 nt, synthetic construct
  misc_feature 1..1698: note = hemagglutinin__InfluenzaA__ABB79990
  source 1..1698: mol_type = other RNA
atgaaagcaaaactactggtcctgttatgtacatttacagctacatacgcagacacaatatgtataggctaccatgccaacaactcaacagacactgttgacacagtacttgagaagaatgtgacagtgacacactctgtcaacctacttgaggacagtcacaatggaaaactatgtctactaaaaggaatagccccactacaattgggtaattgcagcgttgccggatggatcttaggaaacccagaatgcgaattactgatttccaaggaatcatggtcctacattgtagaaacaccaaatcccgagaatggaacatgttacccagggtatttcgccgactatgaggaactgagggagcaattgagttcagtatcttcatttgagagattcgaaatattccccaaaggaagctcatggcccaaccacaccgtaaccggagtatcagcatcatgctcccataatgggaaaagcagtttttacagaaatttgctatggctgacggggaagaatggtttgtacccaaacctgagcatgtcctatgtaaacaacaaagagaaagaagtccttgtgctatggggtgttcatcacccacctaacataggggaccaaaaggccctctaccatacagaaaatgcttatgtctctgtagtgtcttcacattatagcagaagattcaccccagaaatagccaaaagacccaaagtaagagatcaggaaggaagaatcaactactactggactctgctggaacccggggacacaataatatttgaggcaaatggaaatctaatagcgccatggtatgctttcgcactgagtagaggctttggatcaggaatcatcacctcaaatgcaccaatggatgaatgtgatgcgaagtgtcaaacacctcagggagctataaacagtagtcttcctttccagaatgtacacccagttacaataggagagtgtccaaagtatgtcaggagtgcaaaattaaggatggttacaggactaaggaacatcccatccattcaatccagaggtttgtttggagccattgccggtttcattgaaggggggtggactggaatggtagatgggtggtatggttatcatcatcagaatgagcaaggatctggctatgctgcagatcaaaaaagcacacaaaatgccattaacgggattacaaacaaggtgaattctgtaattgagaaaatgaacactcaattcacagctgtgggcaaagaattcaacaaattagaaagaaggatggaaaacttaaataaaaaagttgatgatgggtttctagacatttggacatataatgcagaattgttggttctactggaaaatgaaaggactttggatttccatgactccaatgtgaagaatctgtatgagaaagtaaaaagccaattaaagaataatgccaaagaaataggaaacgggtgttttgaattctatcacaagtgtaacaatgaatgcatggaaagtgtgaaaaatggaacttatgactatccaaaatattccgaagaatcaaagttaaacagggagaaaattgatggagtaaaattggaatcaatgggagtctatcagattctggcgatctactcaactgtcgccagttccctggttcttttggtctccctgggggcaatcagcttctggatgtgttccaatgggtctttgcagtgtagaatatgcatctga

SEQ ID NO: 30951 - RNA, 1701 nt, synthetic construct
  misc_feature 1..1701: note = hemagglutinin__InfluenzaA__ABB80001
  source 1..1701: mol_type = other RNA
atgaagactatcattgctttgagctacactctatgtctggtttttgctcaaaaacttcccggaaatgacaacagcacggcaacgctgtgccttgggcaccatgcagtaccaaacggaacgatagtgaaaacaatcacgaatgaccaaattgaagttactaatgctactgagctggttcagagttcctcaacaggtggaatatgcgacagtcctcatcagatccttgatggagaaaactgcacactaatagatgctctattgggagaccctcagtgtgatggcttccaaaataagaaatgggacctttttgttgaacgcagcaaagcctacagcaactgttacccttatgatgtgccggattatgcctcccttaggtcactagttgcctcatctggcacactggagtttaacaatgaaagcttcaactggactggagtcactcaaaatggaacaagctctgcttgcaaaaggagatctaataacagtttctttagtagattgaattggttgacccacttaaaattcaaatacccagcattgaacgtgactatgccaaacaatgaaaaatttgacaaattgtacatttggggggttcaccacccgggtacggacaatgaccaaatcagcctatatgctcaagcatcaggaagaatcacagtctctaccaaaagaagccaacaaactgtaatcccgaatatcggatctagacccagggtaagggatatccccagcagaataagcatctattggacaatagtaaaaccgggagacatacttttgattaacagcacagggaatctaattgctcctcggggttacttcaaaatacgaagtgggaaaagctcaataatgagatcagatgcacccattggcaaatgcaattctgaatgcatcactccaaatggaagcattcccaatgacaaaccatttcaaaatgtaaacaggatcacatatggggcctgtcccagatatgttaagcaaagcactctgaaattggcaacagggatgcgaaatgtaccagagaaacaaactagaggcatatttggcgcaatcgcgggtttcatagaaaatggttgggagggaatggtggatggttggtacggtttcaggcatcaaaattctgagggaataggacaagcagcagatctcaaaagcactcaagcagcaatcaaccaaatcaatgggaagctgaataggttgatcgggaaaaccaacgagaaattccatcagattgaaaaagaattctcagaagtagaagggagaattcaggacctcgagaaatatgttgaggacactaaaatagatctctggtcatacaacgcggagcttcttgttgccctggagaaccaacatacaattgatctaactgactcagaaatgaacaaactgtttgaaagaacaaagaagcaactgagggaaaatgctgaggatatgggcaatggttgtttcaaaatataccacaaatgtgacaatgcctgcatagggtcaatcagaaatggaacttatgaccatgacgtatacagagatgaagcattaaacaaccggttccagatcaaaggtgttgagctgaagtcaggatacaaagattggatcctatggatttcctttgccatatcatgttttttgctttgtgttgctttgttggggttcatcatgtgggcctgccaaaaaggcaacattaggtgcaacatttgcatttga

SEQ ID NO: 30952 - RNA, 1701 nt, synthetic construct
  misc_feature 1..1701: note = hemagglutinin__InfluenzaA__ABB80012
  source 1..1701: mol_type = other RNA
atgaagactatcattgctttgagctacattctatgtctggttttcgctcaaaaacttcccggaaatgacaacagcacggcaacgctgtgccttgggcaccatgcagtaccaaacggaacgatagtgaaaacaatcacgaatgaccaaattgaagttactaatgctactgagctggttcagagttcctcaacaggtggaatatgcgacagtcctcatcagatccttgatggagaaaactgcacactaatagatgctctattgggagaccctcagtgtgatggcttccaaaataagaaatgggacctttttgttgaacgcagcaaagcctacagcaactgttacccttatgatgtgccggattatgcctcccttaggtcactagttgcctcatccggcacactggagtttaacaatgaaagcttcaattggactggagtcactcaaaatggaacaagctctgcttgcaaaaggagatctaataacagtttctttagtagattgaattggttgacccacttaaaattcaaatacccagcattgaacgtgactatgccaaacaatgaaaaatttgacaaattatacatttggggggttcaccacccgggtacggacaatgaccaaatcagcctatatgctcaagcatcaggaagaatcacagtctctaccaaaagaagccaacaaactgtaatcccgaatatcggatctagacccagggtaagggatatccccagcagaataagcatctattggacaatagtaaaaccgggagacatacttttgattaacagcacagggaatctaattgctcctcggggttacttcaaaatacgaagtgggaaaagctcaataatgagatcagatgcacccattggcaaatgcaattctgaatgcatcactccaaatggaagcattcccaatgacaaaccatttcaaaatgtaaacaggatcacatatggggcctgtcccagatatgttaagcaaaacactctgaaattggcaacagggatgcgaaatgtaccagagaaacaaactagaggcatatttggcgcaatcgcgggtttcatagaaaatggttgggagggaatggtggatggttggtacggtttcaggcatcaaaattctgagggaataggacaagcagcagatctcaaaagcactcaagcagcaatcaaccaaatcaatgggaagctgaataggttgatcggaaaaaccaacgagaaattccatcagattgaaaaagaattctcagaagtagaagggagaattcaggacctcgagaaatatgttgaggacactaaaatagatctctggtcatacaacgcggagcttcttgttgccctggagaaccaacatacaattgatctaactgactcagaaatgaacaaactgtttgaaagaacaaagaagcaactgagggaaaatgctgaggatatgggcaatggttgtttcaaaatataccacaaatgtgacaatgcctgcatagggtcaatcagaaatggaacttatgaccatgatgtatacagagatgaagcattaaacaaccggttccagatcaaaggtgttgagctgaagtcaggatacaaagattggatcctatggatttcctttgccatatcatgttttttgctttgtgttgctttgttggggttcatcatgtgggcctgccaaaaaggcaacattaggtgcaacatttgcatttga

SEQ ID NO: 30953 - RNA, 1701 nt, synthetic construct
  misc_feature 1..1701: note = hemagglutinin__InfluenzaA__ABB80023
  source 1..1701: mol_type = other RNA
atgaagaccatcattgctttgagctacattttctatctggctctcggccaagaccttccaggaaatgacaacagcaaagcaacgctgtgcctgggacatcatgcggtgccaaacggaacactagtgaaaacaatcacaaatgatcagactgaagtgactaatgctactgagctagttcagagctcctcaacggggaaaatatgcaacaatcctcatcgaatccttgatggaatggactgcacactgatagatgctctactgggggaccctcattgtgatgtttttcaaaatgagacatgggaccttttcgttgaacgcagcaaagctttcagcaactgttacccttatgatgtaccagattatgcctcccttagatcactagttgcctcgtcaggcactctggagtttatcactgagggtttcacttggactgaggtcactcagaatgggggaagcaatgcttgcaaaaggggacctgatagcggttttttcagtagactgaactggttgaccaaatcaggaagaacatatccagtgctgaacgtgactatgccaaacaatgacaattttgacaaactatacatttggggggttcaccacccgagcacggaccaagaacaaaccaacctgtatgttcaaacatcagggagagtcacagtctctaccaggagaagccagcaaactataatcccgaatatcggatccagaccctgggtaaggggtctgtctagtagaataagcatctattggacaatagttaagccgggagacgtactggtaattaatagtaatgggaacctaatcgctcctcggggttatttcaaaatgcgcactgggaaaagctcaataatgaggtcagatgcacctattgatacctgtatttctgaatgcatcactccaaatggaagcattcccaatgataaaccctttcaaaacgtaaacaagatcacatatggagcatgccccaaatatgttaagcaagacaccctgaaattggcaacaggaatgcggaatgtaccagagaaacaaactagaggcctattcggcgcaatagcaggcttcatagaaaatggttgggagggaatgatagacggttggtacggtttcaggcatcaaaattctgagggaacaggacaagcagcagatcttaaaagcactcaagcagccattgaccaaatcaatgggaaattgaacaggataatcgagaagacgaatgagaaattccatcaaatcgaaaaggaattctcagaagtagaagggagaattcaggacctcgagaaatacgttgaagacactaaaatagatctatggtcttacaatgcagagcttcttgttgctctggagaatcaacacacaattgatctgactgactcggaaatgaacaaactgtttgaaaaaacaagaaggcaactgagggaaaatgctgaagacatgggcaatggttgcttcaaaatataccacaaatgtgacaacgcttgcatagagtcaatcagaaatgggacttatgaccatgatgtatacagagacgaagcattaaacaacaggtttcaaatcaaaggtgttgaactgaaatctggatacaaagactggatcctgtggatttcctttgccatatcatgctttttgctttgtgttgttttgctggggttcatcatgtgggcctgccagagaggcaacattaggtgcaacatttgcatttga

SEQ ID NO: 30954 - RNA, 1701 nt, synthetic construct
  misc_feature 1..1701: note = hemagglutinin__InfluenzaA__ABB80034
  source 1..1701: mol_type = other RNA
atgaagaccatcattgctttgagctacattttctgtctggttctcggccaagaccttccaggaaatgacaacagcacagcaacgctgtgcctgggacatcatgcggtgccaaacggaacactagtgaaaacaatcacagatgatcagattgaagtgactaatgctactgagctagttcagagctcctcaacggggaaaatatgcaacaatcctcatcgaatccttgatggactagactgcacactgatagatgctctattgggggaccctcattgtgatgtttttcaaaatgagacatgggaccttttcgttgaacgcagcaaagctttcagcaactgttacccttatgatgtgccagattatgcatcccttaggtcactagttgcctcgtcaggcactctggagtttatcactgagggtttcacttggactggggtcactcagaatgggggaagcaatgcttgcaaaaggggacctggtagcggttttttcagtagactgaactggttgaccaaatcaggaagcacatatccagtgctgaacgtgactatgccaaacaatgacaattttgacaaactatacatttggggggttcatcacccgagcacgaaccaagaacaaaccagcctgtatgttcaagcatcagggagagtcacagtttctaccaggagaagccagcagactataatcccgaatatcgggtccagaccctgggtaaggggtctgtctagtagaataagcatctattggacaatagttaagccgggagacgtactggtaattaatagtaatgggaacctaatcgctcctcggggttatttcaaaatgcgcactgggaaaagctcaataatgaggtcagatgcaactattgatacctgtatttctgaatgcatcactccaaatggaagcattcccaatgacaaaccctttcaaaacgtaaacaagatcacatatggagcatgccccaagtatgttaagcaaaacaccctgaagttggcaacagggatgcggaatgtaccagagaaacaaactagaggcctattcggcgcaatagcaggtttcatagaaaatggttgggagggaatgatagacggttggtacggtttcaggcatcaaaattctgagggcacaggacaagcagcagatcttaaaagcactcaagcagccatcgaccaaatcaatgggaaattgaacagggtaatcgagaagacgaacgagaaattccatcaaatcgaaaaggaattctcagaagtagaagggagaattcaggacctcgagaaatacgttgaagacactaaaatagatctctggtcttacaatgcggagcttcttgtcgctctggagaatcaacatacaattgacctgactgactcggaaatgaacaagctgtttgaaaaaacaagaaggcaactgagggaaaatgctgaagacatgggcaatggttgcttcaaaatataccacaaatgtgacaacgcttgcattgagtcaatcagaaatgggacttatgaccatgatgtatacagagacgaagcattaaacaaccggtttcagatcaaaggtgttgaactgaagtctggatacaaagactggatcctgtggatttcctttgccatatcatgctttttgctttgtgttgttttgctggggttcatcatgtgggcctgccagagaggcaacattaggtgcaacatttgcatttga

SEQ ID NO: 30955 - RNA, 1698 nt, synthetic construct; identical to SEQ ID NO: 30868
  misc_feature 1..1698: note = hemagglutinin__InfluenzaA__ABB80045
  source 1..1698: mol_type = other RNA

SEQ ID NO: 30956 - RNA, 1701 nt, synthetic construct
  misc_feature 1..1701: note = hemagglutinin__InfluenzaA__ABB80081
  source 1..1701: mol_type = other RNA
atgaagactatcattgctttgagctacatttcatgtctggttttcgctcaaaaacttcccggaaatgacaacagcacggcaacgctgtgcctgggacaccatgcagtgccaaacggaacgctagtgaaaacaatcacgaatgaccaaattgaagtgactaatgctactgagctggttcagagttcctcaacaggtagaatatgcgacagtcctcacagaatccttgatggagaaaactgcacactgatagatgctctattgggagaccctcattgtgatggcttccaaaataaggaatgggacctttttgttgaacgcagcaaagcctacagcaactgttacccttatgatgtgccggattatgcctcccttaggtcactagttgcctcatccggcactctggagtttaacaatgaaagcttcaattggactggagtcgctcagaatggaacaagctatgcttgcaaaaggagatctattaaaagtttctttagtagattgaattggttgcaccaattaaaatacaaatatccagcactgaacgtgactatgccaaacaatgacaaatttgacaaattgtacatttggggggttcaccacccgagtacggacagtgaccaaaccagcctatatgctcaagcatcagggagagtcacagtctctaccaaaagaagccaacaaactgtaatcccgaatatcggatctagaccctgggtaaggggtgtctccagcagaataagcatctattggacaatagtaaaaccgggagacatacttttgattaacagcacagggaatctaattgctcctcggggttacttcaaaatacgaagtgggaaaagctcaataatgaggtcagatgcacccattggcaaatgcaattctgaatgcatcactccaaatggaagcattcccaatgacaaaccatttcaaaatgtaaacaggatcacatatggggcctgtcccagatatgttaagcaaaacactctgaaattggcaacagggatgcggaatgtaccagagaaacaaactagaggcatattcggcgcaatcgcaggtttcatagaaaatggttgggagggaatggtagacggttggtacggtttcaggcatcaaaattctgagggcacaggacaagcagcagatcttaaaagcactcaagcagcaatcaaccaaatcaacgggaaactgaataggttaatcgagaaaacgaacgagaaattccatcaaattgaaaaagaattctcagaagtagaagggagaattcaggacctcgagaaatatgttgaggacactaaaatagatctctggtcgtacaacgcggagcttcttgttgccctggagaaccaacatacaattgatctaactgactcagaaatgaacaaactgtttgaaagaacaaggaagcaactgagggaaaatgctgaggatatgggcaatggttgtttcaaaatataccacaaatgtgacaatgcctgcatagggtcaatcagaaatggaacttatgaccatgatgtatacagagacgaagcattaaacaaccggttccagatcaaaggtgttgagctgaagtcaggatacaaagattggatcctatggatttcctttgccatatcatgttttttgctttgtgttgttttgctggggttcatcatgtgggcctgccaaaaaggcaacattaggtgcaacatttgcatttga

SEQ ID NO: 30957 - RNA, 1701 nt, synthetic construct
  misc_feature 1..1701: note = hemagglutinin__InfluenzaA__ABB80092
  source 1..1701: mol_type = other RNA
atgaagactatcattgctttgagctacatttcatgtctggttttcgctcaaaaacttcccggaaatgacaacagcacggcaacgctgtgcctgggacaccatgcagtgccaaacggaacgctagtgaaaacaatcacgaatgaccaaattgaagtgactaatgctactgagctggttcagagttcctcaacaggtagaatatgcgacagtcctcaccgaatccttgatggagaaaactgcacactgatagatgctctattgggagaccctcattgtgatggcttccaaaataaggaatgggacctttttgttgaacgcagcaaagcctacagcaactgttacccttatgatgtgccggattatgcctcccttaggtcactagttgcctcatccggcactctggagtttaacaatgaaagcttcaattggactggagtcgctcagaatggaacaagctatgcttgcaaaaggagatctattaaaagtttctttagtagattgaattggttgcaccaattaaaatacaaatatccagcactgaacgtgactatgccaaacaatgacaaatttgacaaattgtacatttggggggttcaccacccgagtacggacagtgaccaaaccagcctatatgctcaagcatcagggagagtcacagtctctaccaaaagaagccaacaaactgtaatcccgaatatcggatctagaccctgggtaaggggtgtctccagcagaataagcatctattggacattagtaaaaccgggagacatacttttgattaacagcacagggaatctaattgctcctcggggttacttcaaaatacgaagtgggaaaagctcaataatgaggtcagatgcacccattggcaaatgcaattctgaatgcatcactccaaatggaagcattcccaatgacaaaccatttcaaaatgtaaacaggatcacatatggggcctgtcccagatatgttaagcaaaacactctgaaattggcaacagggatgcggaatgtaccagagaaacaaactagaggcatattcggcgcaatcgcaggtttcatagaaaatggttgggagggaatggtagacggttggtacggtttcaggcatcaaaattctgagggcacaggacaagcagcagatcttaaaagcactcaagcagcaatcaaccaaatcaacgggaaactgaataggttaatcgagaaaacgaacgagaaattccatcaaattgaaaaagaattctcagaagtagaagggagaattcaggacctcgagaaatatgttgaggacactaaaatagatctctggtcgtacaacgcggagcttcttgttgccctggagaaccaacatacaattgatctaactgactcagaaatgaacaaactgtttgaaagaacaaggaagcaactgagggaaaatgctgaggatatgggcaatggttgtttcaaaatataccacaaatgtgacaatgcctgcatagggtcaatcagaaatggaacttatgaccatgatgtatacagagacgaagcattaaacaaccggttccagatcaaaggtgttgagctgaagtcaggatacaaagattggatcctatggatttcctttgccatatcatgttttttgctttgtgttgttttgctggggttcatcatgtgggcctgccaaaaaggcaacattaggtgcaacatttgcatttga

SEQ ID NO: 30958 - RNA, 1701 nt, synthetic construct; identical to SEQ ID NO: 30935
  misc_feature 1..1701: note = hemagglutinin__InfluenzaA__ABB80137
  source 1..1701: mol_type = other RNA

SEQ ID NO: 30959 - RNA, 1701 nt, synthetic construct
  misc_feature 1..1701: note = hemagglutinin__InfluenzaA__ABB80159
  source 1..1701: mol_type = other RNA
atgaagactatcattgctttgagctacatttcatgtctggttttcgctcaaaaacttcccggaaatgacaacagcacggcaacgctgtgcctgggacaccatgcagtgccaaacggaacgctagtgaaaacaatcacaaatgaccaaattgaagtgactaatgctactgagctggttcagagttcctcaacaggtagaatatgcgacagtcctcaccgaatccttgatggagaaaactgcacactgatagatgctctattgggagaccctcattgtgatggcttccaaaataaggaatgggacctttttgttgaacgcagcaaagcctacagcaactgttacccttatgatgtgccggattatgcctcccttaggtcactagttgcctcatccggcactctggagtttaacaatgaaagcttcaattggactggagtcgctcagaatggaacaagctatgcttgcaaaaggagatctattaaaagtttctttagtagattgaattggttgcaccaattaaaatacaaatatccagcactgaacgtgactatgccaaacaatgacaaatttgacaaattgtacatttggggggttcaccacccgagtacggacagtgaccaaaccagcctatatgctcaagcatcagggagagtcacagtctctaccaaaagaagccaacaaactgtaatcccgaatatcggatctagaccctgggtaaggggtgtctccagcagaataagcatctattggacaatagtaaaaccgggagacatacttttgattaacagcacagggaatctaattgctcctcggggttacttcaaaatacgaagtgggaaaagctcaataatgaggtcagatgcacccattggcaaatgcaattctgaatgcatcactccaaatggaagcattcccaatgacaaaccatttcaaaatgtaaacaggatcacatatggggcctgtcccagatatgttaagcaaaacactctgaaattggcaacagggatgcggaatgtaccagagaaacaaactagaggcatattcggcgcaatcgcaggtttcatagaaaatggttgggagggaatggtagacggttggtacggtttcaggcatcaaaattctgagggcacaggacaagcagcagatcttaaaagcactcaagcagcaatcaaccaaatcaacgggaaactgaataggttaatcgagaaaacgaacgagaaattccatcaaattgaaaaagaattctcagaagtagaagggagaattcaggacctcgagaaatatgttgaggacactaaaatagatctctggtcgtacaacgcggagcttcttgttgccctggagaaccaacatacaattgatctaactgactcagaaatgaacaaactgtttgaaagaacaaggaaacaactgagggaaaatgctgaggatatgggcaatggttgtttcaaaatataccacaaatgtgacaatgcctgcatagggtcaatcagaaatggaacttatgaccatgatgtatacagagacgaagcattaaacaaccggttccagatcaaaggtgttgagctgaagtcaggatacaaagattggatcctatggatttcctttgccatatcatgttttttgctttgtgttgttttgctggggttcatcatgtgggcctgccaaaaaggcaacattaggtgcaacatttgcatttga

SEQ ID NO: 30960 - RNA, 1701 nt, synthetic construct
  misc_feature 1..1701: note = hemagglutinin__InfluenzaA__ABB80185
  source 1..1701: mol_type = other RNA
atgaagactatcattgctttgagctacattttatgtctggttttcgctcaaaaacttcccggaaatgacaacagcacggcaacgctgtgtctgggacaccatgcagtgccaaacggaacgctagtgaaaacaatcacgaatgaccaaattgaagtgactaatgctactgagctggttcagagttcctcaacaggtagaatatgcgacagtcctcaccaaatccttgatgggaaaaactgcacactgatagatgctctattgggagaccctcattgtgatggcttccaaaataaggaatgggacctttttgttgaacgcagcacagcttacagcaactgttacccttatgatgtgccggattatgcctcccttaggtcactagttgcctcatccggcaccctggagtttaccaaagaaggcttcaattggactggagtcgctcaggatggaacaagctatgcttgcaaaaggggatctgttaaaagtttctttagtagattgaattggttgcacaaattagaatacaaatatccagcactgaacgtgactatgccaaacaatgacaaatttgacaaattgtacatttggggggttcaccacccgagtacggacagtgaccaaaccagcctatatgttcaagcatcagggagagtcacagtctctaccaaaagaagccaacaaactgtaatcccgaatatcgggtctagaccctgggtaaggggtgtctccagcagaataagcatctattggacaatagtaaaaccgggagacatacttttgattaacagcacagggaatctaattgctcctcggggttacttcaaaatacgaagtgggaaaagctcaataatgaggtcggatgcacccattgacaactgcaattctgaatgcattactccaaatggaagcattcccaatgacaaaccttttcaaaatgtaaacaggatcacatatggggcctgtcccagatatgttaagcaaaacactctgaaattggcaacagggatgcggaatgtaccagagaaacaaactagaggcatattcggcgcaatcgcaggtttcatagaaaatggttgggagggaatggtggacggttggtacggtttcaggcatcaaaattctgaaggcacaggacaagcagcagatcttaaaagcactcaagcagcaatcaaccaaatcaacgggaaactgaataggttaatcgagaaaacgaacgagaaattccatcaaatcgaaaaagaattctcagaagtagaagggagaattcaggacctcgagaaatatgttgaagacactaaaatagatctctggtcttacaacgcggagcttcttgttgccctggagaaccaacatacaattgatctaactgactcagaaatgaacaaactgttcgaaagaacaagaaagcaactgagggaaaatgctgaggacatgggcaatggttgcttcaaaatataccacaaatgtgacaatgcctgcatagggtcaatcagaaatggaacttatgaccatgatgtatacagagacgaagcattaaacaaccggttccagatcaaaggtgttgagctgaagtcaggatacaaagattggatcctatggatttcctttgccatatcatgctttttgctttgtgttgttttgctggggttcattatgtgggcctgccaaaaaggcaacattaggtgcaacatttgcatttga

SEQ ID NO: 30961 - RNA, 1701 nt, synthetic construct
  misc_feature 1..1701: note = hemagglutinin__InfluenzaA__ABB80207
  source 1..1701: mol_type = other RNA
atgaagactatcattgctttgagctacattttatgtctggttttcgctcaaaaacttcccggaaatgacaacagcacggcaacgctgtgcctgggacaccatgcagtgccaaacggaacgctagtgaaaacaatcacgaatgaccaaattgaagtgactaatgctactgagctggttcagagttcctcaacaggtagaatatgcgacagtcctcaccgaatccttgatggagaaaactgcacactgatagatgctctattgggagaccctcattgtgatgacttccaaaataaggaatgggacctttttgttgaacgcagcaaagcctacagcaactgctacccttatgatgtgccggattatgcctcccttaggtcactagttgcctcatccggcaccctggagtttaacaatgaaagcttcaattggactggagtcgctcagaatggaacaagctatgcttgcaaaaggagatctattaaaagtttctttagtagattgaattggttgcaccaattaaaatacaaatatccagcactgaacgtgactatgccaaacaatgacaaatttgacaaattgtacatttggggggttcaccacccgagtacggacagtgaccaaaccagcctatatgctcaagcatcagggagagtcacagtctctaccaaaagaagccaacaaactgtaatcccgaatatcggatctagaccctgggtaaggggtgtctccagcagaataagcatctattggacaatagtaaaaccgggagacatacttttgattaacagcacagggaatctaattgctcctcggggttacttcaaaatacgaagtgggaaaagctcaataatgaggtcagatgcacccattggcaaatgcaattctgaatgcatcactccaaatggaagcattcccaatgacaaaccatttcaaaatgtaaacaggatcacatatggggcctgtcccagatatgttaagcaaaacactctgaaattggcaacagggatgcggaatgtaccagagaaacaaactagaggcatattcggcgcaatcgcaggtttcatagaaaatggttgggagggaatggtagacggttggtacggtttcaggcatcaaaattctgagggcacaggacaagcagcagatcttaaaagcactcaagcagcaatcaaccaaatcaacgggaaactgaataggttaatcgagaaaacgaacgagaaattccatcaaattgaaaaagaattctcagaagtagaagggagaattcaggacctcgagaaatatgttgaggacactaaaatagatctctggtcgtacaacgcggagcttcttgttgccctggagaaccaacatacaattgatctaactgactcagaaatgaacaaactgtttgaaagaacaaggaagcaactgagggaaaatgctgaggatatgggcaatggttgtttcaaaatataccacaaatgtgacaatgcctgcatagggtcaatcagaaatgggacttatgaccatgatgtatacagagacgaagcattaaacaaccggttccagatcaaaggtgttgagctgaagtcaggatacaaagattggatcctatggatttcctttgccatgtcatgttttttgctttgtgttgttttgctggggttcatcatgtgggcctgccaaaaaggcaacattaggtgcaacatttgcatttga

SEQ ID NO: 30962 - RNA, 1701 nt, synthetic construct
  misc_feature 1..1701: note = hemagglutinin__InfluenzaA__ABB80229
  source 1..1701: mol_type = other RNA
atgaagactatcattgctttgagctacattttatgtctggttttcgctcaaaaacttcccggaaatgacaacagcacggcaacgctgtgcctgggacaccatgcagtgccaaacggaacgctagtgaaaacaatcacgaatgaccaaattgaagtgactaatgctactgagctggttcagagttcctcaacaggtagaatatgcgacagtcctcaccgaatccttgatggagaaaactgcacactgatagatgctctattgggagaccctcattgtgatggcttccaaaataaggaatgggacctttttgttgaacgcagcaaagcctacagcaactgttacccttatgatgtgccggattatgcctcccttaggtcactagttgcctcatccggcaccctggagtttaacaatgaaagcttcaattggactggagtcgctcagaatggaacaagctatgcttgcaaaaggagatctattaaaagtttctttagtagattgaattggttgcaccaattaaaatacaaatatccagcactgaacgtgactatgccaaacaatgacaaatttgacaaattgtacatttggggggttcaccacccgagtacggacagtgaccaaaccagcctatatgctcaagcatcagggagagtcacagtctctaccaaaagaagccaacaaactgtaatcccgaatatcggatctagaccctgggtaaggggtgtctccagcagaataagcatctattggacaatagtaaaaccgggagacatacttttgattaacagcacagggaatctaattgctcctcggggttacttcaaaatacgaagtgggaaaagctcaataatgaggtcagatgcacccattggcaaatgcaattctgaatgcatcactccaaatggaagcattcccaatgacaaaccatttcaaaatgtaaacaggatcacatatggggcctgtcccagatatgttaagcaaaacactctgaaattggcaacagggatgcggaatgtaccagagaaacaaactagaggcatattcggcgcaatcgcaggtttcatagaaaatggttgggagggaatggtggacggttggtacggtttcaggcatcaaaattctgagggcacaggacaagcagcagatcttaaaagcactcaagcagcaatcaaccaaatcaacgggaaactgaataggttaatcgagaaaacgaacgagaaattccatcaaattgaaaaagaattctcagaagtagaagggagaattcaggacctcgagaaatatgttgaggacactaaaatagatctctggtcgtacaacgcggagcttcttgttgccctggagaaccaacatacaattgatctaactgactcagaaatgaacaaactgtttgaaagaacaaggaagcaactgagggaaaatgctgaggacatgggcaatggttgtttcaaaatataccacaaatgtgacaatgcctgcatagggtcaatcagaaatggaacttatgaccatgatgtatacagagacgaagcattaaacaaccggttccagatcaaaggtgttgagctgaagtcaggatacaaagattggatcctatggatttcctttgccatgtcatgttttttgctttgtgttgttttgctggggttcatcatgtgggcctgccaaaaaggcaacattaggtgcaacatttgcatttga

SEQ ID NO: 30963 - RNA, 1701 nt, synthetic construct
  misc_feature 1..1701: note = hemagglutinin__InfluenzaA__ABB80240
  source 1..1701: mol_type = other RNA
atgaagactatcattgctttgagctacatttcatgtctggttttcgctcaaaaacttcccggaaatgacaacagcacggcaacgctgtgcctgggacaccatgcagtgccaaacggaacgctagtgaaaacaatcacgaatgaccaaattgaagtgactaatgctactgagctggttcagagttcctcaacaggtagaatatgcgacagtcctcaccgaatccttgatggagaaaactgcacactgatagatgctctattgggagaccctcattgtgatggcttccaaaataaggaatgggacctttttgttgaacgcagcaaagcctacagcaactgttacccttatgatgtgccggattatgcctcccttaggtcactagttgcctcatccggcaccctggagtttaacaatgaaagcttcaattggactggagtcgctcagaatggaacaagctatgcttgcaaaaggagatctattaaaagtttctttagtagattgaattggttgcaccaattaaaatacaaatatccagcactgaacgtgactatgccaaacaatgacaaatttgacaaattgtacatttggggggttcaccacccgagtacggacagtgaccaaaccagcctatatgctcaagcatcagggagagtcacagtctctaccaaaagaagccaacaaactgtaatcccgaatatcggatctagaccctgggtaaggggtgtctccagcagaataagcatctattggacaatagtaaaaccgggagacatacttttgattaacagcacagggaatctaattgctcctcggggttacttcaaaatacgaagtgggaaaagctcaataatgaggtcagatgcacccattggcaaatgcaattctgaatgcatcactccaaatggaagcattcccaatgacaaaccatttcaaaatgtaaacaggatcacatatggggcctgtcccagatatgttaagcaaaacactctgaaattggcaacagggatgcggaatgtaccagagaaacaaactagaggcatattcggcgcaatcgcaggtttcatagaaaatggttgggagggaatggtagacggttggtacggtttcaggcatcaaaattctgagggcacaggacaagcagcagatcttaaaagcactcaagcagcaatcaaccaaatcaacgggaaactgaataggttaatcgagaaaacgaacgagaaattccatcaaattgaaaaagaattctcagaagtagaagggagaattcaggacctcgagaaatatgttgaggacactaaaatagatctctggtcgtacaacgcggagcttcttgttgccctggagaaccaacatacaattgatctaactgactcagaaatgaacaaactgtttgaaagaacaaggaagcaactgagggaaaatgctgaggatatgggcaatggttgtttcaaaatataccacaaatgtgacaatgcctgcatagggtcaatcagaaatggaacttatgaccatgatgtatacagagacgaagcattaaacaaccggttccagatcaaaggtgttgagctgaagtcaggatacaaagattggatcctatggatttcctttgccatatcatgttttttgctttgtgttgttttgctggggttcatcatgtgggcctgccaaaaaggcaacattaggtgcaacatttgcatctga

SEQ ID NO: 30964 - RNA, 1701 nt, synthetic construct
  misc_feature 1..1701: note = hemagglutinin__InfluenzaA__ABB80251
  source 1..1701: mol_type = other RNA
atgaagactatcattgctttgagctacattttatgtctggttttcgctcaaaaacttcccggaaatgacaacagcacggcaacgctgtgcctgggacaccatgcagtgccaaacggaacgctagtgaaaacaatcacgaatgaccaaattgaagtgactaatgctactgagctggttcagagttcctcaacaggtagaatatgcgacagtcctcaccgaatccttgatggagaaaactgcacactgatagatgctctattgggagaccctcattgtgatggcttccaaaataaggaatgggacctttttgttgaacgcagcaaagcctacagcaactgttacccttatgatgtgccggattatgcctcccttaggtcactagttgcctcatccggcaccctggagtttaacaatgaaagcttcaattggactggagtcgctcagaatggaacaagctctgcttgcaaaaggagatctattaaaagtttctttagtagattgaattggttgcaccaattaaaatacaaatatccagcactgaacgtgactatgccaaacaatgacaaatttgacaaattgtacatttggggggttcaccacccgagtacggacagtgaccaaaccagcctatatgctcaagcatcagggagagtcacagtctctaccaaaagaagccaacaaactgtaatcccgaatatcggatctagaccctgggtaaggggtgtctccagcagaataagcatctattggacaatagtaaaaccgggagacatacttttgattaacagcacagggaatctaattgctcctcggggttacttcaaaatacgaagtgggaaaagctcaataatgaggtcagatgcacccattggcaaatgcaattctgaatgcatcactccaaatggaagcattcccaatgacaaaccatttcaaaatgtaaacaggatcacatatggggcctgtcccagatatgttaagcaaaacactctgaaattggcaacagggatgcggaatgtaccagagaaacaaactagaggcatattcggcgcaatcgcaggtttcatagaaaatggttgggagggaatggtagacggttggtacggtttcaggcatcaaaattctgagggcacaggacaagcagcagatcttaaaagcactcaagcagcaatcaaccaaatcaacgggaaactgaataggttaatcgagaaaacgaacgagaaattccatcaaattgaaaaagaattctcagaagtagaagggagaattcaggacctcgagaaatatgttgaggacactaaaatagatctctggtcgtacaacgcggagcttcttgttgccctggagaaccaacatacaattgatctaactgactcagaaatgaacaaactgtttgaaagaacaaggaagcaactgagggaaaatgctgaggatatgggcaatggttgtttcaaaatataccacaaatgtgacaatgcctgcatagggtcaatcagaaatggaacttatgaccatgatgtatacagagatgaagcattaaacaaccggttccagatcaaaggtgttgagcttaagtcaggatacaaagattggatcctatggatttcctttgccatatcatgttttttgctttgtgttgttttgctggggctcatcatgtgggcctgccaaaaaggcaacattaggtgcaacatttgcatttga

SEQ ID NO: 30965 - RNA, 1701 nt, synthetic construct
  misc_feature 1..1701: note = hemagglutinin__InfluenzaA__ABB80492
  source 1..1701: mol_type = other RNA
atgaagactatcattgctttgagctacattttatgtctggttttcgctcaaaaacttcccggaaatgacaacagcacggcaacgctgtgcctgggacaccatgcagtgccaaacggaacgctagtgaaaacaatcacgaatgaccaaattgaagtgactaatgctactgagctggttcagaattcctcaacaggtagaatatgcgacagtcctcaccgaatccttgatggagaaaactgcacactgatagatgctctattgggagaccctcattgtgatggcttccaaaataaggaatgggacctttttgttgaacgcagcaaagcctacagcaactgttacccttatgatgtgccggattatgcctcccttaggtcactagttgcctcatccggcaccctggagtttaacaatgaaagcttcaattggactggagtcgctcagaatggaacaagctatgcttgcaaaaggagatctattaaaagtttctttagtagattgaattggttgcaccaattaaaatacaaatatccagcactgaacgtgactatgccaaacaatgacaaatttgacaaattgtacatttggggggttcaccacccgagtacggacagtgaccaaaccagcctatatgctcaagcatcagggagagtcacagtctctaccaaaagaagccaacaaactgtaatcccgaatatcggatctagaccctgggtaaggggtgtctccagcagaataagcatctattggacaatagtaaaaccgggagacatacttttgattaacagcacagggaatctaattgctcctcggggttacttcaaaatacgaagtgggaaaagctcaataatgaggtcagatgcacccattggcaaatgcaattctgaatgcatcactccaaatggaagcattcccaatgacaaaccatttcaaaatgtaaacaggatcacatatggggcctgtcccagatatgttaagcaaaacaccctgaaattggcaacagggatgcggaatgtaccagagaaacaaactagaggcatattcggcgcaatcgcaggtttcatagaaaatggttgggagggaatggtagacggttggtacggtttcaggcatcaaaattctgagggcacaggacaagcagcagatcttaaaagcactcaagcagcaatcaaccaaatcaacgggaaactgaataggttaatcgagaaaacgaacgagaaattccatcaaattgaaaaagaattctcagaagtagaagggagaattcaggacctcgagaaatatgttgaggacactaaaatagatctctggtcgtacaacgcggagcttcttgttgccctggagaaccaacatacaattgatctaactgactcagaaatgaacaaactgtttgaaagaacaaggaagcaactgagggaaaatgctgaggatatgggcaatggttgtttcaaaatataccacaaatgtgacaatgcctgcatagggtcaatcagaaatggaacttatgaccatgatgtatacagagacgaagcattaaacaaccggttccagataaaaggtgttgagctgaagtcaggatacaaagattggatcctatggatttcctttgccatgtcatgttttttgctttgtgttgttttgctggggttcatcatgtgggcctgccaaaaaggcaacattaggtgcaacatttgcatttga

SEQ ID NO: 30966 - RNA, 1701 nt, synthetic construct
  misc_feature 1..1701: note = hemagglutinin__InfluenzaA__ABB80503
  source 1..1701: mol_type = other RNA
atgaagactatcattgctttgagctacatttcatgtctggttttcgctcaaaaacttcccggaaatgacaacaacacggcaacgctgtgcctgggacaccatgcagtgccaaacggaacgctagtgaaaacaatcacgaatgaccaaattgaagtgactaatgctactgagctggttcagagttcctcaacaggtagaatatgcgacagtcctcaccgaatccttgatggagaaaactgcacactgatagatgctctattgggagaccctcattgtgatggcttccaaaataaggaatgggacctttttgttgaacgcagcaaagcctacagcaactgttacccttatgatgtgccggattatgcctcccttaggtcactagttgcctcatccggcactctggagtttaacaatgaaagcttcaattggactggagtcgctcagaatggaacaagctatgcttgcaaaaggagatctattaaaagtttctttagtagattgaattggttgcaccaattaaaatacaaatatccagcactgaacgtgactatgccaaacaatgacaaatttgacaaattgtacatttggggggttcaccacccgagtacggacagtgaccaaaccagcctatatgctcaagcatcagggagagtcacagtctctaccaaaagaagccaacaaactgtaatcccgaatatcggatctagaccctgggtaaggggtgtctccagcagaataagcatctattggacaatagtaaaaccgggagacatacttttgattaacagcacagggaatctaattgctcctcggggttacttcaaaatacgaagtgggaaaagctcaataatgaggtcagatgcacccattggcaaatgcaattctgaatgcatcactccaaatggaagcattcccaatgacaaaccatttcaaaatgtaaacaggatcacatatggggcctgtcccagatatgttaagcaaaacactctgaaattggcaacagggatgcggaatgtaccagagaaacaaactagaggcatattcggcgcaatcgcaggtttcatagaaaatggttgggagggaatggtagacggttggtacggtttcaggcatcaaaattctgagggcacaggacaagcagcagatcttaaaagcactcaagcagcaatcaaccaaatcaacgggaaactgaataggttaatcgagaaaacgaacgagaaattccatcaaattgaaaaagaattctcagaagtagaagggagaattcaggacctcgagaaatatgttgaggacactaaaatagatctctggtcgtacaacgcggagcttcttgttgccctggagaaccaacatacaattgatctaactgactcagaaatgaacaaactgtttgaaagaacaaggaagcaactgagggaaaatgctgaggatatgggcaatggttgtttcaaaatataccacaaatgtgacaatgcctgcatagggtcaatcagaaatggaacttatgaccatgatgtatacagagacgaagcattaaacaaccggttccagatcaaaggtgttgagctgaggtcaggatacaaagattggatcctatggatttcctttgccatatcatgttttttgctttgtgttgttttgctggggttcatcatgtgggcctgccaaaaaggcaacattaggtgcaacatttgcatttga

SEQ ID NO: 30967 - RNA, 1701 nt, synthetic construct
  misc_feature 1..1701: note = hemagglutinin__InfluenzaA__ABB80514
  source 1..1701: mol_type = other RNA
atgaagactatcattgctttgagctacatttcatgtctggttttcgctcaaaaacttcccggaaatgacaacagcacggcaacgctgtgcctgggacaccatgcagtgccaaacggaacgctagtgaaaacaatcacgaatgaccaaattgaagtgactaatgctactgagctggttcagagttcctcaacaggtagaatatgcgacagtcctcaccgaatccttgatggagaaaactgcacactgatagatgctctattgggagaccctcattgtgatggcttccaaaataaggaatgggacctttttgttgaacgcagcaaagcctacagcaactgttacccttatgatgtgccggattatgcctcccttaggtcactagttgcctcatccggcactctggagtttaacaatgaaagcttcaattggactggagtcgctcagaatggaacaagctatgcttgcaaaaggagatctattaaaagtttctttagtagattgaattggttgcaccaattaaaatacaaatatccagcactgaacgtgactatgccaaacaatgacaaatttgacaaattgtacatttggggggttcaccacccgagtacggacagtgaccaaaccagcctatatgctcaagcatcagggagagtcacagtctctaccaaaagaagccaacaaactgtaatcccgaatatcggatctagaccctgggtaaggggtgtctccagcagaataagcatctattggacaatagtaaaaccgggagacatacttttgattaacagcacagggaatctaattgctcctcggggttacttcaaaatacgaagtgggaaaagctcaataatgaggtcagatgcacccattggcaaatgcaattctgaatgcatcactccaaatggaagcattcccaatgacaaaccatttcaaaatgtaaacaggatcacatatggggcctgtcccagatatgttaagcaaaacactctgaaattggcaacagggatgcggaatgtaccagagaaacaaactagaggcatattcggcgcaatcgcaggtttcatagaaaatggttgggagggaatggtagacggttggtacggtttcaggcatcaaaattctgagggcacaggacaagcagcagatcttaaaagcactcaagcagcaatcaaccaaatcaacgggaaactgaataggttaatcgagaaaacgaacgagaaattccatcaaattgaaaaagaattctcagaagtagaagggagaattcaggacctcgagaaatatgttgaggacactaaaatagatctctggtcgtacaacgcggagcttcttgttgccctggagaaccaacatacaattgatctaactgactcagaaatgaacaaactgtttgaaagaacaaggaagcaactgagggaaaatgctgaggatatgggcaatggttgtttcaaaatataccacaaatgtgacaatgcctgcatagggtcaatcagaaatggaacttatgaccatgatgtatacagagacgaagcattaaacaaccggttccagatcaaaggtgttgagctgaagtcaggatacaaagattggatcctatggatttcctttgccatatcatgttttttgctttgtgttgttttgctggggttcatcatgtgggcctgccaaaaaggcaacattaggtgcaacatttgcatttga

SEQ ID NO: 30968 - RNA, 1701 nt, synthetic construct
  misc_feature 1..1701: note = hemagglutinin__InfluenzaA__ABB80529
  source 1..1701: mol_type = other RNA
atgaagactatcattgctttgagctacatttcatgtctggttttcgctcaaaaacttcccggaaatgacaacagcacggcaacgctgtgcctgggacaccatgcagtgccaaacggaacgctagtgaaaacaatcacgaatgaccaaattgaagtgactaatgctactgagctggttcagagttcctcaacaggtagaatatgcgacagtcctcaccgaatccttgatggagaaaactgcacactgatagatgctctattgggagaccctcattgtgatggcttccaaaataaggaatgggacctttttgttgaacgcagcaaagcctacagcaactgttacccttatgatgtgccggattatgcctcccttaggtcactagttgcctcatccggcactctggagtttaacaatgaaagcttcaattggactggagtcgctcagaatggaacaagctatgcttgcaaaaggagatctattaaaagtttctttagtagattgaattggttgcaccaattaaaatacaaatatccagcactgaacgtgactatgccaaacaatgacaaatttgacaaattgtacatttggggggttcaccacccgagtacggacagtgaccaaaccagcctatatgctcaagcatcagggagagtcacagtctctaccaaaagaagccaacaaactgtaatcccgaatatcggatctagaccctgggtaaggggtgtctccagcagaataagcatctattggacaatagtaaaaccgggagacatacttttgattaacagcacagggaatctaattgctcctcggggttacttcaaaatacgaagtgggaaaagctcaataatgaggtcagatgcacccattggcaaatgcaattctgaatgcatcactccaaatggaagcattcccaatgacaaaccatttcaaaatgtaaacaggatcacatatggggcctgtcccagatatgttaagcaaaacactctgaaattggcaacagggatgcggaatgtaccagataaacaaactagaggcatattcggcgcaatcgcaggtttcatagaaaatggttgggagggaatggtagacggttggtacggtttcaggcatcaaaattctgagggcacaggacaagcagcagatcttaaaagcactcaagcagcaatcaaccaaatcaacgggaaactgaataggttaatcgagaaaacgaacgagaaattccatcaaattgaaaaagaattctcagaagtagaagggagaattcaggacctcgagaaatatgttgaggacactaaaatagatctctggtcgtacaacgcggagcttcttgttgccctggagaaccaacatacaattgatctaactgactcagaaatgaacaaactgtttgaaagaacaaggaagcaactgagggaaaatgctgaggatatgggcaatggttgtttcaaaatataccacaaatgtgacaatgcctgcatagggtcaatcagaaatggaacttatgaccatgatgtatacagagacgaagcattaaacaaccggttccagatcaaaggtgttgagctgaagtcaggatacaaagattggatcctatggatttcctttgccatatcatgttttttgctttgtgttgttttgctggggttcatcatgtgggcctgccaaaaaggcaacattaggtgcaacatttgcatttga

SEQ ID NO: 30969 - RNA, 1701 nt, synthetic construct
  misc_feature 1..1701: note = hemagglutinin__InfluenzaA__ABB80641
  source 1..1701: mol_type = other RNA
atgaagactatcattgctttgagctacattttatgtcttgttttcgctcaaaaaattcccggaaatgacaacagcacggcaacgctgtgcctgggacaccatgcagtgccaaacggaacgctagtgaaaacaatcacgaatgaccaaattgaagtgactaatgctactgagctggttcagagttcctcaacaggtagaatatgcgacagtcctcaccgaatccttgatggagaaaactgcacactgatagatgctctattgggagaccctcattgtgatggcttccaaaataaggaatgggacctttttgttgaacgcagcaaagcctacagcaactgttacccttatgatgtgtcggattatgcctcccttaggtcactagttgcctcatccggcaccctggagtttaacaatgaaagcttcaattggactggagtcgctcagaatggaacaagctacgcttgcaaaaggagatctattaaaagtttctttagtagattgaattggttgcaccaattaaaatacaaatatccagcactgaacgtgactatgccaaacaatgacaaatttgacaaattgtacatttggggggttcaccacccgagtacggacagtgaccaaaccagcctatatgctcaagcatcagggagagtcacagtctctaccaaaagaagccaacaaactgtaatcccgaatatcggatctagaccctgggtaaggggtgtctccagcagaataagcatctattggacaatagtaaaaccgggagacatacttttgattaacagcacagggaatctaattgctcctcggggttacttcaaaatacgaagtgggaaaagctcaataatgaggtcagatgcacccattggcaaatgcaattctgaatgcatcactccaaatggaagcattcccaatgacaaaccatttcaaaatgtaaacaggatcacatatggggcctgtcccagatatgttaagcaaaacactctgaaattggcaacagggatgcggaatgtaccagagaaacaaactagaggcatattcggcgcaatagcaggtttcatagaaaatggttgggagggaatggtagacggttggtacggtttcaggcatcaaaattctgagggcacaggacaagcagcagatcttaaaagcactcaagcagcaatcaaccaaatcaacgggaaactgaataggttaatcgagaaaacgaacgagaaattccatcaaattgaaaaagaattctcagaagtagaagggagaattcaggacctcgagaaatatgttgaggacactaaaatagatctctggtcgtacaacgcggagcttcttgttgccctggagaaccaacatacaattgatctaactgactcagaaatgaacaaactgtttgaaagaacaaggaagcaactgagggaaaatgctgaggatatgggcaatggttgtttcaaaatataccacaaatgtgacaatgcctgcatagggtcaatcagaaatggaacttatgaccatgatgtatacagagacgaagcattaaacaaccggtttcagatcaaaggtgttgagctgaagtcaggatacaaagattggatcctatggatttcctttgccatatcatgttttttgctttgtgttgttttgctggggttcatcatgtgggcctgccaaaaaggcaacattaggtgcaacatttgcatttga

SEQ ID NO: 30970 - RNA, 1701 nt, synthetic construct
  misc_feature 1..1701: note = hemagglutinin__InfluenzaA__ABB80661
  source 1..1701: mol_type = other RNA
atgaagactatcattgctttgagctacattttatgtctggttttcgctcaaaaaattcccggaaatgacaacagcacggcaacgctgtgcctgggacaccatgcagtgccaaacggaacgctagtgaaaacaatcacgaatgaccaaattgaagtgactaatgctactgagctggttcagagttcctcaacaggtagaatatgcgacagtcctcaccgaatccttgatggagaaaactgcacactgatagatgctctattgggagaccctcattgtgatggcttccaaaataaggaatgggacctttttgttgaacgcagcaaagcctacagcaactgttacccttatgatgtgccggattatgcctcccttaggtcactagttgcctcatccggcaccctggagtttaacaatgaaagcttcaattggactggagtcgctcagaatggaacaagctatgcttgcaaaaggagatctattaaaagtttctttagtagattgaattggttgcaccaattaaaatacaaatatccagcactgaacgtgactatgccaaacaatgacaaatttgacaaattgtacatttggggggttcaccacccgagtacggacagtgaccaagccagcctatatgctcaagcatcagggagagtcacagtctctaccaaaagaagccaacaaactgtaatcccgaatatcggatctagaccctgggtaaggggtgtctccagcagaataagcatctattggacaatagtaaaaccgggagacatacttttgattaacagcacagggaatctaattgctcctcggggttacttcaaaatacgaagtgggaaaagctcaataatgaggtcagatgcacccattggcaaatgcaattctgaatgcatcactccaaatggaagcattcccaatgacaaaccatttcaaaatgtaaacaggatcacatatggggcctgtcccagatatgttaagcaaaacactctgaaattggcaacagggatgcggaatgtaccagagaaacaaactagaggcatattcggcgcaatcgcaggtttcatagaaaatggttgggagggaatggtagacggttggtacggtttcaggcatcaaaattctgagggcacaggacaagcagcagatcttaaaagcactcaagcagcaatcaaccaaatcaacgggaaactgaataggttaatcgagaaaacgaacgagaaattccatcaaattgaaaaagaattctcagaagtagaagggagaattcaggacctcgagaaatatgttgaggacactaaaatagatctctggtcgtacaacgcggagcttcttgttgccctggagaaccaacatacaattgatctaactgactcagaaatgaacaaactgtttgaaagaacaaggaagcaactgagggaaaatgctgaggatatgggcaatggttgtttcaaaatataccacaaatgtgacaatgcctgcatagggtcaatcagaaatggaacttatgaccatgatgtatacagagacgaagcattaaacaaccggtttcagatcaaaggtgttgagctgaagtcaggatacaaagattggatcctatggatttcctttgccatatcatgttttttgctttgtgttgttttgctggggttcatcatgtgggcctgccaaaaaggcaacattaggtgcaacatttgcatttga

SEQ ID NO: 30971 - RNA, 1701 nt, synthetic construct
  misc_feature 1..1701: note = hemagglutinin__InfluenzaA__ABB80672
  source 1..1701: mol_type = other RNA
atgaagactatcattgctttgagctacattttatgtctggttttcgctcaaaaacttcccggaaatgacaacagcacggcaacgctgtgcctgggacaccatgcagtgccaaacggaacgctagtgaaaacaatcacgaatgaccaaattgaagtgactaatgctactgagctggttcagggttcctcaacaggtagaatatgcgacagtcctcaccaaatccttgatggaaaaaactgcacactgatagatgctctattgggagaccctcattgtgatggcttccaaaataaggaatgggacctttttgttgaacgcagcacagcttacagcaactgttacccttatgatgtgccggattatgcctcccttaggtcactagttgcctcatccggcaccctggagtttaccaaagaaggcttcaattggactggagtcgctcaggatggaacaagctatgcttgcaaaaggggatctgttaaaagtttctttagtagattgaattggttgcacaaattagaatacaaatatccagcactgaacgtgactatgccaaacaatgacaaatttgacaaattgtacatttggggggttcaccacccgagtacggacagtgaccaaaccagcctatatgttcaagcatcagggagagtcacagtctctaccaaaagaagccaacaaactgtaatcccgaatatcgggtctagaccctgggtaaggggtgtctccagcagaataagcatctattggacaatagtaaaaccgggagacatacttttgattaacagcacagggaatctaattgctcctcggggttacttcaaaatacgaagtgggaaaagctcaataatgaggtcggatgcacccattgacaactgcaattctgaatgcattactccaaatggaagcattcccaatgacaaaccttttcaaaatgtaaacaggatcacatatggggcctgtcccagatatgttaagcaaaacactctgaaattggcaacagggatgcggaatgtaccagagaaacaaactagaggcatattcggcgcaatcgcaggtttcatagaaaatggttgggagggaatggtggacggttggtacggtttcaggcatcaaaactctgaaggcacaggacaagcagcagatcttaaaagcactcaagcagcaatcaaccaaatcaacgggaaactgaataggttaatcgagaaaacgaacgagaaattccatcaaatcgaaaaagaattctcagaagtagaagggagaattcaggacctcgagaaatatgttgaagacactaaaatagatctctggtcttacaacgcggagcttcttgttgccctggagaaccaacatacaattgatctaactgactcagaaatgaacaaactgttcgaaagaacaagaaagcaactgagggaaaatgctgaggacatgggcaatggttgcttcaaaatataccacaaatgtgacaatgcctgcatagggtcaatcagaaatggaacttatgatcatgatgtatacagagacgaagcattaaacaaccggttccagatcaaaggtgttgagctgaagtcaggatacaaagattggatcctatggatttcctttgccatatcatgctttttgctttgtgttgttttgctggggttcattatgtgggcctgccaaaaaggcaacattaggtgcaacatttgcatttga

SEQ ID NO: 30972 - RNA, 1701 nt, synthetic construct
  misc_feature 1..1701: note = hemagglutinin__InfluenzaA__ABB80682
  source 1..1701: mol_type = other RNA
atgaagactatcattgctttgagctacatttcatgtctggttttcgctcaaaaacttcccggaaatgacaacagcacggcaacgctgtgcctgggacaccatgcagtgccaaacggaacgctagtgaaaacaatcacgaatgaccaaattgaagtgactaatgctactgagctggttcagagttcctcaacaggtagaatatgcgacagtcctcaccgaatccttgatggagaaaactgcacactgatagatgctctattgggagaccctcattgtgatggcttccaaaataaggaatgggacctttttgttgaacgcagcaaagcctacagcaactgttacccttatgatgtgccggattatgcctcccttaggtcactagttgcctcatccggcactctggagtttaacaatgaaagcttcaattggactggagtcgctcagaatggaacaagctatgcttgcaaaaggagatctattaaaagtttctttagtagattgaattggttgcaccaattaaaatacaaatatccagcactgaacgtgactatgccaaacaatgacaaatttgacaaattgtacatttggggggttcaccacccgagtacggacagtgaccaaaccagcctatatgctcaagcatcagggagagtcacagtctctaccaaaagaagccaacaaactgtaatcccgaatatcggatctagaccctgggtaaggggtgtctccagcagaataagcatctattggacaatagtaaaaccgggagacatacttttgattaacagcacagggaatctaattgctcctcggggttacttcaaaatacgaagtgggaaaagctcaataatgaggtcagatgcacccattggcaaatgcaattctgaatgcatcactccaaatggaagcattcccaatgacaaaccatttcaaaatgtaaacaggatcacatatggggcctgtcccagatatgttaagcaaaacactctgaaattggcaacagggatgcggaatgtaccagagaaacaaactagaggcatattcggcgcaatcgcaggtttcatagaaaatggttgggagggaatggtagacggttggtacggtttcaggcatcaaaattctgagggcacaggacaagcagcagatcttaaaagcactcaagcagcaatcaaccaaatcaacgggaaactgaataggttaatcgagaaaacgaacgagaaattccatcaaattgaaaaagaattctcagaagtagaagggagaattcaggacctcgagaaatatgttgaggacactaaaatagatctctggtcgtacaacgcggagcttcttgttgccctggagaaccaacatacaattgatctaactgactcagaaatgaacaaactgttggaaagaacaaggaagcaactgagggaaaatgctgaggatatgggcaatggttgtttcaaaatataccacaaatgtgacaatgcctgcatagggtcaatcagaaatggaacttatgaccatgatgtatacagagacgaagcattaaacaaccggttccagatcaaaggtgttgagctgaagtcaggatacaaagattggatcctatggatttcctttgccatatcatgttttttgctttgtgttgttttgctggggttcatcatgtgggcctgccaaaaaggcaacattaggtgcaacatttgcatttga

SEQ ID NO: 30973 - RNA, 1701 nt, synthetic construct
  misc_feature 1..1701: note = hemagglutinin__InfluenzaA__ABB80693
  source 1..1701: mol_type = other RNA
atgaagactatcattgctttgagctacatttcatgtctggttttcgctcaaaaacttcccggaaatgacaacagcacggcaacgctgtgcctgggacaccatgcagtgccaaacggaacgctagtgaaaacaatcacgaatgaccaaattgaagtgactaatgctactgagctggttcagagttcctcaacaggtagaatgtgcgacagtcctcaccgaatccttgatggagaaaactgcacactgatagatgctctattgggagaccctcattgtgatggcttccaaaataaggaatgggacctttttgttgaacgcagcaaagcctacagcaactgttacccttatgatgtgccggattatgcctcccttaggtcactagttgcctcatccggcactctggagtttaacaatgaaagcttcaattggactggagtcgctcagaatggaacaagctatgcttgcaaaaggagatctattaaaagtttctttagtagattgaattggttgcaccaattaaaatacaaatatccagcactgaacgtgactatgccaaacaatgacaaatttgacaaattgtacatttggggggttcaccacccgagtacggacagtgaccaaaccagcctatatgctcaagcatcagggagagtcacagtctctaccaaaagaagccaacaaactgtaatcccgaatatcggatctagaccctgggtaaggggtgtctccagcagaataagcatctattggacaatagtaaaaccgggagacatacttttgattaacagcacagggaatctaattgctcctcggggttacttcaaaatacgaagtgggaaaagctcaataatgaggtcagatgcacccattggcaaatgcaattctgaatgcatcactccaaatggaagcattcccaatgacaaaccatttcaaaatgtaaacaggatcacatatggggcctgtcccagatatgttaagcaaaacactctgaaattggcaacagggatgcggaatgtaccagagaaacaaactagaggcatattcggcgcaatcgcaggtttcatagaaaatggttgggagggaatggtagacggttggtacggtttcaggcatcaaaattctgagggcacaggacaagcagcagatcttaaaagcactcaagcagcaatcaaccaaatcaacgggaaactgaataggttaatcgagaaaacgaacgagaaattccatcaaattgaaaaagaattctcagaagtagaagggagaattcaggacctcgagaaatatgttgaggacactaaaatagatctctggtcgtacaacgcggagcttcttgttgccctggagaaccaacatacaattgatctaactgactcagaaatgaacaaactgtttgaaagaacaaggaagcaactgagggaaaatgctgaggatatgggcaatggttgtttcaaaatataccacaaatgtgacaatgcctgcatagggtcaatcagaaatggaacttatgaccatgatgtatacagagacgaagcattaaacaaccggttccagatcaaaggtgttgagctgaagtcaggatacaaagattggatcctatggatttcctttgccatatcatgttttttgctttgtgttgttttgctggggttcatcatgtgggcctgccaaaaaggcaacattaggtgcaacatttgcatttga

SEQ ID NO: 30974 - RNA, 1701 nt, synthetic construct
  misc_feature 1..1701: note = hemagglutinin__InfluenzaA__ABB80704
  source 1..1701: mol_type = other RNA
atgaagactatcattgctttgagctacattttatgtctggttttcgctcaaaaaattcccggaaatgacaacagcacggcaacgctgtgcctgggacaccatgcagtgccaaacggaacgctagtgaaaacaatcacgaatgaccaaattgaagtgactaatgctactgagctggttcagagttcctcaacaggtagaatatgcgacagtcctcaccgaatccttgatggagaaaactgcacactgatagatgctctattgggagaccctcattgtgatggcttccaaaataaggaatgggacctttttgttgaacgcagcaaagcctacagcaactgttacccttatgatgtgccggattatgcctcccttaggtcactagttgcctcatccggcaccctggagtttaacaatgaaagcttcaattggactggagtcgctcagaatggaacaagctatgcttgcaaaaggagatctattaaaagtttctttagtagattgaattggttgcaccaattaaaatacaaatatccagcactgaacgtgaccatgccaaacaatgacaaatttgacaaattgtacatttggggggttcaccacccgagtacggacagtgaccaaaccagcctatatgctcaagcatcagggagagtcacagtctctaccaaaagaagccaacaaactgtaatcccgaatatcggatctagaccctgggtaaggggtgtctccagcagaataagcatctattggacaatagtaaaaccgggagacatacttttgattaacagcacagggaatctaattgctcctcggggttacttcaaaatacgaagtgggaaaagctcaataatgaggtcagatgcacccattggcaaatgcaattctgaatgcatcactccaaatggaagcattcccaatgacaaaccatttcaaaatgtaaacaggatcacatatggggcctgtcccagatatgttaagcaaaacactctgaaattggcaacagggatgcggaatgtaccagagaaacaaactagaggcatattcggcgcaatcgcaggtttcatagaaaatggttgggagggaatggtagacggttggtacggtttcaggcatcaaaattctgagggcacaggacaagcagcagatcttaaaagcactcaagcagcaatcaaccaaatcaacgggaaactgaataggttaatcgagaaaacgaacgagaaattccatcaaattgaaaaagaattctcagaagtagaagggagaattcaggacctcgagaaatatgttgaggacactaaaatagatctctggtcgtacaacgcggagcttcttgttgccctggagaaccaacatacaattgatctaactgactcagaaatgaacaaactgtttgaaagaacaaggaagcaactgagggaaaatgctgaggatatgggcaatggttgtttcaaaatataccacaaatgtgacaatgcctgcatagggtcaatcagaaatggaacttatgaccatgatgtatacagagacgaagcattaaacaaccggttccagatcaaaggtgttgagctgaagtcaggatacaaagattggatcctatggatttcctttgccatatcatgttttttgctttgtgttgttttgctggggttcatcatgtgggcctgccaaaaaggcaacattaggtgcaacatttgcatttga

SEQ ID NO: 30975 - RNA, 1701 nt, synthetic construct
  misc_feature 1..1701: note = hemagglutinin__InfluenzaA__ABB80715
  source 1..1701: mol_type = other RNA
atgaagactatcattgctttgagctacatttcatgtctggttttcgctcaaaaacttcccggaaatgacaacagcacggcaacgctgtgcctgggacaccatgcagtgccaaacggaacgctagtgaaaacaatcacgaatgaccaaattgaagtgactaatgctactgagctggttcagagttcctcaacaggtagaatatgcgacagtcctcaccgaatccttgatggagaaaactgcacactgatagatgctctattgggagaccctcattgtgatggcttccaaaataaggaatgggacctttttgttgaacgcagcaaagcctacagcaactgttacccttatgatgtgccggattatgcctcccttaggtcactagttgcctcatccggcactctggagtttaacaatgaaagcttcaattggactggagtcgctcagaatggaacaagctatgcttgcaaaaggagatctattaaaagtttctttagtagattgaattggttgcaccaattaaaatacaaatatccagcactgaacgtgactatgccaaacaatgacaaatttgacaaattgtacatttggggggttcaccacccgagtacggacagtgaccaaaccagcctatatgctcaagcatcagggagagtcacagtctctaccaaaagaagccaacaaactgtaatcccgaatatcggatctagaccctgggtaaggggtgtctccagcagaataagcatctattggacaatagtaaaaccgggagacatacttttgattaacagcacagggaatctaattgctcctcggggttacttcaaaatacgaagtgggaaaagctcaataatgaggtcagatgcacccattggcaaatgcaattctgaatgcatcactccaaatggaagcattcccaatgacaaaccatttcaaaatgtaaacaggatcacatatggggcctgtcccagatatgttaagcaaaacactctgaaattggcaacagggatgcggaatgtaccagagaaacaaactagaggcatattcggcgcaattgcaggtttcatagaaaatggttgggagggaatggtagacggttggtacggtttcaggcatcaaaattctgagggcacaggacaagcagcagatcttaaaagcactcaagcagcaatcaaccaaatcaacgggaaactgaataggttaatcgagaaaacgaacgagaaattccatcaaattgaaaaagaattctcagaagtagaagggagaattcaggacctcgagaaatatgttgaggacactaaaatagatctctggtcgtacaacgcggagcttcttgttgccctggagaaccaacatacaattgatctaactgactcagaaatgaacaaactgtttgaaagaacaaggaagcaactgagggaaaatgctgaggatatgggcaatggttgtttcaaaatataccacaaatgtgacaatgcctgcatagggtcaatcagaaatggaacttatgaccatgatgtatacagagacgaagcattaaacaaccggttccagatcaaaggtgttgagctgaagtcaggatacaaagattggatcctatggatttcctttgccatatcatgttttttgctttgtgttgttttgctggggttcatcatgtgggcctgccaaaaaggcaacattaggtgcaacatttgcatttga

SEQ ID NO: 30976 - RNA, 1701 nt, synthetic construct
  misc_feature 1..1701: note = hemagglutinin__InfluenzaA__ABB80724
  source 1..1701: mol_type = other RNA
atgaagactatcattgctttgagctacattttatgtctggttttcgctcaaaaacttcccggaaatgacaacagcacggcaacgctgtgcctgggacaccatgcagtgccaaacggaacgctagtgaaaacaatcacgaatgaccaaattgaagtgactaatgctactgagctggttcagagttcctcaacaggtagaatatgcgacagtcctcaccgaatccttgatggagaaaactgcacactgatagatgctctattgggagaccctcattgtgatggcttccaaaataaggaatgggacctttttgttgaacgcagcaaagcctacagcaactgttacccttatgatgtgccggattatgcctcccttaggtcactagttgcctcatccggcaccctggagtttaacaatgaaagcttcaattggactggagtcgctcagaatggaacaagctatgcttgcaaaaggagatctattaaaagtttctttagtagattgaattggttgcaccaattaaaatacaaatatccagcactgaacgtgactatgccaaacaatgacaaatttgacaaattgtacatttggggggttcaccacccgagtacggacagtgaccaagccagcctatatgctcaagcatcagggagagtcacagtctctaccaaaagaagccaacaaactgtaatcccgaatatcggatctagaccctgggtaaggggtgtctccagcagaataagcatctattggacaatagtaaaaccgggagacatacttttgattaacagcacagggaatctaattgctcctcggggttacttcaaaatacgaagtgggaaaagctcaataatgaggtcagatgcacccattggcaaatgcaattctgaatgcatcactccaaatggaagcattcccaatgacaaaccatttcaaaatgtaaacaggatcacatatggggcctgtcccagatatgttaagcaaaacaccctgaaattggcaacagggatgcggaatgtaccagagaaacaaactagaggcatattcggcgcaatcgcaggtttcatagaaaatggttgggagggaatggtagacggttggtacggtttcaggcatcaaaattctgagggcacaggacaagcagcagatcttaaaagcactcaagcagcaatcaaccaaatcaacgggaaactgaataggttaatcgagaaaacgaacgagaaattccatcaaattgaaaaagaattctcagaagtagaagggagaattcaggacctcgagaaatatgttgaggacactaaaatagatctctggtcgtacaacgcggagcttcttgttgccctggagaaccaacatacaattgatctaactgactcagaaatgaacaaactgtttgaaagaacaaggaagcaactgagggaaaatgctgaggatatgggcaatggttgtttcaaaatataccacaaatgtgacaatgcctgcatagggtcaatcagaaatggaacttatgaccatgatgtatacagagacgaagcattaaacaaccggttccagatcaaaggtgttgagctgaagtcaggatacaaagattggatcctatggatttcctttgccatgtcatgttttttgctttgtgttgttttgctggggttcatcatgtgggcctgccaaaaaggcaacattaggtgcaacatttgcatttga

SEQ ID NO: 30977 - RNA, 1701 nt, synthetic construct
  misc_feature 1..1701: note = hemagglutinin__InfluenzaA__ABB80737
  source 1..1701: mol_type = other RNA
atgaagactatcattgctttgagctacattttatgtctggttttcgctcaaaaacttcccggaaatgacaacagcacggcaacgctgtgcctgggacaccatgcagtgccaaacggaacgctagtgaaaacaatcacgaatgaccaaattgaagtgactaatgctactgagctggttcagagttcttcaacaggtagaatatgcgacagtcctcaccgaatccttgatggagaaaactgcacactgatagatgctctattgggagaccctcattgtgatggcttccaaaataaggaatgggacctttttgttgaacgcagcaaagcctacagcaactgttacccttatgatgtgccggattatgcctcccttaggtcactagttgcctcatccggcaccctggagtttaacaatgaaagcttcaattggactggagtcgctcagaatggaacaagctatgcttgcaaaaggagatctattaaaagtttctttagtagattgaattggttgcaccaattaaaatacaaatatccagcactgaatgtgactatgccaaacaatgacaaatttgacaaattgtacatttggggggttcaccacccgagtacggacagtgaccaaaccagcctatatgctcaagcatcagggagagtcacagtctctaccaaaagaagccaacaaactgtaatcccgaatatcggatctagaccctgggtaaggggtgtctccagcagaataagcatctattggacaatagtaaaaccgggagacatacttttgattaacagcacagggaatctaattgctcctcggggttacttcaaaatacgaagtgggaaaagctcaataatgaggtcagatgcacccattggcaaatgcaattctgaatgcatcactccaaatggaagcattcccaatgacaaaccatttcaaaatgtaaacaggatcacatatggggcctgtcccagatatgttaagcaaaacaccctgaaattggcaacagggatgcggaatgtaccagagaaacaaactagaggcatattcggcgcaatcgcaggtttcatagaaaatggttgggagggaatggtagacggttggtacggtttcaggcatcaaaattctgagggcacaggacaagcagcagatcttaaaagcactcaagcagcaatcaaccaaatcaacgggaaactgaataggttaatcgagaaaacgaacgagaaattccatcaaattgaaaaagaattctcagaagtagaagggagaattcaggacctcgagaaatatgttgaggacactaaaatagatctctggtcgtacaacgcggagcttcttgttgccctggagaaccaacatacaattgatctaactgactcagaaatgaacaaactgtttgaaagaacaaggaagcaactgagggaaaatgctgaggatatgggcaatggttgtttcaaaatataccacaaatgtgacaatgcctgcatagggtcaatcagaaatggaacttatgaccatgatgtatacagagacgaagcattaaacaaccggttccagatcaaaggtgttgagctgaagtcaggatacaaagattggatcctatggatttcctttgccatgtcatgttttttgctttgtgttgttttgctggggttcatcatgtgggcctgccaaaaaggcaacattaggtgcaacatttgcatttga

SEQ ID NO: 30978 - RNA, 1701 nt, synthetic construct
  misc_feature 1..1701: note = hemagglutinin__InfluenzaA__ABB80748
  source 1..1701: mol_type = other RNA
atgaagactatcattgctttgagctacatttcatgtctggttttcgctcaaaaacttcccggaaatgacaacagcacggcaacgctgtgcctgggacaccatgcagtgccaaacggaacgctagtgaaaacaatcacgaatgaccaaattgaagtgactaatgctactgagctggttcagagttcctcaacaggtagaatatgcgacagtcctcaccgaatccttgatggagaaaactgcacactgatagatgctctattgggagaccctcattgtgatggcttccaaaataaggaatgggacctttttgttgaacgcagcaaagcctacagcaactgttacccttatgatgtgccggattatgcctcccttaggtcactagttgcctcatccggcactctggagtttaacaatgaaagcttcaattggactggagtcgctcagaatggaacaagctatgcttgcaaaaggaggtctattaaaagtttctttagtagattgaattggttgcaccaattaaaatacaaatatccagcactgaacgtgactatgccaaacaatgacaaatttgacaaattgtacatttggggggttcaccacccgagtacggacagtgaccaaaccagcctatatgctcaagcatcagggagagtcacagtctctacccaaagaagccaacaaactgtaatcccgaatatcggatctagaccctgggtaaggggtgtctccagcagaataagcatctattggacaatagtaaaaccgggagacatacttttgattaacagcacagggaatctaattgctcctcggggttacttcaaaatacgaagtgggaaaagctcaataatgaggtcagatgcacccattggcaaatgcaattctgaatgcatcactccaaatggaagcattcccaatgacaaaccatttcaaaatgtaaacaggatcacatatggggcctgtcccagatatgttaagcaaaacactctgaaattggcaacagggatgcggaatgtaccagagaaacaaactagaggcatattcggcgcaatcgcaggtttcatagaaaatggttgggagggaatggtagacggttggtacggtttcaggcatcaaaattctgagggcacaggacaagcagcagatcttaaaagcactcaagcagcaatcaaccaaatcaacgggaaactgaataggttaatcgagaaaacgaacgagaaattccatcaaattgaaaaagaattctcagaagtagaagggagaattcaggacctcgaggaatatgttgaggacactaaaatagatctctggtcgtacaacgcggagcttcttgttgccctggagaaccaacatacaattgatctaactgactcagaaatgaacaaactgtttgaaagaacaaggaagcaactgagggaaaatgctgaggatatgggcaatggttgtttcaaaatataccacaaatgtgacaatgcctgcatagggtcaatcagaaatggaacttatgaccatgatgtatacagagacgaagcattaaacaaccggttccagatcaaaggtgttgagctgaagtcaggatacaaagattggatcctatggatttcctttgccatatcatgttttttgctttgtgttgttttgctggggttcatcatgtgggcctgccaaaaaggcaacattaggtgcaacatttgcatttga

SEQ ID NO: 30979 - RNA, 1701 nt, synthetic construct
  misc_feature 1..1701: note = hemagglutinin__InfluenzaA__ABB82183
  source 1..1701: mol_type = other RNA
atgaagactatcattgctttgagctacattttatgtctggttttcgctcaaaaacttcccggaaatgacaacagcacggcaacgctgtgcctggggcaccatgcagtgccaaacggaacgctagtgaaaacaatcacgaatgaccaaattgaagtgactaatgctactgagctggttcagagttcctcaacaggtagaatatgcgacagtcctcaccaaatccttgatggagaaaactgcacactaatagatgctctattgggagaccctcattgtgatggcttccaaaataaggaatgggaccttttcgttgaacgcagcaaagcctacagcaactgttacccttatgatgtgccggattatgcctcccttaggtcactagttgcctcatccggcacactggagtttaacaatgaaagcttcaattggactggagtcgctcagaatggaacaagctctgcttgcaaaaggaggtctaataaaagtttctttagtagattgaattggttgcaccaattgaaatacaaatacccagcactgaacgtgactatgccaaacaatgaaaaatttgacaaattgtacatttggggggttcaccacccgagtacggacagtgaccaaatcagcctatatgctcaagcatcagggagagtcacagtctctaccaaaagaagccaacagactgtaatcccgaatatcggatctagaccctgggtaaggggtgtctccagcagaataagcatctattggacaatagtaaaaccgggagacatacttttgattaacagcacagggaatctaattgctcctcggggttacttcaaaatacgaagtgggaaaagctcagtaatgaggtcagatgcatccattggcagatgcaattctgaatgcatcactccaaatggaagcattcccaatgacaaaccatttcaaaatgtaaacaggatcacatatggggcctgtcccagatatgttaagcaaaacactctgaaattggcaacagggatgcggaatgtaccagagaaacaaactagaggcatattcggtgcaatcgcgggtttcatagaaaatggttgggagggaatggtggacggttggtacggtttcaggcatcaaaattctgagggcacaggacaagcagcagatcttaaaagcactcaagcagcaatcaaccaaatcaacgggaaactgaataggttaatcgagaaaacgaacgaaaaattccatcaaattgaaaaagaattctcagaagtagaagggagaattcaggacctcgagaaatatgttgaggacactaaaatagatctctggtcgtacaacgcggagcttcttgttgccctggagaaccaacatacaattgatctaactgactcagaaatgaacaaactgtttgaaagaacaaagaagcaactgagggaaaatgctgaggatatgggcaatggctgtttcaaaatataccacaaatgtgacaatgcctgcatagggtcaatcagaaatggaacttatgaccatgatgtatacagagacgaagcattaaacaaccggttccagatcaaaggtgttgagctgaagtcaggatacaaagattggatcctatggatttcctttgccatatcatgttttttgctttgtgttgttttgctggggttcatcatgtgggcctgccaaaaaggcaacattaggtgcaacatttgcatttga

SEQ ID NO: 30980 - RNA, 1698 nt, synthetic construct; identical to SEQ ID NO: 30937
  misc_feature 1..1698: note = hemagglutinin__InfluenzaA__ABB82194
  source 1..1698: mol_type = other RNA

SEQ ID NO: 30981 - RNA, 1698 nt, synthetic construct
  misc_feature 1..1698: note = hemagglutinin__InfluenzaA__ABB82205
  source 1..1698: mol_type = other RNA
atgaaagtaaaactactggttctgttatgtacatttacagctacatatgcagacacaatatgtataggctaccatgccaacaactcaaccgacactgttgacacagtacttgagaagaatgtgacagtgacacactctgtcaacctacttgaggacagtcacaatggaaaactatgtctactaaaaggaatagccccactacaattgggtaattgcagcgttgccggatggatcttaggaaacccagaatgcgaattactgatttccaaggaatcatggtcctacattgtagaaacaccaaatcctgagaatggaacatgttacccagggtatttcgccgactatgaggaactgagggagcaattgagttcagtatcttcatttgagaggttcgaaatattccccaaagagagctcatggcccaaccacaccgtaaccggagtatcagcatcatgctcccataacgggaaaagcagtttttacaaaaatttgctatggctgacggggaagaatggtttgtacccaaacctgagcaagtcctatgcaaacagcaaagagaaagaagtccttgtactatggggtgttcatcacccgcctaacataggggaccaaagggccctctatcatacagaaaatgcttatgtctctgtagtgtcttcacattatagcagaagattcaccccagaaatagccaaaagacccaaggtgagagatcaggaaggaagaatcaactactactggactctgctggaacccggggatacaataatatttgaggcaaatggaaatctaatagcgccaaggtatgctttcgcactgagtagaggctttggatcaggaatcatcacctcaaatgcaccaatggatgaatgtgatgcgaagtgtcaaacacctcagggagctataaacagcagtcttcctttccagaatgtacacccagtcacaataggagagtgtccaaagtatgtcaggagtgcaaaattaaggatggttacaggactaaggaacatcccatccattcaatccagaggtttgtttggagccattgccggtttcattgaaggggggtggactggaatggtagatggttggtatggttatcatcatcagaatgagcaaggatctgggtatgctgcagatcaaaaaagcacacaaaatgccattaacgggattacaaacaaggtgaattctgtaattgagaaaatgaacactcaattcacagctgtgggcaaagaattcaacaaattggaaagaaggatggaaaacttaaataaaaaagttgatgatgggtttctagacatttggacatataatgcagaattgttggttctactggaaaatgaaaggactttggatttccatgactccaacgtgaagaatctgtatgagaaagtaaaaagccaattaaagaataatgccaaagaaatagggaacgggtgttttgaattctatcacaagtgtaacgatgaatgcatggagagtgtgaaaaatggaacttatgactatccaaaatattccgaagaatcaaagttaaacagggagaaaattgatggagtgaaattggaatcaatgggagtctatcagattctggcgatctactcaacagtcgccagttccctggttcttttggtctccctgggggcaatcagcttctggatgtgttccaatgggtctttgcagtgtagaatatgcatctaa

SEQ ID NO: 30982 - RNA, 1698 nt, synthetic construct
  misc_feature 1..1698: note = hemagglutinin__InfluenzaA__ABB82216
  source 1..1698: mol_type = other RNA
atgaaagtaaaactactggtcctgttatgtacatttacagctacatatgcagacacaatatgtataggctaccatgccaacaactcaaccgacactgttgacacagtacttgagaagaatgtgacagtgacacactctgtcaacctacttgaggacagtcacaatggaaaactatgtctactaaaaggaatagccccactacaattgggtaattgcagcgttgccggatggatcttaggaaacccagaatgcgaattgctgatttccaaggaatcatggtcctacattgtagaaacaccaaatcctgagaatggaacatgttacccagggtatttcgccgactatgaggaactgagggagcaattgagttcagtatcttcatttgagaggttcgaaatattccccaaagaaagctcatggcccaaccacaccgtaaccggagtatcatcatcatgctcccataatgggaaaagcagtttttacagaaatttgctatggctgacggggaagaatggtttgtacccaaacctgagcaagtcctatgtaaacaacaaagagaaagaagtccttgtactatggggtgttcatcacccgcctaacataggggaccaaagggccctctatcatacagaaaatgcttatgtctctgtagtgtcttcacattatagcagaagattcaccccagaaatagccaaaagacccaaagtaagagatcaggaaggaagaatcaactactactggactctgctggaacccggggacacaataatatttgaggcaaatggaaatctaatagcgccaaggtatgctttcgcactgagtaggggctttggatcaggaatcatcacctcaaatgcaccaatggatgaatgtgatgcgaagtgtcaaacacctcagggagctataaacagcagtcttcctttccagaatgtacacccagtcacaataggagagtgtccaaagtatgtcaggagtgcaaaattaaggatggttacaggactaaggaacatcccatccattcaatccagaggtttgtttggggccattgccggtttcattgaaggggggtggactggaatggtagatggttggtatggttatcatcatcagaatgagcaaggatctggctatgctgcagatcaaaaaagcacacaaaatgccattaacgggattacaaacaaggtgaattctgtaattgagaaaatgaacactcaattcacagctgtgggcaaagaattcaataaattggaaagaaggatggaaaacttaaataaaaaagttgatgatgggtttctagacatttggacatataatgcagaattgttggttctactggaaaatgaaaggactttggatttccatgactccaatgtgaagaatctgtatgagaaagtaaaaagccaattaaagaataatgccaaagaaataggaaacgggtgttttgaattctatcacaagtgtaacgatgaatgcatggagagtgtgaaaaatggaacttatgactatccaaaatattccgaagaatcaaagttaaacagggagaaaattgatggagtgaaattggaatcaatgggagtctatcagattctggcgatctactcaacagtcgccagttccctggttcttttggtctccctgggggcaatcagcttctggatgtgttccaatgggtctttgcagtgtagaatatgcatctaa

SEQ ID NO: 30983 - RNA, 1701 nt, synthetic construct
  misc_feature 1..1701: note = hemagglutinin__InfluenzaA__ABB82227
  source 1..1701: mol_type = other RNA
atgaagaccatcattgctttgagctacattttctgtctgactctcggccaagaccttccaggaaatgacaacagcaaggcaacgctgtgcctgggacatcatgcggtgccaaacggaacactagtgaaaacaatcacagatgatcagactgaagtgactaatgctactgagctagttcaaagctcctcaacggggaaaatatgcaacaatcctcatcgaatccttgatggaatggactgcacactgatagatgctctattgggggaccctcattgtgatgtttttcaaaatgagacatgggaccttttcgttgaacgcagcaaagctttcagcaactgttacccttatgatgtgccagattatgcctcccttaggtcactagctgcctcgtcaggcactctggagtttatcactgagggtttcacttggactggggtcactcagaatgggggaagcaatgcttgcaaaaggggacctggtagcggttttttcagtagactgaactggttgaccaaatcaggaaacacctatccagtgctgaacgtgactatgccaaacaatgacaattttgacaaactatacatttggggggttcaccacccgagcacggaccaagaacaaaccagcctgtatgttcaagcatcagggagagtcacagtctctaccaggagaagccagcaaactataatcccgaatatcggatccagaccctgggtaaggggtctgtctagtagaataagcatctattggacaatagttaagccgggagacgtacttgtaattaatagtaatgggaacctaatcgctcctcggggttatttcaaaatgcgcactgggaaaagctcaataatgaggtcagatgcacctattgatacctgtatttctgaatgcatcactccaaatggaagcattcccaatgacaaaccctttcaaaacataaacaagatcacatatggagcatgccccaagtatgttaagcaaaacaccctaaagttggcaacagggatgcggaatgtaccagagaaacaaaccagaggcctattcggcgcaatagcaggtttcatagaaaatggttgggagggaatgatagacggttggtacggtttcaggcatcaaaattctgagggcacaggacaagcggcagatcttaaaagcactcaagcagccatcgaccaaatcaatgggaaattgaacaggataatcgagaagacgaacgagaaattccatcaaatcgaaaaggaattctcagaagtagaagggagaattcaggacctcgagaaatacgttgaagacactaaaatagatctatggtcttacaatgcggagcttcttgtcgctatggagaatcaacatacaattgatctgactgactcggaaatgaacaaactgtttgaaaaaacaagaaggcaactgagggaaaatgctgaagacatgggcaatggttgcttcaaaatataccacaaatgtgacaacgcttgcatagagtcaatcagaaatgggacttatgaccatgatgtatacagagacgaagcattaaacaacaggtttcagatcaaaggtgttgaactgaagtctggatacaaagactggatcctgtggatttcctttgccatatcatgctttttgctttgtgttgttttgctggggttcatcatgtgggcctgccagagaggcaacattaggtgcaacatttgcatttga

SEQ ID NO: 30984 - RNA, 1698 nt, synthetic construct
  misc_feature 1..1698: note = hemagglutinin__InfluenzaA__ABB83026
  source 1..1698: mol_type = other RNA
atgaaagtaaaactactgatcctgttatgtacatttacagctacatatgcagacacaatatgtataggctaccatgccaacaactcaaccgacactgttgacacagtacttgagaagaatgtgacagtgacacactctgtcaacctacttgaggacagtcacaatggaaaactatgtctactaaaaggaatagcccccctacaattgggtaattgcagcgttgccggatggatcttaggaaacccagaatgcgaattactgatttccaaggaatcatggtcctacattgtagaaacaccaaatcctgagaatggaacatgttacccagggtatttcgccgactatgaggagctaagggagcaattgagttcagtatcttcatttgagagattcgaaatattccccaaagaaagctcatggcccaaccacaccgtaaccggagtatcagcatcatgctcccataatgggaaaagcagtttttacagaaatttgctatggctgacggagaagaatggtttgtacccaaacctgagcaagtcctatgcaaacaacaaagagaaagaagtccttatactatggggtgttcatcacccgcctaacataggggaccaaaggaccctctatcatacagaaaatgcttatgtctctgtagtgtcttcacattatagcagaagattcaccccagaaataaccaaaaggcccaaagtaagagatcaggaaggaagaatcaactactactggactctgctggaacccggggatacaataatatttgaggcaaatggaaatctaatagcgccatggtatgctttcgcactgagtagaggctttggatcaggaatcatcacctcaaatgcaccaatggatgaatgtgatgcgaagtgtcaaacacctcagggagctataaacagcagtcttcctttccagaatgtacacccagtcacaataggagagtgtccaaagtatgtcaggagtgcaaaattaaggatggttacaggactaaggaacatcccatccattcaatccagaggtttgtttggagccattgccggtttcattgaaggggggtggactggaatggtagacgggtggtatggttatcatcatcagaatgagcaaggatctggctatgctgcagatcaaaaaagcacacaaaacgccattaacgggattacaaacaaggtgaattctgtaattgagaaaatgaacactcaattcacagctgtgggcaaagaattcaacaaattggaaagaaggatggaaaacttaaataaaaaagttgatgatgggtttctagacatttggacatataatgcagaattgttggttctactggaaaatgaaaggactttggatttccacgactccaatgtgaagaatctgtatgagaaagtaaaaagccaattaaagaataatgccaaagaaataggaaatgggtgttttgaattctatcacaagtgtaacaatgaatgcatggagagtgtgaaaaatggaacttatgactatccaaaatattccgaagaatcaaagttaaacagggaaaaaatcgatggagtgaaattggaatcaatgggagtctatcagattctggcgatctactcaactgtcgccagttccctggttcttttggtctccctgggggcaatcagcttctggatgtgttccaatgggtctttgcagtgtagaatatgcatctga

SEQ ID NO: 30985 - RNA, 1698 nt, synthetic construct
  misc_feature 1..1698: note = hemagglutinin__InfluenzaA__ABB83127
  source 1..1698: mol_type = other RNA
atgaaagtaaaactactgatcctgttatgtacatttacagctacatatgcagacacaatatgtataggctaccatgccaacaactcaaccgacactgttgacacagtacttgagaagaatgtgacagtgacacactctgtcaacctacttgaggacagtcacaatggaaaactgtgcctactaaaaggaatagcccccctacaattgggtaattgcagcgttgccggatggatcttaggaaacccagaatgcgaattactgatttccaaggaatcatggtcctacattgtagaaacaccaaatcctgagaatggagcatgttacccagggtatttcgccgactatgaggagctaagggagcaattgagttcagtatcttcatttgagagattcgaaatattccccaaagaaagctcatggcccaaccacaccgtaaccggagtatcagcatcatgctcccataatgggaaaagcagtttttacagaaatttgctatggctgacggggaagaatggtttgtacccaaacctgagcaagtcctatgcaaacaacaaagagaaagaagtccttatactatggggtgttcatcacccgcctaacataggggaccaaaggaccctctatcacacagaaaatgcttatgtctctgtagtgtcttcacattatagcagaagattcaccccagaaataaccaaaaggcccaaagtaagagatcaggaaggaagaatcaactactactggactctgctggaacccggggatacaataatatttgaggcaaatggaaatctaatagcgccatggtatgctttcgcactgagtagaggctttggatcaggaatcatcatctcaaatgcaccaatggatgaatgtgatgcgaagtgtcaaacacctcagggagctataaacagcagtcttcctttccagaatgtacacccagtcacaataggagagtgtccaaagtatgtcaggagtgcaaaattaaggatggttacaggactaaggaacatcccatccattcaatccagaggtttgtttggagccattgccggtttcattgaaggggggtggactggaatggtagatgggtggtatggttatcatcatcagaatgagcaaggatctggctatgctgcagatcaaaaaagcacacaaaatgccattaacgggattacaaacaaggtgaattctgtaattgagaaaatgaacactcaattcacagctgtgggcaaagaattcaacaaattggaaagaaggatggaaaacttaaataaaaaggttgatgatgggtttctagacatttggacatataatgcagaattgttggttctactggaaaatgaaaggactttggatttccacgactccaatgtgaagaatctgtacgagaaagtaaaaagccaattaaagaataatgccaaagaaataggaaatgggtgttttgaattctatcacaagtgtaacaatgaatgcatggagagtgtgaaaaatggaacttatgactatccaaaatattccgaagaatcaaagttaaacagggaaaaaattgatggagtgaaattggactcaatgggggtctatcagattctggcgatctactcaactgtcgccagttccctggttcttttggtctccctgggggcaatcagcttctggatgtgttccaatgggtctttgcagtgtagaatatgcatctga

SEQ ID NO: 30986 - RNA, 1698 nt, synthetic construct
  misc_feature 1..1698: note = hemagglutinin__InfluenzaA__ABB83138
  source 1..1698: mol_type = other RNA
atgaaagtaaaactactgatcctgttatgtacatttacagctacatatgcagacacaatatgtataggctaccatgccaacaactcaaccgacactgttgacacagtacttgagaagaatgtgacagtgacacactctgtcaacctacttgaggacagtcacaatggaaaactgtgcctactaaaaggaatagcccccctacaattgggtaattgcagcgttgccggatggatcttaggaaacccagaatgcgaattactgatttccaaggaatcatggtcctacattgtagaaacaccaaatcctgagaatggagcatgttacccagggtatttcgccgactatgaggagctaagggagcaattgagttcaatatcttcatttgagagattcgaaatattccccaaagaaagctcatggcccaaccacaccgtaaccggagtatcagcatcatgctcccataatgggaaaagcagtttttacagaaatttgctatggctgacggggaagaatggtttgtacccaaacctgagcaagtcctatgcaaacaacaaagagaaagaagtccttatactatggggtgttcatcacccgcctaacataggggaccaaaggaccctctatcacacagaaaatgcttatgtctctgtagtgtcttcacattatagcagaagattcaccccagaaataaccaaaaggcccaaagtaagagatcaggaaggaagaatcaactactactggactctgctggaacccggggatacaataatatttgaggcaaatggaaatctaatagcgccatggtatgctttcgcactgagtagaggctttggatcaggaatcatcacctcaaatgcaccaatggatgaatgtgatgctaagtgtcaaacacctcagggagctataaacagcagtcttcctttccagaatgtacacccagtcacaataggagagtgtccaaagtatgtcaggagtgcaaaattaaggatggttacaggactaaggaacatcccatccattcaatccagaggtttgtttggagccattgccggtttcattgaaggggggtggactggaatggtagatgggtggtatggttatcatcatcagaatgagcaaggatctggctatgctgcagatcaaaaaagcacacaaaatgccattaacgggattacaaacaaggtgaattctgtaattgagaaaatgaacactcaattcacagctgtgggcaaagaattcaacaaattggaaagaaggatggaaaacttaaataaaaaggttgatgatgggtttctagacatttggacatataatgcagaattgttggttctactggaaaatgaaaggactttggatttccacgactccaatgtgaagaatctgtacgagaaagtaaaaagccaattaaagaataatgccaaagaaataggaaatgggtgttttgaattctatcacaagtgtaacaatgaatgcatggagagtgtgaaaaatggaacttatgactatccaaaatattccgaagaatcaaagttaaacagggaaaaaattgatggagtgaaattggactcaatgggggtctatcagattctggcgatctactcaactgtcgccagttccctggttcttttggtctccctgggggcaatcagcttctggatgtgttccaatgggtctttgcagtgtagaatatgcatctga

SEQ ID NO: 30987 - RNA, 1701 nt, synthetic construct
  misc_feature 1..1701: note = hemagglutinin__InfluenzaA__ABB86877
  source 1..1701: mol_type = other RNA
atgaaggcaatactattaatattgctgtatacatttacagccacaaatgcagacacactatgtataggttatcatgcaaataattcaactgacactgttgatacagtgctggaaaagaatgtaacagtaacacattctgttaaccttctagaagacagacataacggaaaactatgcaacctagggggaatagccccattgtacttgggtaattgtaacattgctggatggcttttgggaaacccagaatgtgaattactattcacagtaagctcatggtcctacattgtggaaacatctaactcagacaatgggacatgttaccctggagatttcatcaattatgaagagctgagagagcagttgagctcaatgtcatcatatgaaagatttgagatattccccaaagaaagttcatggcccaatcatgaaacaaacaggggtgtgactgcagcatgcccctatgctggagcaaacagtttctacagaaacttaatatggctggtaaaaaaaggaaattcatacccaaagatcaacaaatcctatgttaataataaagagaaggaagtccttgtgctatggggcattcaccatccacctaccagtgctgaccaacaaagtctctatcagaatgcagatgcctatgtttctgtggagtcatcaaagtacaacaagaaatttaagccagaaatagcaacaagacccaaggtgagaggtcaagcagggagaatgaactattactggacattagtagagcctggagacacaataacattcgaagcaactggaaacctagtggtaccaaggtatgcctttgcaatgaatagaggttctggatctggtatcataatttcagataccccagttcacgattgtaatacgacttgtcaaacacccaaaggtgctataaacaccagcctcccatttcagaatgtacatccagtcacaattggagaatgtccaaaatatgtcaaaagcacaaaattgagaatggctacaggattaaggaatatcccgtctattcaatctagaggtctgtttgaagccattgctggctttattgaggggggatggacaggaatgatagatggatggtacggttatcaccatcaaaatgagcagggatcaggatatgcagctgaccgaaagagcacacagaatgccattgacgggatcactaacaaagtaaactctgttattgaaaagatgaacacacaattcacagcagtgggtaaagaattcaaccacctggaaaaaagaatagagaatttaaacaaaaaggttgatgatggttttctggatgtttggacttataatgccgaactgctagttctattggaaaatgaaagaactttagatttccatgactcaaatgtgaaaaatctatatgagaaagtaagaagccagctaaggaacaatgccaaggaaattgggaatggatgctttgaattctaccataaatgtgatgacacatgcatggagagcgtcagaaatgggacttatgattacctaaagtactcagaagaatcaaaactaaatagagagaaaatagagggggtgaagttggattcagcaagaatttaccagattttggcgatatattcaactgtcgccagttcattggtactattggtctccctgggggcaatcagtttctggatgtgctctaatgggtctttacagtgcagaatatgtatttaa

SEQ ID NO: 30988 - RNA, 1701 nt, synthetic construct
  misc_feature 1..1701: note = hemagglutinin__InfluenzaA__ABB86887
  source 1..1701: mol_type = other RNA
atgaaggcaatactattaatattgctgtatacatttacagccacaaatgcagacacactatgtataggttatcatgcaaataattcaactgacactgttgatacagtgctggaaaagaatgtaacagtaacacattctgttaaccttctagaagacagacataacggaaaactatgcaacctagggggaatagccccattgtacttgggtaattgtaacattgctggatggcttttgggaaacccagaatgtgaattactattcacagtaagctcatggtcctacattgtggaaacatctaactcagacaatgggacatgttaccctggagatttcatcaattatgaagagctgagagagcagttgagctcaatgtcatcatatgaaagatttgagatattccccaaagaaagttcatggcccaatcatgaaacaaacaggggtgtgactgcagcatgcccctatgctggagcaaacagtttctacagaaacttaatatggctggtaaaaaaaggaaattcatacccaaagatcaacaaatcctatgttaataataaagagaaggaagtccttgtgctatggggcattcaccatccacctaccagtgctgaccaacaaagtctctatcagaatgcagatgcctatgtttctgtggagtcatcaaagtacaacaagaaatttaagccagaaatagcaacaagacccaaggtgagaggtcaagcagggagaatgaactattactggacattagtagagcctggagacacaataacattcgaagcaactggaaatctagtggtaccaagatatgccttcgcaatgaaaagaggttctggatctggtattatcatttcagatacaccagtccacgattgtaatacgacttgtcaaacacccaaaggtgctataaacaccagcctcccatttcagaatatacatccagtcacaattggagaatgtccaaaatatgtcaaaagcacaaaattgagaatggctacaggactaaggaatatcccgtctattcaatctagaggtctgtttggagccattgctggctttattgaggggggatggacaggaatgatagatggatggtacggttatcaccatcaaaatgagcagggatcaggatatgcagctgaccgaaagagcacacagaatgccattgacggaatcactaacaaagtaaactctgttattgaaaagatgaacacacaattcacagcagtgggtaaagaattcaaccacctggaaaaaagaatagagaatttaaacaaaaaggttgatgatggttttctggatgtttggacttataatgccgaactgctagttctattggaaaatgaaagaactttagatttccatgactcaaatgtgaaaaatctatatgagaaagtaagaagccagctaaggaacaatgccaaggaaattgggaatggatgctttgaattctaccataaatgtgatgacacatgcatggagagcgtcagaaatgggacttatgattacctaaagtactcagaagaatcaaaactaaatagagagaaaatagagggggtgaagttggattcagcaagaatttaccagattttggcgatatattcaactgtcgccagttcattggtactattggtctccctgggggcaatcagtttctggatgtgctctaatgggtctttacagtgcagaatatgtatttaa

SEQ ID NO: 30989 - RNA, 1698 nt, synthetic construct
  misc_feature 1..1698: note = hemagglutinin__InfluenzaA__ABB86899
  source 1..1698: mol_type = other RNA
atgaaagtaaaactactgatcctgttatgtacatttacagctacatatgcagacacaatatgtataggctaccatgccaacaactcaaccgacactgttgacacagtacttgagaagaatgtgacagtgacacactctgtcaacctacttgaggacagtcacaatggaaaactgtgcctactaaaagggatagcccccctacaattgggtaattgcagcgttgccgggtggatcttaggaaacccagaatgcgaattactgatttctaaggaatcatggtcctacattgtagaaacaccaaatcctgagaatggagcatgttacccagggcatttcgccgactatgaggagctaagggagcaattgagttcagtatcttcatttgagagattcgaaatattccccaaagaaagctcatggcccaaccacaccataaccggagtatcagcatcatgctcccataatgggaaacgcagtttttacagaaatctgctatggctgacggggaagaatggtttgtacccaaacctgagcaagtcctatgcaaacaacaaagagaaagaagtccttatactatggggtgttcatcacccgcctaacataggggaccaaaggaccctctatcacacagaaaatgcttatgtctctgtagtgtcttcacattatagcagaagattcaccccagaaataaccaaaagacccaaagtaagagatcaggaaggaagaatcaactactactggactctgctggaacccggggatacaataatatttgaggcaaatggaaatttaatagcgccatggtatgctttcgcactgagtagaggttttggatcaggaatcatcacctcaaatgcaccaatggatgaatgtgatgcgaagtgtcaaacacctcagggagctataaacagcagtcttcctttccagaatgtacacccagtcacaataggagagtgtccaaagtatgtcaggagtgcaaaattaaggatggttacaggactaaggaacatcccatccattcaatccagaggtttgtttggagccattgccggtttcattgaaggggggtggactggaatggtagatgggtggtatggttatcatcatcagaatgagcaaggatctggctatgctgcagatcaaaaaagcacacaaaatgccattaacgggatcacaaacaaggtgaattctgtaattgagaaaatgaacactcagttcacagctgtgggcaaagaattcagcaaattggaaagaaggatggaaaacttaaataaaaaggttgatgatgggtttctagacatttggacatataatgcagaattgttggttctactggaaaatgaaaggactttggatttccacgactccaatgtgaagaatctgtacgagaaagtaaaaggccaattaaagaataatgccaaagaaataggaaatgggtgttttgaattctatcacaagtgtaacaatgaatgcatggagagtgtgaaaaatggaacttatgactatccaaaatattccgaagaatcaaagttaaacagggaaaaaattgatggagtgaaattggactcaatgggggtctatcagattctggcgatctactcaactgtcgccagttccctgattcttttggtctccctgggggctatcagcttctggatgtgttccaatgggtctttgcagtgtagaatatgcatctga

SEQ ID NO: 30990 - RNA, 1701 nt, synthetic construct
  misc_feature 1..1701: note = hemagglutinin__InfluenzaA__ABB86907
  source 1..1701: mol_type = other RNA
atgaaggcaatactattagtcttgttatacacatttacatccacaaatgcagacacattatgtataggttatcatgcaaataattcaactgacactgttgatacggtattagaaaagaatgtaacagtaacacactctgttaatcttctggaagacaaacacaacggaaagttatgcagactagggggaatagccccgttacacttgggtaaatgtaacattgctggatggcttttaggaaacccagaatgtgacttactactcacagtaagctcatggtcttacattgtggaaacatctaactcatacaatgggacatgttacccaggagatttcaccaattatgaggagctgagagagcaattgagctcagtgtcatcattcgaaagatttgagatattccccaaggcaagctcatggcccaatcatgaaacaaacagaggtgtgacagcagcatgccctcatgctgggacaaacagcttttacagaaatttaatatggctggtgaaaaaaggaaatacatatccaaagctcagcaaatcctatgttaacaataaagggaaggaggttcttgtattatggggcattcaccacccatctaccagtactgatcaacaaagtctctaccagaatgcagatacctatgtttttgtggggacatcaaagtataacaagaaattcaagccggaaatagcagtgagacccaaagtgaaagaccaagcagggagaatgaattattactggacattagtagaacctggggacacaataacatttgaagcaactggaaacctagtagtaccaagatatgcctttgcaatgaatagaggccatggatccggtattattatttcagacaccccagtccatgattgtaatacgacttgtcaaacacccaaaggtgctataaacaccagcctcccatttcagaatgtgcatccagtcacaattggaaaatgtccaaaatatgtcaaaagcacaagattgagaatggctacaggattaaggaatattccatctattcaatctagaggcctgtttggagctattgctggttttattgaaggaggatggacaggaatgatagatggatggtatggttatcaccaccaaaatgggcagggatcaggatatgcagctgaccaaaagagcacacagaatgccattgacggaatcactaacaaagtaaattctgttattgaaaagatgaacacacagttcacagcagtgggtaaagaattcaaccacttggaaaaaagaatagaaaatctaaacaaaaaggttgatgatggttttctagatgtttggacttacaatgccgaactgttggtcctattggagaatgaaagaactttggatttccacgactcgaatgtgaagaacctatatgaaaaagtaagacgccagctaaagaacaatgctaaggaaattgggaatggctgttttgagttttaccataattgtgatgatgcatgtatggagagtgtcaaaaatggaacttatgattacccaaaatactcagaagagtcacgactaaacagagaggaaataaatggaataaaattggattcaacaagaatttatcagattttggcgatctattcaactgtcgccagctcatcagtgctgttggtctccctgggggcaatcagtttctggatgtgctccaatgggtctttacaatgcagaatatgtatttag

SEQ ID NO: 30991 - RNA, 1698 nt, synthetic construct
  misc_feature 1..1698: note = hemagglutinin__InfluenzaA__ABB86917
  source 1..1698: mol_type = other RNA
atgaaagtaaaactgctgatcctgttatgtacatttacagctacatatgcagacccaatatgtataggctaccatgccaacaactcaaccgacactgttgacacagtacttgagaagaatgtggcagtaacacactctgtcaacctacttgaggacagtcacaatggaaaactgtgcctactaaaaggaatagcccccctacaattgggtaattgcagcgttgccggatggatcttaggaaacccagaatgcgaattactgatttccaaggaatcatggtcctacattgtagaaacaccaaatcctgagaatggagcatgttacccagggtatttcgccgactatgaggagctaagggagcaattgagttcagtatcttcatttgagagattcgaaatattccccaaagaaagctcatggcccaaccacaccgtaaccggagtatcagcatcatgctcccataatgggaaaagcagtttttacagaaatttgctatggctgacggggaagaatggtttgtacccaaacctgagcaagtcctatgcaaacaacaaagagaaagaagtccttatactatggggtgttcatcacccgcctaacataggggaccaaaggaccctctatcacacagaaaatgcttatgtctctgtagtgtcttcacattatagcagaagattcaccccagaaataaccaaaaggcccaaagtaagagatcaggaaggaagaatcaactactactggactctgctggaacccggggatacaataatatttgaggcaaatggaaatctaatagcgccatggtatgctttcgcactgagtagaggctttggatcaggaatcatcacctcaaatgcaccaatggatgaatgtgatgcgaagtgtcaaacacctcagggagctataaacagcagtcttcctttccagaatgtacacccagtcacaataggagagtgtccaaagtatgtcaggagtgcaaaattaaggatggttacaggactaaggaacatcccatccattcaatccagaggtttgtttggagccattgccggtttcattgaaggggggtggactggaatggtagatgggtggtatggttatcatcatcaaaatgagcaaggatctggctatgctgcagatcaaaaaagcacacaaaatgccattaacgggattacaaacaaggtgaattctgtaattgagaaaatgaacactcaattcacagctgtgggcaaagaattcaacaaattggaaagaaggatggaaaacttaaataaaaaggttgatgatgggtttctagacatttggacatataatgcagaattgttggttctactggaaaatgaaaggactttggatttccacgactccaatgtgaagaatctgtacgagaaagtaaaaagccaattaaagaataatgccaaagaaataggaaatgggtgttttgaattctatcacaagtgtaacaatgaatgcatggagagtgtgaaaaatggaacttatgactatccaaaatattccgaagaatcaaaattaaacagggaaaaaattgatggagtgaaattggactcaatgggggtctatcagattctggcgatctactcaactgtcgccagttccctggttcttttagtctccctgggggcaatcagcttctggatgtgttccaatgggtctttgcagtgtagaatatgcatctga

SEQ ID NO: 30992 - RNA, 1698 nt, synthetic construct
  misc_feature 1..1698: note = hemagglutinin__InfluenzaA__ABB86929
  source 1..1698: mol_type = other RNA
atgaaagtaaaactactgatcctgttatatacatttacagctacatatgcagacacaatatgtataggctaccatgccaacaactcaaccgacactgttgacacagtacttgagaagaatgtgacagtgacacactctgtcaacctacttgaggacagtcacaatggaaaactgtgcctactaaaagggatagcccccctacaattgggtaattgcagcgttgccgggtggatcttaggaaacccagaatgcgaattactgatttccaaggaatcatggtcctacattgtagaaacaccaaatcctgagaatggagcatgttacccagggcatttcgccgactatgaggagctaagggagcaattgagttcagtatcttcatttgagagattcgaaatattccccaaagaaagctcatggcccaaccacaccataaccggagtatcagcatcatgctcccacaatgggaaacgcagtttttacagaaatctgctatggctgacggggaagaatggtttgtacccaaacctgagcaagtcctatgcaaacaacaaagagaaagaagtccttatactatggggtgttcatcacccgcctaacataggggaccaaaggaccctctatcacacagaaaatgcttatgtctctgtagtgtcttcacattatagcagaagattcaccccagaaataaccaaaagacccaaagtaagagatcaggaaggaagaatcaactactactggactctgctggaacccggggatacaataatatttgaggcaaatggaaatctaatagcgccatggtatgctttcgcactgagtagaggttttggatcaggaatcatcacctcaaatgcaccaatggatgaatgtgatgcgaagtgtcaaacacctcagggagctataaacagcagtcttcctttccagaatgtacacccagtcacaataggagagtgtccaaagtatgtcaggagtgcaaaattaaggatggttacaggactaaggaacatcccatccattcaatccagaggtttgtttggagccattgccggtttcattgaaggggggtggactggaatggtagatgggtggtatggttatcatcatcagaatgagcaaggatctggctatgctgcagatcaaaaaagcacacaaaatgccattaacgggatcacaaacaaggtgaattctgtaattgagaaaatgaacactcagttcacagctgtgggcaaagaattcagcaaattggaaagaaggatggaaaacttaaataaaaaggttgatgatgggtttctagacatttggacatataatgcagaattgttggttctactggaaaatgaaaggactttggatttccacgactccaatgtgaagaacctgtacgagaaagtaaaaggccaattaaagaataatgccaaagaaataggaaatgggtgttttgaattctatcacaagtgtaacaatgaatgcatggagagtgtgaaaaatggaacttatgactatccaaaatattccgaagaatcaaagttaaacagggaaaaaattgatggagtgaaattggactcaatgggggtctatcagattctggcgatctactcaactgtcgccagttccctgattcttttggtctccctgggggctatcagcttctggatgtgttccaatgggtctttgcagtgtagaatatgcatctga

SEQ ID NO: 30993 - RNA, 1701 nt, synthetic construct
  misc_feature 1..1701: note = hemagglutinin__InfluenzaA__ABB86937
  source 1..1701: mol_type = other RNA
atgaaagcaatactattagtcttgttatatacatttacatccacaaatgcagacacattatgtataggttatcatgcaaataattcaactgacactgttgatacagtactagaaaagaatgtaacggtaacacactctgttaatcttctagaagacaaacacaatggaaggttatgcaaactagggggaatagccccattacacttgggtaaatgtaacattgctggatggcttttgggaaacccagaatgtgaattactattcacagtaagctcatggtcttacattgtggaaacatctaactcatacaatgggacatgttacccaggggatttcatcaattatgaggagctgagggagcaattgagctcagtgtcatcattcgaaagatttgagatattccccaaggcaagttcatggcccaatcatgaaacaaacagaggtgtgacagcagcatgcccacatgctgggacaaacagcttttacagaaatttaatatggctggtgaaaaaaggaaatacatatccaaagatcagcaaatcctatgttaacaataaagggaaggaagttcttgtgttatggggcattcaccatccatctaccagtaatgatcaacaaagtctctaccagaatgcagatacctatgtttttgtgggaccatcaaagtataacaagaaattcaagccggaaatagcaacgagacccaaagtgagagatcaagcagggagaatgaactattactggacactagtagaacctggggatactataacattcgaagcaactggaaacctagtagtaccaaggtatgcctttgcaatgaatagaggttctgaatctggtattataatttcagacacaccagttcatgattgtaatactacttgtcaaacacccaaaggtgctataaacaccagcctcccattccagaatgtacatccagtcacaattggagaatgtccaaaatatgtcaaaagcacaagattgagaatggctacaggattaaggaatatcccatctatccaatctaggggtctgtttggagctattgctggttttattgaggaggggtggacaggaatgatagatggatggtatggttaccaccatcaaaatgggcagggatcaggatatgcagctgaccaaaagagcacacaaaatgccattgacggaatcaccaacaaagtaaattctgttattgaaaagatgaacacacagttcacagcagtaggtaaagaattcaaccacttagaaaaaagaatagaaaatctaaacaaaaaggttgatgatggttttctggatgtttggacttacaatgccgaactgttggtcctattggagaatgaaagaaccttggatttccacgactcgaatgtgaagaacctatatgaaaaagtaagacgccagctaaagaacaatgctaaggaaattgggaatggctgttttgagttctaccacaaatgtgatgatgcatgtatggagagtgtcaaaaatgggacttatgattacccaaaatactcagaagaatcacgactaaacagagaggaaataaatggaataaaactggattcaacaaggatttaccagattttggcgatctattcaactgtcgccagctcatcggtactgttggtctccctgggggcaatcagtttctggatgtgctccaatgggtctttacagtgcagaatatgtatttaa

SEQ ID NO: 30994 - RNA, 1701 nt, synthetic construct
  misc_feature 1..1701: note = hemagglutinin__InfluenzaA__ABB86946
  source 1..1701: mol_type = other RNA
atgaaagcaatactattagtcttgctatatacatttacagccgcaaatgcagacacactatgtataggttatcatgcaaataattcaactgacactgttgatacagtactagaaaagaatgtaacagtaacacactctgttaaccttctagaagacagacataacggaaaactatgcaaactaaggggaatagccccattgcacttgggtaaatgtaacattgctggatggcttttgggaaacccagaatgtgaatcactatccacagtaagctcatggtcttacattgtggaaacatctaactcagacaatgggacatgttacccaggagatttcatcaattatgaggagctgagagagcagctgagttcagtgtcatcatttgaaagatttgagatattccccaaggcaagttcatggcccaatcatgaaacaaacagaggtacgacggcagcatgcccttatgctggagcaaacagcttctacagaaatttaatatggctggtgaaaaaaggaaattcatacccaaagctcaacaaatcctatgttaacaataaggggaaggaagtccttgtgctatggggcattcaccatccatcaaccagtaatgagcaacaaagtctctaccagaatgcagatacctatgtttttgtgggatcatcaaagtataacaagaaattcaagccagaaatagcaacaagacccaaagtgagagatcaagcagggagaatgaactattactggacattaatagaacctggggacacaataacattcgaagcaactggaaacctagtggtaccaaggtatgcctttgcaatgaatagaggttctggatctggtattataatttcagatacaccagttcacgattgtaatactacttgtcaaacacccaaaggtgctataaacaccagcctcccatttcagaatgtacatccagtcacaattggagaatgtccaaaatatgtcaaaagcacaaaattgagaatggctacaggattaaggaatatcccgtctattcaatctagaggtctgtttggagctattgctggttttattgaagggggatggacaggtatgatagatggatggtatggttatcaccaccaaaatgagcagggatcaggatatgcagctgaccaaaagagcacacagaatgccattgacgggatcactaacaaagtaaattctgttattgaaaagatgaacacacagttcacagcagtgggtaaagaattcaaccacttggaaaaaagaatagaaaatttaaacaaaaaggttgatgatggttttctggacgtttggacttacaatgccgaactgttggtactattggaaaatgaaagaactttggatttccacgactctaatgttaagaacctatatgaaaaagtaagaagccagctaaagaacaatgctaaggaaattgggaatggctgttttgagttctaccacaaatgcgatgatgcatgtatggagagtgtcaaaaatgggacttatgattacccaaaatactcagaagaatcaagactaaacagagaggaaatagatggaataaaactggattcaacaagaatttaccagattttggcgatctattcaactgtcgccagttcatcagtactgttggtctccctgggggcaatcagtttctggatgtgctccaatgggtctttacagtgcagaatatgtatttaa

SEQ ID NO: 30995 - RNA, 1701 nt, synthetic construct
  misc_feature 1..1701: note = hemagglutinin__InfluenzaA__ABB96319
  source 1..1701: mol_type = other RNA
atgaagactatcattgctttgagctacattttctgtcaggttttcgcccaaaaccttccaggaaatgacaacagcacagcaacgctgtgcctgggacatcatgcagtgccaaacggaacgctagtgaaaacaatcacgaatgatcagattgaagtgactaatgctactgagctggttcagagttcctcaacaggtagaatatgcgacaatcctcatcgaatccttgatggaaaaaactgcacactgatagatgctctattgggggaccctcattgtgatggctttcaaaatgagaaatgggacctttttgttgaacgcagcaaagctttcagcaactgttacccttatgatgtgccagattatgcctcccttaggtcactagttgcctcgtcaggcaccctggagtttttcaatgaaggcttcaattggactggggtcactcagaatgggggaagctatgcttgtaaaaggggacctgataacagtttcttcagtagactgaactggttgtacaaatcagaaagcacatatccagtgctgaacgtgactatgccaaacaatgacaattttgacaaactgtacatttggggagttcaccacccgagcacggacaaagaacaaaccaacctatatgttcaagcatcagggagagtcacagtctccaccaagagaagccagcaaactataatcccgaatgtcgggcctagaccctgggtaaggggtctgtctagtagaataagcatctattggacaatagtgaaaccgggagacgtactgttaattaatagtaatgggaacctaattgctcctcggggttacttcaaaatacgcactgggaaaagctcaataatgaggtcagatgcacccattggcacctgcagttctgaatgcatcactccaaatggaagcattcccaatgacaagccctttcaaaacgtaaacaagatcacatatggggcatgtcccaagtatgttaagcaaaacactctgaagttggcaacagggatgcggaatgtaccagagaaacaaactagaggcatattcggcgcaatagcaggtttcatagaaaatggttgggagggaatgatagacggttggtacggtttcaggcatcaaaattctgagggcacaggacaagcagcagatcttaaaagcactcaagcagccatcgaccaaatcaatgggaaactgaatagggtaatcgagaaaacaaacgagaaattccatcaaatcgaaaaggaattctcagaagtagaagggagaattcaggacctcgagaaatacgttgaagacactaaaatagatctctggtcttacaatgcggagcttcttgtcgctctggagaaccaacatacaattgatctgactgactcggaaatgaacaaactgtttgaaaaaacaaggaggcaactgagggaaaatgctgaggacatgggcaatggttgcttcaaaatataccacaaatgtgacaatgcttgcatagggtcaatcagaaatggaacttatgaccatgatgtatacagagacgaagcattaaacaaccggtttcagatcaaaggtgttgagctgaagtcaggatacaaagactggatcctgtggatttcctttgccatatcatgctttttgctttgtgttgttttgctggggttcatcatgtgggcctgccaaaaaggcaacattaggtgcaacatttgcatttga

SEQ ID NO: 30996 - RNA, 1701 nt, synthetic construct
  misc_feature 1..1701: note = hemagglutinin__InfluenzaA__ABB96330
  source 1..1701: mol_type = other RNA
atgaagactatcattgctttgagctacattttctgtcaggttttcgcccaaaaccttccaggaaatgacaacagcacagcaacgctgtgcctgggacatcatgcagtgccaaacggaacgctagtgaaaacaatcacgaatgatcagattgaagtgactaatgctactgagctggttcagagttcctcaacaggtagaatatgcgacaatcctcatcgaatccttgatggaaaaaactgcacactgatagatgctctattgggggaccctcattgtgatggctttcaaaatgagaaatgggacctttttgttgaacgcagcaaagctttcagcaactgttacccttatgatgtgccagattatgcctcccttaggtcactagttgcctcgtcaggcaccctggagtttttcaatgaaggcttcaattggactggggtcactcagaatgggggaagctatgcttgtaaaaggggacctgataacagtttcttcagtagactgaactggttgtacaaatcagaaagcacatatccagtgctgaacgtaactatgccaaacaatgacaattttgacaaactgtacatttggggagttcaccacccgagcacggacaaagaacaaaccaacctatatgttcaagcatcagggagagtcacagtctccaccaagagaagccagcaaactataatcccgaatgtcgggtctagaccctgggtaaggggtctgtctagtagaataagcatctattggacaatagtaaaaccgggagacgtactgttaattaatagtaatgggaacctaattgctcctcggggttacttcaaaatacgcactgggaaaagctcaataatgaggtcagatgcacccattggcacctgcagttctgaatgtatcactccaaatggaagcattcccaatgacaggccctttcaaaacgtaaacaagatcacatatggggcatgtcccaagtatgttaagcaaaacactctgaagttggcaacagggatgcggaatgtaccagagaaacaaactagaggcatattcggcgcaatagcaggtttcatagaaaatggttgggagggaatggtagacggttggtacggtttcaggcatcaaaattctgagggcacaggacaagcagcagatcttaaaagcactcaagcagccatcgaccaaatcaatgggaaactgaatagggtaatcgagaaaacaaacgagaaattccatcaaatcgaaaaggaattctcagaagtagaagggagaattcagaacctcgagaaatacgttgaagacactaaaatagatctctggtcttacaatgcggagcttcttgtcgctctggagaaccaacatacaattgatctgactgactcggaaatgaacaaactgtttgaaaaaacaaggaggcaactgagggaaaatgctgaggacatgggcaatggttgcttcaaaatataccacaaatgtgacaatgcttgcatagggtcaatcagaaatggaacttatgaccatgatgtatacagagacgaagcattaaacaaccggtttcagatcaaaggtgttgagctgaagtcaggatacaaagactggatcctgtggatttcctttgccatatcatgctttttgctttgtgttgttttgctggggttcatcatgtgggcctgccaaaaaggcaacattaggtgcaacatttgcatttga

SEQ ID NO: 30997 - RNA, 1701 nt, synthetic construct
  misc_feature 1..1701: note = hemagglutinin__InfluenzaA__ABB96341
  source 1..1701: mol_type = other RNA
atgaagactatcattgctttgagctacattttctgtcaggtttttgcccaaaaccttccaggaaatgacaacagcacagcaacgctgtgcctgggacatcatgcagtgccaaacggaacgctagtgaaaacaatcacgaatgatcagattgaagtgactaatgctactgagctggttcagagttcctcaacaggtagaatatgcgacaatcctcatcgaatccttgatggaaaaaactgcacactgatagatgctctattgggggaccctcattgtgatggctttcaaaatgagaaatgggacctttttgttgaacgcagcaaagctttcagcaactgttacccttatgatgtgccagattatgcctcccttaggtcactagttgcctcgtcaggcaccctggagtttttcaatgaaggcttcaattggactggggtcactcagaatgggggaagctatgcttgtaaaaagggacctgataacagtttcttcagtagactgaactggttgtacaaatcagaaagcacatatccagtgctgaacgtgactatgccaaacaatgacaattttgacaaactgtacatttggggagttcaccacccgagcacggacaaagaacaaaccaacctatatgttcaagcatcagggagagtcacagtctccaccaagagaagccagcaaactataatcccgaatgtcgggtctagaccctgggtaaggggtctgtctagtagaataagcatctattggacaatagtaaaaccgggagacgtactgttaattaatagtaatgggaacctaattgctcctcggggttacttcaaaatacgcactgggaaaagctcaataatgaggtcagatgcacccattggcacctgcagttctgaatgcatcactccaaatggaagcattcccaatgacaagccctttcaaaacgtaaacaagatcacatatggggcatgtcccaagtatgttaagcaaaacactctgaagttggcaacagggatgcggaatgtaccagagaaacaaactagaggcatattcggcgcaatagcaggtttcatagaaaatggttgggagggaatgatagacggttggtacggtttcaggcatcaaaattctgagggcacagggcaagcagcagatcttaaaagcactcaagcagccatcgaccaaatcaatgggaaactgaatagggtaatcgagaaaacaaacgagaaattccatcaaatcgaaaaggaattctcagaagtagaagggagaattcaggacctcgagaaatacgttgaagacactaaaatagatctctggtcttacaatgcggagcttcttgtcgctctggagaaccaacatacaattgatctgactgactcggaaatgaacaaactgtttgaaaaaacaaggaggcaactgagggaaaatgctgaggacatgggcaatggttgcttcaaaatataccacaaatgtgacaatgcttgcatagggtcaatcagaaatggaacttatgaccatgatgtatacagagacgaagcattaaacaaccggtttcagatcaaaggtgttgagctgaagtcaggatacaaagactggatcctgtggatttcctttgccatatcatgctttttgctttgtgttgttttgctggggttcatcatgtgggcctgccaaaaaggcaacattaggtgcaacatttgcatttga

SEQ ID NO: 30998 - RNA, 1701 nt, synthetic construct
  misc_feature 1..1701: note = hemagglutinin__InfluenzaA__ABB96395
  source 1..1701: mol_type = other RNA
atgaagactatcattgctttgagctacattttctgtcaggttttcgcccaaaaccttccaggaaatgacaacagcacagcaacgctgtgcctgggacatcatgcagtgccaaacggaacgctagtgaaaacaatcacgaatgatcagattgaagtgactaatgctactgagctggttcagagttcctcaacaggtagaatatgcgacagtcctcatcgaatccttgatggaaaaaactgcacactgatggatgctctattgggggaccctcattgtgatggctttcaaaatgagaaatgggacctttttgttgaacgcagcaaagctttcagcaactgttacccttatgatgtgccagattatgcctcccttaggtcactagttgcctcgtcaggcaccctggagtttatcaatgaaggcttcaattggactggggtcactcagaatgggggaagctatgcttgcaaaaggggacctgataacagtttcttcagtagactgaactggttgtacaaatcagaaagcacatatccagtgctgaacgtgactatgccaaacaatgacaattttgacaaactgtacatttggggagttcaccacccgagcacggacaaagaacaaaccaacctatatgttcaagcatcagggagagtcacagtctccaccaagagaagccagcaaactataatcccgaatgtcgggtctagaccctgggtaaggggtctgtctagtagaataagcatctattggacaatagtaaaaccgggagacatactgttaattaatagtaatgggaacctaattgctcctcggggttacttcaaaatacgcactgggaaaagctcaataatgagatcagatgcacccattggcacctgcagttctgaatgcatcactccaaatggaagcattcccaatgacaagccctttcaaaacgtaaacaagatcacatatggggcatgtcccaagtatgttaagcaaaacactctgaagttggcaacagggatgcggaatgtaccagagaaacaaactagaggcatattcggcgcaatagcaggtttcatagaaaatggttgggagggaatgatagacggttggtacggtttcaggcatcaaaattctgagggcacaggacaagcagcagatcttaaaagcactcaagcagccatcgaccaaatcaatgggaaactgaatagggtaatcgagagaacaaacgagaaattccatcaaatcgaaaaggaattctcagaagtagaagggagaattcaggacctcgagaaatacgttgaagacactaaaatagatctctggtcttacaatgcggagcttcttgtcgctctggagaaccaacatacaattgatctgactgactcggaaatgaacaaactgtttgaaaaaacaaggaggcaactgagggaaaatgctgaggacatgggcaatggttgcttcaaaatataccacaaatgtgacaatgcttgcatagggtcaatcagaaatggaacttatgaccatgatgtatacagagacgaagcattaaacaaccggtttcagatcaaaggtgttgagctgaagtcaggatacaaagactggatcctgtggatttcctttgccatatcatgctttttgctttgtgttgttttgctggggttcatcatgtgggcctgccaaaaaggcaacattaggtgcaacatttgcatttga

SEQ ID NO: 30999 - RNA, 1698 nt, synthetic construct
  misc_feature 1..1698: note = hemagglutinin__InfluenzaA__ABB96487
  source 1..1698: mol_type = other RNA
atgaaagtaaaactactgatcctgttatgtacatttacagctacatatgcagacacaatatgtataggctaccatgccaacaactcaaccgacactgttgacacagtacttgagaagaatgtgacagtgacacactctgtcaacctacttgaggacagtcacaatggaaaactgtgcctactaaaaggaatagcccccctacaattgggtaattgcagcgttgccggatggatcttaggaaacccagaatgcgaattactgatttccaaggaatcatggtcctacattgtagaaacaccaaatcctgagaatggagcatgttacccagggtatttcgccgactatgaggagctaagggagcaattgagttcagtatcttcatttgagagattcgaaatatttcccaaaaaaagctcatggcccaaccacaccgtaaccggagtatcagcatcatgctcccatgatgggaaaagcagtttttacagaaatttgctatggctgacggggaagaatggtttgtacccaaacctgagcaagtcctatgcaaacaacaaagagaaagaagtccttatactatggggtgttcatcacccgcctaacataggggaccaaaggaccctctatcacacagaaaatgcttatgtctctgtagtgtcttcacattatagcagaagattcaccccagaaataaccaaaaggcccaaagtaagagatcaggaaggaagaatcaactactactggactctgctggaacccggggatacaataatatttgaggcaaatggaaatctaatagcgccatggtatgctttcgcactgagtagaggctttggatcaggaatcatcacctcaaatgcaccaatggatgaatgtgatgcgaagtgtcaaacacctcagggagctataaacagcagtcttcctttccagaatgtacacccagtcacaataggagagtgtccaaagtatgtcaggagtgcaaaattaaggatggttacaggactaaggaacatcccatccattcaatccagaggtttgtttggagccattgccggtttcattgaaggggggtggactggaatggtagatgggtggtatggttatcatcatcagaatgagcaaggatctggctatgctgcagatcaaaaaagcacacaaaatgccattaacgggattacaaacaaggtgaattctgtaattgagaaaatgaacactcaattcacagctgtgggcaaagaattcaacaaattggaaagaaggatggaaaacttaaataaaaaggttgatgatgggtttctagacatttggacatataatgcagaattgttggttctactggaaaatgaaaggactttggatttccacgactccaatgtgaagaatctgtacgagaaagtaaaaagccaattaaagaataatgccaaagaaataggaaatgggtgttttgaattctatcacaagtgtaacaatgaatgcatggagagtgtgaaaaatggaacttatgactatccaaaatattccgaagaatcaaagttaaacagggaaaaaattgatggagtgaaattggactcaatgggggtctatcagattctggcgatctactcaactgtcgccagttccctggttcttttggtctccctgggggcaatcagcttctggatgtgttccaatgggtctttgcagtgtagaatatgcatctga

SEQ ID NO: 31000 - RNA, 1701 nt, synthetic construct
  misc_feature 1..1701: note = hemagglutinin__InfluenzaA__ABB96520
  source 1..1701: mol_type = other RNA
atgaagaccatcattgctttgagctacattttctgtctggctctcggccaagaccttccaggaaatggcaacagcacagcaacgctgtgcctgggacatcatgcggtgccaaacggaacactagtgaaaacaatcacagatgatcagatcgaagtgactaatgctactgagctagttcagagctcctcaacggggaaaatatgcaacaatcctcatcgaatccttgatggaatagactgcacactgatagatgctctattgggggaccctcattgtgatgtttttcaaaatgagacatgggaccttttcgttgaacgcagcaaagctttcagcaactgttacccttatgatgtaccagattatgcctcccttaggtcactagttgcctcgtcaggcactctggagtttatcactgagggtttcacttggactggggtcactcagaatgggggaagcaatgcttgcaaaaggggacctggtagcggttttttcagtagactgaactggttgaccaaatcaggaagcacatatccagtgctgaacgtgactatgccaaacaatgacaattttgacaaactatacatttggggggttcatcacccgagcacggaccaagaacaaaccagcctgtatgttcaagcatcagggagggtcacagtctctaccaggagaagccagcaaactataatcccgaatatcgggtccagaccctgggtaaggggtctgtctagtagaataagcatctattggacaatagttaagccgggagacgtactggtaattaatagtaatgggaacctaatcgctcctcggggttatttcaaaatgcgcactgggaaaagctcaataatgaggtcagatgcacctattgatacctgtatttctgaatgcatcactccaaatggaagcattcccaatgacaagccctttcaaaacgtaaacaagatcacatatggagcatgccccaagtatgttaagcaaaaaaccctgaagttggcaacagggatgcggaatataccagagaaaaaaactagaggcatattcggcgcaatagcaggtttcatagaaaatggttgggaaggaatgatagacggttggtacggtttcaggcatcaaaattctgagggcacaggacaagcagcagatcttaaaagcactcaagcagcaatcgaccaaatcaatgggaaattgaacagggtaatcgagaagacgaacgagaaattccatcaaatcgaaaaggaattctcagaagtagaagggagaattcaggacctcgagaaatacgttgaagacactaaaatagatctctggtcttacaatgctgagcttcttgtcgctctggagaatcaacatacaattgacctgactgactcggaaatgaacaagctgtttgaaaaaacaaggaggcaactgagggaaaatgctgaagacatgggcaatggttgcttcaaaatataccacaaatgtgacaacgcttgcatagagtcaatcagaaatgggacttatgaccatgatgtatacagagacgaagcattaaacaaccggtttcagatcaaaggtgttgaactgaagtctggatacaaagactggatcctgtggatttcctttgccatatcatgctttttgctttgtgttgttttgctggggttcatcatgtgggcctgccagagaggcaacattaggtgcaacatttgcatttga

SEQ ID NO: 31001 - RNA, 1701 nt, synthetic construct
  misc_feature 1..1701: note = hemagglutinin__InfluenzaA__ABB96531
  source 1..1701: mol_type = other RNA
atgaagactatcattgctttgagctacattttatgtctggtttccgctcaaaaaattcccggaaatgacagcagcacagcaacgctgtgcctgggacaccatgcagtgccaaacggaacgctagtgaaaacaatcacgaatgaccaaattgaagtgactaatgctactgagctggttcagagttcctcaacaggtagaatatgcgacagtcctcaccgaatccttgatggagaaaactgcacactgatagatgctctattgggagaccctcattgtgatggcttccaaaataaggaatgggacctttttgttgaacgcagcaaagcctacagcaactgttacccttatgatgtgccggattatgcctcccttaggtcactagttgcctcatccggcaccctggagtttaacaatgaaagcttcaattggactggagtcgctcagaatggaacaagctatgcttgcaaaaggagatctattaaaagtttctttagtagattgaattggttgcaccaattaaaatacaaatatccagcactgaacgtgactatgccaaacaatgacaaatttgacaaattgtacatttggggggttcaccacccgagtacggacagtgaccaaaccagcctatatgctcaagcatcagggagagtcacagtctctaccaaaagaagccaacaaactgtaatcccgaatatcggatctagaccctgggtaaggggtgtctccagcagaataagcatctattggacaatagtaaaaccgggagacatacttttgattaacagcacagggaatctaattgctcctcggggttacttcaaaatacgaagtgggaaaagctcaataatgaggtcagatgcacccattggcaaatgcaattctgaatgcatcactccaaatggaagcattcccaatgacaaaccatttcaaaatgtaaacaggatcacatatggggcctgtcccagatatgttaagcaaaacactctgaaattggcaacagggatgcggaatgtaccagagaaacaaactagaggcatattcggcgcaatcgcaggtttcatagaaaatggttgggagggaatggtagacggttggtacggtttcaggcatcaaaattctgagggcacaggacaagcagcagatcttaaaagcactcaagcagcaatcaaccaaatcaacgggaaactgaataggttaatcgagaaaacgaacgagaaattccatcaaattgaaaaagaattctcagaagtagaagggagaattcaggacctcgagaaatatgttgaggacactaaaatagatctctggtcgtacaacgcggagcttcttgttgccctggagaaccaacatacaattgatctaactgactcagaaatgaacaaactgtttgaaagaacaaggaagcaactgagggaaaatgctgaggatatgggcaatggttgtttcaaaatataccacaaatgtgacaatgcctgcatagggtcaatcagaaatggaacttatgaccatgatgtatacagagacgaagcattaaacaaccggttccagatcaaaggtgttgagctgaagtcaggatacaaagattggatcctatggatttcctttgccatatcatgttttttgctttgtgttgttttgctggggttcatcatgtgggcctgccaaaaaggcaacattaggtgcaacatttgcatttga

SEQ ID NO: 31002 - RNA, 1701 nt, synthetic construct
  misc_feature 1..1701: note = hemagglutinin__InfluenzaA__ABC02234
  source 1..1701: mol_type = other RNA
atgaagactatcattgctttgagctacattttatgtctggttttcgctcaaaaacttcccggaaatgacaacagcacggcaacgctgtgcctgggacaccatgcagtgccaaacggaacgctagtgaaaacaatcacgaatgaccaaattgaagtgactaatgctactgagctggttcagagttcctcaacaggtagaatatgcgacagtcctcaccgaatccttgatggagaaaactgcacactgattgatgctctattgggagaccctcattgtgatggcttccaaaataaggaatgggacctttttgttgaacgcagcaaagcctacagcaactgttacccttatgatgtgccggattatgcctcccttaggtcactagttgcctcatccggcaccctggagtttaacaatgaaagcttcaattggactggagtcgctcagaatggaacaagctatgcttgcaaaaggagatctattaaaagtttctttagtagattgaattggttgcaccaattaaaatacaaatatccagcactgaacgtgactatgccaaacaatgacaaatttgacaaattgtacatttggggggttcaccacccgagtacggacagtgaccaaaccagcctatatgctcaagcatcagggagagtcacagtctctaccaaaataagccaacaaactgtaatcccgaatatcggatctagaccctgggtaaggggtgtctccagcagaataagcatctattggacaatagtaaaaccgggagacatacttttgattaacagcacagggaatctaattgctcctcggggttacttcaaaatacgaagtgggaaaagctcaataatgaggtcagatgcacccattggcaaatgcaattctgaatgcatcactccaaatggaagcattcccaatgacaaaccatttcaaaatgtaaacaggatcacatatggggcctgtcccagatatgttaagcaaaacaccctgaaattggcaacagggatgcggaatgtaccagagaaacaaactagaggcatattcggcgcaatcgcaggtttcatagaaaatggttgggagggaatggtagacggttggtacggtttcaggcatcaaaattctgagggcacaggacaagcagcagaccttaaaagcactcaagcagcaatcaaccaaatcaacgggaaactgaataggttaatcgagaaaacgaacgagaaattccatcaaattgaaaaagaattctcagaagtagaagggagaattcaggacctcgagaaatatgttgaggacactaaaatagatctctggtcgtacaacgcggagcttcttgttgccctggagaaccaacatacaattgatctaactgactcagaaatgaacaaactgtttgaaagaacaaggaagcaactgagggaaaatgctgaggatatgggcaatggttgtttcaaaatataccacaaatgtgacaatgcctgcatagggtcaatcagaaatggaacttatgaccatgatgtatacagagacgaagcattaaacaaccggttccagatcaaaggtgttgagctgaagtcaggatacaaagattggatcctatggatttcctttgccatgtcatgttttttgttttgtgttgttttgctggggttcatcatgtgggcctgccaaaaaggcaacattaggtgcaacatttgcatttga

SEQ ID NO: 31003 - RNA, 1701 nt, synthetic construct
  misc_feature 1..1701: note = hemagglutinin__InfluenzaA__ABC02255
  source 1..1701: mol_type = other RNA
atgaagactatcattgctttgagctacattttctgtctggttctcgcccaagaccttccaggaaatgacaacagcacagcaacgctgtgcctgggacatcatgcggtgccaaacggaacgctagtgaaaacaatcacgaatgatcagattgaagtgactaatgctactgagctggttcagagctcctcaacgggtaaaatatgcaacaatcctcatcgaatccttgatggaataaactgcacactgatagatgctctattgggggaccctcattgtgatggctttcaaaatgagaaatgggaccttttcgttgaacgcagcaaagctttcagcaactgttacccttatgatgtgccagactatgcctcccttaggtcactagttgcctcgtcaggcactctggagtttatcaatgaaggcttcaattggactggggtcactcagaatgggggaagcaatgcttgcaaaaggggacctgatagcggttttttcagtagactgaactggttgtacaaatcaggaagcacatatccagtgctgaacgtgactatgccaaacaatgacaattttgacaaactatacatttggggggttcaccacccgagcacggaccaagaacaaaccaacctatatgttcaagcatcagggagagtcacagtctccaccaagagaagccagcaaactataatcccgaatgttgggtctagaccctgggtaaggggtctgtctagtagaataagcatctattggacaatagttaaaccgggagacatactggtaattaatagtaatgggaacctaattgctcctcggggtcacttcaaaatgcgcactgggaagagctcaataatgaggtcagatgcacctattggcacctgcagttctgaatgcatcactccaaatggaagcattcccaatgacaagccctttcaaaacgtaaacaagatcacatatggggcatgtcccaagtatgttaagcaaaacactctgaagttggcaacagggatgcggaatgtaccagagaaacaaactagaggcatattcggcgcaatagcaggtttcatagaaaatggttgggagggaatgatagacggttggtacggtttcaggcatcaaaattctgagggcacaggacaagcagcagatcttaaaagcactcaagcagctatcgaccaaatcaatgggaaactgaatagggtaatcgagaagacgaacgagaaattccatcaaatcgaaaaggaattctcagaagtagaagggagaattcaggacctcgagaaatacgttgaagacactaaaatagatctctggtcttacaatgcggagcttcttgtcgctctggagaaccaacatacaattgatctgactgactcggaaatgaacaaactgtttgaaaaaacaaggaggcaactgagggaaaatgctgaggacatgggcaatggttgcttcaaaatataccacaaatgtgacaatgcttgcatagggtcaatcagaaatgggacttatgaccatgatgtatacagagacgaagcattaaacaaccggtttcagatcaaaggtgttgaactgaagtcaggatacaaagactggatcctgtggatttcctttgccatatcatgctttttgctttgtgttgttttgctggggttcatcatgtgggcctgccaaaaaggcaacattaggtgcaacatttgcatttga

SEQ ID NO: 31004 - RNA, 1701 nt, synthetic construct
  misc_feature 1..1701: note = hemagglutinin__InfluenzaA__ABC02266
  source 1..1701: mol_type = other RNA
atgaagactatcattgctttgagctacattttctgtctggttttcgcccaagaccttccaggaaatgacaacagcacagcaactctgtgcctgggacatcatgcggtgccaaacggaacgctagtgaaaacaatcacgaatgatcagattgaagtgactaatgctactgaactggttcagagttcctcaacgggtaaaatatgcgacaatcctcatcgaatccttgatggaataaactgcacactgatagatgctctattgggggaccctcattgtgatggctttcaaaatgagaaatgggaccttttcgttgaacgcagcaaagctttcagcaactgttacccttatgatgtgccagattatgcctcccttaggtcactagttgcctcgtcaggcactctggagtttatcaatgaaggcttcaattggactggggtcactcagaatgggggaagcagggcttgcaaaaggggacctgataacggttttttcagtagactgaactggttgtacaaatcaggaagcacatatccagtgcagaacgtgaccatgccaaacaatgacaactctgacaaactatacatttggggggttcaccacccgagcacggacaaagaacaaaccgacctatatgttcaagcatcagggaaagtcacagtctccaccaagagaagccagcaaactgtaatcccgaatgtcgggtctagaccctgggtaaggggtctgtctagtagagtaagcatctattggacaatagttaaaccgggagacatactggtaattaatagtaatggaaacctaattgctcctcggggttacttcaaaatgcgcactgggaaaagctcaataatgaggtcagatgcacctattggcacctgcagctctgaatgcatcactccaaatggaagcattcccaatgacaagccctttcaaaacgtaaacaagatcacatatggggcatgtcccaagtatgttaagcaaaacactctgaagttggcaacagggatgcggaatgtaccagagaaacaaactagaggcatattcggcgcaatagcaggtttcatagaaaatggttgggagggaatgatagacggttggtacggtttcaggcatcaaaattctgagggcacaggacaagcagcagatcttaaaagcactcaagcagccatcgaccaaatcaatgggaaactgaatagggtaatcgagaagacgaacgagaaattccatcaaatcgaaaaggaattctcagaagtagaagggagaattcaggacctcgagaaatacgttgaagacactaaaatagatctctggtcttacaatgcggagcttcttgtcgctctggagaaccaacatacaattgatctgactgactcggaaatgaacaaactgtttgaaaaaacaaggaggcaactgagggaaaatgctgaggacatgggcaatggttgcttcaaaatataccacaaatgtgacaatgcttgcatagggtcaatcagaaatgggacttatgaccatgatgtatacagagacgaagcattaaacaaccggtttcagatcaaaggtgttgaactgaagtcaggatacaaagactggatcctgtggatttcctttgccatatcatgctttttgctttgtgttgttttgctggggttcatcatgtgggcctgccagaaaggcaacattaggtgcaacatttgcatttga

SEQ ID NO: 31005 - RNA, 1701 nt, synthetic construct
  misc_feature 1..1701: note = hemagglutinin__InfluenzaA__ABC02288
  source 1..1701: mol_type = other RNA
atgaagactatcattgctttgagctacattttatgtctggttttcgctcaaaaaattcccggaaatgacaacagcacggcaacgctgtgcctgggacaccatgcagtgccaaacggaacgctagtgaaaacaatcacgaatgaccaaattgaagtgactaatgctactgagctggttcagagttcctcaacaggtagaatatgcgacagtcctcaccgaatccttgatggagaaaactgcacactgatagatgctctattgggagaccctcattgtgatggcttccaaaataaggaatgggacctttttgttgaacgcagcaaagcctacagcaactgttacccttatgatgtgccggattatgcctcccttaggtcactagttgcctcatccggcaccctggagtttaacaatgaaagcttcaattggactggagtcgctcagaatggaacaagctatgcttgcaaaaggagatctattaaaagtttctttagtagattgaattggttgcaccaattaaaatacaaatatccagcactgaacgtgactatgccaaacaatgacaaatttgacaaattgtacatttggggggttcaccacccgagtacggacagtgatcaaaccagcctatatgctcaagcatcagggagagtcacagtctctaccaaaagaagccaacaaactgtaatcccgaatatcggatctagaccctgggtaaggggtgtctccagcagaataagcatctattggacaatagtaaaaccgggagacatacttttgattaacagcacagggaatctaattgctcctcggggttacttcaaaatacgaagtgggaaaagctcaataatgaggtcagatgcacccattggcaaatgcaattctgaatgcatcactccaaatggaagcattcccaatgacaaaccatttcaaaatgtaaacaggatcacatatggggcctgtcccagatatgttaagcaaaacactctgaaattggcaacagggatgcggaatgtaccagagaaacaaactagaggcatattcggcgcaatcgcaggtttcatagaaaatggttgggagggaatggtagacggttggtacggtttcaggcatcaaaattctgagggcacaggacaagcagcagatcttaaaagcactcaagcagcaatcaaccaaatcaatgggaaactgaataggttaatcgagaaaacgaacgagaaattccatcaaattgaaaaagaattctcagaagtagaagggagaattcaggacctcgagaaatatgttgaggacactaaaatagatctctggtcgtacaatgcggagcttcttgttgccctggagaaccaacatacaattgatctaactgactcagaaatgaacaaactgtttgaaagaacaaggaagcaactgagggaaaatgctgaggatatgggcaatggttgtttcaaaatataccacaaatgtgacaatgcctgcatagggtcaatcagaaatggaacttatgaccatgatgtatacagagacgaagcattaaacaaccggtttcagatcaaaggtgttgagctgaagtcaggacacaaagattggatcctatggatttcctttgccatatcatgttttttgctttgtgttgttttgctggggttcatcatgtgggcctgccaaaaaggcaacattaggtgcaacatttgcatttga

SEQ ID NO: 31006 - RNA, 1701 nt, synthetic construct
  misc_feature 1..1701: note = hemagglutinin__InfluenzaA__ABC02299
  source 1..1701: mol_type = other RNA
atgaagactatcattgctttgagctacattttatgtctggttttcgctcaaaaaattcccggaaatgacaacagcacggcaacgctgtgcctgggacaccatgcagtgccaaacggaacgctagtgaaaacaatcacgaatgaccaaattgaagtgactaatgctactgagctggttcagagttcctcaacaggtagaatatgcgacagtcctcaccgaatccttgatggagaaaactgcacactgatagatgctctattgggagaccctcattgtgatggcttccaaaataaggaatgggacctttttgttgaacgcagcaaagcctacagcaactgttacccttatgatgtgccggattatgcctcccttaggtcactagttgcctcatccggcaccctggagtttaacaatgaaagcttcaattggactggagtcgctcagaatggaacaagctatgcttgcaaaaggagatctattaaaagtttctttagtagattgaattggttgcaccaattaaaatacaaatatccagcactgaacgtgactatgccaaacaatgacaaatttgacaaattgtacatttggggggttcaccacccgagtacggacagtgaccaaaccagcctatatgctcaagcatcagggagagtcacagtctctaccaaaagaagccaacaaactgtaatcccgaatatcggatctagaccctgggtaaggggtgtctccagcagaataagcatctattggacaatagtaaaaccgggagacatacttttgattaacagcacagggaatctaattgctcctcggggttacttcaaaatacgaagtgggaaaagctcaataatgaggtcagatgcacccattggcaaatgcaattctgaatgcatcactccaaatggaagcattcccaatgacaaaccatttcaaaatgtaaacaggatcacatatggggcctgtcccagatatgttaagcaaaacactctgaaattggcaacagggatgcggaatgtaccagagaaacaaactagaggcatattcggcgcaatcgcaggtttcatagaaaatggttgggagggaatggtagacggttggtacggtttcaggcatcaaaattctgagggcacaggacaagcagcagatcttaaaagcactcaagcagcaatcaaccaaatcaacgggaaactgaataggttaatcgagaaaacgaacgagaaattccatcaaattgaaaaagaattctcagaagtagaagggagaattcaggacctcgagaaatatgttgaggacactaaaatagatctctggtcgtacaacgcggagcttcttgttgccctggagaaccaacatacaattgatctaactgactcagaaatgaacaaactgtttgaaagaacaaggaagcaactgagggaaaatgctgaggatatgggcaatggttgtttcaaaatataccacaaatgtgacaatgcctgcatagggtcaatcagaaatggaacttatgaccatgatgtatacagagacgaagcattaaacaaccggtttcagatcaaaggtgttgagctgaagtcaggatacaaagattggatcctatggatttcctttgccatatcatgttttttgctttgtgttgttttgctggggttcatcatgtgggcctgccaaaaaggcaacattaggtgcaacatttgcatttga

SEQ ID NO: 31007 - RNA, 1701 nt, synthetic construct; identical to SEQ ID NO: 30998
  misc_feature 1..1701: note = hemagglutinin__InfluenzaA__ABC02310
  source 1..1701: mol_type = other RNA

SEQ ID NO: 31008 - RNA, 1701 nt, synthetic construct
  misc_feature 1..1701: note = hemagglutinin__InfluenzaA__ABC02321
  source 1..1701: mol_type = other RNA
atgaagactatcattgctttgagctacattttctgtctggttctcgcccaagaccttccaggaaatgacaacagcacagcaacgctgtgcctgggacatcatgcggtgccaaacggaacgctagtgaaaacaatcacgaatgatcagattgaagtgactaatgctactgagctggttcagagctcctcaacgggtaaaatatgcaacaatcctcatcgaatccttgatggaataaactgtacactgatagatgctctattgggggaccctcattgtgatggctttcaaaatgagaaatgggaccttttcgttgaacgcagcaaagctttcagcaactgttacccttatgatgtgccagactatgcctcccttaggtcactagttgcctcgtcaggcactctggagtttatcaatgaaggcttcaattggactggggtcactcagaatgggggaagcaatgcttgcaaaaggggacctgatagcggttttttcagtagactgaactggttgtacaaatcaggaagcacatatccagtgctgaacgtgactatgccaaacaatgacaattttgacaaactatacatttggggggttcaccacccgagcacggaccaagaacaaaccaacctatatgttcaagcatcagggagagtcacagtctccaccaagagaagccagcaaactataatcccgaatgttgggtctagaccctgggtaaggggtctgtctagtagaataagcatctattggacaatagttaaaccgggagacatactggtaattaatagtaatgggaacctaattgctcctcggggtcacttcaaaatgcgcactgggaagagctcaataatgaggtcagatgcacctattggcacctgcagttctgaatgcatcactccaaatggaagcattcccaatgacaagccctttcaaaacgtaaacaagatcacatatggggcatgtcccaagtatgttaagcaaaacactctgaagttggcaacagggatgcggaatgtaccagagaaacaaactagaggcatattcggcgcaatagcaggtttcatagaaaatggttgggagggaatgatagacggttggtacggtttcaggcatcaaaattctgagggcacaggacaagcagcagatcttaaaagcactcaagcagctatcgaccaaatcaatgggaaactgaatagggtaatcgagaagacgaacgagaaattccatcaaatcgaaaaggaattctcagaagtagaagggagaattcaggacctcgagaaatacgttgaagacactaaaatagatctctggtcttacaatgcggagcttcttgtcgctctggagaaccaacatacaattgatctgactgactcggaaatgaacaaactgtttgaaaaaacaaggaggcaactgagggaaaatgctgaggacatgggcaatggttgcttcaaaatataccacaaatgtgacaatgcttgcatagggtcaatcagaaatgggacttatgaccatgatgtatacagagacgaagcattaaacaaccggtttcagatcaaaggtgttgaactgaagtcaggatacaaagactggatcctgtggatttcctttgccatatcatgctttttgctttgtgttgttttgctggggttcatcatgtgggcctgccaaaaaggcaacattaggtgcaacatttgcatttga

SEQ ID NO: 31009 - RNA, 1701 nt, synthetic construct
  misc_feature 1..1701: note = hemagglutinin__InfluenzaA__ABC02332
  source 1..1701: mol_type = other RNA
atgaagactatcattgctttgagctacattttctgtctggttctcggccaagattttccaggaaatgacaacagcacagcaacgctgtgcctgggacatcatgcggtgccaaacggaacactagtgaaaacaatcacaaatgatcagattgaagtgactaatgctactgagctggttcagagttcctcaacggggaaaatatgcaacaatcctcatcgaatccttgatggaatagactgcacactgatagatgctctattgggggaccctcattgtgatggctttcaaaatgagacatgggaccttttcgttgaacgcagcaaagctttcagcaactgttacccttatgatgtgccagattatgcctcccttaggtcactagttgcctcgtcaggcactctggagtttatcaatgaaggcttcacttggactggggtcactcagaatgggggaagcaatgcttgcaaaaggggacctgatagcggttttttcagtagactgaactggttgtacaaatcaggaagcacatatccagtgctgaacgtgactatgccaaacaatgacaattttgacaaactatacatttggggggttcaccacccgagcacggaccaagaacaaaccagcctatatgttcaagcatcagggagagtcacagtctctaccaagagaagccagcaaactataatcccgaatatcgggtctagaccctgggtaaggggtctgtctagtagaataagcatctattggacaatagttaaaccaggagacatactggtaattaatagtaatgggaacctaattgctcctcggggttatttcaaaatgcgcactgggaaaagctcaataatgaggtcagatgcacctattggcacctgcatttctgaatgcatcactccaaatggaagcattcccaatgacaagccctttcaaaacgtaaacaagatcacatatggggcatgtcccaagtatgttaagcaaaacaccctgaagttggcaacagggatgcggaatgtaccagagaaacaaactagaggcctattcggcgcaatagcaggtttcatagaaaatggttgggagggaatgatagacggttggtacggtttcaggcatcaaaattctgagggcacaggacaagcagcagatcttaaaagcactcaagcagccatcgaccaaatcaatgggaaactgaatagggtaatcgagaagacgaacgagaaattccatcaaatcgaaaaggaattctcagaagtagaagggagaattcaggacctcgagaaatacgttgaagacactaaaatagatctctggtcttacaatgcggagcttcttgtcgctctggagaaccaacatacaattgatctgactgactcggaaatgaacaaactgtttgaaaaaacaaggaggcaactgagggaaaatgctgaggacatgggcaatggttgcttcaaaatataccacaaatgtgacaatgcttgcatagggtcaatcagaaatgggacttatgaccatgatgtatacagagacgaagcattaaacaaccggtttcagatcaaaggtgttgaactgaagtcaggatacaaagactggatcctgtggatttcctttgccatatcatgctttttgctttgtgttgttttgctggggttcatcatgtgggcctgccagaaaggcaacattaggtgcaacatttgcatttga

SEQ ID NO: 31010 - RNA, 1701 nt, synthetic construct
  misc_feature 1..1701: note = hemagglutinin__InfluenzaA__ABC39805
  source 1..1701: mol_type = other RNA
atgaagaccatcattgctttgagctacattctctgtctggttttcgcccaaaaccttcccggaaatgacaacagcacagcaacgctgtgcctgggacatcatgcagtgccaaacggaacactagtgaaaacaataacgaatgatcaaattgaagtgaccaatgctactgagctggttcagagttcctcagcaggtagaatatgcgacagtccccaccgaatccttgatgggaaaaactgcacactgatagatgctctattgggagatcctcattgtgatggctttcaaaatgagaaatgggacctttttgttgaacgcagcaaagctttcagcaactgttacccttatgatgtgcaagattatgcctcccttaggtcactagttgcctcgtcaggcaccctggagtttatcaatgaaggcttcaattggactggggtcactcagagtgggggaagctatgcttgcaaaaggggatctggtaacagtttcttcagtagactgaactggttgtacaaatcagaaagcaaatatccagcgctgaacgtgactatgccaaacaatggcaattttgacaaactgtacatttggggggttcatcacccgagcacggacaaagaacaaaccaacctatatgttcgagcgtcagggagagtcacagtctctaccaagagaagccagcaaactgtaatcccgaatatcgggcctagaccctgggtaaggggcctgtctagtagaataagtatctattggacaatagtgaaaccgggagacatactgttaattaatagtagtgggaacctaattgctcctcggggttatttcaaaatacgcactgggaaaagctcaataatgaggtcagatgcacctattggcacctgcagttctgaatgcatcactccaaatggaagcattcccaatgacaagcccttccaaaacgtaaacaagatcacatatggggcatgtcccaagtatgttaagcaaaatactctaaaattggcaacagggatgcggaatataccagagaaacaaactagaggcatattcggcgcaatagcaggtttcatagaaaatggttgggagggaatggtagacggctggtacggtttcaggcatcaaaattctgagggcacaggacaagcagcagatcttaaaagcactcaagcagcaatcgaccaaatcaatgggaaactgaatagggtaatcgagaaaactaacgagaaattccatcaaatcgaaaaggaattctcagaagtagaagggagaattcaggacctcgagaaatacgttgaagacactaaaatagatctctggtcttacaacgcagagcttcttgttgctctggagaaccaacatacaattgatctgactgactcggaaatgaacaaactgtttgaaaaaacaaggaggcaactgagggaaaatgctgaggacatgggcaatggttgcttcaaaatataccacaaatgtgacaatgcttgcatagggtcaatcagaaatggaacttatgaccatgatgtatacagagacgaagcattaaacaaccggtttcagatcaaaggtgttgagctgaagtcaggatacaaagactggatcctgtggatttcctttgccatatcatgctttttgctttgtgttgttttgctggggttcatcatgtgggcctgccaaaaaggcaacattaggtgcaacatttgcatttga

SEQ ID NO: 31011 - RNA, 1698 nt, synthetic construct
  misc_feature 1..1698: note = hemagglutinin__InfluenzaA__ABC40522
  source 1..1698: mol_type = other RNA
atgaaagtaaaactactgatcctgttatgtacatttacagctacatatgcagacacaatatgtataggctaccatgccaacaactcaaccgacactgttgacacagtacttgagaagaatgtgacagtgacacactctgtcaacctacttgaggacagtcacaatggaaaactgtgcctactaaaaggaatagcccccctacaattgggtaattgcagcgttgccggatggatcttaggaaacccagaatgcgaattactgatttccaaggaatcatggtcctacattgtagaaacaccaaatcctgagaatggagcatgttacccagggtatttcgccgactatgaggagctaagggagcaattgagttcagtatcttcatttgagagattcgaaatattccccaaagaaagctcatggcccaaccacaccgtaaccggagtatcagcatcatgctcccataatgggaaaagcagtttttacaaaaatttgctatggctgacggggaagaatggtttgtacccaaacctgagcaagtcctatgcaaacaacaaagagaaagaagtccttatactatggggtgttcatcacccgcctaacataggggaccaaaggaccctctatcacacagaaaatgcttatgtctctgtagtgtcttcacattatagcagaagattcaccccagaaataaccaaaaggcccaaagtaagagatcaggaaggaagaatcaactactactggactctgctggaacccggggatacaataatatttgaggcaaatggaaatctaatagcgccatggtatgctttcgcactgagtagaggctttggatcaggaatcatcacctcaaatgcaccaatggatgaatgtgatgctaagtgtcaaacacctcagggagctataaacagcagtcttcctttccagaatgtacacccagtcacaataggagagtgtccaaagtatgtcaggagtgcaaaattaaggatggttacaggactaaggaacatcccatccattcaatccagaggtttgtttggagccattgccggtttcattgaaggggggtggactggaatggtagatgggtggtatggttatcatcatcagaatgagcaaggatctggctatgctgcagatcaaaaaagcacacaaaatgccattaacgggattacaaacaaggtgaattctgtaattgagaaaatgaacactcaattcacagctgtgggcaaagaattcaacaaattggaaagaaggatggaaaacttaaataaaaaggttgatgatgggtttctagacatttggacatataatgcagaattgttggttctactggaaaatgaaaggactttggatttccacgactccaatgtgaagaatctgtacgagaaagtaaaaagccaattaaagaataatgccaaagaaataggaaatgggtgttttgaattctatcacaagtgtaacaatgaatgcatggagagtgtgaaaaatggaacttatgactatccaaaatattccgaagaatcaaagttaaacagggaaaaaattgatggagtgaaattggactcaatgggggtctatcagattctggcgatctactcaactgtcgccagttccctggttcttttggtctccctgggggcaatcagcttctggatgtgttccaatgggtctttgcagtgtagaatatgcatctga

SEQ ID NO: 31012 - RNA, 1698 nt, synthetic construct; identical to SEQ ID NO: 30861
  misc_feature 1..1698: note = hemagglutinin__InfluenzaA__ABC40533
  source 1..1698: mol_type = other RNA

SEQ ID NO: 31013 - RNA, 1701 nt, synthetic construct
  misc_feature 1..1701: note = hemagglutinin__InfluenzaA__ABC40555
  source 1..1701: mol_type = other RNA
atgaagactatcattgctttgagctacattttctgtctggttttcgcccaaaacctccccagaaatgacaaaagcacagcaacgctgtgcctgggacaccatgcagtgccaaacggaacgctagtgaaaacaatcacgaatgatcagattgaagtgactaatgctactgagctggttcagagttcctcaacaggtagaatatgcgacagtcctcaccgaatccttgatgggaaaaactgcacactggtagatgctctattgggagaccctcattgtgatggctttcagaatgagaaatgggacctttttgttgaacgcagcaaagctttcagcaactgttacccttatgatgtgccagattatgcctcccttaggtcactagttgcctcgtcaggcaccctggagtttatcaatgaaagcttcaattggactggagtcactcagagtgggggaagctatgcttgcaaaaggggatctgataacagtttcttcagtagactgaattggttgtacgaatcagaaagcaaatatccagtgctgaacgtgactatgccaaacaatggcaattttgacaaactgtacatttggggggttcaccacccgagcacggacaaagaacaaaccaacctatatgttcgagcatcagggagagtcacagtctctaccaagagaagccagcaaactataatcccgaatatcgggtctagaccctgggtaaggggtctgtctagcagaataagcatctattggacaatagtaaaaccgggagacatactgttaattaatagtaatgggaacctaattgctcctcggggttacttcaaaatacgcactgggaaaagctcaataatgaggtcagatgcacctattggcacctgcagttctgaatgcatcactccaaatggaagcattcccaatgacaagccctttcaaaatgtaaacaagatcacatatggggcatgtcccaagtatgttaagcaaaacactctgaagttggcaacagggatgcggaatgtaccagagaaacaaactagaggcatattcggcgcaatagcaggtttcatagaaaatggttgggagggaatggtagacggttggtacggtttcaggcatcaaaattctgagggcacaggacaagcagcagatcttaaaagcactcaagcagcaatcgaccaaatcaatgggaaactgaatagggtaatcgagaaaacgaacgagaaattccatcaaatcgaaaaggaattctcagaagtagaagggagaattcaggacctcgagaaatacgttgaagacactaaaatagatctctggtcttacaacgcggagcttcttgtcgctctggagaaccaacatacaattgatctgactgactcggaaatgaacaaactgtttgaaaaaacaaggaggcaactgagggaaaatgctgaggacatgggcaatggttgcttcaaaatataccacaaatgtgacaatgcttgcatagggtcaatcagaaatggaacttatgaccatgatgtatacagagacgaagcattaaacaaccggtttcagatcaaaggtgttgagctgaagtcaggatacaaagactggatcctgtggatttcctttgccatatcatgctttttgctttgtgttgttttgctggggttcatcatgtgggcctgccaaaaaggcaacattaggtgcaacatttgcatttga

SEQ ID NO: 31014 - RNA, 1701 nt, synthetic construct
  misc_feature 1..1701: note = hemagglutinin__InfluenzaA__ABC40608
  source 1..1701: mol_type = other RNA
atgaagactatcattgctttgagctacattttatgtctggttttcgctcaaaaacttcccggaaatgacaacagcacggcaacgctgtgcctgggacaccatgcagtgccaaacggaacgctagtgaaaacaatcacgaatgaccaaattgaagtgactaatgctactgagctggttcagagttcctcaacaggtagaatatgcgacagtcctcaccgaatccttgatggagaaaactgcacactgatagatgctctattgggagaccctcattgtgatggcttccaaaataaggaatgggacctttttgttgaacgcagcaaagcctacagcaactgttacccttatgatgtgccggattatgcctcccttaggtcactagttgcctcatccggcaccctggagtttaacaatgaaagcttcaattggactggagtcgctcagaatggaacaagctctgcttgcaaaaggagatccattaaaagtttctttagtagattgaattggttgcaccaattaaaatacaaatatccagcactgaacgtgactatgccaaacaatgacaaatttgacaaattgtacatttggggggttcaccacccgagtacggacagtgaccaaaccagcctatatgctcaagcatcagggagagtcacagtctctaccagaagaagccaacaaactgtaatcccgaacatcggatctagaccctgggtaaggggtgtctccagcagaataagcatctattggacaatagtaaaaccgggagacatacttttgattaacagcacagggaatctaattgctcctcggggttacttcaaaatacgaagtgggaaaagctcaataatgaggtcagatgcacccattggcaaatgcaattctgaatgcattactccaaatggaagcattcccaatgacaaaccatttcaaagtgtaaacaggatcacatatggggcctgtcccagatatgttaagcaaaacactctgaaattggcaacagggatgcggaatgtaccagagaaacaaactagaggcatattcggcgcaatcgctggtttcatagaaaatggttgggagggaatggtggacggttggtacggtttcaggcatcaaaattctgagggcacaggacaagcagcagatcttaaaagcactcaagcagcaatcaaccaaatcaacgggaaactgaataggttaatcgagaaaacgaacgagaaattccatcaaattgaaaaagaattctcagaagtagaagggagaattcaagacctcgagaaatatgttgaggacactaaaatagatctctggtcgtacaacgcggagcttcttgttgccctggagaaccaacatacaattgatctaactgactcagaaatgaacaaactgtttgaaagaacaaggaagcaactgagggaaaatgctgaggatatgggcaatggttgtttcaaaatataccacaaatgtgacaatgcctgcatagggtcaatcagaaatggaacttatgaccatgatgtatacagagacgaagcattaaacaaccggttccaaatcaaaggtgttgagctgaagtcaggatacaaagattggatcctatggatttcctttgccatatcatgttttttgctttgtgttgttttgctggggttcatcatgtgggcctgccaaaaaggcaacattaggtgcaacatttgcatttga

SEQ ID NO: 31015 - RNA, 1701 nt, synthetic construct
  misc_feature 1..1701: note = hemagglutinin__InfluenzaA__ABC40619
  source 1..1701: mol_type = other RNA
atgaagactatcattgctttgagctacattttctgtctggttctcggccaagacttttcaggaaatgacaacagcacagcaacgctgtgcctgggacatcatgcggtgccaaacggaacactagtgaaaacaatcacaaatgatcagattgaagtgactaatgctactgagctggttcagagttcctcaacggggaaaatatgcaacaatcctcatcgaatccttgatggaatagactgcacactgatagatgctctattgggggaccctcattgtgatggctttcaaaatgagacatgggaccttttcgttgaacgcagcaaagctttcagcaactgttacccttatgatgtgccagattatgcctcccttaggtcactagttgcctcgtcaggcactctggagtttatcaatgaaggcttcaattggactggggtcactcagaatgggggaagcaatgcttgcaaaaggggacctgatagcggttttttcagtagactgaactggttgtacaaatcaggaagcacatatccagtgctgaacgtgagtatgccaaacaatgacaattttgacaaactatacatttggggggttcaccacccgagcacggaccaagaacaaaccaacctatatgttcaagcatcagggagagtcacagtctccaccaagagaagtcagcaaactataatcccgaatatcgggtctagaccctgggtaaggggtctgtctagtagaataagcatctattggacaatagttaaaccgggagacatactggtaattaatagtaatgggaacctaattgctcctcggggttatttcaaaatgcgcactggaaaaagctcaataatgaggtcagatgcacctattggcacctgcatttctgaatgcatcactccaaatggaagcattcccaatgacaaaccctttcaaaacgtaaacaagatcacatatggtgcatgtcccaagtatgttaagcaaaacaccctgaagttggcaacagggatgcggaatgtaccagagaaacaaactagaggcatattcggcgcaatagcaggtttcatagaaaatggttgggagggaatgatagacggttggtacggtttcaggcatcaaaattctgagggcacaggacaagcagcagatcttaaaagcactcaagcagccatcgaccaaatcaatgggaaactgaataggataatcgagaagacgaacgagaaattccatcaaatagaaaaggaattctcagaagtagaagggagaattcaggacctcgagaaatacgttgaagacactaaaatagatctctggtcttacaatgcggagcttcttgtcgctctggagaaccaacatacaattgatctgactgactcggaaatgaacaaactgtttgaaaaaacaaggaggcaactgagggaaaatgctgaggacatgggcaatggttgcttcaaaatataccacaaatgtgacaatgcttgcatagggtcaatcagaaatgggacttatgaccatgatgtatacagagacgaagcattaaacaaccggtttcagatcaaaggtgttgaactgaagtcaggatacaaagactggatcctgtggatttcctttgccatatcatgctttttgctttgtgttgttttgctggggttcatcatgtgggcctgccagaaaggcaacattaggtgcaacatttgcatttga

SEQ ID NO: 31016 - RNA, 1698 nt, synthetic construct
  misc_feature 1..1698: note = hemagglutinin__InfluenzaA__ABC40631
  source 1..1698: mol_type = other RNA
atgaaagtaaaactactgatcttgttatgtacatttacagctacatatgcagacacaatatgtataggctaccatgccaacaactcaaccgacactgttgacacagtacttgagaagaatgtgacagtgacacactctgtcaacctacttgaggacagtcacaatggaaaactatgtctactaaaaggaatagcccccctacaattgggtaattgcagcgttgccggatggatcttaggaaacccagaatgcgaattactgatttccaaggaatcatggtcctacattgtagaaacaccaaatcctgagaatggaacatgttacccagggtatttcgccgactatgaggagctaagggagcaattgagttcagtatcttcatttgagagattcgaaatattccccaaagaaagctcatggcccaaccacaccgtaaccggagtatcagcatcatgctcccataatgggaaaagcagtttttacagaaatttgctatggctgacggggaagaatggtttgtacccaaacctgagcaagtcctatgcaaacaacaaagagaaagaagtccttatactatggggtgttcatcacccgcctaacataggggaccaaaggaccctctatcatacagaaaatgcttatgtctctgtagtgtcttcacattatagcagaagattcaccccagaaataaccaaaaggcccaaagtaagagatcaggaaggaagaatcaactactactggactctgctggaacccggggatacaataatatttgaggcaaatggaaatctaatagcgccatggtatgctttcgcactgagtagaggctttggatcaggaatcatcacctcaaatgcaccaatggatgaatgtgatgcgaagtgtcaaacacctcagggagctataaacagcagtcttcctttccagaatgtacacccagtcacaataggagagtgtccaaagtatgtcaggagtgcaaaattaaggatggttacaggactaaggaacatcccatccattcaatccagaggtttgtttggagccattgccggtttcattgaaggggggtggactggaatggtagatgggtggtatggttatcatcatcagaatgagcaaggatctggctatgctgcagatcaaaaaagcacacaaaacgccattaacgggattacaaacaaggtgaattctgtaattgagaaaatgaacactcaattcacagctgtgggcaaagaattcaacaaattggaaagaaggatggaaaacttaaataaaaaagttgatgatggatttctagacatttggacatataatgcagaattgttggttctactggaaaatgaaaggactttggatttccacgactccaatgtgaagaatctgtatgagaaagtaaaaagccaattaaagaataatgccaaagaaataggaaatgggtgttttgaattctatcacaagtgtaacaatgaatgcatggagagtgtgaaaaatggaacttatgactatccaaaatattccgaagaatcaaagttaaacagggaaaaaattgatggagtgaaattggaatcaatgggagtctatcagattctggcgatctactcaactgtcgccagttccctggttcttttggtctccctgggggcaatcagcttctggatgtgttccaatgggtctttgcagtgtagaatatgcatctga

SEQ ID NO: 31017 - RNA, 1701 nt, synthetic construct
  misc_feature 1..1701: note = hemagglutinin__InfluenzaA__ABC41692
  source 1..1701: mol_type = other RNA
atgaagactatcattgctttgagctacattctatgtctggttttcgctcaaaaacctcccggaaatgacaacagcacggcaacgctgtgccttgggcaccatgcagtaccaaacggaacgatagtgaaaacaatcacaaatgaccaaattgaagttactaatgctactgagctggttcagagttcctcaacaggtggaatatgcgacagtcctcatcagatccttgatggagaaaactgcacactaatagatgctctattgggagaccctcagtgtgatggcttccaaaataagaaatgggacctttttgttgaacgcagcaaagcctacagcaactgttacccttatgatgtgccggatcatgcctcccttaggtcactagttgcctcatccggcacactggagtttaacaatgaaagcttcgattggactggagtcactcagaatggaacaagctctgcttgcaaaaggagatctaataaaagtttctttagtagattgaattggttgacccacttaaaatacaaatacccagcattgaacgtgactatgccaaacaatgaaaaatttgacaaattgtacatttggggggttcaccacccgggtacggacagtgaccaaatcagcctatatgctcaagcatcaggaagaatcacagtctctaccaaaagaagccaacaaactgtaatcccgaatatcggatctagacccagggtaagggatgtctccagccgaataagcatctattggacaatagtaaaaccgggagacatacttttgattaacagcacagggaatctaattgctcctcggggttacttcaaaatacgaagtgggaaaagctcaataatgagatcagatgcacccattggcaaatgcaattctgaatgcatcactccaaatggaagcattcccaatgacaaaccatttcaaaatgtaaacaggatcacatatggggcctgtcccagatatgttaagcaaaacactctgaaattggcaacagggatgcgaaatgtaccagagaaacaaactagaggcatatttggcgcaatcgcgggtttcatagaaaatggttgggagggaatggtggacggttggtacggtttcaggcatcaaaattctgagggcacaggacaagcagcagatctcaaaagcactcaagcagcaatcaaccaaatcaatgggaaactgaataggttaatcgggaaaacaaacgagaaattccatcagattgaaaaagaattctcagaagtagaagggagaattcaggacctcgagaaatatgttgaggacactaaaatagatctctggtcatacaacgcggagcttcttgttgccctggagaaccaacatacaattgatctaactgactcagaaatgaacaaactgtttgaaagaacaaagaagcaactgagggaaaatgctgaggatatgggcaatggttgtttcaaaatataccacaaatgtgacaatgcctgcatagggtcaatcagaaatggaacttatgaccatgatgtgtacagagatgaagcattaaacaaccggttccagatcaaaggtgttgagctgaagtcaggatataaagattggatcctatggatttcctttgccatatcatgttttttgctttgtgttgctttgttggggttcatcatgtgggcctgccaaaaaggcaacattaggtgcaacatttgcatttga

SEQ ID NO: 31018 - RNA, 1698 nt, synthetic construct
  misc_feature 1..1698: note = hemagglutinin__InfluenzaA__ABC41714
  source 1..1698: mol_type = other RNA
atgaaagtaaaactactggttctgttatgtacatttacagctacatatgcagacacaatatgtataggctaccatgccaacaactcaaccgacactgttgacacagtacttgagaagaatgtgacagtgacacactctgtcaacctacttgaggacagtcacaatggaaaactatgtctactaaaaggaatagccccactacaattgggtaattgcagcgttgccggatggatcttaggaaacccagaatgcgaattactgatttccaaggaatcatggtcctacattgtagaaacaccaaatcctgagaatggaacatgttatccagggtatttcgccgactatgaggaactgagggagcaattgagttcagtatcttcatttgagaggttcgaaatattccccaaagagagctcatggcccaaccacaccgtaaccggagtatcagcatcatgctcccataacgggaaaagcagtttttacagaaatttgctatggctgacggggaagaatggtttatacccaaacctgagcaagtcctatgcaaacaacaaagagaaagaagtccttgtactatggggtgttcatcacccgcctaacataggggaccaaagggccctctatcatacagaaaatgcttatgtctctgtagtgtcttcacattatagcagaagattcaccccagaaatagccaaaagacccaaggtaagagatcaggaaggaagaatcaactactactggactctgctggaacccggggatacaataatatttgaggcaaatggaaatctaatagcgccaaggtatgctttcgcactgagtagaggctttggatcaggaatcatcacctcaaatgcaccaatggatgaatgtgatgcgaagtgtcaaacacctcagggagctataaacagcagtcttcctttccagaatgtacacccagtcacaataggagagtgtccaaagtatgtcaggagtgcaaaattaaggatggttacaggactaaggaacatcccatccattcaatccagaggtttgtttggagccattgccggtttcattgaaggggggtggactggaatggtagatggttggtatggttatcatcatcagaatgagcaaggatctgggtatgctgcagatcaaaaaagcacacaaaatgccattaacgggattacaaacaaggtgaattctgtaattgagaaaatgaacactcaattcacagctgtgggcaaagaattcaacaaattggaaagaaggatggaaaacttaaataaaaaagttgatgatggatttctagacatttggacatataatgcagaattgttggttctactggaaaatgaaaggactttggatttccatgactccaacgtgaagaatctgtatgagaaagtaaaaagccaattaaagaataatgccaaagaaataggaaacgggtgttttgaattctatcacaagtgtaacgatgaatgcatggagagtgtgaaaaatggaacttatgactatccaaaatattccgaagaatcaaagttaaacagggagaaaattgatggagtgaaattggaatcaatgggagtctatcagattctggcgatctactcaacagtcgccagttccctggttcttttggtctccctgggggcaatcagcttctggatgtgttccaatgggtctttgcagtgtagaatatgcatctaa

SEQ ID NO: 31019 - RNA, 1701 nt, synthetic construct
  misc_feature 1..1701: note = hemagglutinin__InfluenzaA__ABC41725
  source 1..1701: mol_type = other RNA
atgaagactaccattgctttgagctacattctatgtctggttttcgctcaaaaacttcccggaaatgacaacagcacggcaacgctgtgccttgggcaccatgcagtaccaaacggaacgatagtgaaaacaatcacaaatgaccaaattgaagttactaatgctactgagctggttcagagttcctcaacaggtggaatatgcgacagtcctcatcagatccttgatggagaaaactgcacactaatagatgctctattgggagaccctcagtgtgatggcttccaaaataagaaatgggacctttttgttgaacgcagcaaagcctacagcaactgttacccttatgatgtgccggatcatgcctcccttaggtcactagttgcctcatccggcacactggagtttaacaatgaaagcttcgattggactggagtcactcagaatggaacaagctctgcttgcaaaaggagatctaataaaagtttctttagtagattgaattggttgacccacttaaaatacaaatacccagcattgaacgtgactatgccaaacaatgaaaaatttgacaaattgtacatttggggggttcaccacccgggtacggacagtgaccaaatcagcctatatgctcaagcatcaggaagaatcacagtctctaccaaaagaagccaacaaactgtaatcccgaatatcggatctagacccagggtaagggatgtctccagccgaataagcatctattggacaatagtaaaaccgggagacatacttttgattaacagcacagggaatctaattgctcctcggggttacttcaaaatacgaagtgggaaaagctcaataatgagatcagatgcacccattggcaaatgcaattctgaatgcatcactccaaatggaagcattcccaatgacaaaccatttcaaaatgtaaacaggatcacatatggggcctgtcccagatatgttaagcaaaacactctgaaattggcaacagggatgcgaaatgtaccagagaaacaaactagaggcatatttggcgcaatcgcgggtttcatagaaaatggttgggagggaatggtggacggttggtacggtttcaggcatcaaaattctgagggcacaggacaagcagcagatctcaaaagcactcaagcagcaatcaaccaaatcaatgggaaactgaataggttaatcgggaaaacaaacgagaaattccatcagattgaaaaagaattctcagaagtagaagggagaattcaggacctcgagaaatatgttgaggacactaaaatagatctctggtcatacaacgcggagcttcttgttgccctggagaaccaacatacaattgatctaactgactcagaaatgaacaaactgtttgaaagaacaaagaagcaactgagggaaaatgctgaggatatgggcaatggttgtttcaaaatataccacaaatgtgacaatgcctgcatagggtcaatcagaaatggaacttatgaccatgatgtgtacagagatgaagcattaaacaaccggttccagatcaaaggtgttgagctgaagtcaggatataaagattggatcctatggatttcctttgccatatcatgttttttgctttgtgttgctttgttggggttcatcatgtgggcctgccaaaaaggcaacattaggtgcaacatttgcatttga

SEQ ID NO: 31020 - RNA, 1701 nt, synthetic construct
  misc_feature 1..1701: note = hemagglutinin__InfluenzaA__ABC41736
  source 1..1701: mol_type = other RNA
atgaagactatcattgctttgagctacattctatgcctggttttcgctcaaaaacttcccggaaatgacaacagcacggcaacgctgtgccttgggcaccatgcagtaccaaacggaacgatagtgaaaacaatcacaaatgaccaaattgaagttactaatgctactgagctggttcagagttcctcaacaggtggaatatgcgacagtcctcatcagatccttgatggagaaaactgcacactaatagatgctctattgggagaccctcagtgtgatggcttccaaaataagaaatgggacctttttgttgaacgcagcaaagcctacagcaactgttacccttatgatgtgccggatcatgcctcccttaggtcactagttgcctcatccggcacactggagtttaacaatgaaagcttcgattggactggagtcactcagaatggaacaagctctgcttgcaaaaggagatctaataaaagtttctttagtagattgaattggttgacccacttaaaatacaaatacccagcattgaacgtgactatgccaaacaatgaaaaatttgacaaattgtacatttggggggttcaccacccgggtacggacagtgaccaaatcagcctatatgctcaagcatcaggaagaatcacagtctctaccaaaagaagccaacaaactgtaatcccgaatatcggatctagacccagggtaagggatgtctccagccgaataagcatctattggacaatagtaaaaccgggagacatacttttgattaacagcacagggaatctaattgctcctcggggttacttcaaaatacgaagtgggaaaagctcaataatgagatcagatgcacccattggcaaatgcaattctgaatgcatcactccaaatggaagcattcccaatgacaaaccatttcaaaatgtaaacaggatcacatatggggcctgtcccagatatgttaagcaaaacactctgaaattggcaacagggatgcgaaatgtaccagagaaacaaactagaggcatatttggcgcaatcgcgggtttcatagaaaatggttgggagggaatggtggacggttggtacggtttcaggcatcaaaattctgagggcacaggacaagcagcagatctcaaaagcactcaagcagcaatcaaccaaatcaatgggaaactgaataggttaatcgggaaaacaaacgagaaattccatcagattgaaaaagaattctcagaagtagaagggagaattcaggacctcgagaaatatgttgaggacactaaaatagatctctggtcatacaacgcggagcttcttgttgccctggagaaccaacatacaattgatctaactgactcagaaatgaacaaactgtttgaaagaacaaagaagcaactgagggaaaatgctgaggatatgggcaatggttgtttcaaaatataccacaaatgtgacaatgcctgcatagggtcaatcagaaatggaacttatgaccatgatgtgtacagagatgaagcattaaacaaccggttccagatcaaaggtgttgagctgaagtcaggatataaagattggatcctatggatttcctttgccatatcatgttttttgctttgtgttgctttgttggggttcatcatgtgggcctgccaaaaaggcaacattaggtgcaacatttgcatttga

SEQ ID NO: 31021 - RNA, 1701 nt, synthetic construct; identical to SEQ ID NO: 31020
  misc_feature 1..1701: note = hemagglutinin__InfluenzaA__ABC41952
  source 1..1701: mol_type = other RNA

SEQ ID NO: 31022 - RNA, 1701 nt, synthetic construct
  misc_feature 1..1701: note = hemagglutinin__InfluenzaA__ABC41953
  source 1..1701: mol_type = other RNA
atgaagactatcattgctttgagctacattctatgcctggttttcgctcaaaaacttcccggaaatgacaacagcacggcaacgctgtgccttgggcaccatgcagtaccaaacggaacgatagtgaaaacaatcacaaatgaccaaattgaagttactaatgctactgagctggttcagagttcctcaacaggtggaatatgcgacagtcctcatcagatccttgatggagaaaactgcacactaatagatgctctattgggagaccctcagtgtgatggcttccaaaataagaaatgggacctttttgttgaacgcagcaaagcctacagcaactgttacccttatgatgtgccggatcatgcctcccttaggtcactagttgcctcatccggcacactggagtttaacaatgaaagcttcgattggactggagtcactcagaatggaacaagctctgcttgcaaaaggagatctaataaaagtttctttagtagattgaattggttgacccacttaaaatacaaatacccagcattgaacgtgactatgccaaacaatgaaaaatttgacaaattgtacatttggggggttcaccacccgggtacggacagtgaccaaatcagcctatatgctcaagcatcaggaagaatcacagtctctaccaaaagaagccaacaaactgtaatcccgaatatcggatctagacccagggtaagggatgtctccagccgaataagcatctattggacaatagtaaaaccgggagacatacttttgattaacagcacagggaatctaattgctcctcggggttacttcaaaatacgaagtgggaaaagctcaataatgagatcagatgcacccattggcaaatgcaattctgaatgcatcactccaaatggaagcattcccaatgacaaaccatttcaaaatgtaaacaggatcacatatggggcctgtcccagatatgttaagcaaaacactctgaaattggcaacagggatgcgaaatgtaccagagaaacaaactagaggcatatttggcgcaatcgcgggtttcatagaaaatggttgggagggaatggtggacggttggtacggtttcaggcatcaaaattctgagggcacaggacaagcagcagatctcaaaagcactcaagcagcaatcaaccaaatcaatgggaaactgaataggttaatcgggaaaacaaacgagaaattccatcagattgaaaaagaattctcagaagtagaagggagaattcaggacctcgagaaatatgttgaggacactaaaatagatctctggtcatacaacgcggagcttcttgttgccctggagaaccaacatacaattgatctaactgactcagaaatgaacaaactgtttgaaagaacaaagaagcaactgagggaaaatgctgaggatatgggcaatggttgtttcaaaatataccacaaatgtgacaatgcctgtatagggtcaatcagaaatggaacttatgaccatgatgtgtacagagatgaagcattaaacaaccggttccagatcaaaggtgttgagctgaagtcaggatataaagattggatcctatggatttcctttgccatatcatgttttttgctttgtgttgctttgttggggttcatcatgtgggcctgccaaaaaggcaacattaggtgcaacatttgcatttga

SEQ ID NO: 31023 - RNA, 1701 nt, synthetic construct
  misc_feature 1..1701: note = hemagglutinin__InfluenzaA__ABC41964
  source 1..1701: mol_type = other RNA
atgaagactatcattgctttgagctacattctatgtctggttttcgctcaaaaacttcccggaaatgacaacagcacggcaacgctgtgccttgggcaccatgcagtaccaaacggaacgatagtgaaaacaatcacaaatgaccaaattgaagttactaatgctactgagctggttcagagttcctcaacaggtggaatatgcgacagtcctcatcagatccttgatggagaaaactgcacactaatagatgctctattgggagaccctcagtgtgatggcttccaaaataagaaatgggacctttttgttgaacgcagcaaagcctacagcaactgttacccttatgatgtgccggatcatgcctcccttaggtcactagttgcctcatccggcacactggagtttaacaatgaaagcttcgattggactggagtcactcagaatggaacaagctctgcttgcaaaaggagatctaataaaagtttctttagtagattgaattggttgacccacttaaaatacaaatacccagcattgaacgtgactatgccaaacaatgaaaaatttgacaaattgtacatttggggggttcaccacccgggtacggacagtgaccaaatcagcctatatgctcaagcatcaggaagaatcacagtctctaccaaaagaagccaacaaactgtaatcccgaatatcggatctagacccagggtaagggatgtctccagccgaataagcatctattggacaatagtaaaaccgggagacatacttttgattaacagcacagggaatctaattgctcctcggggttacttcaaaatacgaagtgggaaaagctcaataatgagatcagatgcacccattggcaaatgcaattctgaatgcatcactccaaatggaagcattcccaatgacaaaccatttcaaaatgtaaacaggatcacatatggggcctgtcccagatatgttaagcaaaacactctgaaattggcaacagggatgcgaaatgtaccagagaaacaaactagaggcatatttggcgcaatcgcgggtttcatagaaaatggttgggagggaatggtggacggttggtacggttttaggcatcaaaattctgagggcacaggacaagcagcagatctcaaaagcactcaagcagcaatcaaccaaatcaatgggaaactgaataggttaatcgggaaaacaaacgagaaattccatcagattgaaaaagaattctcagaagtagaagggagaattcaggacctcgagaaatatgttgaggacactaaaatagatctctggtcatacaacgcggagcttcttgttgccctggagaaccaacatacaattgatctaactgactcagaaatgaacaaactgtttgaaagaacaaagaagcaactgagggaaaatgctgaggatatgggcaatggttgtttcaaaatataccacaaatgtgacaatgcctgcatagggtcaatcagaaatggaacttatgaccatgatgtgtacagagatgaagcattaaacaaccggttccagatcaaaggtgttgagctgaagtcaggatataaagattggatcctatggatttcctttgccatatcatgttttttgctttgtgttgctttgttggggttcatcatgtgggcctgccaaaaaggcaacattaggtgcaacatttgcatttga

SEQ ID NO: 31024 - RNA, 1701 nt, synthetic construct
  misc_feature 1..1701: note = hemagglutinin__InfluenzaA__ABC42014
  source 1..1701: mol_type = other RNA
atgaagactatcattgctttgagctacattctatgtctggttttcgctcaaaaacttcccggaaatgacaacagcacggcaacgctgtgccttgggcaccatgcagtaccaaacggaacgatagtgaaaacaatcacaaatgaccaaattgaagttactaatgctactgagctggttcagagttcctcaacaggtggaatatgcgacagtcctcatcagatccttgatggagaaaactgcacactaatagatgctctattgggagaccctcagtgtgatggcttccaaaataagaaatgggacctttttgttgaacgcagcaaagcctacagcaactgttacccttatgatgtgccggatcatgcctcccttaggtcactagttgcctcatccggcacactggagtttaacaatgaaagcttcgattggactggagtcactcagaatggaacaagctctgcttgcaaaaggagatctaataaaagtttctttagtagattgaattggttgacccacttaaaatacaaatacccagcattgaacgtgactatgccaaacaatgaaaaatttgacaaattgtacatttggggggttcaccacccgggtacggacagtgaccaaatcagcctatatgctcaagcatcaggaagaatcacagtctctaccaaaagaagccaacaaactgtaatcccgaatatcggatctagacccagggtaagggatgtctccagccgaataagcatctattggacaatagtaaaaccgggagacatacttttgattaacagcacagggaatctaattgctcctcggggttacttcaaaatacgaagtgggaaaagctcaataatgagatcagatgcacccattggcaaatgcaattctgaatgcatcactccaaatggaagcattcccaatgacaaaccatttcaaaatgtaaacaggatcacatatggggcctgtcccagatatgttaagcaaaacactctgaaattggcaacagggatgcgaaatgtaccagagaaacaaactagaggcatatttggcgcaatcgcgggtttcatagaaaatggttgggagggaatggtggacggttggtacggtttcaggcatcaaaattctgagggcacaggacaagcagcagatctcaaaagcactcaagcagcaatcaaccaaatcaatgggaaactgaataggttaatcgggaaaacaaacgagaaattccatcagattgaaaaagaattctcagaagtagaagggagaattcaggacctcgagaaatatgttgaggacactaaaatagatctctggtcatacaacgcggagcttcttgttgccctggagaaccaacatacaattgatctaactgactcagaaatgaacaaactgtttgaaagaacaaagaagcaactgagggaaaatgctgaggatatgggcaatggttgtttcaaaatataccacaaatgtgacaatgcctgcatagggtcaatcagaaatggaacttatgaccatgatgtgtacagagatgaagcattaaacaaccggttccagatcaaaggtgttgagctgaagtcaggatataaagattggatcctatggatttcctttgccatatcatgttttttgctttgtgttgctttgttggggttcatcatgtgggcctgccaaaaaggcaacattaggtgcaacatttgcatttga

SEQ ID NO: 31025 - RNA, 1701 nt, synthetic construct; identical to SEQ ID NO: 31020
  misc_feature 1..1701: note = hemagglutinin__InfluenzaA__ABC42114
  source 1..1701: mol_type = other RNA

SEQ ID NO: 31026 - RNA, 1701 nt, synthetic construct; identical to SEQ ID NO: 31024
  misc_feature 1..1701: note = hemagglutinin__InfluenzaA__ABC42125
  source 1..1701: mol_type = other RNA

SEQ ID NO: 31027 - RNA, 1701 nt, synthetic construct; identical to SEQ ID NO: 31024
  misc_feature 1..1701: note = hemagglutinin__InfluenzaA__ABC42136
  source 1..1701: mol_type = other RNA

SEQ ID NO: 31028 - RNA, 1701 nt, synthetic construct
  misc_feature 1..1701: note = hemagglutinin__InfluenzaA__ABC42147
  source 1..1701: mol_type = other RNA
atgaagactatcattgctttgagctacattctatgcctggttttcgctcaaaaacttcccggaaatgacaacagcacggcaacgctgtgccttgggcaccatgcagtaccaaacggaacgatagtgaaaacaatcacaaatgaccaaattgaagttactaatgctactgagctggttcagagttcctcaacaggtggaatatgcgacagtcctcatcagatccttgatggagaaaactgcacactaatagatgctctattgggagaccctcagtgtgatggcttccaaaataagaaatgggacctttttgttgaacgcagcaaagcctacagcaactgttacccttatgatgtgccggatcatgcctcccttaggtcactagttgcctcatccggcacactggagtttaacaatgaaagcttcgattggactggagtcactcagaatggaacaagctctgcttgcaaaaggagatctaataaaagtttctttagtagattgaattggttgacccacttaaaatacaaatacccagcattgaacgtgactatgccaaacaatgaaaaatttgacaaattgtacatttggggggttcaccacccgggtacggacagtgaccaaatcagcctatatgctcaagcatcaggaagaatcacagtctctaccaaaagaagccaacaaactgtaatcccgaatatcggatccagacccagggtaagggatgtctccagccgaataagcatctattggacaatagtaaaaccgggagacatacttttgattaacagcacagggaatctaattgctcctcggggttatttcaaaatacgaagtgggaaaagctcaataatgagatcagatgtacccattggcaaatgcaattctgaatgcatcactccaaatggaagcattcccaatgacaaaccatttcaaaatgtaaacaggatcacatatggggcctgtcccagatatgttaagcaaaacactctgaaattggcaacagggatgcgaaatgtaccagagaaacaaactagaggcatatttggcgcaatcgcgggtttcatagaaaatggttgggagggaatggtggacggttggtacggtttcaggcatcaaaattctgagggcacaggacaagcagcagatctcaaaagcactcaagcagcaatcaaccaaatcaatgggaaactgaataggttaatcgggaaaacaaacgagaaattccatcagattgaaaaagaattctcagaagtagaagggagaattcaggacctcgagaaatatgttgaggacactaaaatagatctctggtcatacaacgcggagcttcttgttgccctggagaaccaacatacaattgatctaactgactcagaaatgaacaaactgtttgaaagaacaaagaagcaactgagggaaaatgctgaggatatgggtaatggttgtttcaaaatataccacaaatgtgacaatgcctgcatagggtcaatcagaaatggaacttatgaccatgatgtgtacagagatgaagcattaaacaaccggttccagatcaaaggtgttgagctgaagtcaggatataaagattggatcctatggatttcctttgccatatcatgttttttgctttgtgttgctttgttggggttcatcatgtgggcctgccaaaaaggcaacattaggtgcaacatttgcatttga

SEQ ID NO: 31029 - RNA, 1701 nt, synthetic construct; identical to SEQ ID NO: 31024
  misc_feature 1..1701: note = hemagglutinin__InfluenzaA__ABC42158
  source 1..1701: mol_type = other RNA

SEQ ID NO: 31030 - RNA, 1701 nt, synthetic construct; identical to SEQ ID NO: 31024
  misc_feature 1..1701: note = hemagglutinin__InfluenzaA__ABC42169
  source 1..1701: mol_type = other RNA

SEQ ID NO: 31031 - RNA, 1701 nt, synthetic construct; identical to SEQ ID NO: 31024
  misc_feature 1..1701: note = hemagglutinin__InfluenzaA__ABC42180
  source 1..1701: mol_type = other RNA

SEQ ID NO: 31032 - RNA, 1701 nt, synthetic construct; identical to SEQ ID NO: 31024
  misc_feature 1..1701: note = hemagglutinin__InfluenzaA__ABC42192
  source 1..1701: mol_type = other RNA

SEQ ID NO: 31033 - RNA, 1701 nt, synthetic construct; identical to SEQ ID NO: 31020
  misc_feature 1..1701: note = hemagglutinin__InfluenzaA__ABC42307
  source 1..1701: mol_type = other RNA

SEQ ID NO: 31034 - RNA, 1701 nt, synthetic construct
  misc_feature 1..1701: note = hemagglutinin__InfluenzaA__ABC42318
  source 1..1701: mol_type = other RNA
atgaagactatcattgctttgagctacattctatgcctggttttcgctcaaaaacttcccggaaatgacaacagcacggcaacgctgtgccttgggcaccatgcagtaccaaacggaacgatagtgaaaacaatcacaaatgaccaaattgaagttactaatgctactgagctggttcagagttcctcaacaggtggaatatgcgacagtcctcatcagatccttgatggagaaaactgcacactaatagatgctctattgggagaccctcagtgtgatggcttccaaaataagaaatgggacctttttgttgaacgcagcaaagcctacagcaactgttacccttatgatgtgccggatcatgcctcccttaggtcactagttgcctcatccggcacactggagtttaacaatgaaagcttcgattggactggagtcactcagaatggaacaagctctgcttgcaaaaggagatctaataaaagtttctttagtagattgaattggttgacccacttaaaatacaaatacccagcattgaacgtgactatgccaaacaatgaaaaatttgacaaattgtacatttggggggttcaccacccgggtacggacagtgaccaaatcagcctatatgctcaagcatcaggaagaatcacagtctctaccaaaagaagccaacaaactgtaatcccgaatatcggatctagacccagggtaagggatgtctccagccgaataagcatctattggacaatagtaaaaccgggagacatacttttgattaacagcacagggaatctaattgctcctcggggttacttcaaaatacgaagtgggaaaagctcaataatgagatcagatgcgcccattggcaaatgcaattctgaatgcatcactccaaatggaagcattcccaatgacaaaccatttcaaaatgtaaacaggatcacatatggggcctgtcccagatatgttaagcaaaacactctgaaattggcaacagggatgcgaaatgtaccagagaaacaaactagaggcatatttggcgcaatcgcgggtttcatagaaaatggttgggagggaatggtggacggttggtacggtttcaggcatcaaaattctgagggcacaggacaagcagcagatctcaaaagcactcaagcagcaatcaaccaaatcaatgggaaactgaataggttaatcgggaaaacaaacgagaaattccatcagattgaaaaagaattctcagaagtagaagggagaattcaggacctcgagaaatatgttgaggacactaaaatagatctctggtcatacaacgcggagtttcttgttgccctggagaaccaacatacaattgatctaactgactcagaaatgaacaaactgtttgaaagaacaaagaagcaactgagggaaaatgctgaggatatgggcaatggttgtttcaaaatataccacaaatgtgacaatgcctgcatagggtcaatcagaaatggaacttatgaccatgatgtgtacagagatgaagcattaaacaaccggttccagatcaaaggtgttgagctgaagtcaggatataaagattggatcctatggatttcctttgccatatcatgttttttgctttgtgttgctttgttggggttcatcatgtgggcctgccaaaaaggcaacattaggtgcaacatttgcatttga

SEQ ID NO: 31035 - RNA, 1701 nt, synthetic construct; identical to SEQ ID NO: 31024
  misc_feature 1..1701: note = hemagglutinin__InfluenzaA__ABC42346
  source 1..1701: mol_type = other RNA

SEQ ID NO: 31036 - RNA, 1701 nt, synthetic construct; identical to SEQ ID NO: 31024
  misc_feature 1..1701: note = hemagglutinin__InfluenzaA__ABC42461
  source 1..1701: mol_type = other RNA

SEQ ID NO: 31037 - RNA, 1701 nt, synthetic construct; identical to SEQ ID NO: 31020
  misc_feature 1..1701: note = hemagglutinin__InfluenzaA__ABC42494
  source 1..1701: mol_type = other RNA

SEQ ID NO: 31038 - RNA, 1701 nt, synthetic construct; identical to SEQ ID NO: 31024
  misc_feature 1..1701: note = hemagglutinin__InfluenzaA__ABC42505
  source 1..1701: mol_type = other RNA

SEQ ID NO: 31039 - RNA, 1701 nt, synthetic construct
  misc_feature 1..1701: note = hemagglutinin__InfluenzaA__ABC42516
  source 1..1701: mol_type = other RNA
atgaagactatcattgctttgagctacattctatgtctggttttcgctcaaaaacttcccggaaatgacaacagcacggcaacgctgtgccttgggcaccatgcagtaccaaacggaacgatagtgaaaacaatcacaaatgaccaaattgaagttactaatgctactgagctggttcagagttcctcaacaggtggaatatgcgacagtcctcatcagatccttgatggagaaaactgcacactaatagatgctctattgggagaccctcagtgtgatggcttccaaaataagaaatgggacctttttgttgaacgcagcaaagcctacagcaactgttacccttatgatgtgccggatcatgcctcccttaggtcactagttgcctcatccggcacactggagtttaacaatgaaagcttcgattggactggagtcactcagaatggaacaagctctgcttgcaaaaggagatctaataaaagtttctttagtagattgaattggttgacccacttaaaatacaaatacccagcattgaacgtgactatgccaaacaatgaaaaatttgacaaattgtacatttggggggttcaccacccgggtacggacagtgaccaaatcagcctatatgctcaagcatcaggaagaatcacagtctctaccaaaagaagccaacaaactgtaatcccgaatatcggatctagacccagggtaagggatgtctccagccgaataagcatctattggacaatagtaaaaccgggagacatacttttgattaacagcacagggaatctaattgctcctcggggttacttcaaaatacgaagtgggaaaagctcaataatgagatcagatgcacccattggcaaatgcaattctgaatgcatcactccaaatggaagcattcccaatgacaaaccatttcaaaatgtaaacaggatcacatatggggcctgtcccagatatgttaagcaaaacactctgaaattggcaacagggatgcgaaatgtaccagagaaacaaactagaggcatatttggcgcaatcgcgggtttcatagaaaatggttgggagggaatggtggacggttggtacggtttcaggcatcaaaattctgagggcacaggacaagcagcagatctcaaaagcactcaagcagcaatcaaccaaatcaatgggaaactgaataagttaatcgggaaaacaaacgagaaattccatcagattgaaaaagaattctcagaagtagaagggagaattcaggacctcgagaaatatgttgaggacactaaaatagatctctggtcatacaacgcggagcttcttgttgccctggagaaccaacatacaattgatctaactgactcagaaatgaacaaactgtttgaaagaacaaagaagcaactgagggaaaatgctgaggatatgggcaatggttgtttcaaaatataccacaaatgtgacaatgcctgcatagggtcaatcagaaatggaacttatgaccatgatgtgtacagagatgaagcattaaacaaccggttccagatcaaaggtgttgagctgaagtcaggatataaagattggatcctatggatttcctttgccatatcatgttttttgctttgtgttgctttgttggggttcatcatgtgggcctgccaaaaaggcaacattaggtgcaacatttgcatttga

SEQ ID NO: 31040 - RNA, 1701 nt, synthetic construct; identical to SEQ ID NO: 31020
  misc_feature 1..1701: note = hemagglutinin__InfluenzaA__ABC42527
  source 1..1701: mol_type = other RNA

SEQ ID NO: 31041 - RNA, 1701 nt, synthetic construct; identical to SEQ ID NO: 31020
  misc_feature 1..1701: note = hemagglutinin__InfluenzaA__ABC42574
  source 1..1701: mol_type = other RNA

SEQ ID NO: 31042 - RNA, 1701 nt, synthetic construct
  misc_feature 1..1701: note = hemagglutinin__InfluenzaA__ABC42585
  source 1..1701: mol_type = other RNA
atgaagactatcattgctttgagctacattctatgtctggttttcgctcaaaaacttcccggaaatgacaacagcacggcaacgctgtgccttgggcaccatgcagtaccaaacggaacgatagtgaaaacaatcacaaatgaccaaattgaagttactaatgctactgagctggttcagagttcctcaacaggtggaatatgcgacagtcctcatcagatccttgatggagaaaactgcacactaatagatgctctattgggagaccctcagtgtgatggcttccaaaataagaaatgggacctttttgttgaacgcagcaaagcctacagcaactgttacccttatgatgtgccggatcatgcctcccttaggtcactagttgcctcatccggcacactggagtttaacaatgaaagcttcgattggactggagtcactcagaatggaacaagctctgcttgcaaaaggagatctaataaaagtttctttagtagattgaattggttgacccacttaaaatacaaatacccagcattgaacgtgactatgccaaacaatgaaaaatttgacaaattgtacatttggggggttcaccacccgggtacggacagtgaccaaatcagcctatatgctcaagcatcaggaagaatcacagtctctaccaaaagaagccaacaaactgtaatcccgaatatcggatctagacccagggtaagggatgtctccagccgaataagcatctattggacaatagtaaaaccgggagacatacttttgattaacagcacagggaatctaattgctcctcggggttacttcaaaatacgaagtgggaaaagctcaataatgagatcagatgcacccattggcaaatgcaattctgaatgcatcactccaaatggaagcattcccaatgacaaaccatttcaaaatgtaaacaggatcacatatggggcctgtcccagatatgttaagcaaaacactctgaaattggcaacagggatgcgaaatgtaccagagaaacaaactagaggcatatttggcgcaatcgcgggtttcatagaaaatggttgggagggaatggtggacggttggtacggtttcaggcatcaaaattctgagggcacaggacaagcagcagatctcaaaagcactcaagcagcaatcaaccaaatcaatgggaaactgaataggttaatcgggaaaacaaacgagaaattccatcagattgaaaaagaattctcagaagtagaagggagaattcaggacctcgagaaatatgttgaggacactaaaatagatctctggtcatacaacgcggagcttcttgttgccctggagaaccaacatacaattgatctaactgactcagaaatgaacaaactgtttgaaagaacaaagaagcaactgagggaaaatgctgaggatatgggcaatggttgtttcaaaatataccacaaatgtgacaatgcctgcataggctcaatcagaaatggaacttatgaccatgatgtgtacagagatgaagcattaaacaaccggttccagatcaaaggtgttgagctgaagtcaggatataaagattggatcctatggatttcctttgccatatcatgttttttgctttgtgttgctttgttggggttcatcatgtgggcctgccaaaaaggcaacattaggtgcaacatttgcatttga

SEQ ID NO: 31043 - RNA, 1701 nt, synthetic construct; identical to SEQ ID NO: 30822
  misc_feature 1..1701: note = hemagglutinin__InfluenzaA__ABC42596
  source 1..1701: mol_type = other RNA

SEQ ID NO: 31044 - RNA, 1701 nt, synthetic construct; identical to SEQ ID NO: 30826
  misc_feature 1..1701: note = hemagglutinin__InfluenzaA__ABC42607
  source 1..1701: mol_type = other RNA

SEQ ID NO: 31045 - RNA, 1701 nt, synthetic construct; identical to SEQ ID NO: 30826
  misc_feature 1..1701: note = hemagglutinin__InfluenzaA__ABC42618
  source 1..1701: mol_type = other RNA

SEQ ID NO: 31046 - RNA, 1701 nt, synthetic construct
  misc_feature 1..1701: note = hemagglutinin__InfluenzaA__ABC42629
  source 1..1701: mol_type = other RNA
atgaagactatcattgctttgagctacattctatgtctggttttcgctcaaaaacttcccggaaatgacaacagcacggcaacgctgtgccttgggcaccatgcagtaccaaacggaacgatagtgaaaacaatcacgaatgaccaaattgaagttactaatgctactgagctggttcagagttcctcaacaggtggaatatgcgacagtcctcatcagatccttgatggagaaaactgcacactaatagatgctctattgggagaccctcagtgtgatggcttccaaaataagaaatgggacctttttgttgaacgcagcaaagcctacagcaactgttacccttatgatgtgccggatcatgcctcccttaggtcactagttgcctcatccggcacactggagtttaacaacgaaagcttcaattggactggagtcactcaaaatggaacaagctctgcttgcaaaaggagatctaataacagtttctttagtagattgaattggttgacccatttaaaattcaaatacccagcattgaacgtgactatgccaaacaatgaaaaatttgacaaattgtacatttggggggttcaccacccgggtacggacaatgaccaaatcagcctatatgctcaagcatcaggaagaatcacagtctctaccaaaagaagccaacaaactgtaatcccgaatatcggatctagacccagggtaagggatatccccagcagaataagcatctattggacaatagtaaaaccgggagacatacttttgattaacagcacagggaatctaattgctcctcggggttacttcaaaatacgaagtgggaaaagctcaataatgagatcagatgcacccattggcaaatgcaattctgaatgcatcactccaaatggaagcattcccaatgacaaaccatttcaaaatgtaaacaggatcacatatggggcctgtcccagatatgttaagcaaaacactctgaaattggcaacagggatgcgaaatgtaccagagaaacaaactagaggcatatttggcgcaatcgcgggtttcatagaaaatggttgggagggaatggtggatggttggtacggtttcaggcatcaaaattctgagggaacgggacaagcagcagatctcaaaagcactcaagcagcaatcaaccaaatcaatgggaagctgaataggttgatcgggaaaaccaacgagaaattccatcagattgaaaaagaattctcagaagtagaagggagaattcaggacctcgagaaatatgttgaggacactaaaatagatctctggtcatacaacgcggagcttcttgttgccctggagaaccaacatacaattgatctaactgactcagaaatgaacaaactgtttgaaagaacaaagaagcaactgagggaaaatgctgaggatatgggcaatggttgtttcaaaatataccacaaatgtgacaatgcctgcatagggtcaatcagaaatggaacttatgaccatgatgtatacagagatgaagcattaaacaaccggttccagatcaaaggtgttgagctgaagtcaggatacaaagattggatcctatggatttcctttgccatatcatgttttttgctttgtgttgctttgttggggttcatcatgtgggcctgccaaaaaggcaacattaggtgcaacatttgcatttga

SEQ ID NO: 31047 - RNA, 1701 nt, synthetic construct
  misc_feature 1..1701: note = hemagglutinin__InfluenzaA__ABC42640
  source 1..1701: mol_type = other RNA
atgaagactatcattgctttgagctacattctatgtctggttttcgctcaaaaaattcccggaaatgacaacagcacggcaacgctgtgccttgggcaccatgcagtaccaaacggaacgatagtgaaaacaatcacgaatgaccaaattgaagttactaatgctactgagctggttcagagttcctcaacaggtggaatatgcgacagtcctcatcagatccttgatggagaaaactgcacactaatagatgctctattgggagaccctcagtgtgatggcttccaaaataagaaatgggacctttttgttgaacgcagcaaagcctacagcaactgttacccttatgatgtgccggattatgcctcccttaggtcactagttgcctcatccggcacactggagtttaacaatgaaagcttcaattggactggagtcactcaaaatggaacaagctctgcttgcaaaaggagatctaataacagtttctttagtagattgaattggttgacccatttaaaattcaaatacccagcattgaacgtgactatgccaaacaatgaaaaatttgacaaattgtacatttggggggttcaccacccgggtacggacaatgaccaaatcagcctatatgctcaagcatcaggaagaatcacagtctctaccaaaagaagccaacaaactgtaatcccgaatatcggatctagacccagggtaagggatatccccagcagaataagcatctattggacaatagtaaaaccgggagacatacttttgattaacagcacagggaatctaattgctcctcggggttacttcaaaatacgaagtgggaaaagctcaataatgagatcagatgcacccattggcaaatgcaattctgaatgcatcactccaaatggaagcattcccaatgacaaaccatttcaaaatgtaaacaggatcacatatggggcctgtcccagatatgttaagcaaaacactctgaaattggcaacagggatgcgaaatgtaccagagaaacaaactagaggcatatttggcgcaatcgcgggtttcatagaaaatggttgggagggaatggtggatggttggtacggtttcaggcatcaaaattctgagggaataggacaagcagcagatctcaaaagcactcaagcagcaatcaaccaaatcaatgggaagctgaataggttgatcgggaaaaccaacgagaaattccatcagattgaaaaagaattctcagaagtagaagggagaattcaggacctcgagaaatatgttgaggacactaaaatagatctctggtcatacaacgcggagcttcttgttgccctggagaaccaacatacaattgatctaactgactcagaaatgaacaaactgtttgaaagaacaaagaagcaactgagggaaaatgctgaggatatgggcaatggttgtttcaaaatataccacaaatgtgacaatgcctgcatagggtcaatcagaaatggaacttatgaccatgatgtatacagagatgaagcattaaacaaccggttccagatcaaaggtgttgagctgaagtcaggatacaaagattggatcctatggatttcctttgccatatcatgttttttgctttgtgttgctttgttggggttcatcatgtgggcctgccaaaaaggcaacattaggtgcaacatttgcatttga

SEQ ID NO: 31048 - RNA, 1701 nt, synthetic construct
  misc_feature 1..1701: note = hemagglutinin__InfluenzaA__ABC42651
  source 1..1701: mol_type = other RNA
atgaagactatcattgctttgagctacattctatgtctggttttcgctcaaaaacttcccggaaatgacaacagcacggcaacgctgtgccttgggcaccatgcagtaccaaacggaacgatagtgaaaacaatcacgaatgaccaaattgaagttactaatgctactgagctggttcagagttcctcaacaggtggaatatgcgacagtcctcatcagatccttgatggagaaaactgcacactaatagatgctctattgggagaccctcagtgtgatggcttccaaaataagaaatgggacctttttgttgaacgcagcaaagcctacagcaactgttacccttatgatgtgccggattatgcctcccttaggtcactagttgcctcatccggcacactggagtttaacaatgaaagcttcaattggactggagtcactcaaaatggaacaagctctgcttgcaaaaggagatctaataacagtttctttagtagattgaattggttgacccatttaaaattcaaatacccagcattgaacgtgactatgccaaacaatgaaaaatttgacaaattgtacatttggggggttcaccacccgggtacggacaatgaccaaatcagcctatatgctcaagcatcaggaagaatcacagtctctaccaaaagaagccaacaaactgtaatcccgaatatcggatctagacccagggtaagggatatccccagcagaataagcatctattggacaatagtaaaaccgggagacatacttttgattaacagcacagggaatctaattgctcctcggggttacttcaaaatacgaagtgggaaaagctcaataatgagatcagatgcacccattggcaaatgcaattctgaatgcatcactccaaatggaagcattcccaatgacaaaccatttcaaaatgtaaacaggatcacatatggggcctgtcccagatatgttaagcaaaacactctgaaattggcaacagggatgcgaaatgtaccagagaaacaaactagaggcatatttggcgcaatcgcgggtttcatagaaaatggttgggagggaatggtggatggttggtacggtttcaggcatcaaaattctgagggaataggacaagcagcagatctcaaaagcactcaagcagcaatcaaccaaatcaatgggaagctgaataggttgatcgggaaaaccaacgagaaattccaccagattgaaaaagaattctcagaagtagaagggagaattcaggacctcgagaaatatgttgaggacactaaaatagatctctggtcatacaacgcggagcttcttgttgccctggagaaccaacatacaattgatctaactgactcagaaatgaacaaactgtttgaaagaacaaagaagcaactgagggaaaatgctgaggatatgggcaatggttgtttcaaaatataccacaaatgtgacaatgcctgcatagggtcaatcagaaatggaacttatgaccatgatgtatacagagatgaagcattaaacaaccggttccagatcaaaggtgttgagctgaagtcaggatacaaagattggatcctatggatttcctttgccatatcatgttttttgctttgtgttgctttgttggggttcatcatgtgggcctgccaaaaaggcaacattaggtgcaacatttgcatttga

SEQ ID NO: 31049 - RNA, 1701 nt, synthetic construct
  misc_feature 1..1701: note = hemagglutinin__InfluenzaA__ABC42662
  source 1..1701: mol_type = other RNA
atgaagactatcattgctttgagctacattctatgtctggttttcgctcaaaaacttcccggaaatgacaacagcacggcaacgctgtgccttgggcaccatgcagtaccaaacggaacgatagtgaaaacaatcacgaatgaccaaattgaagttactaatgctactgagctggttcagagttcctcaacaggtggaatatgcgacagtcctcatcagatccttgatggagaaaactgcacactaatagatgctctattgggagaccctcagtgtgatggcttccaaaataagaaatgggacctttttgttgaacgcagcaaagcctacagcaactgttacccttatgatgtgccggattatgcctcccttaggtcactagttgcctcatccggcacactggagtttaacaatgaaagcttcaattggactggagtcactcaaaatggaacaagctctgcttgcaaaaggagatctaataacagtttctttagtagattgaattggttgacccatttaaaattcaaatacccagcattgaacgtgactatgccaaacaatgaaaaatttgacaaattgtacatttggggggttcaccacccgggtacggacaatgaccaaatcagcctatatgctcaagcatcaggaagaatcacagtctctaccaaaagaagccaacaaactgtaatcccgaatatcggatctagacccagggtaagggatatccccagcagaataagcatctattggacaatagtaaaaccgggagacatacttttgattaacagcacagggaatctaattgctcctcggggttacttcaaaatacgaagtgggaaaagctcaataatgagatcagatgcacccattggcaaatgcaattctgaatgcatcactccaaatggaagcattcccaatgacaaaccatttcaaaatgtaaacaggatcacatatggggcctgtcccagatatgttaagcaaaacactctgaaattggcaacagggatgcgaaatgtaccagagaaacaaactagaggcatatttggcgcaatcgcgggtttcatagaaaatggttgggagggaatggtggatggttggtacggtttcaggcatcaaaattctgagggaataggacaagcagcagatctcaaaagcactcaagcagcaatcaaccaaatcaatgggaagctgaataggttgatcgggaaaaccaacgagaaattccatcagattgaaaaagaattctcagaagtagaagggagaattcaggacctcgagaaatatgttgaggacactaaaatagatctctggtcatacaacgcggagtttcttgttgccctggagaaccaacatacaattgatctaactgactcagaaatgaacaaactgtttgaaagaacaaagaagcaactgagggaaaatgctgaggatatgggcaatggttgtttcaaaatataccacaaatgtgacaatgcctgcatagggtcaatcagaaatggaacttatgaccatgatgtatacagagatgaagcattaaacaaccggttccagatcaaaggtgttgagctgaagtcaggatacaaagattggatcctatggatttcctttgccatatcatgttttttgctttgtgttgctttgttggggttcatcatgtgggcctgccaaaaaggcaacattaggtgcaacatttgcatttga

SEQ ID NO: 31050 - RNA, 1701 nt, synthetic construct
  misc_feature 1..1701: note = hemagglutinin__InfluenzaA__ABC42673
  source 1..1701: mol_type = other RNA
atgaagactatcattgctttgagctacattctatgtctgattttcgctcaaaaacttcccggaaatgacaacagcacggcaacgctgtgccttgggcaccatgcagtaccaaacggaacgatagtgaaaacaatcacgaatgaccaaattgaagttactaatgctactgagctggttcagagttcctcaacaggtggaatatgcgacagtcctcatcagatccttgatggagaaaactgcacactaatagatgctctattgggagaccctcagtgtgatggcttccaaaataagaaatgggacctttttgttgaacgcagcaaagcctacagcaactgttacccttatgatgtgccggattatgcctcccttaggtcactagttgcctcatccggcacactggagtttaacaatgaaagcttcaattggactggagtcactcaaaatggaacaagctctgcttgcaaaaggagatctaataacagtttctttagtagattgaattggttgacccatttaaaattcaaatacccagcattgaacgtgactatgccaaacaatgaaaaatttgacaaattgtacatttggggggttcaccacccgggtacggacaatgaccaaatcagcctatatgctcaagcatcaggaagaatcacagtctctaccaaaagaagccaacaaactgtaatcccgaatatcggatctagacccagggtaagggatatccccagcagaataagcatctattggacaatagtaaaaccgggagacatacttttgattaacagcacagggaatctaattgctcctcggggttacttcaaaatacgaagtgggaaaagctcaataatgagatcagatgcacccattggcaaatgcaattctgaatgcatcactccaaatggaagcattcccaatgacaaaccatttcaaaatgtaaacaggatcacatatggggcctgtcccagatatgttaagcaaaacactctgaaattggcaacagggatgcgaaatgtaccagagaaacaaactagaggcatatttggcgcaatcgcgggtttcatagaaaatggttgggagggaatggtggatggttggtacggtttcaggcatcaaaattctgagggaataggacaagcagcagatctcaaaagcactcaagcagcaatcaaccaaatcaatgggaagctgaataggttgatcgggaaaaccaacgagaaattccatcagattgaaaaagaattctcagaagtagaagggagaattcaggacctcgagaaatatgttgaggacactaaaatagatctctggtcatacaacgcggagcttcttgttgccctggagaaccaacatacaattgatctaactgactcagaaatgaacaaactgtttgaaagaacaaagaagcaactgagggaaaatgctgaggatatgggcaatggttgtttcaaaatataccacaaatgtgacaatgcctgcatagggtcaatcagaaatggaacttatgaccatgatgtatacagagatgaagcattaaacaaccggttccagatcaaaggtgttgagctgaagtcaggatacaaagattggatcctatggatttcctttgccatatcatgttttttgctttgtgttgctttgttggggttcatcatgtgggcctgccaaaaaggcaacattaggtgcaacatttgcatttga

SEQ ID NO: 31051 - RNA, 1701 nt, synthetic construct; identical to SEQ ID NO: 30822
  misc_feature 1..1701: note = hemagglutinin__InfluenzaA__ABC42684
  source 1..1701: mol_type = other RNA

SEQ ID NO: 31052 - RNA, 1701 nt, synthetic construct; identical to SEQ ID NO: 30822
  misc_feature 1..1701: note = hemagglutinin__InfluenzaA__ABC42695
  source 1..1701: mol_type = other RNA

SEQ ID NO: 31053 - RNA, 1701 nt, synthetic construct
  misc_feature 1..1701: note = hemagglutinin__InfluenzaA__ABC42706
  source 1..1701: mol_type = other RNA
atgaagactatcattgctttgagctacattctatgtctggttttcgctcaaaaacttcccggaaatgacaacagcacggcaacgctgtgccttgggcaccatgcagtaccaaacggaacgacagtgaaaacaatcacgaatgaccaaattgaagttactaatgctactgagctggttcagagttcctcaacaggtggaatatgcgacagtcctcatcagatccttgatggagaaaactgcacactaatagatgctctattgggagaccctcagtgtgatggcttccaaaataagaaatgggacctttttgttgaacgcagcaaagcctacagcaactgttacccttatgatgtgccggattatgcctcccttaggtcactagttgcctcatccggcacactggagtttaacaatgaaagcttcaattggactggagtcactcaaaatggaacaagctctgcttgcaaaaggagatctaataacagtttctttagtagattgaattggttgacccatttaaaattcaaatacccagcattgaacgtgactatgccaaacaatgaaaaatttgacaaattgtacatttggggggttcaccacccgggtacggacaatgaccaaatcagcctatatgctcaagcatcaggaagaatcacagtctctaccaaaagaagccaacaaactgtaatcccgaatatcggatctagacccagggtaagggatatccccagcagaataagcatctattggacaatagtaaaaccgggagacatacttttgattaacagcacagggaatctaattgctcctcggggttacttcaaaatacgaagtgggaaaagctcaataatgagatcagatgcacccattggcaaatgcaattctgaatgcatcactccaaatggaagcattcccaatgacaaaccatttcaaaatgtaaacaggatcacatatggggcctgtcccagatatgttaagcaaaacactctgaaattggcaacagggatgcgaaatgtaccagagaaacaaactagaggcatatttggcgcaatcgcgggtttcatagaaaatggttgggagggaatggtggatggttggtacggtttcaggcatcaaaattctgagggaataggacaagcagcagatctcaaaagcactcaagcagcaatcaaccaaatcaatgggaagctgaataggttgatcgggaaaaccaacgagaaattccatcagattgaaaaagaattctcagaagtagaagggagaattcaggacctcgagaaatatgttgaggacactaaaatagatctctggtcatacaacgcggagcttcttgttgccctggagaaccaacatacaattgatctaactgactcagaaatgaacaaactgtttgaaagaacaaagaagcaactgagggaaaatgctgaggatatgggcaatggttgtttcaaaatataccacaaatgtgacaatgcctgcatagggtcaatcagaaatggaacttatgaccatgatgtatacagagatgaagcattaaacaaccggttccagatcaaaggtgttgagctgaagtcaggatacaaagattggatcctatggatttcctttgccatatcatgttttttgctttgtgttgttttgttggggttcatcatgtgggcctgccaaaaaggcaacattaggtgcaacatttgcatttga

SEQ ID NO: 31054 - RNA, 1701 nt, synthetic construct; identical to SEQ ID NO: 30822
  misc_feature 1..1701: note = hemagglutinin__InfluenzaA__ABC42717
  source 1..1701: mol_type = other RNA

SEQ ID NO: 31055 - RNA, 1701 nt, synthetic construct
  misc_feature 1..1701: note = hemagglutinin__InfluenzaA__ABC42728
  source 1..1701: mol_type = other RNA
atgaagactatcattgctttgagctacattctatgtctggttttcgctcaaaaacttcccggaaatgacaacagcacggcaacgctgtgccttgggcaccatgcagtaccaaacggaacggtagtgaaaacaatcacaaatgaccaaattgaagttactaatgctactgagctggttcagagttcctcaacaggtggaatatgcgacagtcctcatcagatccttgatggagaaaactgcacactaatggatgctctattgggagaccctcagtgtgatggcttccaaaataagaaatgggacctttttgttgaacgcagcagagcctacagcaactgttacccttatgatgtgccggattatgcctcccttaggtcactagttgcctcatccggcacactggagtttaacaatgaaagcttcaattggactggagtcactcaaaatggaacaagctctgcttgcaaaaggagatctaataacagtttctttagtagattgaattggttgacccacttaaaattcaaatacccagcattgaacgtgactatgccaaacaatgaaaaatttgacaaattgtacatttggggggttcaccacccgggtacggacaatgaccaaatcagcctatatgctcaagcatcaggaagaatcacagtctctaccaaaagaagccaacaaactgtaatcccgaatatcggatctagacccagggtaagggatatccccagcagaataagcatctattggacaatagtaaaaccgggagacatacttttgattaacagcacagggaatctaattgctcctcggggttacttcaaaatacgaagtgggaaaagctcaataatgagatcagatgcacccattggcaaatgcaattctgaatgcatcactccaaatggaagcattcccaatgacaaaccatttcaaaatgtaaacaggatcacatatggggcctgtcccagatatgttaagcaaaacactctgaaattggcaacagggatgcgaaatgtaccagagaaacaaactagaggcatatttggcgcaatcgcgggtttcatagaaaatggttgggagggaatggtggatggttggtacggtttcaggcatcaaaattctgagggaacaggacaagcagcagatctcaaaagcactcaagcagcaatcaaccaaatcaatgggaagctgaataggttgatcgggaaaaccaacgagaaattccatcagattgaaaaagaattctcagaagtagaagggagaattcaggacctcgagaaatatgttgaggacactaaaatagatctctggtcatacaacgcggagcttcttgttgccctggagaaccaacatacaattgatctaactgactcagaaatgaacaaactgtttgaaagaacaaaaaagcaactgagggaaaatgctgaggatatgggcaatggttgtttcaaaatataccacaaatgtgacaatgcctgcataggatcaatcagaaatggaacttatgaccatgatgtatacagagatgaagcattaaacaaccggttccagatcaaaggtgttgagctgaagtcaggatacaaagattggatcctatggatttcctttgccatatcatgttttttgctttgtgttgttttgttggggttcatcatgtgggcctgccaaaaaggcaacattaggtgcaacatttgcatttga

SEQ ID NO: 31056 - RNA, 1701 nt, synthetic construct
  misc_feature 1..1701: note = hemagglutinin__InfluenzaA__ABC42739
  source 1..1701: mol_type = other RNA
atgaagactatcattgctttgagctacattctatgtctggttttcgctcaaaaacttcccggaaatgacaacagcacggcaacgctgtgccttgggcaccatgcagtaccaaacggaacgatagtgaaaacaatcacgaatgaccaaattgaagttactaatgctactgagctggttcagagttcctcaacaggtggaatatgcgacagtcctcatcagatccttgatggagaaaactgcacactaatagatgccctattgggagaccctcagtgtgatggcttccaaaataagaaatgggacctttttgttgaacgcagcaaagcctacagcaactgttacccttatgatgtgccggattatgcctcccttaggtcactagttgcctcatccggcacactggagtttaacaatgaaagcttcaattggactggagtcactcaaaatggaacaagctctgcttgcaaaaggagatctaataacagtttctttagtagattgaattggttgacccatttaaaattcaaatacccagcattgaacgtgactatgccaaacaatgaaaaatttgacaaattgtacatttggggggttcaccacccgggtacggacaatgaccaaatcagcctatatgctcaagcatcaggaagaatcacagtctctaccaaaagaagccaacaaactgtaatcccgaatatcggatctagacccagggtaagggatatccccagcagaataagcatctattggacaatagtaaaaccgggagacatacttttgattaacagcacagggaatctaattgctcctcggggttacttcaagatacgaagtgggaaaagctcaataatgagatcagatgcacccattggcaaatgcaattctgaatgcatcactccaaatggaagcattcccaatgacaaaccatttcaaaatgtaaacaggatcacatatggggcctgtcccagatatgttaagcaaaacactctgaaattggcaacagggatgcgaaatgtaccagagaaacaaactagaggcatatttggcgcaatcgcgggtttcatagaaaatggttgggagggaatggtggatggttggtacggtttcaggcatcaaaattctgagggaataggacaagcagcagatctcaaaagcactcaagcagcaatcaaccaaatcaatgggaagctgaataggttgatcgggaaaaccaacgagaaattccatcagattgaaaaagaattctcagaagtagaagggagaattcaggacctcgagaaatatgttgaggacactaaaatagatctctggtcatacaacgcggagcttcttgttgccctggagaaccaacatacaattgatctaactgactcagaaatgaacaaactgtttgaaagaacaaagaagcaactgagggaaaatgctgaggatatgggcaatggttgtttcaaaatataccacaaatgtgacaatgcctgcatagggtcaatcagaaatggaacttatgaccatgatgtatacagagatgaagcattaaacaaccggttccagatcaaaggtgttgagctgaagtcaggatacaaagattggatcctatggatttcctttgccatatcatgttttttgctttgtgttgctttgttggggttcatcatgtgggcctgccaaaaaggcaacattaggtgcaacatttgcatttga

SEQ ID NO: 31057 - RNA, 1698 nt, synthetic construct
  misc_feature 1..1698: note = hemagglutinin__InfluenzaA__ABC42750
  source 1..1698: mol_type = other RNA
atgaaagtaaaactactggtcctgttatgcacatttacagctacatatgcagacacaatatgtataggctaccatgccaacaactcaaccgacactgttgacacagtacttgaaaagaatgtgacagtgacacactctgtcaacctgcttgaggacagtcacaatggaaaactatgtctattaaaaggaatagccccactacaattgggtaattgcagcgttgccgggtggatcttaggaaacccagaatgcgaattactgatttccaaggaatcatggtcctacattgtagaaaaaccaaatcctgagaatggaacatgttacccagggcatttcgctgactatgaggaactgagggagcaattgagttcagtatcttcatttgagaggttcgaaatattccccaaagaaagctcatggcccaaccacaccgtaaccggagtatcagcatcatgctcccataatgggaaaagcagtttttacaaaaatttgctatggctgacggggaagaatggtttgtacccaaacctgagcaagtcctatgcaaacaacaaagagaaagaagtccttgtactatggggtgttcatcacccgccaaacataggtgaccaaaaggccctctatcatacagaaaatgcttatgtctctgtagtgtcttcacattatagcagaaaattcaccccagaaatagccaaaagacccaaagtaagagatcaagaaggaagaatcaactactactggactctgcttgaacccggggatacaataatatttgaggcaaatggaaatctaatagcgccaagatatgctttcgcactgagtagaggctttggatcaggaatcatcaactcaaatgcaccaatggatgaatgtgatgcgaagtgccaaacacctcagggagctataaacagcagtcttcctttccagaatgtacacccagtcacaataggagagtgtccaaagtatgtcaggagtgcaaaattaaggatggttacaggactaaggaacatcccatccattcaatccagaggtttgtttggagccattgccggtttcattgaaggggggtggactggaatggtagatggttggtatggttatcatcatcagaatgagcaaggatctggctatgctgcagatcaaaaaagcacacaaaatgccattaatgggattacaaacaaggtgaattctgtaattgagaaaatgaacactcaattcacagctgtgggcaaagaattcaacaaattggaaagaaggatggaaaacttaaataaaaaagttgatgatgggtttatagacatttggacatataatgcagaactgttggttctactggaaaatgaaaggactttggatttccatgactccaatgtgaagaatctgtatgagaaagtaaaaagccaattaaagaataatgccaaagaaataggaaatgggtgttttgaattctatcacaagtgtaacgatgaatgcatggagagtgtaaaaaatggaacttatgactatccaaaatattccgaagaatcaaagttaaacagggagaaaattgatggagtgaaattggaatcaatgggagtctatcagattctggcgatctactcaacagtcgccagttctctggttcttttggtctccctgggggcaatcagcttctggatgtgttccaatgggtctttgcagtgtagaatatgcatctaa

SEQ ID NO: 31058 - RNA, 1701 nt, synthetic construct
  misc_feature 1..1701: note = hemagglutinin__InfluenzaA__ABC42761
  source 1..1701: mol_type = other RNA
atgaagactatcattgctttgagctacattctatgtctggttttcgctcaaaaacttcccggaaatgacaacagcacggcaacgctgtgccttgggcaccatgcagtaccaaacggaacgatagtgaaaacaatcacgaatgaccaaattgaagttactaatgctactgagctggttcagagttcctcaacaggtggaatatgcgacagtcctcatcagatccttgatggagaaaactgcacactaatagatgctctattgggagaccctcagtgtgatggcttccaaaataagaaatgggacctttttgttgaacgcagcaaagcctacagcaactgttacccttatgatgtgccggattatgcctcccttaggtcactagttgcctcatccggcacactggagtttaacaatgaaagcttcaattggactggagtcactcaaaatggaacaagctctgcttgcaaaaggagatctaataacagtttctttagtagattgaattggttgacccatttaaaattcaaatacccagcattgaacgtgactatgccaaacaatgaaaaatttgacaaattgtacatttggggggttcaccacccgggtacggacaatgaccaaatcagcctatatgctcaagcatcaggaagaatcacagtctctaccaaaagaagccaacaaactgtaatcccgaatatcggatctagacccagggtaagggatatccccagcagaataagcatctattggacaatagtaaaaccgggagacatacttttgattaacagcacagggaatctaattgctcctcggggttacttcaaaatacgaagtgggaaaagctcaataatgagatcagatgcacccattggcaaatgcaattctgaatgcatcactccaaatggaagcattcccaatgacaaaccatttcaaaatgtaaacaggatcacatatggggcctgtcccagatatgttaagcaaaacactctgaaattggcaacagggatgcgaaatgtaccagagaaacaaactagaggcatatttggcgcaatcgcgggtttcatagaaaatggttgggagggaatggtggatggttggtacggtttcaggcatcaaaattctgagggaataggacaagcagcagatctcaaaagcactcaagcagcaatcaaccaaatcaatgggaagctgaataggttgatcgggaaaaccaacgagaaattccatcagattgaaaaagaattctcagaagtagaagggagaattcaggacctcgagaaatatgttgaggacactaaaatagatctctggtcatacaacgcggagcttcttgttgccctggagaaccaacataccattgatctaactgactcagaaatgaacaaactgtttgaaagaacaaagaagcaactgagggaaaatgctgaggatatgggcaatggttgtttcaaaatataccacaaatgtgacaatgcctgcatagggtcaatcagaaatggaacttatgaccatgatgtatacagagatgaagcattaaacaaccggttccagatcaaaggtgttgagctgaagtcaggatacaaagattggatcctatggatttcctttgccatatcatgttttttgctttgtgttgctttgttggggttcatcatgtgggcctgccaaaaaggcaacattaggtgcaacatttgcatttga

SEQ ID NO: 31059 - RNA, 1701 nt, synthetic construct
  misc_feature 1..1701: note = hemagglutinin__InfluenzaA__ABC42772
  source 1..1701: mol_type = other RNA
atgaagactatcattgctttgagctacattctatgtctggttttcgctcaaaaacttcccggaaatgacaacagcacggcaacgctgtgccttgggcaccatgcagtaccaaacggaacgatagtgaaaacaatcacgaatgaccaaattgaagttactaatgctactgagctggttcagagttcctcaacaggtggaatatgcgacagtcctcatcagatccttgatggagaaaactgcacactaatagatgctctattgggagaccctcagtgtgatggcttccaaaataagaaatgggacctttttgttgaacgcagcaaagcctacagcaactgttacccttatgatgtgccggattatgcctcccttaggtcactagttgcctcatccggcacactggaatttaacaatgaaagcttcaattggactggagtcactcaaaatggaacaagctctgcttgcaaaaggagatctaataacagtttctttagtagattgaattggttgacccatttaaaattcaaatacccagcattgaacgtgactatgccaaacaatgaaaaatttgacaaattgtacatttggggggttcaccacccgggtacggacaatgaccaaatcagcctatatgctcaagcatcaggaagaatcacagtctctaccaaaagaagccaacaaactgtaatcccgaatatcggatctagacccagggtaagggatatccccagcagaataagcatctattggacaatagtaaaaccgggagacatacttttgattaacagcacagggaatctaattgctcctcggggttacttcaaaatacgaagtgggaaaagctcaataatgagatcagatgcacccattggcaaatgcaattctgaatgcatcaccccaaatggaagcattcccaatgacaaaccatttcaaaatgtaaacaggatcacatatggggcctgtcccagatatgttaagcaaaacactctgaaattggcaacagggatgcgaaatgtaccagagaaacaaactagaggcatatttggcgcaatcgcgggtttcatagaaaatggttgggagggaatggtggatggttggtacggtttcaggcatcaaaattctgagggaataggacaagcagcagatctcaaaagcactcaagcagcaatcaaccaaatcaatgggaagctgaataggttgatcgggaaaaccaacgagaaattccatcagattgaaaaagaattctcagaagtagaagggagaattcaggacctcgagaaatatgttgaggacactaaaatagatctctggtcatacaacgcggagcttcttgttgccctggagaaccaacatacaattgatctaactgactcagaaatgaacaaactgtttgaaagaacaaagaagcaactgagggaaaatgctgaggatatgggcaatggttgtttcaaaatataccacaaatgtgacaatgcctgcatagggtcaatcagaaatggaacttatgaccatgatgtatacagagatgaagcattaaacaaccggttccagatcaaaagtgttgagctgaagtcaggatacaaagattggatcctatggatttcctttgccatatcatgttttttgctttgtgttgctttgttggggttcatcatgtgggcctgccaaaaaggcaacattaggtgcaacatttgcatttga

SEQ ID NO: 31060 - RNA, 1701 nt, synthetic construct; identical to SEQ ID NO: 30822
  misc_feature 1..1701: note = hemagglutinin__InfluenzaA__ABC42783
  source 1..1701: mol_type = other RNA

SEQ ID NO: 31061 - RNA, 1701 nt, synthetic construct; identical to SEQ ID NO: 30822
  misc_feature 1..1701: note = hemagglutinin__InfluenzaA__ABC42794
  source 1..1701: mol_type = other RNA

SEQ ID NO: 31062 - RNA, 1701 nt, synthetic construct; identical to SEQ ID NO: 30822
  misc_feature 1..1701: note = hemagglutinin__InfluenzaA__ABC42805
  source 1..1701: mol_type = other RNA

SEQ ID NO: 31063 - RNA, 1701 nt, synthetic construct; identical to SEQ ID NO: 30826
  misc_feature 1..1701: note = hemagglutinin__InfluenzaA__ABC42816
  source 1..1701: mol_type = other RNA

SEQ ID NO: 31064 - RNA, 1701 nt, synthetic construct
  misc_feature 1..1701: note = hemagglutinin__InfluenzaA__ABC42827
  source 1..1701: mol_type = other RNA
atgaagactatcattgctttgagctacattctatgtctggttttcgctcaaaaacttcccggaaatgacaacagcacggcaacgctgtgccttgggcaccatgcagtaccaaacggaacgatagtgaaaacaatcacgaatgaccaaattgaagttactaatgctactgagctggttcagagttcctcaacaggtggaatatgcgacagtcctcatcagatccttgatggagaaaactgcacactaatagatgctctattgggagaccctcagtgtgatggcttccaaaataagaaatgggacctttttgttgaacgcagcaaagcctacagcaactgttacccttatgatgtgccggattatgcctcccttaggtcactagttgcctcatccggcacactggagtttaacaatgaaagcttcaattggactggagtcactcaaaatggaacaagctctgcttgcaaaaggagatctaataacagtttctttagtagattgaattggttgacccatttaaaattcaaatacccagcattgaacgtgactatgccaaacaatgaaaaatttgacaaattgtacatttggggggttcaccacccgggtacggacaatgaccaaatcagcctatatgctcaagcatcaggaagaatcacagtctctaccaaaagaagccaacaaactgtaatcccgaatatcggatctagacccagggtaagggatatccccagcagaatgagcatctattggacaatagtaaaaccgggagacatacttttgattaacagcacagggaatctaattgctcctcggggttacttcaaaatacgaagtgggaaaagctcaataatgagatcagatgcacccattggcaaatgcaattctgaatgcatcactccaaatggaagcattcccaatgacaaaccatttcaaaatgtaaacaggatcacatatggggcctgtcccagatatgttaagcaaaacactctgaaattggcaacagggatgcgaaatgtaccagagaaacaaactagaggcatatttggcgcaatcgcgggtttcatagaaaatggttgggagggaatggtggatggttggtacggtttcaggcatcaaaattctgagggaataggacaagcagcagatctcaaaagcactcaagcagcaatcaaccaaatcaatgggaagctgaataggttgatcgggaaaaccaacgagaaattccatcagattgaaaaagaattctcagaagtagaagggagaattcaggacctcgagaaatatgttgaggacactaaaatagatctctggtcatacaacgcggagcttcttgttgccctggagaaccaacatacaattgatctaactgactcagaaatgaacaaactgtttgaaagaacaaagaagcaactgagggaaaatgctgaggatatgggcaatggttgtttcaaaatataccacaaatgtgacaatgcctgcatagggtcaatcagaaatggaacttatgaccatgatgtatacagagatgaagcattaaacaaccggttccagatcaaaggtgttgagctgaagtcaggatacaaagattggatcctatggatttcctttgccatatcatgttttttgctttgtgttgctttgttggggttcatcatgtgggcctgccaaaaaggcaacattaggtgcaacatttgcatttga

SEQ ID NO: 31065 - RNA, 1701 nt, synthetic construct
  misc_feature 1..1701: note = hemagglutinin__InfluenzaA__ABC42849
  source 1..1701: mol_type = other RNA
atgaagactatcattgctttgagctacattctatgtctggttttcgctcaaaaacttcccggaaatgacaacagcacggcaacgctgtgccttgggcaccatgcagtaccaaacggaacgatagtgaaaacaatcacgaatgaccaaattgaagttactaatgctactgagctggttcagagttcctcaacaggtggaatatgcgacagtcctcatcagatccttgatggagaaaactgcacactaatagatgctctattgggagaccctcagtgtgatggcttccaaaataagaaatgggacctttttgttgaacgcagcaaagcctacagcaactgttacccttatgatgtgccggattatgcctcccttaggtcactagttgcctcatccggcacactggagtttaacaatgaaagcttcaattggactggagtcactcaaaatggaacaagctctgcttgcaaaaggagatctaataacagtttctttagtagattgaattggttgacccatttaaaattcaaatacccagcattgaacgtgactatgccaaacaatgaaaaatttgacaaattgtacatttggggggttcaccacccgggtacggacaatgaccaaatcagcctatatgctcaagcatcaggaagaatcacagtctctaccaaaagaagccaacaaactgtaatcccgaatatcggatctagacccagggtaagggatatccccagcagaataagcatctattggacaatagtgaaaccgggagacatacttttgattaacagcacagggaatctaattgctcctcggggttacttcaaaatacgaagtgggaaaagctcaataatgagatcagatgcacccattggcaaatgcaattctgaatgcatcactccaaatggaagcattcccaatgacaaaccatttcaaaatgtaaacaggatcacatatggggcctgtcccagatatgttaagcaaaacactctgaaattggcaacagggatgcgaaatgtaccagagaaacaaactagaggcatatttggcgcaatcgcgggtttcatagaaaatggttgggagggaatggtggatggttggtacggtttcaggcatcaaaattctgagggaataggacaagcagcagatctcaaaagcactcaagcagcaatcaaccaaatcaatgggaagctgaataggttgatcgggaaaaccaacgagaaattccatcagattgaaaaagaattctcagaagtagaagggagaattcaggacctcgagaaatatgttgaggacactaaaatagatctctggtcatacaacgcggagcttcttgttgccctggagaaccaacatacaattgatctaactgactcagaaatgaacaaactgtttgaaagaacaaagaagcaactgagggaaaatgctgaggatatgggcaatggttgtttcaaaatataccacaaatgtgacaatgcctgcatagggtcaatcagaaatggaacttatgaccatgatgtatacagagatgaagcattaaacaaccggttccagatcaaaggtgttgagctgaagtcaggatacaaagattggatcctatggatttcctttgccatatcatgttttttgctttgtgttgctttgttggggttcatcatgtgggcctgccaaaaaggcaacattaggtgcaacatttgcatttga

SEQ ID NO: 31066 - RNA, 1701 nt, synthetic construct
  misc_feature 1..1701: note = hemagglutinin__InfluenzaA__ABC42882
  source 1..1701: mol_type = other RNA
atgaagactatcattgctttgagctacattttatgcctggttttcgctcaaaaacttcccggaaatgacaacagcacggcaacgctgtgtctggggcatcatgcagtgccaaacggaacgctagtgaaaacaatcacgaatgaccaaattgaagtaactaatgctactgagctggttcagagttcctcaacaggtagaatatgcgacagtcctcaccaaatccttgatggagaaaactgcacactaatagatgctctattgggagaccctcattgtgatggcttccaaaataaggaatgggacctttttgttgaacgcagcaaagcctacagcaactgttacccttatgatgtgccggattatgtctcccttaggtcactagttgcctcatcaggcacgctggagtttaacaatgaaagcttcaattggactggagtcgctcagaatggaacaagctctgcttgcaaaaggagatctgataaaagtttctttagtagattgaattggttgcaccaattaaaatacaaatatccagcactgaacgtgactatgccaaacaatgaaaaatttgacaaattgtacatttggggggttcaccacccgggtacagacagtgaccaaatcagcctatatgctcaagcatcggggagagtcacagtctctaccaaaagaagccaacaaactgtaatcccgaatatcggatctagaccctgggtaaggggtgtctccagcagaataagcatctattggacaatagtaaaaccgggagacatacttttgattaacagcacagggaatctaattgctcctcggggttacttcaaaatacgaagtgggaaaagctcaataatgaggtcagatgcacccattggcaaatgcaattctgaatgcatcactccaaatggaagcattcccaatgacaaaccatttcaaaatgtaaacaggatcacatatggggcctgtcccagatatgttaagcaaaacactctgaaattggcaacagggatgcggaatgtgccagagaaacaaactagaggcatattcggtgcaatcgcgggcttcatagaaaatggttgggagggaatgatggacggttggtacggtttcaggcatcaaaattctgagggcacagggcaagcagcagatcttaaaagcactcaagcagcaatcaaccaaatcaacgggaaactgaataggttaatcgagaaaacgaacgagaaattccatcaaattgaaaaagaattctcagaagtagaagggagaattcaggacctcgagaaatatgttgaggacactaaaatagatctctggtcgtacaatgcggagcttcttgttgccctggagaaccaacatacaattgatctaactgactcagaaatgaacaaactgtttgaaagaacaaagaagcaactgagggaaaatgctgaggatatgggcaatggttgtttcaaaatataccacaaatgtgacaatgcctgcatagggtcaatcagaaatggaacttatgaccatgatgtatacagagacgaagcattgaacaaccggttccagatcaaaggtgttgagctgaagtcaggatacaaagattgggtcctatggatttcctttgccatatcatgttttttgctttgtattgttttgctggggttcatcatgtgggcctgccaaaaaggcaacattaggtgcaacatttgcatttga

SEQ ID NO: 31067 - RNA, 1701 nt, synthetic construct; identical to SEQ ID NO: 31066
  misc_feature 1..1701: note = hemagglutinin__InfluenzaA__ABC42893
  source 1..1701: mol_type = other RNA

SEQ ID NO: 31068 - RNA, 1701 nt, synthetic construct
  misc_feature 1..1701: note = hemagglutinin__InfluenzaA__ABC42929
  source 1..1701: mol_type = other RNA
atgaagactatcattgctttgagctacattctatgcctggttttcgctcaaaaacttcccggaaatgacaacagcacggcaacgctgtgccttgggcaccatgcagtaccaaacggaacgatagtgaaaacaatcacaaatgaccaaattgaagttactaatgctactgagctggttcagagttcctcaacaggtggaatatgcgacagtcctcatcagatccttgatggagaaaactgcacactaatagatgctctattgggagaccctcagtgtgatggcttccaaaataagaaatgggacctttttgttgaacgcagcaaagcctacagcaactgttacccttatgatgtgccggatcatgcctcccttaggtcactagttgcctcatccggcacactggagtttaacaatgaaagcttcgattggactggagtcactcagaatggaacaagctctgcttgcaaaaggagatctaataaaagtttctttagtagattgaattggttgacccacttaaaatacaaatacccagcattgaacgtgactatgccaaacaatgaaaaatttgacaaattgtacatttggggggttcaccacccgggtacggacagtgaccaaatcagcctatatgctcaagcatcaggaagaatcacagtctctaccaaaagaagccaacaaactgtaatcccgaatatcggatctagacccagggtaagggatgtctccagccgaataagcatctattggacaatagtaaaaccgggagacatacttttgattaacagcacagggaatctaattgctcctcggggttacttcaaaatacgaagtgggaaaagctcaataatgagatcagatgcacccattggcaaatgcaattctgaatgcatcactccaaatggaagcattcccaatgacaaaccatttcaaaatgtaaacaggatcacatatggggcctgtcccagatatgttaagcaaaacactctgaaattggcaacagggatgcgaaatgtaccagagaaacaaactagaggcatatttggcgcaatcgcgggtttcatagaaaatggttgggagggaatggtggacggttggtacggtttcaggcatcaaaattctgagggcacaggacaagcagcagatctcaaaagcactcaagcagcaatcaaccaaatcaatgggaaactgaataggttaatcgggaaaacaaacgagaaattccatcagattgaaaaagaattctcagaagtagaagggagaattcaggacctcgagaaatatgttgaggacactaaaatagatctctggtcatacaacgcggagcttcttgttgccctggagaaccaacatacaattgatctaactgactcagaaatgaacaaactgtttgaaagaacaaagaaacaactgagggaaaatgctgaggatatgggcaatggttgtttcaaaatataccacaaatgtgacaatgcctgcatagggtcaatcagaaatggaacttatgaccatgatgtgtacagagatgaagcattaaacaaccggttccagatcaaaggtgttgagctgaagtcaggatataaagattggatcctatggatttcctttgccatatcatgttttttgctttgtgttgctttgttggggttcatcatgtgggcctgccaaaaaggcaacattaggtgcaacatttgcatttga

SEQ ID NO: 31069 - RNA, 1701 nt, synthetic construct; identical to SEQ ID NO: 31024
  misc_feature 1..1701: note = hemagglutinin__InfluenzaA__ABC42940
  source 1..1701: mol_type = other RNA

SEQ ID NO: 31070 - RNA, 1701 nt, synthetic construct; identical to SEQ ID NO: 31024
  misc_feature 1..1701: note = hemagglutinin__InfluenzaA__ABC42951
  source 1..1701: mol_type = other RNA

SEQ ID NO: 31071 - RNA, 1701 nt, synthetic construct; identical to SEQ ID NO: 31024
  misc_feature 1..1701: note = hemagglutinin__InfluenzaA__ABC42962
  source 1..1701: mol_type = other RNA

SEQ ID NO: 31072 - RNA, 1701 nt, synthetic construct; identical to SEQ ID NO: 31020
  misc_feature 1..1701: note = hemagglutinin__InfluenzaA__ABC42973
  source 1..1701: mol_type = other RNA

SEQ ID NO: 31073 - RNA, 1701 nt, synthetic construct
  misc_feature 1..1701: note = hemagglutinin__InfluenzaA__ABC42995
  source 1..1701: mol_type = other RNA
atgaagactatcattgctttgagctacattctatgtctggttttcgctcaaaaacttcccggaaatgacaacagcacggcaacgctgtgccttgggcaccatgcagtaccaaacggaacgatagtgaaaacaatcacaaatgaccaaattgaagttactaatgctactgagctggttcagagttcctcaacaggtggaatatgcgacagtcctcatcagattcttgatggagaaaactgcacactaatagatgctctattgggagaccctcagtgtgatggcttccaaaataagaaatgggacctttttgttgaacgcagcaaagcctacagcaactgttacccttatgatgtgccggatcatgcctcccttaggtcactagttgcctcatccggcacactggagtttaacaatgaaagcttcgattggactggagtcactcagaatggaacaagctctgcttgcaaaaggagatctaataaaagtttctttagtagattgaattggttgacccacttaaaatacaaatacccagcattgaacgtgactatgccaaacaatgaaaaatttgacaaattgtacatttggggggttcaccacccgggtacggacagtgaccaaatcagcctatatgctcaagcatcaggaagaatcacagtctctaccaaaagaagccaacaaactgtaatcccgaatatcggatctagacccagggtaagggatgtctccagccgaataagcatctattggacaatagtaaaaccgggagacatacttttgattaacagcacagggaatctaattgctcctcggggttacttcaaaatacgaagtgggaaaagctcaataatgagatcagatgcacccattggcaaatgcaattctgaatgcatcactccaaatggaagcattcccaatgacaaaccatttcaaaatgtaaacaggatcacatatggggcctgtcccagatatgttaagcaaaacactctgaaattggcaacagggatgcgaaatgtaccagagaaacaaactagaggcatatttggcgcaatcgcgggtttcatagaaaatggttgggagggaatggtggacggttggtacggtttcaggcatcaaaattctgagggcacaggacaagcagcagatctcaaaagcactcaagcagcaatcaaccaaatcaatgggaaactgaataggttaatcgggaaaacaaacgagaaattccatcagattgaaaaagaattctcagaagtagaagggagaattcaggacctcgagaaatatgttgaggacactaaaatagatctctggtcatacaacgcggagcttcttgttgccctggagaaccaacatacaattgatctaactgactcagaaatgaacaaactgtttgaaagaacaaagaagcaactgagggaaaatgctgaggatatgggcaatggttgtttcaaaatataccacaaatgtgacaatgcctgcatagggtcaatcagaaatggaacttatgaccatgatgtgtacagagatgaagcattaaacaaccggttccagatcaaaggtgttgagctgaagtcaggatataaagattggatcctatggatttcctttgccatatcatgttttttgctttgtgttgctttgttggggttcatcatgtgggcctgccaaaaaggcaacattaggtgcaacatttgcatttga

SEQ ID NO: 31074 - RNA, 1701 nt, synthetic construct
  misc_feature 1..1701: note = hemagglutinin__InfluenzaA__ABC43006
  source 1..1701: mol_type = other RNA
atgaagactatcattgctttgagctacattctatgtctggttttcgctcaaaaacttcccggaaatgacaacagcacggcaacgctgtgccttgggcaccatgcagtaccaaacggaacgatagtgaaaacaatcacaaatgaccaaattgaagttactaatgctactgagctggttcagagttcctcaacaggtggaatatgcgacagtcctcatcagatccttgatggagaaaactgcacactaatagatgctctattgggagaccctcagtgtgatggcttccaaaataagaaatgggacctttttgttgaacgcagcaaagcctacagcaactgttacccttatgatgtgccggatcatgcctcccttaggtcactagttgcctcatccggcacactggagtttaacaatgaaagcttcgattggactggagtcactcagaatggaacaagctctgcttgcaaaaggagatctaataaaagtttctttagtagattgaattggttgacccacttaaaatacaaatacccagcattgaacgtgactatgccaaacaatgaaaaatttgacaaattgtacatttggggggttcaccacccgggtacggacagtgaccaaatcagcctatatgctcaagcatcaggaagaatcacagtctctaccaaaagaagccaacaaactgtaatcccgaatatcggatctagacccagggtaagggatgtctccagccgaataagcatctattggacaatagtaaaaccgggagacatacttttgattaacagcacagggaatctaattgctcctcggggttacttcaaaatacgaagtgggaaaagctcaataatgagatcagatgcacccattggcaaatgcaattctgaatgcatcactccaaatggaagcattccaaatgacaaaccatttcaaaatgtaaacaggatcacatatggggcctgccccagatatgttaagcaaaacactctgaaattggcaacagggatgcgaaatgtaccagagaaacaaactagaggcatatttggcgcaatcgcgggtttcatagaaaatggttgggagggaatggtggacggttggtacggtttcaggcatcaaaattctgagggcacaggacaagcagcagatctcaaaagcactcaagcagcaatcaaccaaatcaatgggaaactgaataggttaatcgggaaaacaaacgagaaattccatcagattgaaaaagaattctcagaagtagaagggagaattcaggacctcgagaaatatgttgaggacactaaaatagatctctggtcatacaacgcggagcttcttgttgccctggagaaccaacatacaattgatctaactgactcagaaatgaacaaactgtttgaaagaacaaagaagcaactgagggaaaatgctgaggatatgggcaatggttgtttcaaaatataccacaaatgtgacaatgcctgcatagggtcaatcagaaatggaacttatgaccatgatgtgtacagagatgaagcattaaacaaccggttccagatcaaaggtgttgagctgaagtcaggatataaagattggatcctatggatttcctttgccatatcatgttttttgctttgtgttgctttgttggggttcatcatgtgggcctgccaaaaaggcaacattaggtgcaacatttgcatttga

SEQ ID NO: 31075 - RNA, 1701 nt, synthetic construct
  misc_feature 1..1701: note = hemagglutinin__InfluenzaA__ABC43028
  source 1..1701: mol_type = other RNA
atgaagactatcattgctttgagctacattctatgtctggttttcgctcaaaaacttcccggaaatgacaacagcacggcaacgctgtgccttgggcaccatgcagtaccaaacggaacgatagtgaaaacaatcacaaatgaccaaattgaagttactaatgctactgagctggttcagagttcctcaacaggtggaatatgcgacagtcctcatcagatccttgatggagaaaactgcacactaatagatgctctattgggagaccctcagtgtgatggcttccaaaataagaaatgggacctttttgttgaacgcagcaaagcctacagcaactgttacccttatgatgtgccggatcatgcctcccttaggtcactagttgcctcatccggcacactggagtttaacaatgaaagcttcgattggactggagtcactcagaatggaacaagctctgcttgcaaaaggagatctaataaaagtttctttagtagattgaattggttgacccacttaaaatacaaatacccagcattgaacgtgactatgccaaacaatgaaaaatttgacaaattgtacatttggggggttcaccacccgggtacggacagtgaccaaatcagcctatatgctcaagcatcaggaagaatcacagtctctaccaaaagaagtcaacaaactgtaatcccgaatatcggatctagacccagggtaagggatgtctccagccgaataagcatctattggacaatagtaaaaccgggagacatacttttgattaacagcacagggaatctaattgctcctcggggttacttcaaaatacgaagtgggaaaagctcaataatgagatcagatgcacccattggcaaatgcaattctgaatgcatcactccaaatggaagcattcccaatgacaaaccatttcaaaatgtaaacaggatcacatatggggcctgtcccagatatgttaagcaaaacactctgaaattggcaacagggatgcgaaatgtaccagagaaacaaactagaggcatatttggcgcaatcgcgggtttcatagaaaatggttgggagggaatggtggacggttggtacggtttcaggcatcaaaattctgagggcacaggacaagcagcagatctcaaaagcactcaagcagcaatcaaccaaatcaatgggaaactgaataggttaatcgggaaaacaaacgagaaattccatcagattgaaaaagaattctcagaagtagaagggagaattcaggacctcgagaaatatgttgaggacactaaaatagatctctggtcatacaacgcggagcttcttgttgccctggagaaccaacatacaattgatctaactgactcagaaatgaacaaactgtttgaaagaacaaagaagcaactgagggaaaatgctgaggatatgggcaatggttgtttcaaaatataccacaaatgtgacaatgcctgcatagggtcaatcagaaatggaacttatgaccatgatgtgtacagagatgaagcattaaacaaccggttccagatcaaaggtgttgagctgaagtcaggatataaagattggatcctatggatttcctttgccatatcatgttttttgctttgtgttgctttgttggggttcatcatgtgggcctgccaaaaaggcaacattaggtgcaacatttgcatttga

SEQ ID NO: 31076 - RNA, 1701 nt, synthetic construct; identical to SEQ ID NO: 31024
  misc_feature 1..1701: note = hemagglutinin__InfluenzaA__ABC43039
  source 1..1701: mol_type = other RNA

SEQ ID NO: 31077 - RNA, 1701 nt, synthetic construct
  misc_feature 1..1701: note = hemagglutinin__InfluenzaA__ABC43050
  source 1..1701: mol_type = other RNA
atgaagactatcattgctttgagctacattctatgtctggttttcgctcaaaaacttcccggaaatgacaacagcacggcaacgctgtgccttgggcaccatgcagtaccaaacggaacgatagtgaaaacaatcacaaatgaccaaattgaagttactaatgctactgagctggttcagagttcctcaacaggtggaatatgcgacagtcctcatcagatccttgatggagaaaactgcacactaatagatgctctattgggagaccctcagtgtgatggcttccaaaataagaaatgggacctttttgttgaacgcagcaaagcctacagcaactgttacccttatgatgtgccggatcatgcctcccttaggtcactagttgcctcatccggcacactggagtttaacaatgaaagcttcgattggactggagtcactcagaatggaacaagctctgcttgcaaaaggagatctaataaaagtttctttagtagattgaattggttgacccacttaaaatacaaatacccagcattgaacgtgactatgccaaacaatgaaaaatttgacaaattgtacatttggggggttcaccacccgggtacggacagtgaccaaatcagcctatatgctcaagcatcaggaagaatcacagtctctaccaaaagaagccaacaaactgtaatcccgaatatcggatctagacccagggtaagggatgtctccagccgaataagcatctattggacaatagtaaaaccaggagacatacttttgattaacagcacagggaatctaattgctcctcggggttacttcaaaatacgaagtgggaaaagctcaataatgagatcagatgcacccattggcaaatgcaattctgaatgcatcactccaaatggaagcattcccaatgacaaaccatttcaaaatgtaaacaggatcacatatggggcctgtcccagatatgttaagcaaaacactctgaaattggcaacagggatgcgaaatgtaccagagaaacaaactagaggcatatttggcgcaatcgcgggtttcatagaaaatggttgggagggaatggtggacggttggtacggtttcaggcatcaaaattctgagggcacaggacaagcagcagatctcaaaagcactcaagcagcaatcaaccaaatcaatgggaaactgaataggttaatcgggaaaacaaacgagaaattccatcagattgaaaaagaattctcagaagtagaagggagaattcaggacctcgagaaatatgttgaggacactaaaatagatctctggtcatacaacgcggagcttcttgttgccctggagaaccaacatacaattgatctaactgactcagaaatgaacaaactgtttgaaagaacaaagaagcaactgagggaaaatgctgaggatatgggcaatggttgtttcaaaatataccacaaatgtgacaatgcctgcatagggtcaatcagaaatggaacttatgaccatgatgtgtacagagatgaagcattaaacaaccggttccagatcaaaggtgttgagctgaagtcaggatataaagattggatcctatggatttcctttgccatatcatgttttttgctttgtgttgctttgttggggttcatcatgtgggcctgccaaaaaggcaacattaggtgcaacatttgcatttga

SEQ ID NO: 31078 - RNA, 1701 nt, synthetic construct; identical to SEQ ID NO: 31024
  misc_feature 1..1701: note = hemagglutinin__InfluenzaA__ABC43061
  source 1..1701: mol_type = other RNA

SEQ ID NO: 31079 - RNA, 1701 nt, synthetic construct
  misc_feature 1..1701: note = hemagglutinin__InfluenzaA__ABC43072
  source 1..1701: mol_type = other RNA
atgaagactatcattgctttgagctacattctatgtctggttttcgctcaaaaacttcccggaaatgacaacagcacggcaacgctgtgccttgggcaccatgcagtaccaaacggaacgatagtgaaaacaatcacaaatgaccaaattgaagttactaatgctactgagctggttcagagttcctcaacaggtggaatatgcgacagtcctcatcagatccttgatggagaaaactgcacactaatagatgctctattgggagaccctcagtgtgatggcttccaaaataagaaatgggacctttttgttgaacgcagcaaagcctacagcaactgttacccttatgatgtgccggatcatgcctcccttaggtcactagttgcctcatccggcacactggagtttaacaatgaaagcttcgattggactggagtcactcagaatggaacaagctctgcttgcaaaaggagatctaataaaagtttctttagtagattgaattggttgacccacttaaaatacaaatacccagcattgaacgtgactatgccaaacaatgaaaaatttgacaaattgtacatttggggggttcaccacccgggtacggacagtgaccaaatcagcctatatgctcaagcatcaggaagaatcacagtctctaccaaaagaagccaacaaactgtaatcccgaatatcggatctagacccagggtaagggatgtctccagccgaataagcatctattggacaatagtaaaaccgggagacatacttttgattaacagcacagggaatctaattgctcctcggggttacttcaaaatacgaagtgggaaaagctcaataatgagatcagatgcacccattggcaaatgcaattctgaatgcatcactccaaatggaagcattcccaatgacaaaccatttcaaaatgtaaacaggatcacatatggggcctgtcccagatatgttaagcaaaacactctgaaattggcaacagggatgcgaaatgtaccagagaaacaaactagaggcatatttggcgcaatcgcgggtttcatagaaaatggttgggagggaatggtggacggttggtacggtttcaggcatcaaaattctgagggcacaggacaagcagcagatctcaaaagcactcaagcagcaatcaaccaaatcaatgggaaactgaataggttaatcgggaaaacaaacgagaaattccatcagattgaaaaagaattctcagaagtagaagggagaattcaggacctcgagaaatatgttgaggacactaaaatagatctctggtcatacaacgcggagcttcttgttgccctggagaaccaacatacaattgatctaactgactcagaaatgaacaaactgtttgaaaaaacaaagaagcaactgagggaaaatgctgaggatatgggcaatggttgtttcaaaatataccacaaatgtgacaatgcctgcataggctcaatcagaaatggaacttatgaccatgatgtgtacagagatgaagcattaaacaaccggttccagatcaaaggtgttgagctgaagtcaggatataaagattggatcctatggatttcctttaccatatcatgttttttgctttgtgttgctttgttggggttcatcatgtgggcctgccaaaaaggcaacattaggtgcaacatttgcatttga

SEQ ID NO: 31080 - RNA, 1701 nt, synthetic construct; identical to SEQ ID NO: 31020
  misc_feature 1..1701: note = hemagglutinin__InfluenzaA__ABC43083
  source 1..1701: mol_type = other RNA

SEQ ID NO: 31081 - RNA, 1701 nt, synthetic construct
  misc_feature 1..1701: note = hemagglutinin__InfluenzaA__ABC43094
  source 1..1701: mol_type = other RNA
atgaagactatcattgctttgagctacattctatgtctggttttcgctcaaaaacttcccggaaatgacaacagcacggcaacgctgtgccttgggcaccatgcagtaccaaacggaacgatagtgaaaacaatcacaaatgaccaaattgaagttactaatgctactgagttggttcagagttcctcaacaggtggaatatgcgacagtcctcatcagatccttgatggagaaaactgcacactaatagatgctctattgggagaccctcagtgtgatggcttccaaaataagaaatgggacctttttgttgaacgcagcaaagcctacagcaactgttacccttatgatgtgccggatcatgcctcccttaggtcactagttgcctcatccggcacactggagtttaacaatgaaagcttcgattggactggagtcactcagaatggaacaagctctgcttgcaaaaggagatctaataaaagtttctttagtagattgaattggttgacccacttaaaatacaaatacccagcattgaacgtgactatgccaaacaatgaaaaatttgacaaattgtacatttggggggttcaccacccgggtacggacagtgaccaaatcagcctatatgctcaagcatcaggaagaatcacagtctctaccaaaagaagccaacaaactgtaatcccgaatatcggatctagacccagggtaagggatgtctccagccgaataagcatctattggacaatagtaaaaccgggagacatacttttgattaacagcacagggaatctaattgctcctcggggttacttcaaaatacgaagtgggaaaagctcaataatgagatcagatgcacccattggcaaatgcaattctgaatgcatcactccaaatggaagcattcccaatgacaaaccatttcaaaatgtaaacaggatcacatatggggcctgtcccagatatgttaagcaaaacactctgaaattggcaacagggatgcgaaatgtaccagagaaacaaactagaggcatatttggcgcaatcgcgggtttcatagaaaatggttgggagggaatggtggacggttggtacggtttcaggcatcaaaattctgagggcacaggacaagcagcagatctcaaaagcactcaagcagcaatcaaccaaatcaatgggaaactgaataggttaatcgggaaaacaaacgagaaattccatcagattgaaaaagaattctcagaagtagaagggagaattcaggacctcgagaaatatgttgaggacactaaaatagatctctggtcatacaacgcggagcttcttgttgccctggagaaccaacatacaattgatctaactgactcagaaatgaacaaactgtttgaaagaacaaagaagcaactgagggaaaatgctgaggatatgggcaatggttgtttcaaaatataccacaaatgtgacaatgcctgcatagggtcaatcagaaatggaacttatgaccatgatgtgtacagagatgaagcattaaacaaccggttccagatcaaaggtgttgagctgaagtcaggatataaagattggatcctatggatttcctttgccatatcatgttttttgctttgtgttgctttgttggggttcatcatgtgggcctgccaaaaaggcaacattaggtgcaacatttgcatttga

SEQ ID NO: 31082 - RNA, 1701 nt, synthetic construct; identical to SEQ ID NO: 31074
  misc_feature 1..1701: note = hemagglutinin__InfluenzaA__ABC43116
  source 1..1701: mol_type = other RNA

SEQ ID NO: 31083 - RNA, 1701 nt, synthetic construct; identical to SEQ ID NO: 30822
  misc_feature 1..1701: note = hemagglutinin__InfluenzaA__ABC43127
  source 1..1701: mol_type = other RNA

SEQ ID NO: 31084 - RNA, 1701 nt, synthetic construct
  misc_feature 1..1701: note = hemagglutinin__InfluenzaA__ABC43138
  source 1..1701: mol_type = other RNA
atgaagactatcattgctttgagctacattctatgtctggttttcgctcaaaaacttcccggaaatgacaacagcacggcaacactgtgccttgggcaccatgcagtaccaaacggaacgatagtgaaaacaatcacgaatgaccaaattgaagttactaatgctactgagctggttcagagttcctcaacaggtggaatatgcgacagtcctcatcagatccttgatggagaaaactgcacactaatagatgctctattgggagaccctcagtgtgatggcttccaaaataagaaatgggacctttttgttgaacgcagcaaagcctacagcaactgttacccttatgatgtgccggattatgcctcccttaggtcactagttgcctcatccggcacactggagtttaacaatgaaagcttcaattggactggagtcactcaaaatggaacaagctctgcttgcaaaaggagatctaataacagtttctttagtagattgaattggttgacccatttaaaattcaaatacccagcattgaacgtgactatgccaaacaatgaaaaatttgacaaattgtacatttggggggttcaccacccgggtacgaacaatgaccaaatcagcctatatgctcaagcatcaggaagaatcacagtctctaccaaaagaagccaacaaactgtaatcccgaatatcggatctagacccagggtaagggatatccccagcagaataagcatctattggacaatagtaaaaccgggagacatacttttgattaacagcacagggaatctaattgctcctcggggttacttcaaaatacgaagtgggaaaagctcaataatgagatcagatgcacccattggcaaatgcaattctgaatgcatcactccaaatggaagcattcccaatgacaaaccattccaaaatgtaaacaggatcacatatggggcctgtcccagatatgttaagcaaaacactctgaaattggcaacagggatgcgaaatgtaccagagaaacaaactagaggaatatttggcgcaatcgcgggtttcatagaaaatggttgggagggaatggtggatggttggtacggtttcaggcatcaaaattctgagggaataggacaagcagcagatctcaaaagcactcaagcagcaatcaaccaaatcaatgggaagctgaataggttgatcgggaaaaccaacgagaaattccatcagattgaaaaagaattctcagaagtagaagggagaattcaggacctcgagaaatatgttgaggacactaaaatagatctctggtcatacaacgcggagcttcttgttgccctggagaaccaacatacaattgatctaactgactcagaaatgaacaaactgtttgaaagaacaaagaagcaactgagggaaaatgctgaggatatgggcaatggttgtttcaaaatataccacaaatgtgacaatgcctgcatagggtcaatcagaaatggaacttatgaccatgatgtgtacagagatgaagcattaaacaaccggttccagatcaaaggtgttgagctgaagtcaggatacaaagattggatcctatggatttcctttgccatatcatgttttttgctttgtgttgctttgttggggttcatcatgtgggcctgccaaaaaggcaacattaggtgcaacatttgcatttga

SEQ ID NO: 31085 - RNA, 1701 nt, synthetic construct; identical to SEQ ID NO: 30822
  misc_feature 1..1701: note = hemagglutinin__InfluenzaA__ABC43149
  source 1..1701: mol_type = other RNA

SEQ ID NO: 31086 - RNA, 1701 nt, synthetic construct; identical to SEQ ID NO: 30822
  misc_feature 1..1701: note = hemagglutinin__InfluenzaA__ABC43160
  source 1..1701: mol_type = other RNA

SEQ ID NO: 31087 - RNA, 1701 nt, synthetic construct; identical to SEQ ID NO: 30822
  misc_feature 1..1701: note = hemagglutinin__InfluenzaA__ABC43171
  source 1..1701: mol_type = other RNA

SEQ ID NO: 31088 - RNA, 1701 nt, synthetic construct; identical to SEQ ID NO: 30822
  misc_feature 1..1701: note = hemagglutinin__InfluenzaA__ABC43182
  source 1..1701: mol_type = other RNA

SEQ ID NO: 31089 - RNA, 1701 nt, synthetic construct
  misc_feature 1..1701: note = hemagglutinin__InfluenzaA__ABC43475
  source 1..1701: mol_type = other RNA
atgaagactatcattgctttgagctacattctatgtctggttttcgctcaaaaacttcccggaaatgacaacagcacggcaacgctgtgccttgggcaccatgcagtaccaaacggaacgacagtgaaaacaatcacgaatgaccaaattgaagttactaatgctactgagctggttcagagttcctcaacaggtggaatatgcgacagtcctcatcagatccttgatggagaaaactgcacactaatagatgctctattgggagaccctcagtgtgatggcttccaaaataagaaatgggacctttttgttgaacgcagcaaagcctacagcaactgttacccttatgatgtgccggattatgcctcccttaggtcactagttgcctcatccggcacactggagtttaacaatgaaagcttcaattggactggagtcactcaaaatggaacaagctctgcttgcaaaaggagatctaataacagtttctttagtagattgaattggttgacccatttaaaattcaaatacccagcattgaacgtgactatgccaaacaatgaaaaatttgacaaattgtacatttggggggttcaccacccgggtacggacaatgaccaaatcagcctatatgctcaagcatcaggaagaatcacagtctctaccaaaagaagccaacaaactgtaatcccgaatatcggatctagacccagggtaagggatatccccagcagaataagcatctattggacaatagtaaaaccgggagacatacttttgattaacagcacagggaatctaattgctcctcggggttacttcaaaatacgaagtgggaaaagctcaataatgagatcagatgcacccattggcaaatgcaattctgaatgcatcactccaaatggaagcattcccaatgacaaaccatttcaaaatgtaaacaggatcacatatggggcctgtcccagatatgttaagcaaaacactctgaaattggcaacagggatgcgaaatgtaccagagaaacaaactagaggcatatttggcgcaatcgcgggtttcatagaaaatggttgggagggaatggtggatggttggtacggtttcaggcatcaaaattctgagggaataggacaagcagcagatctcaaaagcactcaagcagcaatcaaccaaatcaatgggaagctgaataggttgatcgggaaaaccaacgagaaattccatcagattgaaaaagaattctcagaagtagaagggagaattcaggacctcgagaaatatgttgaggacactaaaatagatctctggtcatacaacgcggagcttcttgttgccctggagaaccaacatacaattgatctaactgactcagaaatgaacaaactgtttgaaagaacaaagaagcaactgagggaaaatgctgaggatatgggcaatggttgtttcaaaatataccacaaatgtgacaatgcctgcatagggtcaatcagaaatggaacttatgaccatgatgtatacagagatgaagcattaaacaaccggttccagatcaaaggtgttgagctgaagtcaggatacaaagattggatcctatggatttcctttgccatatcatgttttttgctttgtgttgctttgttggggttcatcatgtgggcctgccaaaaaggcaacattaggtgcaacatttgcatttga

SEQ ID NO: 31090 - RNA, 1701 nt, synthetic construct; identical to SEQ ID NO: 30822
  misc_feature 1..1701: note = hemagglutinin__InfluenzaA__ABC43486
  source 1..1701: mol_type = other RNA

SEQ ID NO: 31091 - RNA, 1701 nt, synthetic construct; identical to SEQ ID NO: 30822
  misc_feature 1..1701: note = hemagglutinin__InfluenzaA__ABC43497
  source 1..1701: mol_type = other RNA

SEQ ID NO: 31092 - RNA, 1701 nt, synthetic construct
  misc_feature 1..1701: note = hemagglutinin__InfluenzaA__ABC43508
  source 1..1701: mol_type = other RNA
atgaagactatcattgctttgagctacattctatgtctggttttcgctcaaaaacttcccggaaatgacaacagcacggcaacgctgtgccttgggcaccatgcagtaccaaacggaacgatagtgaaaacaatcacgaatgaccaaattgaagttactaatgctactgagctggttcagagttcctcaacaggtggaatatgcgacagtcctcatcagatccttgatggagaaaactgcacactaatagatgctctattgggagaccctcagtgtgatggcttccaaaataagaaatgggacctttttgttgaacgcagcaaagcctacagcaactgttacccttatgatgtgccggattatgcctcccttaggtcactagttgcctcatccggcacactggagtttaacaatgaaagcttcaattggactggagtcactcaaaatggaacaagctctgcttgcaaaaggagatctaataacagtttctttagtagattgaattggttgacccatttaaaattcaaatacccagcattgaacgtgactatgccaaacaatgaaaaatttgacaaattgtacatttggggggttcaccacccgggtacgaacaatgaccaaatcagcctatatgctcaagcatcaggaagaatcacagtctctaccaaaagaagccaacaaactgtaatcccgaatatcggatctagacccagggtaagggatatccccagcagaataagcatctattggacaatagtaaaaccgggagacatacttttgattaacagcacagggaatctaattgctcctcggggttacttcaaaatacgaagtgggaaaagctcaataatgagatcagatgcacccattggcaaatgcaattctgaatgcatcactccaaatggaagcattcccaatgacaaaccatttcaaaatgtaaacaggatcacatatggggcctgtcccagatatgttaagcaaaacactctgaaattggcaacagggatgcgaaatgtaccagagaaacaaactagaggcatatttggcgcaatcgcgggtttcatagaaaatggttgggagggaatggtggatggttggtacggtttcaggcatcaaaattctgagggaataggacaagcagcagatctcaaaagcactcaagcagcaatcaaccaaatcaatgggaagctgaataggttgatcgggaaaaccaacgagaaattccatcagattgaaaaagaattctcagaagtagaagggagaattcaggacctcgagaaatatgttgaggacactaaaatagatctctggtcatacaatgcggagcttcttgttgccctggagaaccaacatacaattgatctaactgactcagaaatgaacaaactgtttgaaagaacaaagaagcaactgagggaaaatgctgaggatatgggcaatggttgtttcaaaatataccacaaatgtgacaatgcctgcatagggtcaatcagaaatggaacttatgaccatgatgtatacagagatgaagcattaaacaaccggttccagatcaaaggtgttgagctgaagtcaggatacaaagattggatcctatggatttcctttgccatatcatgttttttgctttgtgttgctttgttggggttcatcatgtgggcctgccaaaaaggcaacattaggtgcaacatttgcatttga

SEQ ID NO: 31093 - RNA, 1701 nt, synthetic construct; identical to SEQ ID NO: 30826
  misc_feature 1..1701: note = hemagglutinin__InfluenzaA__ABC43519
  source 1..1701: mol_type = other RNA

SEQ ID NO: 31094 - RNA, 1701 nt, synthetic construct; identical to SEQ ID NO: 30824
  misc_feature 1..1701: note = hemagglutinin__InfluenzaA__ABC43530
  source 1..1701: mol_type = other RNA

SEQ ID NO: 31095 - RNA, 1701 nt, synthetic construct
  misc_feature 1..1701: note = hemagglutinin__InfluenzaA__ABC43552
  source 1..1701: mol_type = other RNA
atgaagactatcattgctttgagctacattctatgtctggttttcgctcaaaaacttcccggaaatgacaacagcacggcaacgctgtgccttgggcaccatgcagtaccaaacggaacgatagtgaaaacaatcacgaatgaccaaattgaagttactaatgctactgagctggttcagagttcatcaacaggtggaatatgcgacagtcctcatcagatccttgatggagaaaactgcacactaatagatgctctattgggagaccctcagtgtgatggcttccaaaataagaaatgggacctttttgttgaacgcagcaaagcctacagcaactgttacccttatgatgtgccggattatgcctcccttaggtcactagttgcctcatccggcacactggagtttaacaatgaaagcttcaattggactggagtcactcaaaatggaacaagctctgcttgcaaaaggagatctaataacagtttctttagtagattgaattggttgacccacttaaaattcaaatacccagcattgaacgtgactatgccaaacaatgaaaaatttgacaaattgtacatttggggggttcaccacccgggtacggacaatgaccaaatcagcctatatgctcaagcaccaggaagaatcacagtctccaccaaaagaagccaacaaactgtaatcccgaatatcggatctagacccagggtaagggatatccccagcagaataagcatctattggacaatagtaaaaccgggagacatacttttgattaacagcacagggaatctaattgctcctcggggttacttcaaaatacgaagtgggaaaagctcaataatgagatcagatgcacccattggcaaatgcaattctgaatgcatcactccaaatggaagcattcccaatgacaaaccatttcaaaatgtaaacaggatcacatatggggcctgtcccagatatgttaagcaaaacactctgaaattggcaacagggatgcgaaatgtaccagagaaacaaactagaggcatatttggcgcaatcgcgggtttcatagaaaatggttgggagggaatggtggatggttggtacggtttcaggcatcaaaattctgagggaataggacaagcagcagatctcaaaagcactcaagcagcaatcaaccaaatcaatgggaagctgaataggttgatcgggaaaaccaacgagaaattccatcagattgaaaaagaattctcagaagtagaagggagaattcaggaccttgagaaatatgttgaggacactaaaatagatctctggtcatacaacgcggagcttcttgttgccctggagaaccaacatacaattgatctaactgactcagaaatgaacaaactgtttgaaagaacaaagaagcaactgagggaaaatgctgaggatatgggcaatggttgtttcaaaatataccacaaatgtgacaatgcctgcatagggtcaatcagaaatggaacttatgaccatgatgtatacagagatgaagcattaaacaaccggttccagatcaaaggtgttgagctgaagtcaggatacaaagattggatcctatggatttcctttgccatatcatgttttttgctttgtgttgctttgttggggttcatcatgtgggcctgccaaaaaggcaacattaggtgcaacatttgcatttga

SEQ ID NO: 31096 - RNA, 1701 nt, synthetic construct
  misc_feature 1..1701: note = hemagglutinin__InfluenzaA__ABC46554
  source 1..1701: mol_type = other RNA
atgaagactatcattgctttgagctacattttctgtcaggttttcgcccaaaaccttccaggaaatgacaacagcacagcaacgctgtgcctgggacatcatgcagtgccaaacggaacgctagtgaaaacaatcacgaatgatcagattgaagtgactaatgctactgagctggttcagagttcctcaacaggtagaatatgcgacagtcctcatcgaatccttgatggaaaaaactgcacactgatagatgctctattgggggaccctcattgtgatggctttcaaaatgagaaatgggacctttttgttgaacgcagcaaagctttcagcaactgttacccttatgatgtgccagattatgcctcccttaggtcactagttgcctcgtcaggcaccctggagtttatcaatgaaggcttcaattggactggggtcactcaggatgggggaagctatgcttgcaaaaggggacctgataacagtttcttcagtagactgaactggttgtacaaatcagaaagcacatatccagtgctgaacgtgactatgccaaacaatgacaattttgacaaactgtacatttggggggttcaccacccgagcacggacaaagaacaaaccaacctatatgttcaagcatcagggagagtcacagtctccaccaagagaagccagcaaactataatcccgaatgtcgggtctagaccctgggtaaggggtctgtctagtagaataagcatctattggacaatagtaaaaccgggagacatactgttaattaatagtaatgggaacctaattgctcctcggggttacttcaaaatacgcactgggaaaagctcaataatgagatcagatgcacccattggcacctgcagttctgaatgcatcactccaaatggaagcattcccaatgacaagccctttcaaaacgtaaacaagatcacatatggggcatgtcccaagtatgttaagcaaaacactctgaagttggcaacagggatgcggaatgtaccagagaaacaaactagaggcatattcggcgcaatagcaggtttcatagaaaatggttgggagggaatgatagacggttggtacggtttcaggcatcaaaattctgagggcacaggacaagcagcagatcttaaaagcactcaagcagccatcgaccaaatcaatgggaaactgaatagggtgatcgagaaaacaaacgagaaattccatcaaatcgaaaaggaattctcagaagtagaagggagaattcaggacctcgagaaatacgttgaagacactaaaatagatctctggtcttacaatgcggagcttcttgtcgctctggagaaccaacatacaattgatctgactgactcggaaatgaacaaactgtttgaaaaaacaaggaggcaactaagggaaaatgctgaggacatgggcaatggctgcttcaaaatataccacaaatgtgacaatgcttgcatagggtcaatcagaaatggaacttatgaccatgatgtatacagggacgaagcattaaacaaccggtttcagatcaaaggtgttgagctgaagtcaggatacaaagactggatcctgtggatttcctttgccatatcatgctttttgctttgtgttgttttgctggggttcatcatgtgggcctgccaaaaaggcaacattaggtgcaacatttgcatttga

SEQ ID NO: 31097 - RNA, 1701 nt, synthetic construct
  misc_feature 1..1701: note = hemagglutinin__InfluenzaA__ABC46576
  source 1..1701: mol_type = other RNA
atgaagactatcattgctttgagctacattttctgtctggttttcgcccaaaaccttcccggaaatgacaaaagcacagcaacgctgtgcctgggacaccatgcagtgccaaacggaacgctagtgaaaacaatcacgaatgatcagattgaagtgactaatgctactgagctggttcagagttcctcaacaggtagaatatgcgacagtcctcaccgaatccttgatgggaaaaactgcacactggtagatgctctattgggagaccctcattgtgatggctttcagaatgagaaatgggacctttttgttgaacgcagcaaagctttcagcaactgttacccttatgatgtgccagattatgcctcccttaggtcactagttgcctcgtcaggcaccctggagtttatcaatgaaagcttcaattggactggagtcactcagagtgggggaagctatgcttgcaaaaggggatctgacaacagtttcttcagtagactgaattggttgtacgaatcagaaagcaaatatccagtgctgaacgtgactatgccaaacaatggcaattttgacaaactgtacatttggggggttcaccacccgagcacggacaaagaacaaaccaacctatatgttcgagcatcagggagagtcacagtctctaccaagagaagccagcaaactataatcccgaatatcgggtctagaccctgggtaaggggtctgtctagcagaataagcatctattggacaatagtaaaaccgggagacatactgttaattaatagtaatgggaacctaattgctcctcggggttacttcaaaatacgcactgggaaaagctcaataatgaggtcagatgcacctattggcacctgcagttctgaatgcatcactccaaatggaagcattcccaatgacaagccctttcaaaatgtaaacaagatcacatatggggcatgtcccaagtatgttaagcaaaacactctgaagttggcaacagggatgcggaatgtaccagagaaacaaactagaggcatattcggcgcaatagcaggtttcatagaaaatggttgggagggaatggtagacggttggtacggtttcaggcatcaaaattctgagggcacaggacaagcagcagatcttaaaagcactcaagcagcaatcgaccaaatcaatgggaaactgaatagggtaatcgagaaaacgaacgagaaattccatcaaatcgaaaaggaattctcagaagtagaagggagaattcaggacctcgagaaatacgttgaagacactaaaatagatctctggtcttacaacgcggagcttcttgtcgctctggagaaccaacatacaattgatctgactgactcggaaatgaacaaactgtttgaaaaaacaaggaggcaactgagggaaaatgctgaggacatgggcaatggttgcttcaaaatataccacaaatgtgacaatgcttgcatagggtcaatcagaaatggaacttatgaccatgatgtatacagagacgaagcattaaacaaccggtttcagatcaaaggtgttgagctgaagtcaggatacaaagactggatcctgtggatttcctttgccatatcatgctttttgctttgtgttgttttgctggggttcatcatgtgggcctgccaaaaaggcaacattaggtgcaacatttgcatttga

SEQ ID NO: 31098 - RNA, 1701 nt, synthetic construct; identical to SEQ ID NO: 30967
  misc_feature 1..1701: note = hemagglutinin__InfluenzaA__ABC50167
  source 1..1701: mol_type = other RNA

SEQ ID NO: 31099 - RNA, 1701 nt, synthetic construct; identical to SEQ ID NO: 30967
  misc_feature 1..1701: note = hemagglutinin__InfluenzaA__ABC50178
  source 1..1701: mol_type = other RNA

SEQ ID NO: 31100 - RNA, 1701 nt, synthetic construct; identical to SEQ ID NO: 30967
  misc_feature 1..1701: note = hemagglutinin__InfluenzaA__ABC50189
  source 1..1701: mol_type = other RNA

SEQ ID NO: 31101 - RNA, 1701 nt, synthetic construct; identical to SEQ ID NO: 31066
  misc_feature 1..1701: note = hemagglutinin__InfluenzaA__ABC50200
  source 1..1701: mol_type = other RNA

SEQ ID NO: 31102 - RNA, 1701 nt, synthetic construct; identical to SEQ ID NO: 31066
  misc_feature 1..1701: note = hemagglutinin__InfluenzaA__ABC50211
  source 1..1701: mol_type = other RNA

SEQ ID NO: 31103 - RNA, 1701 nt, synthetic construct; identical to SEQ ID NO: 31066
  misc_feature 1..1701: note = hemagglutinin__InfluenzaA__ABC50222
  source 1..1701: mol_type = other RNA

SEQ ID NO: 31104 - RNA, 1701 nt, synthetic construct; identical to SEQ ID NO: 31066
  misc_feature 1..1701: note = hemagglutinin__InfluenzaA__ABC50233
  source 1..1701: mol_type = other RNA

SEQ ID NO: 31105 - RNA, 1701 nt, synthetic construct; identical to SEQ ID NO: 31066
  misc_feature 1..1701: note = hemagglutinin__InfluenzaA__ABC50244
  source 1..1701: mol_type = other RNA

SEQ ID NO: 31106 - RNA, 1701 nt, synthetic construct; identical to SEQ ID NO: 31066
  misc_feature 1..1701: note = hemagglutinin__InfluenzaA__ABC50266
  source 1..1701: mol_type = other RNA

SEQ ID NO: 31107 - RNA, 1701 nt, synthetic construct; identical to SEQ ID NO: 31066
  misc_feature 1..1701: note = hemagglutinin__InfluenzaA__ABC50277
  source 1..1701: mol_type = other RNA

SEQ ID NO: 31108 - RNA, 1701 nt, synthetic construct
  misc_feature 1..1701: note = hemagglutinin__InfluenzaA__ABC50299
  source 1..1701: mol_type = other RNA
atgaagactatcattgctttgagctacattttatgcctggttttcgctcaaaaacttcccggaaatgacaacagcacggcaacgctgtgtctggggcatcatgcagtgccaaacggaacgctagtgaaaacaatcacgaatgaccaaattgaagtaactaatgctactgagctggttcagagttcctcaacaggtagaatatgcgacagtcctcaccaaatccttgatggagaaaactgcacactaatagatgctctattgggagaccctcattgtgatggcttccaaaataaggaatgggacctttttgttgaacgcagcaaagcctacagcaactgttacccttatgatgtgccggattatgtctcccttaggtcactagttgcctcatcaggcacgctggagtttaacaatgaaagcttcaattggactggagtcgctcagaatggaacaagctctgcttgcaaaaggagatctgataaaagtttctttagtagattgaattggttgcaccaattaaaatacaaatatccagcactgaacgtgactatgccaaacaatgaaaaatttgacaaattgtacatttggggggttcaccacccgggtacagacagtgaccaaatcagcctatatgctcaagcatcggggagagtcacagtctctaccaaaagaagccaacaaactgtaatcccgaatatcggatctagaccctgggtaaggggtgtctccagcagaataagcatctattggacaatagtaaaaccgggagacatacttttgattaacagcacagggaatctaattgctcctcggggttacttcaaaatacgaagtgggaaaagctcaataatgaggtcagatgcacccattggcaaatgcaattctgaatgcatcactccaaatggaagcattcccaatgacaaaccatttcaaaatgtaaacaggatcacatatggggcctgtcccagatatgttaagcaaaacactctgaaattggcaacagggatgcggaatgtgccagagaaacaaactagaggcatattcggtgcaatcgcgggcttcatagaaaatggttgggagggaatgatggacggttggtacggtttcaggcatcaaaattctgagggcacagggcaagcagcagatcttaaaagcactcaagcagcaatcaaccaaatcaacgggaaactgaataggttaatcgagaaaacgaacgagaaattccatcaaattgaaaaagaattctcagaagtagaagggagaattcaggacctcgagaaatatgttgaggacactaaaatagatctctggtcgtacaatgcggagcttcttgttgccctggagaaccaacatacaattgatctaactgactcagaaatgaacaaactgtttgaaagaacaaagaagcaactgagggaaaatgctgaggatatgggcaatggttgtttcaaaatataccacaaatgtgacaatgcctgcatagggtcaatcagaaatggaacttatgaccatgatgtatacagagacgaagcattgaacaaccggttccagatcaaaggtgttgagctgaagtcaggatacaaagattgggtcctatggatttcctttgccacatcatgttttttgctttgtattgttttgctggggttcatcatgtgggcctgccaaaaaggcaacattaggtgcaacatttgcatttga

SEQ ID NO: 31109 - RNA, 1701 nt, synthetic construct
  misc_feature 1..1701: note = hemagglutinin__InfluenzaA__ABC50310
  source 1..1701: mol_type = other RNA
atgaagactatcattgctttgagctacattttatgcctggttttcgctcaaaaacttcccggaaatgacaacagcacggcaacgctgtgtctggggcatcatgcagtgccaaacggaacgctagtgaaaacaatcacgaatgaccaaattgaagtaactaatgctactgagctggttcagagttcctcaacaggtagaatatgcgacagtcctcaccaaatccttgatggagaaaactgcacactaatagatgctctattgggagacccccattgtgatggcttccaaaataaggaatgggacctttttgttgaacgcagcaaagcctacagcaactgttacccttatgatgtgccggattatgtctcccttaggtcactagttgcctcatcaggcacgctggagtttaacaatgaaagcttcaattggactggagtcgctcagaatggaacaagctctgcttgcaaaaggagatctgataaaagtttctttagtagattgaattggttgcaccaattaaaatacaaatatccagcactgaacgtgactatgccaaacaatgaaaaatttgacaaattgtacatttggggggttcaccacccgggtacagacagtgaccaaatcagcctatatgctcaagcatcggggagagtcacagtctctaccaaaagaagccaacaaactgtaatcccgaatatcggatctagaccctgggtaaggggtgtctccagcagaataagcatctattggacaatagtaaaaccgggagacatacttttgattaacagcacagggaatctaattgctcctcggggttacttcaaaatacgaagtgggaaaagctcaataatgaggtcagatgcacccattggcaaatgcaattctgaatgcatcactccaaatggaagcattcccaatgacaaaccatttcaaaatgtaaacaggatcacatatggggcctgtcccagatatgttaagcaaaacactctgaaattggcaacagggatgcggaatgtgccagagaaacaaactagaggcatattcggtgcaatcgcgggcttcatagaaaatggttgggagggaatgatggacggttggtacggttttaggcatcaaaattctgagggcacagggcaagcagcagatcttaaaagcactcaagcagcaatcaaccaaatcaacgggaaactgaataggttaatcgagaaaacgaacgagaaattccatcaaattgaaaaagaattctcagaagtagaagggagaattcaggacctcgagaaatatgttgaggacactaaaatagatctctggtcgtacaatgcggagcttcttgttgccctggagaaccaacatacaattgatctaactgactcagaaatgaacaaactgtttgaaagaacaaagaagcaactgagggaaaatgctgaggatatgggcaatggttgtttcaaaatataccacaaatgtgacaatgcctgcatagggtcaatcagaaatggaacttatgaccatgatgtatacagagacgaagcattgaacaaccggttccagatcaaaggtgttgagctgaagtcaggatacaaagattgggtcctatggatttcctttgccatatcatgttttttgctttgtattgttttgctggggttcatcatgtgggcctgccaaaaaggcaacattaggtgcaacatttgcatttga

SEQ ID NO: 31110 - RNA, 1701 nt, synthetic construct
  misc_feature 1..1701: note = hemagglutinin__InfluenzaA__ABC50321
  source 1..1701: mol_type = other RNA
atgaagactatcattgctttgagctacattttatgcctggttttcgctcaaaaacttcccggaaatgacaacagcacggcaacgctgtgtctggggcatcatgcagtgccaaacggaacgctagtgaaaacaatcacgaatgaccaaattgaagtaactaatgctactgagctggttcagagttcctcaacaggtagaatatgcgacagtcctcaccaaatccttgatggagaaaactgcacactaatagatgctctattgggagaccctcattgtgatggcttccaaaataaggaatgggacctttttgttgaacgcagcaaagcctacagcaactgttacccttatgatgtgccggattatgtctcccttaggtcactagttgcctcatcaggcacgctggagtttaacaatgaaagcttcaattggactggagtcgctcagaatggaacaagctctgcttgcaaaaggagatctgataaaagtttctttagtagattgaattggttgcaccaattaaaatacaaatatccagcattgaacgtgactatgccaaacaatgaaaaatttgacaaattgtacatttggggggttcaccacccgggtacagacagtgaccaaatcagcctatatgctcaagcatcggggagagtcacagtctctaccaaaagaagccaacaaactgtaatcccgaatatcggatctagaccctgggtaaggggtgtctccagcagaataagcatctattggacaatagtaaaaccgggagacatacttttgattaacagcacagggaatctaattgctcctcggggttacttcaaaatacgaagtgggaaaagctcaataatgaggtcagatgcacccattggcaaatgcaactctgaatgcatcactccaaatggaagcattcccaatgacaaaccatttcaaaatgtaaacaggatcacatatggggcctgtcccagatatgttaagcaaaacactctgaaattggcaacagggatgcggaatgtgccagggaaacaaactagaggcatattcggtgcaatcgcgggcttcatagaaaatggttgggagggaatgatggacggttggtacggtttcaggcatcaaaattctgagggcacagggcaagcagcagatcttaaaagcactcaagcagcaatcaaccaaatcaacgggaaactgaataggttaatcgagaaaacgaacgagaaattccatcaaattgaaaaagaattctcagaagtagaagggagaattcaggacctcgagaaatatgttgaggacactaaaatagatctctggtcgtacaatgcggagcttcttgttgccctggagaaccaacatacaattgatctaactgactcagaaatgaacaaactgtttgaaagaacaaagaagcaactgagggaaaatgctgaggatatgggcaatggttgtttcaaaatataccacaaatgtgacaatgcctgcatagggtcaatcagaaatggaacttatgaccatgatgtatacagagacgaagcattgaacaaccggttccagatcaaaggtgttgagctgaagtcaggatacaaagattgggtcctatggatttcctttgccatatcatgttttttgctttgtattgttttgctggggttcatcatgtgggcctgccaaaaaggcaacattaggtgcaacatttgcatttga

SEQ ID NO: 31111 - RNA, 1701 nt, synthetic construct
  misc_feature 1..1701: note = hemagglutinin__InfluenzaA__ABC50332
  source 1..1701: mol_type = other RNA
atgaagactatcattgctttgagctacattttatgcctggttttcgctcaaaaacttcccggaaatgacaacagcacggcaacgctgtgcctggggcaccatgcagtgccaaacggaacgctagtgaaaacaatcacgaatgaccaaattgaagtgactaatgctactgagctggttcagagttcctcaacaggtagaatatgcgacagtcctcaccaaatccttgatggagaaaactgcacactaatagatgctctattgggagaccctcattgtgatggcttccaaaataaggaatgggacctttttgttgaacgcagcaaagcctacagcaactgttacccttatgatgtgccggattatgtctcccttaggtcactagttgcctcatcaggcacgctggagtttaacaatgaaagcttcaattggactggagtcgctcagaatggaacaagctctgcttgcaaaaggagatctgataaaagtttctttagtagattgaattggttgcaccaattaaaatacaaatatccagcactgaacgtgactatgccaaacaatgaaaaatttgacaaattgtacatttggggggttcaccaccctggtacagacagtgaccaaatcagcctatatgctcaagcatcagggagagtcacagtctctaccaaaagaagccaacaaactgtaatcccgaatatcggatctagaccctgggtaaggggtgtctccagcagaataagcatctattggacaatagtgaaaccgggagacatacttttgattaacagcacagggaatctaattgctcctcggggttacttcaaaatacgaagtgggaaaagctcaataatgaggtcagatgcacccattggcaaatgcaattctgaatgcatcactccaaatggaagcattcccaatggcaaaccatttcaaaatgtaaacaggatcacatatggggcctgtcccagatatgttaagcaaaacactctgaaattggcaacagggatgcggaatgtgccagagaaacaaactagaggcatattcggtgcaatcgcgggcttcatagaaaatggttgggagggaatgatggacggttggtacggtttcaggcatcagaattctgagggcacagggcaagcagcagatcttaaaagcactcaagcagcaatcaaccaaatcaacgggaaactgaataggttaatcgagaaaacgaacgagaaattccatcaaattgaaaaagaattctcagaagtagaagggagaattcaggacctcgagaaatatgtcgaggacactaaaatagatctctggtcgtacaatgcggagcttcttgttgccctggagaaccaacatacaattgatctaactgactcagaaatgaacaaactgtttgaaagaacaaagaagcaactgagggaaaatgctgaggatatgggcaatggttgtttcaaaatataccacaaatgtgacaatgcctgcatagggtcaatcagaaatggaacttatgaccatgatgtatacagagacgaagcattgaacaaccggttccagatcaaaggtgttgagctgaagtcaggatacaaagattggatcctatggatttcctttgccatatcatgttttttgctttgtattgttttactggggttcatcatgtgggcctgccaaaaaggcaacattaggtgcaacatttgcatttga

SEQ ID NO: 31112 - RNA, 1701 nt, synthetic construct
  misc_feature 1..1701: note = hemagglutinin__InfluenzaA__ABC50343
  source 1..1701: mol_type = other RNA
atgaagactatcattgctttgagctacattttatgcctggttttcgctcaaaaacttcccggaaatgacaacagcacggcaacgctgtgtctggggcatcatgcagtgccaaacggaacgctagtgaaaacaatcacgaatgaccaaattgaagtaactaatgctactgagctggttcagagttcctcaacaggtagaatatgcgacagtcctcaccaaatccttgatggagaaaactgcacactaatagatgctctattgggagaccctcattgtgatggcttccaaaataaggaatgggacctttttgttgaacgcagcaaagcctacagcaactgttacccttatgatgtgccggattatgtctcccttaggtcactagttgcctcatcaggcacgctggagtttaacaatgaaagcttcaattggactggagtcgctcagaatggaacaagctctgcttgcaaaaggagatccgataaaagtttctttagtagattgaattggttgcaccaattaaaatacaaatatccagcgctgaacgtgactatgccaaacaatgaaaaatttgacaaattgtacatttggggggttcaccacccgggtacagacagtgaccaaatcagcctatatgctcaagcatcggggagagtcacagtctctaccaaaagaagccaacaaactgtaatcccgaatatcggatctagaccctgggtaaggggtgtctccagcagaataagcatctattggacaatagtaaaaccgggagacatacttttgattaacagcacagggaatctaattgctcctcggggttacttcaaaatacgaagtgggaaaagctcaataatgaggtcagatgcacccattggcaaatgcaattctgaatgcatcactccaaatggaagcattcccaatgacaaaccatttcaaaatgtaaacaggatcacatatggggcctgtcccagatatgttaagcaaaacactctgaaattggcaacagggatgcggaatgtgccagagaaacaaactagaggcatattcggtgcaatcgcgggcttcatagaaaatggttgggagggaatgatggacggttggtacggtttcaggcatcaaaattctgagggcacagggcaagcagcagatcttaaaagcactcaagcagcaatcaaccaaatcaacgggaaactgaataggttaatcgagaaaacgaacgagaaattccatcaaattgaaaaagaattctcagaagtagaagggagaattcaggacctcgagaaatatgttgaggacactaaaatagatctctggtcgtacaatgcggagcttcttgttgccctggagaaccaacatacaattgatctaactgactcagaaatgaacaaactgtttgaaagaacaaagaagcaactgagggaaaatgctgaggatatgggcaatggttgtttcaaaatataccacaaatgtgacaatgcctgcatagggtcaatcagaaatggaacttatgaccatgatgtatacagagacgaagcattgaacaaccggttccagatcaaaggtgttgagctgaagtcaggatacaaagattgggtcctatggatttcctttgccatatcatgttttttgctttgtattgttttgctggggttcatcatgtgggcctgccaaaaaggcaacattaggtgcaacatttgcatttga

SEQ ID NO: 31113 - RNA, 1701 nt, synthetic construct
  misc_feature 1..1701: note = hemagglutinin__InfluenzaA__ABC50354
  source 1..1701: mol_type = other RNA
atgaagactatcattgctttgagctacattttatgcctggttttcgctcaaaaactccccggaaatgacaacagcacggcaacgctgtgtctggggcatcatgcagtgccaaacggaacgctagtgaaaacaatcacgaatgaccaaattgaagtaactaatgctactgagctggttcagagttcctcaacaggtagaatatgcgacagtcctcaccaaatccttgatggagaaaactgcacactaatagatgctctattgggagacccccattgtgatggcttccaaaataaggaatgggacctttttgttgaacgcagcaaagcctacagcaactgttacccttatgatgtgccggattatgtctcccttaggtcactagttgcctcatcaggcacgctggagtttaacaatgaaagcttcaattggactggagtcgctcagaatggaacaagctcttcttgcaaaaggagatctgataaaagtttctttagtagattgaattggttgcaccaattaaaatacaaatatccagcactgaacgtgactatgccaaacaatgaaaaatttgacaaattgtacatttggggggttcaccacccgggtacagacagtgaccaaatcagcctatatgctcaagcatcggggagagtcacagtctctaccaaaagaagccaacaaactgtaatcccgaatatcggatctagaccctgggtaaggggtgtctccagcagaataagcatctattggacaatagtaaaaccgggagacatacttttgattaacagcacagggaatctaattgctcctcggggttacttcaaaatacgaagtgggaaaagctcaataatgaggtcagatgcacccattggcaaatgcaattctgaatgcatcactccaaatggaagcattcccaatgacaaaccatttcaaaatgtaaacaggatcacatatggggcctgtcccagatatgttaagcaaaacactctgaaattggcaacagggatgcggaatgtgccagagaaacaaactagaggcatattcggtgcaatcgcgggcttcatagaaaatggttgggagggaatgatggacggttggtacggttttaggcatcaaaattctgagggcacagggcaagcagcagatcttaaaagcactcaagcagcaatcaaccaaatcaacgggaaactgaataggttaatcgagaaaacgaacgagaaattccatcaaattgaaaaagaattctcagaagtagaagggagaattcaggacctcgagaaatatgttgaggacactaaaatagatctctggtcgtacaatgcggagcttcttgttgccctggagaaccaacatacaattgatctaactgactcagaaatgaacaaactgtttgaaagaacaaagaagcaactgagggaaaatgctgaggatatgggcaatggttgtttcaaaatataccacaaatgtgacaatgcctgcatagggtcaatcagaaatggaacttatgaccatgatgtatacagagacgaagcattgaacaaccggttccagatcaaaggtgttgagctgaagtcaggatacaaagattgggtcctatggatttcctttgccatatcatgttttttgctttgtattgttttgctggggttcatcatgtgggcctgccaaaaaggcaacattaggtgcaacatttgcatttga

SEQ ID NO: 31114 - RNA, 1701 nt, synthetic construct
  misc_feature 1..1701: note = hemagglutinin__InfluenzaA__ABC50376
  source 1..1701: mol_type = other RNA
atgaagactatcattgctttgagctacattttatgcctggttttcgctcaaaaacttcccggaaatgacaacagcacggcaacgctgtgtctggggcatcatgcagtgccaaacggaacgctagtgaaaacaatcacgaatgaccaaattgaagtaactaatgctactgagctggttcagagttcctcaacaggtagaatatgcgacagtcctcaccaaatccttgatggagaaaactgcacactaatagatgctctattgggagaccctcattgtgatggcttccaaaataaggaatgggacctttttgttgaacgcagcaaagcctacagcaactgttacccttatgatgtgccggattatgtctcccttaggtcactagttgcctcatcaggcacgctggagtttaacaatgaaagcttcaattggactggagtcgctcagaatggaacaagctctgcttgcaaaaggagatctgataaaagtttctttagtagattgaattggttgcaccaattaaaatacaaatatccagcactgaacgtgactatgccaaacaatgaaaaatttgacaaattgtacatttggggggttcaccacccgggtacagacagtgaccaaatcagcctatatgctcaagcatcggggagagtcacagtctctaccaaaagaagccaacaaactgtaatcccgaataccggatctagaccctgggtaaggggtgtctccagcagaataagcatctattggacaatagtaaaaccgggagacatacttttgattaacagcacagggaatctaattgctcctcggggttacttcaaaatacgaagtgggaaaagctcaataatgaggtcagatgcacccattggcaaatgcaattctgaatgcatcactccaaatggaagcattcccaatgacaaaccatttcaaaatgtaaacaggatcacatatggggcctgtcccagatatgttaagcaaaacactctgaaattggcaacagggatgcggaatgtgccagagaaacaaactagaggcatattcggtgcaatcgcgggcttcatagaaaatggttgggagggaatgatggacggttggtacggtttcaggcatcaaaattctgagggcacagggcaagcagcagatcttaaaagcactcaagcagcaatcaaccaaatcaacgggaaactgaataggttaatcgagaaaacgaacgagaaattccatcaaattgaaaaagaattctcagaagtagaagggagaattcaggacctcgagaaatatgttgaggacactaaaatagatctctggtcgtacaatgcggagcttcttgttgccctggagaaccaacatacaattgatctaactgactcagaaatgaacaaactgtttgaaagaacaaagaagcaactgagggaaaatgctgaggatatgggcaatggttgtttcaaaatataccacaaatgtgacaatgcctgcatagggtcaatcagaaatggaacttatgaccatgatgtatacagagacgaagcattgaacaaccggttccagatcaaaggtgttgagctgaagtcaggatacaaagattgggtcctatggatttcctttgccatatcatgttttttgctttgtattgttttgctggggttcatcatgtgggcctgccaaaaaggcaacattaggtgcaacatttgcatttga

SEQ ID NO: 31115 - RNA, 1701 nt, synthetic construct
  misc_feature 1..1701: note = hemagglutinin__InfluenzaA__ABC50387
  source 1..1701: mol_type = other RNA
atgaagactatcattgctttgagctacattttatgcctggttttcgctcaaaaacttcccggaaatgacaacagcacggcaacgctgtgtctggggcatcatgcagtgccaaacggaacgctagtgaaaacaatcacgaatgaccaaattgaagtaactaatgctactgagctggttcagagttcctcaacaggtagaatatgcgacagtcctcaccaaatccttgatggagaaaactgcacactaatagatgctctattgggagaccctcattgtgatggcttccaaaataaggaatgggacctttttgttgaacgcagcaaagcctacagcaactgttacccttatgatgtgccggattatgtctcccttaggtcactagttgcctcatcaggcacgctggagtttaacaatgaaagcttcaattggactggagtcgctcagaatggaacaagctctgcttgcaaaaggagatctgataaaagtttctttagtagattgaattggttgcaccaattaaaatacaaatatccagcactgaacgtgactatgccaaacaatgaaaaatttgacaaattgtacgtttggggggttcaccacccgggtacagacagtgaccaaatcagcctatatgctcaagcatcggggagagtcacagtctctaccaaaagaagccaacaaactgtaatcccgaatatcggatctagaccctgggtaaggggtgtctccagcagaataagcatctattggacaatagtaaaaccgggagacatacttttgattaacagcacagggaatctaattgctcctcggggttacttcaaaatacgaagtgggaaaagctcaataatgaggtcagatgcacccattggcaaatgcaattctgaatgcatcactccaaatggaagcattcccaatgacaaaccatttcaaaatgtaaacaggatcacatatggggcctgtcccagatatgttaagcaaaacactctgaaattggcaacagggatgcggaatgtgccagagaaacaaactagaggcatattcggtgcaatcgcgggcttcatagaaaatggttgggagggaatgatggacggttggtacggtttcaggcatcaaaattctgagggcacagggcaagcagcagatcttaaaagcactcaagcagcaatcaaccaaatcaacgggaaactgaataggttaatcgagaaaacgaacgagaaattccatcaaattgaaaaagaattctcagaagtagaagggagaattcaggacctcgagaaatatgttgaggacactaaaatagatctctggtcgtacaatgcggagcttcttgttgccctggagaaccaacatacaattgatctaactgactcagaaatgaacaaactgtttgaaagaacaaagaagcaactgagggaaaatgctgaggatatgggcaatggttgtttcaaaatataccacaaatgtgacaatgcctgcatagggtcaatcagaaatggaacttatgaccatgatgtatacagagacgaagcattgaacaaccggttccagatcaaaggtgttgagctgaagtcaggatacaaagattgggtcctatggatttcctttgccatatcatgttttttgctttgtattgttttgctggggttcatcatgtgggcctgccaaaaaggcaacattaggtgcaacatttgcatttga

SEQ ID NO: 31116 - RNA, 1701 nt, synthetic construct
  misc_feature 1..1701: note = hemagglutinin__InfluenzaA__ABC50409
  source 1..1701: mol_type = other RNA
atgaagactatcattgctttgagctacattctatgtctggttttcgctcaaaaacttcccggaaatgacaacagcacggcaacgctgtgccttgggcaccatgcagtaccaaacggaacgatagtgaaaacaatcacgaatgaccaaattgaagttactaatgctactgagctggttcagagttcctcaacaggtggaatatgcgacagtcctcatcagatccttgatggagaaaactgcacactaatagatgctctattgggagaccctcagtgtgatggcttccaaaataagaaatgggacctttttgttgaacgcagcaaagcctacagcaactgttacccttatgatgtgccggattatgtctcccttaggtcactagttgcctcatccggcacactggagtttaacaatgaaagcttcaattggactggagtcactcaaaatggaacaagctctgcttgcaaaaggagatctaataacagtttctttagtagattgaattggttgacccatttaaaattcaaatacccagcattgaacgtgactatgccaaacaatgaaaaatttgacaaattgtacatttggggggttcaccacccgggtacggacaatgaccaaatcagcctatatgctcaagcatcaggaagaatcacagtctctaccaaaagaagccaacaaactgtaatcccgaatatcggatctagacccagggtaagggatatccccagcagaataagcatctattggacaatagtaaaaccgggagacatacttttgattaacagcacagggaatctaattgctcctcggggttacttcaaaatacgaagtgggaaaagctcaataatgagatcagatgcacccattggcaaatgcaattctgaatgcatcactccaaatggaagcattcccaatgacaaaccatttcaaaatgtaaacaggatcacatatggggcctgtcccagatatgttaagcaaaacactctgaaattggcaacagggatgcgaaatgtaccagagaaacaaactagaggcatatttggcgcaatcgcgggtttcatagaaaatggttgggagggaatggtggatggttggtacggtttcaggcatcaaaattctgagggaataggacaagcagcagatctcaaaagcactcaagcagcaatcaaccaaatcaatgggaagctgaataggttgatcgggaaaaccaacgagaaattccatcagattgaaaaagaattctcagaagtagaagggagaattcaggacctcgagaaatatgttgaggacactaaaatagatctctggtcatacaacgcggagcttcttgttgccctggagaaccaacatacaattgatctaactgactcagaaatgaacaaactgtttgaaagaacaaagaagcaactgagggaaaatgctgaggatatgggcaatggttgtttcaaaatataccacaaatgtgacaatgcctgcatagggtcaatcagaaatggaacttatgatcatgatgtatacagagatgaagcattaaacaaccggttccagatcaaaggtgttgagctgaagtcaggatacaaagattggatcctatggatttcctttgccatatcatgttttttgctttgtgttgctttgttggggttcatcatgtgggcctgccaaaaaggcaacattaggtgcaacatttgcatttga

SEQ ID NO: 31117 - RNA, 1701 nt, synthetic construct; identical to SEQ ID NO: 31116
  misc_feature 1..1701: note = hemagglutinin__InfluenzaA__ABC50420
  source 1..1701: mol_type = other RNA

SEQ ID NO: 31118 - RNA, 1701 nt, synthetic construct
  misc_feature 1..1701: note = hemagglutinin__InfluenzaA__ABC54668
  source 1..1701: mol_type = other RNA
atgaagactatcattgctttgagctacattttatgtctggttttcgctcaaaaacttcccggaaatgacaacagcacggcaacgctgtgcctggggcaccatgcagtgccaaacggaacgctagtgaaaacaatcacgaatgaccaaattgaagtgactaatgctactgagctggttcagagttcctcaacaggtagaatatgcgacagtcctcaccaaatccttgatggagaaaactgcacactaatagatgctctattgggagaccctcattgtgatggcttccaaaataaggaatgggacctttttgttgaacgcagcaaagcctacagcaactgttacccttatgatgtgccggattatgcctcccttaggtcactagttgcctcatccggaacactggagtttaacaatgaaagcttcaattggactggagtcgctcagaatggaacaagctctgcttgcaaaaggagatctaataaaagtttctttagtagattgaattggttgcaccaattaaaatacaaatatccagcactgaacgtgactatgccaaacaatgaaaaatttgacaaattgtacatttggggggttcaccacccgagtacggacagtgaccaaatcagcctatatgctcaagcatcagggagagtcacagtctctaccaaaagaagccaacaaactgtaatcccgaatatcggatctggaccctgggtaaggggtgtctccagcagaataagcatctattggacaatagtaaaaccgggagacatacttttgattaacagcacagggaatctaattgctcctcggggttacttcaaaatacgaagtgggaaaagctcaataatgaggtcagatgcacccattggcaaatgcaattctgaatgcatcactccaaatggaagccttcccaatgacaaaccatttcaaaatgtaaacaggatcacatatggggcctgtcccagatatgttaagcaaaacactctgaaattggcaacagggatgcggaatgtaccagagaaacaaactagaggcatattcggcgcaatcgcgggtttcatagaaaatggttgggagggaatggtggacggttggtacggtttcaggcatcaaaattctgagggcacaggacaagcagcagatcttaaaagcactcaagcagcaatcaaccaaatcaacgggaaactgaataggttaatcgagaaaacgaacgagaaattccatcaaattgaaaaagaattctcagaagtagaagggagaattcaggacctcgagaaatatgttgaggacactaaaatagatctctggtcgtacaacgcggagcttcttgttgccctggagaaccaacatacaattgatctaactgactcagaaatgaacaaactgtttgaaagaacaaagaagcaactgagggaaaatgctgaggatatgggcaatggttgtttcaaaatataccacaaatgtgacaatgcctgcatagggtcaatcagaaatggaacttatgaccatgatgtatacagagacgaagcattaaacaaccggttccagatcaaaggtgttgagctgaagtcaggatacaaagattggatcctatggatttcctttgccatatcatgttttttgctttgtgttgttttgctggggttcatcatgtgggcctgccaaaaaggcaacattaggtgcaacatttgcatttga

SEQ ID NO: 31119 - RNA, 1701 nt, synthetic construct
  misc_feature 1..1701: note = hemagglutinin__InfluenzaA__ABC54679
  source 1..1701: mol_type = other RNA
atgaagactatcattgctttgagctacattctatgtctggttttcgctcaaaaacttcccggaaatgacaacagcacggcaacgctgtgccttgggcaccatgcagtaccaaacggaacgatagtgaaaacaatcacgaatgaccaaattgaagttactaatgctactgagctggttcagagttccccaacaggtggaatatgcgacagtcctcatcagatccttgatggagaaaactgcacactaatagatgctctattgggagaccctcagtgtgatggcttccaaaataagaaatgggacctttttattgaacgcagcaaagcctacagcaactgttacccctatgatgtgccggattatgcctcccttaggtcactagttgcctcatccggcacactggaatttaacaatgaaagcttcaattggactggagtcactcaaaatggaacaagctctgcttgcaaaaggagatctaataacagtttctttagtagattgaattggttgacccacttaaaattcaaatacccagcattgaacgtgactatgccaaacaatgaaaaatttgacaaattgtacatttggggggttcaccacccgggtacggacaatgaccaaatcagcctatatgctcaagcttcaggaagaatcacagtctctaccaaaagaagccaacaaactgtaatcccgaatgtcggatctagacccagggtaagggatatccccagcagaataagcatctattggacaatagtaaaaccgggagacatacttttgattaacagcacagggaatctaattgctcctcggggttacttcaaaatacgaagtgggaaaagctcaataatgagatcagatgcacccattggcaaatgcaattctgaatgcatcactccaaatggaagcattcccaatgacaaaccatttcaaaatgtaaacaggatcacatatggggcctgtcccagatatgttaagcaaaacactctgaaattggcaacagggatgcgaaatgtaccagagaaacaaactagaggcatatttggcgcaatcgcgggtttcatagaaaatggttgggagggaatggtggatggttggtacggtttcaggcatcaaaattctgagggaataggacaagcagcagatctcaaaagcactcaagcagcaatcaaccaaatcaatgggaagctgaataggttgatcgggaaaaccaacgagaaattccatcagattgaaaaagaattctcagaagtagaagggagaattcaggacctcgagaaatatgttgaggacactaaaatagatctctggtcatacaacgcggagcttcttgttgccctggagaaccaacatacaattgatctaactgactcagaaatgaacaaactgtttgaaagaacaaagaagcaactgagggaaaatgctgaggatatgggcaatggttgtttcaaaatataccacaaatgtgacaatgcctgcatagggtcgatcagaaatggaacttatgaccatgatgtatacagagatgaggcattgaacaaccggttccagatcaaaggtgttgagctgaagtcaggatacaaagattggatcctatggatttcctttgccatatcatgttttttgctttgtgttgctttgttggggttcatcatgtgggcctgccaaaaaggcaacattaggtgcaacatttgcatttga

SEQ ID NO: 31120 - RNA, 1701 nt, synthetic construct; identical to SEQ ID NO: 31020
  misc_feature 1..1701: note = hemagglutinin__InfluenzaA__ABC67319
  source 1..1701: mol_type = other RNA

SEQ ID NO: 31121 - RNA, 1701 nt, synthetic construct
  misc_feature 1..1701: note = hemagglutinin__InfluenzaA__ABC67454
  source 1..1701: mol_type = other RNA
atgaagactatcattgctttgagctacattttatgcctggttttcgctcaagaacttcccggaaatgacaacagcacggcaacgctgtgtctggggcatcatgcagtgccaaacggaacgctagtgaaaacaatcactaatgaccaaattgaagtaactaatgctactgagctggttcagagttcctcaacaggtagaatatgcgacagtcctcaccaaatccttgatggagaaaactgcacactaatagatgctctattgggagaccctcattgtgatggcttccaaaataaggaatgggacctttttgttgaacgcagcaaagcctacagcaactgttacccttatgatgtgccggattatgtctcccttaggtcactagttgcctcatcaggcacgctggagtttaacaatgaaagcttcaattggactggagtcgctcagaatggaacaagctctgcttgcaaaaggagatctgataaaagtttctttagtagattgaattggttgcaccaattaaaatacaaatatccagcactgaacgtgactatgccaaacaatgaaaaatttgacaaattgtacatttggggggttcaccacccgggtacagacagtgaccaaatcagcctatatgctcaagcatcggggagagtcacagtctctaccaaaagaagccaacaaactgtaatcccgaatatcggatctagaccctgggtaaggggtgtctccagcagaataagcatctattggacaatagtaaaaccgggagacatacttttgattaacagcacagggaatctaattgctcctcggggttacttcaaaatacgaagtgggaaaagctcaataatgaggtcagatgcacccattggcaaatgcaattctgaatgcatcactccaaatggaagcattcccaatgacaaaccatttcaaaatgtaaacaggatcacatatggggcctgtcccagatatgttaagcaaaacactctgaaattggcaacagggatgcggaatgtgccagagaaacaaactagaggcatattcggtgcaatcgcgggcttcatagaaaatggttgggagggaatgatggacggttggtacggtttcaggcatcaaaattctgagggcacagggcaagcagcagatcttaaaagcactcaagcagcaatcaaccaaatcaacgggaaactgaataggttaatcgagaaaacgaacgagaaattccatcaaattgaaaaagaattctcagaagtagaagggagaattcaggacctcgagaaatatgttgaggacactaaaatagatctctggtcgtacaatgcggagcttcttgttgccctggagaaccaacatacaattgatctaactgactcagaaatgaacaaactgtttgaaagaacaaagaagcaactgagggaaaatgctgaggatatgggcaatggttgtttcaaaatataccacaaatgtgacaatgcctgcatagggtcaatcagaaatggaacttatgaccatgatgtatacagagacgaagcattgaacaaccggttccagatcaaaggtgttgagctgaagtcaggatacaaagattgggtcctatggatttcctttgccatatcatgttttttgctttgtattgttttgctggggttcatcatgtgggcctgccaaaaaggcaacattaggtgcaacatttgcatttga

SEQ ID NO: 31122 - RNA, 1701 nt, synthetic construct
  misc_feature 1..1701: note = hemagglutinin__InfluenzaA__ABC67471
  source 1..1701: mol_type = other RNA
atgaagactatcattgctttgagctacattctatgcctggttttcgctcaaaaacttcccggaaatgacaacagcacggcaacgctgtgtctggggcatcatgcagtgccaaacggaacgctagtgaaaacaatcacgaatgaccaaattgaagtaactaatgctactgagctggttcagagttcctcaacaggtagaatatgcgacagtcctcaccaaatccttgatggagaaaactgcacactaatagatgctctattgggagaccctcattgtgatggcttccaaaataaggaatgggacctttttgttgaacgcagcaaagcctacagcaactgttacccttatgatgtgccggattatgtctcccttaggtcactagttgcctcatcaggcacgctggagtttaacaatgaaagcttcaattggactggagtcgctcagaatggaacaagctctgcttgcaaaaggagatctgataaaagtttctttagtagattgaattggttgcaccaattaaaatacaaatatccagcactgaacgtgactatgccaaacaatgaaaaatttgacaaattgtacatttggggggttcaccacccgggtacagacagtgaccaaatcagcctatatgctcaagcatcggggagagtcacagtctctaccaaaagaagccaacaaactgtaatcccgaatatcggatctagaccctgggtaaggggtgtctccagcagaataagcatctattggacaatagtaaaaccgggagacatacttttgattaacagcacagggaatctaattgctcctcggggttacttcaaaatacgaagtgggaaaagctcaataatgaggtcagatgcacccattggcaaatgcaattctgaatgcatcactccaaatggaagcattcccaatgacaaaccatttcaaaatgtaaacaggatcacatatggggcctgtcccagatatgttaagcaaaacactctgaaattggcaacagggatgcggaatgtgccagagaaacaaactagaggcatattcggtgcaatcgcgggcttcatagaaaatggttgggagggaatgatggacggttggtacggtttcaggcatcaaaattctgagggcacagggcaagcagcagatcttaaaagcactcaagcagcaatcaaccaaatcaacgggaaactgaataggttaatcgagaaaacgaacgagaaattccatcaaattgaaaaagaattctcagaagtagaagggagaattcaggacctcgagaaatatgttgaggacactaaaatagatctctggtcgtacaatgcggagcttcttgttgccctggagaaccaacatacaattgatctaactgactcagaaatgaacaaactgtttgaaagaacaaagaagcaactgagggaaaatgctgaggatatgggcaatggttgtttcaaaatataccacaaatgtgacaatgcctgcatagggtcaatcagaaatggaacttatgaccatgatgtatacagagacgaagcattgaacaaccggttccagatcaaaggtgttgagctgaagtcaggatacaaagattgggtcctatggatttcctttgccatatcatgttttttgctttgtattgttttgctggggttcatcatgtgggcctgccaaaaaggcaacattaggtgcaacatttgcatttga

SEQ ID NO: 31123 - RNA, 1701 nt, synthetic construct
  misc_feature 1..1701: note = hemagglutinin__InfluenzaA__ABC67554
  source 1..1701: mol_type = other RNA
atgaagactatcattgctttgagctacattctatgtctggttttcgctcaaaaacttcccggaaatgacaacagcacggcaacgctgtgccttgggcaccatgcagtaccaaacggaacgatagtgaaaacaatcacgaatgaccaaattgaagttactaatgctactgagctggttcagagttcctcaacaggtggaatatgcgacagtcctcatcagatccttgatggagaaaactgcacactaatagatgctctattgggagaccctcagtgtgatggcttccaaaataagaaatgggacctttttgttgaacgcagcaaagcctacagcaactgttacccttatgatgtgccggattatgcctcccttaggtcactaattgcctcatccggcacactggagtttaacaatgaaagcttcaattggactggagtcactcaaaatggaacaagctctgcttgcaaaaggagatctaatagcagtttctttagtagattgaattggttgacccacttaaaattcaaatacccagcattgaacgtgactatgccaaacaatgaagaatttgacaaattgtacatttggggggttcaccacccgggtacagacaatgaccaaatcagcctatatgctcaagcatcaggaagaatcacagtctctaccaaaagaagccaacaaactgtaatcccgaatatcggatctagacccagggtaagggatattcccagcagaataagcatctattggacaatagtaaaaccgggagacatacttttgattaacagcacagggaatctaattgctcctcggggttactttaaaatacgaagtgggaaaagctcaataatgagatcagatgcacccattgtcaaatgcaattctgaatgcattactccaaatggaagcattcccaatgacaaaccatttcaaaatgtaaacaggatcacatatggggcctgtcccagatatgttaagcaaaacactctgaaattggcaacagggatgcgaaatgtaccagagaaacaaactagaggcatatttggcgcaatcgcgggtttcatagaaaatggttgggagggaatggtggatggttggtacggtttcaggcatcaaaattctgagggaataggacaagcagcagatctcaaaagcactcaagcagcaatcgaccaaatcaatgggaagctgaataggttgatcgggaaaaccaacgagaaattccatcagattgaaaaagaattctcagaagtagaagggagaattcaggacctcgagaaatatgttgaggacactaaaatagatctctggtcatacaacgcggagcttcttgttgccctggagaaccaacatacaattgatctaactgactcagaaatgaacaaactgtttgaaagaacaaagaagcaactgagggaaaatgctgaggatatgggcaatggttgtttcaaaatataccacaaatgtgacaatgcctgcatagggtcaatcagaaatggaacttatgaccatgatgtatacagagatgaagcattaaacaaccggttccagatcaaaggtgttgagctgaagtcaggatacaaagattggatcctatggatttcctttgccatatcatgttttttgctttgtgttgctttgttggggttcatcatgtgggcctgccaaaaaggcaacattaggtgcaacatttgcatttga

SEQ ID NO: 31124 - RNA, 1701 nt, synthetic construct
  misc_feature 1..1701: note = hemagglutinin__InfluenzaA__ABC67565
  source 1..1701: mol_type = other RNA
atgaagactatcattgctttgagctacattttctgtctggttctcggccaagactttccaggaaatgacaacagcacagcaacgctgtgcctggggcatcatgcggtgccaaacggaacactagtgaaaacaatcacaaatgatcagattgaagtgactaatgctactgagctggttcagagttcctcaacggggaaaatatgcaacaatcctcatcgaatccttgatggaatagactgcacactgatagatgctctattgggggaccctcattgtgatggctttcaaaatgagacatgggaccttttcgttgaacgcagcaaagctttcagcaactgttacccttatgatgtgccagattatgcctcccttaggtcactagttgcctcgtcaggcactctggagtttatcaatgaaggcttcacttggactggggtcactcagaatgggggaagcaatgcttgcaaaaggggacctgatatcggttttttcagtagactgaactggttgtacaaatcaggaagcacatatccagtgctgaacgtgactatgccaaacaatgacaattttgacaaactatacatttggggggttcaccacccgagcacggaccaagaacaaaccagcctatatgttcaagcatcagggagagtcacagtctctaccaagagaagccagcaaactataatcccgaatatcgggtctagaccctgggtaaggggtctgtctagtagaataagcatctattggacaatagttaaaccgggagacatactggtaattaatagtaatgggaacctaattgctcctcggggttatttcaaaatgcgcactgggaaaagctcaataatgaggtcagatgcacctattggcacctgcatttctgaatgcatcactccaaatggaagcattcccaatgacaagccctttcaaaacgtaaacaagatcacatatggggcatgtcccaagtatgttaagcaaaacaccctgaagttggcaacagggatgcggaatgtaccagagaaacaaactagaggcctattcggcgcaatagcaggtttcatagaaaatggttgggagggaatgatagacggttggtacggtttcaggcatcaaaattctgagggcacaggacaagcagcagatcttaaaagcactcaagcagccatcgaccaaatcaatgggaaactgaatagggtaatcgagaagacgaacgagaaattccatcaaatcgaaaaggaattctcagaagtagaagggagaattcaggacctcgagaaatacgttgaagacactaaaatagatctctggtcttacaatgcggagcttcttgtcgctctggagaaccaacatacaattgatctgactgactcggaaatgaacaaactgtttgaaaaaacaaggaggcaactgagggaaaatgctgaggacatgggcaatggttgcttcaaaatataccacaaatgtgacaatgcttgcatagggtcaatcagaaatgggacttatgaccatgatgtatacagagacgaagcattaaacaaccggtttcagatcaaaggtgttgaactgaagtcaggatacaaagactggatcctgtggatttcctttgccatatcatgctttttgctttgtgttgttttgctggggttcatcatgtgggcctgccagaaaggcaacattaggtgcaacatttgcatttga

SEQ ID NO: 31125 - RNA, 1701 nt, synthetic construct
  misc_feature 1..1701: note = hemagglutinin__InfluenzaA__ABC67576
  source 1..1701: mol_type = other RNA
atgaagactatcattgctttgagctacattttatgtctggttttcgctcaaaaacttcccggaaatgacaacagcatggcaacgctgtgcctgggacaccatgcagtgccaaacggaacgctagtgaaaacaatcacgaatgaccaaattgaagtgactaatgctactgagctggttcagagttcctcaacaggtagaatatgcgacagtcctcaccgaatccttgatggagaaaactgcacactgatagatgctctattgggagaccctcattgtgatggcttccaaaataaggaatgggacctttttgttgaacgcagcaaagcctacagcaactgttacccttatgatgtgccggattatgcctcccttaggtcactagttgcctcatccggcaccctggagtttaacaatgaaagcttcaattggactggagtcgctcagaatggaacaagctatgcttgcaaaaggagatctattaaaagtttctttagtagattgaattggttgcaccaattaaaatacaaatatccagcactgaacgtgactatgccaaacaatgacgaatttgacaaattgtacatttggggggttcaccacccgagtacggacagtgaccaaaccagcctatatgctcaagcatcagggagagtcacagtctctaccaaaagaagccaacaaactgtaatcccgaatatcggatctagaccctgggtaaggggtgtctccagcagaataagcatctattggacaatagtaaaaccgggagacatacttttgattaacagcacagggaatctaattgctcctcggggttacttcaaaatacgaagtgggaaaagctcaataatgaggtcagatgcacccattggcaaatgcaattctgaatgcatcactccaaatggaagcattcccaatgacaaaccatttcaaaatgtaaacaggatcacatatggggcctgtcccagatatgttaagcaaaacactctgaaattggcaacagggatgcggaatgtaccagagaagcaaactagaggcatattcggcgcaatcgcaggtttcatagaaaatggttgggagggaatggtagacggttggtacggtttcaggcatcaaaattctgagggcacaggacaagcagcagatcttaaaagcactcaagcagcaatcaaccaaatcaacgggaaactgaataggttaatcgagaaaacgaacgagaaattccatcaaattgaaaaagaattctcagaagtagaagggagaattcaggacctcgagaaatatgttgaggacactaaaatagatctctggtcgtacaacgcggagcttcttgttgccctggagaaccaacatacaattgatctaactgactcagaaatgaacaaactgtttgaaagaacaaggaagcaactgagggaaaatgctgaggatatgggcaatggttgtttcaaaatataccacaaatgtgacaatgcctgcatagggtcaatcagaaatggaacttatgaccatgatgtatacagagacgaagcattaaacaaccggttccagatcaaaggtgttgagctgaagtcaggatacaaagattggatcctatggatttcctttgccatatcatgttttttgctttgtgttgttttgctggggttcatcatgtgggcctgccaaaaaggcaacattaggtgcaacatttgcatttga

SEQ ID NO: 31126 - RNA, 1701 nt, synthetic construct
  misc_feature 1..1701: note = hemagglutinin__InfluenzaA__ABC67587
  source 1..1701: mol_type = other RNA
atgaagactatcattgctttgagctacattctatgtctggttttcgctcaaaaacttcccggaaatgacaacagcacggcaacgctgtgccttgggcaccatgcagtaccaaacggaacgatagtgaaaacaatcacgaatgaccaaattgaagttactaatgctactgagctggttcagagttcctcaacaggtggaatatgcgacagtcctcatcagatccttgatggagaaaactgcacactaatagatgctctattgggagaccctcagtgtgatggcttccaaaataagaaatgggacctttttgttgaacgcagcaaagcctacagcaactgttacccttatgatgtgccggattatgcctcccttaggtcactagttgcctcatccggcacactggagtttaacaatgaaagcttcaattggactggagtcactcaaaatggaacaagctctgcttgcaaaaggagatctaataacagtttctttagtagattgaattggttgacccatttaaaattcaaatacccagcattgaacgtgactatgccaaacaatgaaaaatttgacaaattgtacatttggggggttcaccacccgggtacggacaatgaccaaatcagcctatatgctcaagcatcaggaagaatcacagtctctaccaaaagaagccaacaaactgtaatcccgaatatcggatctagacccagggtaagggatatccccagcagaataagcatctattggacaatagtaaaaccgggagacatacttttgattaacagcacagggaatctaattgctcctcggggttacttcaaaatacgaagtgggaaaagctcaataatgagatcagatgcacccattggcaaatgcaattctgaatgcatcactccaaatggaagcattcccaatgacaaaccatttcaaaatgtaaacaggatcacatatgggccctgtcccagatatgttaagcaaaacactctgaaattggcaacagggatgcgaaatgtaccagagaaacaaactagaggcatatttggcgcaatcgcgggtttcatagaaaatggttgggagggaatggtggatggttggtacggtttcaggcatcaaaattctgagggaataggacaagcagcagatctcaaaagcactcaagcagcaatcaaccaaatcaatgggaagctgaataggttgatcgggaaaaccaacgagaaattccatcagattgaaaaagaattctcagaagtagaagggagaattcaggacctcgagaaatatgttgaggacactaaaatagatctctggtcatacaacgcggagcttcttgttgccctggagaaccaacatacaattgatctaactgactcagaaatgaacaaactgtttgaaagaacaaagaagcaactgagggaaaatgctgaggatatgggcaatggttgtttcaaaatataccacaaatgtgacaatgcctgcatagggtcaatcagaaatggaacttatgaccatgatgtatacagagatgaagcattaaacaaccggttccagatcaaaggtgttgagctgaagtcaggatacaaagattggatcctatggatttcctttgccatatcatgttttttgctttgtgttgctttgttggggttcatcatgtgggcctgccaaaaaggcaacattaggtgcaacatttgcatttga

SEQ ID NO: 31127 - RNA, 1701 nt, synthetic construct; identical to SEQ ID NO: 30822
  misc_feature 1..1701: note = hemagglutinin__InfluenzaA__ABC67598
  source 1..1701: mol_type = other RNA

SEQ ID NO: 31128 - RNA, 1701 nt, synthetic construct
  misc_feature 1..1701: note = hemagglutinin__InfluenzaA__ABC67609
  source 1..1701: mol_type = other RNA
atgaagactatcattgctttgagctacattttatgcctggttttcgctcaaaaacttcccggaaatgacaacagcacggcaacgctgtgtctggggcatcatgcagtgccaaacggaacgctagtgaaaacaatcacgaatgaccaaattgaagtaactaatgctactgagctggttcagagttcctcaacaggtagaatatgcgacagtcctcaccaaatccttgatggagaaaactgcacactaatagatgctctattgggagaccctcattgtgatggcttccaaaataaggaatgggacctttttgttgaacgcagcaaagcctacagcaactgttacccttatgatgtgccggattatgtctcccttaggtcactagttgcctcatcaggcacgctggagtttaacaatgaaagcttcaattggactggagtcgctcagaatggaacaagctctgcttgcaaaaggagatctgataaaagtttctttagtagattgaattggttgcaccaattaaaatacaaatatccagcactgaacgtgactatgccaaacaatgaaaaatttgacaaattgtacatttggggggttcaccacccgggtacagacagtgaccaaatcagcctatatgctcaagcatcggggagagtcacagtctctaccaaaagaagccaacaaactgtaatcccgaatatcggatctagaccctgggtaaggggtgtctccagcagaataagcatctattggacaatagtaaaaccgggagacatacttttgattaacagcacagggaatctaattgctcctcggggttacttcaaaatacgaagtgggaaaagctcaataatgaggtcagatgcacccattggcaaatgcaattctgaatgcatcaccccaaatggaagcattcccaatgacaaaccatttcaaaatgtaaacaggatcacatatggggcctgtcccagatatgttaagcaaaacactctgaaattggcaacagggatgcggaatgtgccagagaaacaaactagaggcatattcggtgcaatcgcgggcttcatagaaaatggttgggagggaatgatggacggttggtacggtttcaggcatcaaaattctgagggcacagggcaagcagcagatcttaaaagcactcaagcagcaatcaaccaaatcaacgggaaactgaataggttaatcgagaaaacgaacgagaaattccatcaaattgaaaaagaattctcagaagtagaagggagaattcaggacctcgagaaatatgttgaggacactaaaatagatctctggtcgtacaatgcggagcttcttgttgccctggagaaccaacatacaattgatctaactgactcagaaatgaacaaactgtttgaaagaacaaagaagcaactgagggaaaatgctgaggatatgggcaatggttgtttcaaaatataccacaaatgtgacaatgcctgcatagggtcaatcagaaatggaacttatgaccatgatgtatacagagacgaagcattgaacaaccggttccagatcaaaggtgttgagctgaagtcaggatacaaagattgggtcctatggatttcctttgccatatcatgttttttgctttgtattgttttgctggggttcatcatgtgggcctgccaaaaaggcaacattaggtgcaacatttgcatttga

SEQ ID NO: 31129 - RNA, 1701 nt, synthetic construct; identical to SEQ ID NO: 31066
  misc_feature 1..1701: note = hemagglutinin__InfluenzaA__ABC67620
  source 1..1701: mol_type = other RNA

SEQ ID NO: 31130 - RNA, 1701 nt, synthetic construct; identical to SEQ ID NO: 31066
  misc_feature 1..1701: note = hemagglutinin__InfluenzaA__ABC67631
  source 1..1701: mol_type = other RNA

SEQ ID NO: 31131 - RNA, 1701 nt, synthetic construct; identical to SEQ ID NO: 31066
  misc_feature 1..1701: note = hemagglutinin__InfluenzaA__ABC67642
  source 1..1701: mol_type = other RNA

SEQ ID NO: 31132 - RNA, 1701 nt, synthetic construct
  misc_feature 1..1701: note = hemagglutinin__InfluenzaA__ABC67653
  source 1..1701: mol_type = other RNA
atgaagactatcattgctttgagctacattttatgcctggttttcgctcaaaaacttcccggaaatgacaacagcacggcaacgctgtgtctggggcatcatgcagtgccaaacggaacgctagtgaaaacaatcacgaatgaccaaattgaagtaactaatgctactgagctggttcagagttcctcaacaggtagaatatgcgacagtcctcaccaaatccttgatggagaaaactgcacgctaatagatgctctattgggagaccctcattgtgatggcttccaaaataaggaatgggacctttttgttgaacgcagcaaagcctacagcaactgttacccttatgatgtgccggattatgtctcccttaggtcactagttgcctcatcaggcacgctggagtttaacaatgaaagcttcaattggactggagtcgctcagaatggaacaagctctgcttgcaaaaggagatctgataaaagtttctttagtagattgaattggttgcaccaattaaaatacaaatatccagcactgaacgtgactatgccaaacaatgaaaaatttgacaaattgtacatttggggggttcaccacccgggtacagacagtgaccaaatcagcctatatgctcaagcatcggggagagtcacagtctctaccaaaagaagccaacaaactgtaatcccgaatatcggatctagaccctgggtaaggggtgtctccagcagaataagcatctattggacaatagtaaaaccgggagacatacttttgattaacagcacagggaatctaattgctcctcggggttacttcaaaatacgaagtgggaaaagctcaataatgaggtcagatgcacccattggcaaatgcaattctgaatgcatcactccaaatggaagcattcccaatgacaaaccatttcaaaatgtaaacaggatcacatatggggcctgtcccagatatgttaagcaaaacactctgaaattggcaacagggatgcggaatgtgccagagaaacaaactagaggcatattcggtgcaatcgcgggcttcatagaaaatggttgggagggaatgatggacggttggtacggtttcaggcatcaaaattctgagggcacagggcaagcagcagatcttaaaagcactcaagcagcaatcaaccaaatcaacgggaaactgaataggttaatcgagaaaacgaacgagaaattccatcaaattgaaaaagaattctcagaagtagaagggagaattcaggacctcgagaaatatgttgaggacactaaaatagatctctggtcgtacaatgcggagcttcttgttgccctggagaaccaacatacaattgatctaactgactcagaaatgaacaaactgtttgaaagaacaaagaagcaactgagggaaaatgctgaggatatgggcaatggttgtttcaaaatataccacaaatgtgacaatgcctgcatagggtcaatcagaaatggaacttatgaccatgatgtatacagagacgaagcattgaacaaccggttccagatcaaaggtgttgagctgaagtcaggatacaaagattgggtcctatggatttcctttgccatatcatgttttttgctttgtgttgttttgctggggttcatcatgtgggcctgccaaaaaggcaacattaggtgcaacatttgcatttga

SEQ ID NO: 31133 - RNA, 1701 nt, synthetic construct
  misc_feature 1..1701: note = hemagglutinin__InfluenzaA__ABC67697
  source 1..1701: mol_type = other RNA
atgaagactatcattgctttgagctacattctatgtctggttttcgctcaaaaacttcccggaaatgacaacagcacggcaacgctgtgccttgggcaccatgcagtaccaaacggaacgatagtgaaaacaatcacgaatgaccaaattgaagttactaatgctactgagctggttcagagttcctcaacaggtgaaatatgcgacagccctcatcagatccttgatggagaaaactgcacactaatagatgctctattgggagaccctcagtgtgatggcttccaaaataaggaatgggacctttttgttgaacgcagcaaagcctacagcaactgttacccttatgatgtgccggattatgcctcccttaggtcactagttgcctcatccggcacactggagtttaacaatgaaagcttcaattggactggagtcactcaaaatggaacaagctctgcttgcaaaaggagatctaataacagtttctttagtagattgaattggttgacccacttaaaattcaaatacccagcattgaacgtgactatgccaaacaatgaaaaatttgacaaattgtacatttggggggttcaccacccgggtacggacaatgaccaaatcttcctgtatgctcaagcatcaggaagaatcacagtctctaccaaaagaagccaacaaactgtaatcccgaatatcggatctagacccagagtaaggaatatccccagcagaataagcatctattggacaatagtaaaaccgggagacatacttttgattaacagcacagggaatctaattgctcctaggggttacttcaaaatacgaagtgggaaaagctcaataatgagatcagatgcacccattggcaaatgcaattctgaatgcatcactccaaatggaagcattcccaatgacaaaccatttcaaaatgtaaacaggatcacatatggggcctgtcccagatatgttaagcaaaacactctgaaattggcaacagggatgcgaaatgtaccagagaaacaaactagaggcatatttggcgcaatcgcgggtttcatagaaaatggttgggagggaatggtggatggttggtacggtttcaggcatcaaaattctgagggaataggacaagcagcagatctcaaaagcactcaagcagcaatcaatcaaatcaatgggaagctgaataggttgatcgggaaaaccaacgagaaattccatcagattgaaaaagaattctcagaagtagaagggagaattcaggacctcgagaaatatgttgaggacactaaaatagatctctggtcatacaacgcggagcttcttgttgccctggagaaccaacatacaattgatctaactgactcagaaatgaacaaactgtttgaaagaacaaagaagcaactgagggaaaatgctgaggatatgggcaatggttgtttcaaaatataccacaaatgtgacaatgcctgcataggatcaatcagaaatggaacttatgaccatgatgtatacagagatgaagcattaaacaaccggttccagatcaaaggcgttgagctgaaatcaggatacaaagattggatcctatggatttcctttgccatatcatgttttttgctttgtgttgctttgttggggttcatcatgtgggcctgccaaaaaggcaacattaggtgcaacatttgcatttga

SEQ ID NO: 31134 - RNA, 1701 nt, synthetic construct
  misc_feature 1..1701: note = hemagglutinin__InfluenzaA__ABC67708
  source 1..1701: mol_type = other RNA
atgaagactatcattgctttgagctacattctatgtctggttttcgctcaaaaacttcccggaaatgacaacagcacggcaacgctgtgccttgggcaccatgcagtaccaaacggaacgatagtgaaaacaatcacgaatgaccaaattgaagttactaatgctaccgagctggttcagagttcctcaacaggtggaatatgcgacagtcctcatcagatccttgatggagaaaactgcacactaatagatgctctattgggagaccctcagtgtgatggcttccaaaataagaaatgggacctttttgttgaacgcagcaaagcctacagcaactgttacccttatgatgtgccggattatgcctcccttaggtcactagttgcctcatccggcacactggagtttaacaatgaaagcttcaattggactggagtcactcaaaatggaacaagctctgcttgcaaaaggagatctaataacagtttctttagtagattgaattggttgacccacttaaaattcaaatacccagcattgaacgtgactatgccaaacaatgaaaaatttgacaaattgtacatttggggggttcaccacccgggtacggacaatgaccaaatcttcctgtatgctcaagcatcaggaagaatcacagtctctaccaaaagaagccaacaaactgtaatcccgaatatcggatctagacccagagtaaggaatatccccagcagaataagcatctattggacaatagtaaaaccgggagacatacttttgattaacagcacagggaatctaattgctcctaggggttacttcaaaatacgaagtgggaaaagctcaataatgagatcagatgcacccattggcaaatgcaattctgaatgcatcactccaaatggaagcattcccaatgacaaaccatttcaaaatgtaaacaggatcacatatggggcctgtcccagatatgttaagcaaaacactctgaaattggcaacagggatgcgaaatgtaccagagaaacaaactagaggcatatttggcgcaatcgcgggtttcatagaaaatggttgggagggaatggtggatggttggtacggtttcaggcatcaaaattctgagggaataggacaagcagcagatctcaaaagcactcaagcagcaatcaatcaaatcaatgggaagctgaataggttgatcgggaaaaccaacgagaaattccatcagattgaaaaagaattctcagaagtagaagggagaattcaggacctcgagaaatatgttgaggacactaaaatagatctctggtcatacaacgcggagcttcttgttgccctggagaaccaacatacaattgatctaactgactcagaaatgaacaaactgtttgaaagaacaaagaagcaactgagggaaaatgctgaggatatgggcaatggttgtttcaaaatataccacaaatgtgacaatgcctgcataggatcaatcagaaatggaacttatgaccatgatgtatacagagatgaagcattaaacaaccggttccagatcaaaggcgttgagctgaagtcaggatacaaagattggatcctatggatttcctttgccatatcatgttttttgctttgtgttgctttgttggggttcatcatgtgggcctgccaaaaaggcaacattaggtgcaacatttgcatttga

SEQ ID NO: 31135 - RNA, 1701 nt, synthetic construct
  misc_feature 1..1701: note = hemagglutinin__InfluenzaA__ABC67719
  source 1..1701: mol_type = other RNA
atgaagactatcattgctttgagctacattctatgtctggttttcgctcaaaaacttcccggaaatgacaacagcacggcaacgctgtgccttgggcaccatgcagtaccaaacggaacgatagtgaaaacaatcacgaatgaccaaattgaagttactaatgctactgagctggttcagagttcctcaacaggtggaatatgcgacagtcctcatcagatccttgatggagaaaactgcacactaatagatgctctattgggagaccctcagtgtgatggcttccaaaataagaaatgggacctttttgttgaacgcagcaaagcctacagcaactgttacccttatgatgtgccggattatgcctcccttaggtcactagttgcctcatccggcacactggagtttaacaatgaaagcttcaattggactggagtcactcaaaatggaacaagctctgcttgcaaaaggagatctaataacagtttctttagtagattgaattggttgacccacttaaaattcaaatacccagcattgaacgtgactatgccaaacaatgaaaaatttgacaaattgtacatttggggggttcaccacccgggtacggacaatgaccaaatcttcctgtatgctcaagcatcaggaagaatcacagtctctaccaaaagaagccaacaaactgtaatcccgaatatcggatctagacccagagtaaggaatatccccagcagaataagcatctattggacaatagtaaaaccgggagacatacttttgattaacagcacagggaatctaattgctcctaggggttacttcaaaatacgaagtgggaaaagctcaataatgagatcagatgcacccattggcaaatgcaattctgaatgcatcactccaaatggaagtattcccaatgacaaaccatttcaaaatgtaaacaggatcacatatggggcctgtcccagatatgttaagcaaaacactctgaaattggcaacagggatgcgaaatgtaccagagaaacaaactagaggcatatttggcgcaatcgcgggtttcatagaaaatggttgggagggaatggtggatggttggtacggtttcaggcatcaaaattctgagggaataggacaagcagcagatctcaaaagcactcaagcagcaatcaatcaaatcaatgggaagctgaataggttgatcgggaaaaccaacgagaaattccatcagattgaaaaagaattctcagaagtagaagggagaattcaggacctcgagaaatatgttgaggacactaaaatagatctctggtcatacaacgcagagcttcttgttgccctggagaatcaacatacaattgatctaactgactcagaaatgaacaaactatttgaaagaacaaagaagcaactgagggaaaatgctgaggatatgggcaatggttgtttcaaaatataccacaaatgtgacaatgcctgcataggatcaatcagaaatggaacttatgaccatgatgtatacagagatgaagcattaaacaaccggttccagatcaaaggcgttgagctgaagtcaggatacaaagattggatcctatggatttcctttgccatatcatgttttttgctttgtgttgctttgttggggttcatcatgtgggcctgccaaaaaggcaacattaggtgcaacatttgcatttga

SEQ ID NO: 31136 - RNA, 1701 nt, synthetic construct; identical to SEQ ID NO: 31135
  misc_feature 1..1701: note = hemagglutinin__InfluenzaA__ABC67733
  source 1..1701: mol_type = other RNA

SEQ ID NO: 31137 - RNA, 1701 nt, synthetic construct
  misc_feature 1..1701: note = hemagglutinin__InfluenzaA__ABC67806
  source 1..1701: mol_type = other RNA
atgaagactatcattgctttgagctacattctatgtctggttttcgctcaaaaacttcccggaaatgacaacagcacggcaacgctgtgccttgggcaccatgcagtaccaaacggaacgatagtgaaaacaatcacgaatgaccaaattgaagttactaatgctactgagctggttcagagttcctcaacaggtggaatatgcgacagtcctcatcagatccttgatggagaaaactgcacactaatagatgctctattgggagaccctcagtgtgatggcttccaaaataagaaatgggacctttttgttgaacgcagcaaagcctacagcaactgttacccttatgatgtgccggattatgcctcccttaggtcactaattgcctcatccggcacactggagtttaacaatgaaagcttcaattggactggagtcactcaaaatggaacaagctctgcttgcaaaaggagatctaatagcagtttctttagtagattgaattggttgacccacttaaaattcaaatacccagcattgaacgtgactatgccaaacaatgaagaatttgacaaattgtacatttggggggttcaccacccgggtacatacaatgaccaaatcagcctatatgctcaagcatcaggaagaatcacagtctctaccaaaagaagccaacaaactgtaatcccgaatatcgggtctagacccagggtaagggatatccccagcagaataagcatctattggacaatagtaaaaccgggagacatacttttgattaacagcacagggaatctaattgctcctcggggttacttcaaaatacgaagtgggaaaagctcaataatgagatcagatgcacccattggcaaatgcaattctgaatgcatcactccaaatggaagcattcccaatgacaaaccatttcaaaatgtaaacaggatcacatatggggcctgtcccagatatgtcaagcaaaacactctgaaattggcaacagggatgcgaaatgtaccagagaaacaaactagaggcatatttggcgcaatcgcgggtttcatagaaaatggttgggagggaatggtggatggttggtacggtttcaggcatcaaaattctgagggaataggacaagcagcagatctcaaaagcactcaagcagcaatcgaccaaatcaatgggaagctgaataggttgatcgggaaaaccaacgagaaattccatcagattgaaaaagaattctcagaagtagaagggagaattcaggacctcgagaaatatgttgaggacactaaaatagatctctggtcatacaacgcggagcttcttgttgccctggagaaccaacatacaattgatctaactgactcagaaatgaacaaactgtttgaaagaacaaagaagcaactgagggaaaatgctgaggatatgggcaatggttgtttcaaaatataccacaaatgtgacaatgcctgcatagggtcaatcagaaatggaacttatgaccatgatgtatacagagatgaagcattaaacaaccggttccagatcaaaggtgttgagctgaagtcaggatacaaagattggatcctatggatttcctttgccatatcatgttttttgctttgtgttgctttgttggggttcatcatgtgggcctgccaaaaaggcaacattaggtgcaacatttgcatttga

SEQ ID NO: 31138 - RNA, 1701 nt, synthetic construct; identical to SEQ ID NO: 31024
  misc_feature 1..1701: note = hemagglutinin__InfluenzaA__ABC67817
  source 1..1701: mol_type = other RNA

SEQ ID NO: 31139 - RNA, 1701 nt, synthetic construct
  misc_feature 1..1701: note = hemagglutinin__InfluenzaA__ABC67828
  source 1..1701: mol_type = other RNA
atgaagactatcattgctttgagctacattctatgtctggttttcgctcaaaaacttcccggaaatgacaacagcacggcaacgctgtgccttgggcaccatgcagtaccaaacggaacgatagtgaaaacaatcacgaatgaccaaattgaagttactaatgctactgagctggttcagagttcctcaacaggtggaatatgcgacagtcctcatcagatccttgatggagaaaactgcacactaatagatgctctattgggagaccctcagtgtgatggcttccaaaataagaaatgggacctttttgttgaacgcagcaaagcctacagcaactgttacccttatgatgtgccggattatgcctcccttaggtcactagttgcctcatccggcacactggagtttaacaatgaaagcttcaattggactggagtcactcaaaatggaacaagctctgcttgcaaaaggagatctaataacagtttctttagtagattgaattggttgacccacttaaaattcaaatacccagcattgaacgtgactatgccaaacaatgaaaaatttgacaaattgtacatttggggggttcaccacccgggtacggacaatgaccaaatcttcctgtatgctcaagcatcaggaagaatcacagtctctaccaaaagaagccaacaaactgtaatcccgaatatcggatctagacccagagtaaggaatatccccagcagaataagcatctattggacaatagtaaaaccgggagacatacttttgattaacagcacagggaatctaattgctcctaggggttacttcaaaatacgaagtgggaaaagctcaataatgagatcagatgcacccattggcaaatgcaattctgaatgcatcactccaaatggaagcattcccaatgacaaaccatttcaaaatgtaaacaggatcacatatggggcctgtcccagatatgttaagcaaaacactctgaaattggcaacagggatgcgaaatgtaccagagaaacaaactagaggcatatttggcgcaatcgcgggtttcatagaaaatggttgggagggaatggtggatggttggtacggtttcaggcatcaaaattctgagggaataggacaagcagcagatctcaaaagcactcaagcagcaatcaatcaaatcaatgggaagctgaataggttgatcgggaaaaccaacgagaaattccatcagattgaaaaagaattctcagaagtagaagggagaattcaggacctcgagaaatatgttgaggacactaaaatagatctctggtcatacaacgcggagcttcttgttgccctggagaaccaacatacaattgatctaactgactcagaaatgaacaaactgtttgaaagaacaaagaagcaactgagggaaaatgctgaggatatgggcaatggttgtttcaaaatataccacaaatgtgacaatgcctgcataggatcaatcagaaatggaacttatgaccatgatgtatacagagatgaagcattaaacaaccggttccagatcaaaggcgttgagctgaagtcaggatacaaagattggatcctatggatttcctttgccatatcatgttttttgctttgtgttgctttgttggggttcatcatgtgggcctgccaaaaaggcaacattaggtgcaacatttgcatttga

SEQ ID NO: 31140 - RNA, 1701 nt, synthetic construct; identical to SEQ ID NO: 30998
  misc_feature 1..1701: note = hemagglutinin__InfluenzaA__ABC67839
  source 1..1701: mol_type = other RNA

SEQ ID NO: 31141 - RNA, 1701 nt, synthetic construct
  misc_feature 1..1701: note = hemagglutinin__InfluenzaA__ABC67850
  source 1..1701: mol_type = other RNA
atgaagactatcattgctttgagctacattttatgcctggttttcgctcaaaaacttcccggaaatgacaacagcacggcaacgctgtgtctggggcatcatgcagtgccaaacggaacgctagtgaaaacaatcacgaatgaccaaattgaagtaactaatgctactgagctggttcagagttcctcaacaggtagaatatgcgacagtcctcaccaaatccttgatggagaaaactgcacactaatagatgctctattgggagaccctcattgtgatggcttccaaaataaggaatgggacctttttgttgaacgcagcaaagcctacagcaactgttacccttatgatgtgccggattatgtctcccttaggtcactagttgcctcatcaggcacgctggagtttaacaatgaaagcttcaattggactggagtcgctcagaatggaacaagctctgcttgcaaaaggagatctgataaaagtttctttagtagattgaattggttgcaccaattaaaatacaaatatccagcactgaacgtgactatgccaaacaatgaaaaatttgacaaattgtacatttggggggttcaccacccgggtacagacagtgaccaaatcagcctatatgctcaagcatcggggagagtcacagtctctaccaaaagaagccaacaaactgtaatcccgaatatcggatctagaccctgggcaaggggtgtctccagcagaataagcatccattggacaatagtaaaaccgggagacatacttttgattaacagcacagggaatctaattgctcctcggggttacttcaaaatacgaagtgggaaaagctcaataatgaggtcagatgcacccattggcaaatgcaattctgaatgcatcactccaaatggaagcattcccaatgacaaaccatttcaaaatgtaaacaggatcacatatggggcctgtcccagatatgttaagcaaaacactctgaaattggcaacagggatgcggaatgtgccagagaaacaaactagaggcatattcggtgcaatcgcgggcttcatagaaaatggttgggagggaatgatggacggttggtacggtttcaggcatcaaaattctgagggcacagggcaagcagcagatcttaaaagcactcaagcagcaatcaaccaaatcaacgggaaactgaataggttaatcgagaaaacgaacgagaaattccatcaaattgaaaaagaattctcagaagtagaagggagaattcaggacctcgagaaatatgttgaggacactaaaatagatctctggtcgtacaatgcggagcttcttgttgccctggagaaccaacatacaattgatctaactgactcagaaatgaacaaactgtttgaaagaacaaagaagcaactgagggaaaatgctgaggatatgggcaatggttgtttcaaaatataccacaaatgtgacaatgcctgcatagggtcaatcagaaatggaacttatgaccatgatgtatacagagacgaagcattgaacaaccggttccagatcaaaggtgttgagctgaagtcaggatacaaagattgggtcctatggatttcctttgccatatcatgttttttgctttgtattgttttgctggggttcatcatgtgggcctgccaaaaaggcaacattaggtgcaacatttgcatttga

SEQ ID NO: 31142 - RNA, 1701 nt, synthetic construct; identical to SEQ ID NO: 30998
  misc_feature 1..1701: note = hemagglutinin__InfluenzaA__ABC67861
  source 1..1701: mol_type = other RNA

SEQ ID NO: 31143 - RNA, 1701 nt, synthetic construct; identical to SEQ ID NO: 31066
  misc_feature 1..1701: note = hemagglutinin__InfluenzaA__ABC67883
  source 1..1701: mol_type = other RNA

SEQ ID NO: 31144 - RNA, 1701 nt, synthetic construct
  misc_feature 1..1701: note = hemagglutinin__InfluenzaA__ABC67894
  source 1..1701: mol_type = other RNA
atgaagactatcattgctttgagctacattttatgcctggttttcgctcaaaaacttcccggaaatgacaacagcacggcaacgctgtgtctggggcatcatgcagtgccaaacggaacgctagtgaaaacaatcacgaatgaccaaattgaagtaactaatgctactgagctggttcagagttcctcaacaggtagaatatgcgacagtcctcaccaaatccttgatggagaaaactgcacactaatagatgctctattgggagaccctcattgtgatggcttccaaaataaggaatgggacctttttgttgaacgcagtaaagcctacagcaactgttacccttatgatgtgccggattatgtctcccttaggtcactagttgcctcatcaggcacgctggagtttaacaatgaaagcttcaattggactggagtcgctcagaatggaacaagctctgcttgcaaaaggagatctgataaaagtttctttagtaaattgaattggttgcaccaattaaaatacaaatatccagcactgaacgtgactatgccaaacaatgaaaaatttgacaaattgtacatttggggggttcaccacccgggtacagacagtgaccaaatcagcctatatgctcaagcatcagggagagtcacagtctctaccaaaagaagccaacaaactgtaatcccgaatatcggatctagaccctgggtaaggggtgtctccagcagaataagcatctattggacaatagtaaaaccgggagacatacttttgattaacagcacagggaatctaattgctcctcggggttacttcaaaatacgaagtgggaaaagctcaataatgaggtcagatgcacccattggcaaatgcaattctgaatgcatcactccaaatggaagcattcccaatgacaaaccatttcaaaatgtaaacaggatcacatatggggcctgtcccagatatgttaagcaaaacactctgaaattggcaacagggatgcggaatgtgccagagaaacaaactagaggcatattcggtgcaatcgcgggcttcatagaaaatggttgggagggaatgatggacggttggtacggtttcaggcatcaaaattctgagggcacagggcaagcagcagatcttaaaagcactcaagcagcaatcaaccaaatcaacgggaaactgaataggttaatcgagaaaacgaacgagaaattccatcaaattgaaaaagaattctcagaagtagaagggagaattcaggacctcgagaaatatgttgaggacactaaaatagatctctggtcgtacaatgcggagcttcttgttgccctggagaaccaacatacaattgatctaactgactcagaaatgaacaaactgtttgaaagaacaaagaagcaactgagggaaaatgctgaggatatgggcaatggttgtttcaaaatataccacaaatgtgacaatgcctgcatagggtcaatcagaaatggaacttatgaccatgatgtatacagagacgaagcattgaacaaccggttccagatcaaaggtgttgagctgaagtcaggatacaaagattgggtcctatggatttcctttgccatatcatgttttttgctttgtattgttttgctggggttcatcatgtgggcctgccaaaaaggcaacattaggtgcaacatttgcatttga

SEQ ID NO: 31145 - RNA, 1701 nt, synthetic construct; identical to SEQ ID NO: 31066
  misc_feature 1..1701: note = hemagglutinin__InfluenzaA__ABC67967
  source 1..1701: mol_type = other RNA

SEQ ID NO: 31146 - RNA, 1701 nt, synthetic construct; identical to SEQ ID NO: 31066
  misc_feature 1..1701: note = hemagglutinin__InfluenzaA__ABC67978
  source 1..1701: mol_type = other RNA

SEQ ID NO: 31147 - RNA, 1701 nt, synthetic construct
  misc_feature 1..1701: note = hemagglutinin__InfluenzaA__ABC67989
  source 1..1701: mol_type = other RNA
atgaagactatcattgctttgagctacattttatgcctggttttcgctcaaaaacttcccggaaatgacaacagcacggcaacgctgtgtctggggcatcatgcagtgccaaacggaacgctagtgaaaacaatcacgaatgaccaaattgaagtaactaatgctactgagctggttcagagttcctcaacaggtagaatatgcgacagtcctcaccaaatccttgatggagaaaactgcacactaatagatgctctattgggagaccctcattgtgatggcttccaaaataaggaatgggacctttttgttgaacgcagcaaagcctacagcaactgttacccttatgatgtgccggattatgtctcccttaggtcactagttgcctcatcaggcacgctggagtttaacaatgaaagcttcaattggactggagtcgctcagaatggaacaagctctgcttgcaaaaggagatctgataaaagtttctttagtagattgaattggttgcaccaattaaaatacaaatatccagcactgaaagtgactatgccaaacaatgaaaaatttgacaaattgtacatttggggggttcaccacccgggtacagacagtgaccaaatcagcctatatgctcaagcatcggggagagtcacagtctctaccaaaagaagccaacaaactgtaatcccgaatatcggatctagaccctgggtaaggggtgtctccagcagaataagcatctattggacaatagtaaaaccgggagacatacttttgattaacagcacagggaatctaattgctcctcggggttacttcaaaatacgaagtgggaaaagctcaataatgaggtcagatgcacccattggcaaatgcaattctgaatgcatcactccaaatggaagcattcccaatgacaaaccatttcaaaatgtaaacaggatcacatatggggcctgtcccagatatgttaagcaaaacactctgaaattggcaacagggatgcggaatgtgccagagaaacaaactagaggcatattcggtgcaatcgcgggcttcatagaaaatggttgggagggaatgatggacggttggtacggtttcaggcatcaaaattctgagggcacagggcaagcagcagatcttaaaagcactcaagcagcaatcaaccaaatcaacgggaaactgaataggttaatcgagaaaacgaacgagaaattccatcaaattgaaaaagaattctcagaagtagaagggagaattcaggacctcgagaaatatgttgaggacactaaaatagatctctggtcgtacaatgcggagcttcttgttgccctggagaaccaacatacaattgatctaactgactcagaaatgaacaaactgtttgaaagaacaaagaagcaactgagggaaaatgctgaggatatgggcaatggttgtttcaaaatataccacaaatgtgacaatgtctgcatagggtcaatcagaaatggaacttatgaccatgatgtatacagagacgaagcattgaacaaccggttccagatcaaaggtgttgagctgaagtcaggatacaaagattgggtcctatggatttcctttgccatatcatgttttttgctttgtattgttttgctggggttcatcatgtgggcctgccaaaaaggcaacattaggtgcaacatttgcatttga

SEQ ID NO: 31148 - RNA, 1701 nt, synthetic construct
  misc_feature 1..1701: note = hemagglutinin__InfluenzaA__ABC68000
  source 1..1701: mol_type = other RNA
atgaagactatcattgctttgagctacattttatgcctggttttcgctcaagaacttcccggaaatgacaacagcacggcaacgctgtgtctggggcatcatgcagtgccaaacggaacgctagtgaaaacaatcacgaatgaccaaattgaagtaactaatgctactgagctggttcagagttcctcaacaggtagaatatgcgacagtcctcaccaaatccttgatggagaaaactgcacactaatagatgctctattgggagaccctcattgtgatggcttccaaaataaggaatgggacctttttgttgaacgcagcaaagcctacagcaactgttacccttatgatgtgccggattatgtctcccttaggtcactagttgcctcatcaggcacgctggagtttaacaatgaaagcttcaattggactggagtcgctcagaatggaacaagctctgcttgcaaaaggagatctgataaaagtttctttagtagattgaattggttgcaccaattaaaatacaaatatccagcactgaacgtgactatgccaaacaatgaaaaatttgacaaattgtacatttggggggttcaccacccgggtacagacagtgaccaaatcagcctatatgctcaagcatcggggagagtcacagtctctaccaaaagaagccaacaaactgtaatcccgaatatcggatctagaccctgggtaaggggtgtctccagcagaataagcatctattggacaatagtaaaaccgggagacatacttttgattaacagcacagggaatctaattgctcctcggggttacttcaaaatacgaagtgggaaaagctcaataatgaggtcagatgcacccattggcaaatgcaattctgaatgcatcactccaaatggaagcattcccaatgacaaaccatttcaaaatgtaaacaggatcacatatggggcctgtcccagatatgttaagcaaaacactctgaaattggcaacagggatgcggaatgtgccagagaaacaaactagaggcatattcggtgcaatcgcgggcttcatagaaaatggttgggagggaatgatggacggttggtacggtttcaggcatcaaaattctgagggcacagggcaagcagcagatcttaaaagcactcaagcagcaatcaaccaaatcaacgggaaactgaataggttaatcgagaaaacgaacgagaaattccatcaaattgaaaaagaattctcagaagtagaagggagaattcaggacctcgagaaatatgttgaggacactaaaatagatctctggtcgtacaatgcggagcttcttgttgccctggagaaccaacatacaattgatctaactgactcagaaatgaacaaactgtttgaaagaacaaagaagcaactgagggaaaatgctgaggatatgggcaatggttgtttcaaaatataccacaaatgtgacaatgcctgcatagggtcaatcagaaatggaacttatgaccatgatgtatacagagacgaagcattgaacaaccggttccagatcaaaggtgttgagctgaagtcaggatacaaagattgggtcctatggatttcctttgccatatcatgttttttgctttgtattgttttgctggggttcatcatgtgggcctgccaaaaaggcaacattaggtgcaacatttgcatttga

SEQ ID NO: 31149 - RNA, 1701 nt, synthetic construct
  misc_feature 1..1701: note = hemagglutinin__InfluenzaA__ABC68049
  source 1..1701: mol_type = other RNA
atgaagactatcattgctttgagctacattttatgcctggttttcgctcaaaaacttcccggaaatgacaacagcacggcaacgctgtgtctggggcatcatgcagtgccaaacggaacgctagtgaaaacaatcacggatgaccaaattgaagtaactaatgctactgagctggttcagagttcctcaacaggtagaatatgcgacagtcctcaccaaatccttgatggagaaaactgcacactaatagatgctctattgggagaccctcattgtgatggcttccaaaataaggaatgggacctttttgttgaacgcagcaaagcctacagcaactgttacccttatgatgtgccggattatgtctcccttaggtcactagttgcctcatcaggcacgctggagtttaacaatgaaagcttcaattggactggagtcgctcagaatggaacaagctctgcttgcaaaaggagatctgataaaagtttctttagtagattgaattggttgcaccaattaaaatacaaatatccagcactgaacgtgactatgccaaacaatgaaaaatttgacaaattgtacgtttggggggttcaccacccgggtacagacagtgaccaaatcagcctatatgctcaagcatcggggagagtcacagtctctaccaaaagaagccaacaaactgtaatcccgaatatcggatctagaccctgggtaaggggtgtctccagcaaaataagcatctattggacaatagtaaaaccgggagacatacttttgattaacagcacagggaatctaattgctcctcggggttacttcaaaatacgaagtgggaaaagctcaataatgaggtcagatgcacccattggcaaatgcaattctgaatgcatcactccaaatggaagcattcccaatgacaaaccatttcaaaatgtaaacaggatcacatatggggcctgtcccagatatgttaagcaaaacactctgaaattggcaacagggatgcggaatgtgccagagaaacaaactagaggcatattcggtgcaatcgcgggcttcatagaaaatggttgggagggaatgatggacggttggtacggtttcaggcatcaaaattctgagggcacagggcaagcagcagatcttaaaagcactcaagcagcaatcaaccaaatcaacgggaaactgaataggttaatcgagaaaacgaacgagaaattccatcaaattgaaaaagaattctcagaagtagaagggagaattcaggacctcgagaaatatgttgaggacactaaaatagatctctggtcgtacaatgcggagcttcttgttgccctggagaaccaacatacaattgatctaactgactcagaaatgaacaaactgtttgaaagaacaaagaagcaactgagggaaaatgctgaggatatgggcaatggttgtttcaaaatataccacaaatgtgacaatgcctgcatagggtcaatcagaaatggaacttatgaccatgatgtatacagagacgaagcattgaacaaccggttccagatcaaaggtgttgagctgaagtcaggatacaaagattgggtcctatggatttcctttgccatatcatgttttttgctttgtattgttttgctggggttcatcatgtgggcctgccaaaaaggcaacattaggtgcaacatttgcatttga

SEQ ID NO: 31150 - RNA, 1701 nt, synthetic construct; identical to SEQ ID NO: 31066
  misc_feature 1..1701: note = hemagglutinin__InfluenzaA__ABC68060
  source 1..1701: mol_type = other RNA

SEQ ID NO: 31151 - RNA, 1701 nt, synthetic construct
  misc_feature 1..1701: note = hemagglutinin__InfluenzaA__ABC68071
  source 1..1701: mol_type = other RNA
atgaagactatcattgctttgagctacattttatgcctggttttcgctcaaaaacttcccggaaatgacaacagcacggcaacgctgtgtctggggcatcatgcagtgccaaacggaacgctagtgaaaacaatcacgaatgaccaaattgaggtaactaatgctactgagctggttcagagttcctcaacaggtagaatatgcgacagtcctcaccaaatccttgatggagaaaactgcacactaatagatgctctattgggagaccctcattgtgatggcttccaaaataaggaatgggacctttttgttgaacgcagcaaagcctacagcaactgttacccttatgatgtgccggattatgtctcccttaggtcactagttgcctcatcaggcacgctggagtttaacaatgaaagcttcaattggactggagtcgctcagaatggaacaagctctgcttgcaaaaggagatctgataaaagtttctttagtagattgaattggttgcaccaattaaaatacaaatatccagcactgaacgtgactatgccaaacaatgaaaaatttgacaaattgtacatttggggggttcaccacccgggtacagacagtgaccaaatcagcctatatgctcaagcatcggggagagtcacagtctctaccaaaagaagccaacaaactgtaatcccgaatatcggatctagaccctgggtaaggggtgtctccagcagaataagcatctattggacaatagtaaaaccgggagacatacttttgattaacagcacagggaatctaattgctcctcggggttacttcaaaatacgaagtgggaaaagctcaataatgaggtcagatgcacccattggcaaatgcaattctgaatgcatcactccaaatggaagcattcccaatgacaaaccatttcaaaatgtaaacaggatcacatatggggcctgtcccagatatgttaagcaaaacactctgaaattggcaacagggatgcggaatgtgccagagaaacaaactagaggcatattcggtgcaatcgcgggcttcatagaaaatggttgggagggaatgatggacggttggtacggtttcaggcatcaaaattctgagggcacagggcaagcagcagatcttaaaagcactcaagcagcaatcaaccaaatcaacgggaaactgaataggttaatcgagaaaacgaacgagaaattccatcaaattgaaaaagaattctcagaagtagaagggagaattcaggacctcgagaaatatgttgaggacactaaaatagatctctggtcgtacaatgcggagcttcttgttgccctggagaaccaacatacaattgatctaactgactcagaaatgaacaaactgtttgaaagaacaaagaagcaactgagggaaaatgctgaggatatgggcaatggttgtttcaaaatataccacaaatgtgacaatgcctgcatagggtcaatcagaaatggaacttatgaccataatgtatacagagacgaagcattgaacaaccggttccagatcaaaggtgttgagctgaagtcaggatacaaagattgggtcctatggatttcctttgccatatcatgttttttgctttgtattgttttgctggggttcatcatgtgggcctgccaaaaaggcaacattaggtgcaacatttgcatttga

SEQ ID NO: 31152 - RNA, 1701 nt, synthetic construct
  misc_feature 1..1701: note = hemagglutinin__InfluenzaA__ABC68082
  source 1..1701: mol_type = other RNA
atgaagactatcattgctttgagctacattctatgtctggttttcgctcaaaaacttcccggaaatgacaacagcacggcaacgctgtgccttgggcaccatgcagtaccaaacggaacgatagtgaaaacaatcacgaatgaccaaattgaagttactaatgctactgagctggttcagagttcctcaacaggtggaatatgcgacagtcctcatcagatccttgatggagaaaactgcacactaatagatgctctattgggagaccctcagtgtgatggcttccaaaataagaaatgggacctttttgttgaacgcagcaaagcctacagcaactgttacccttatgatgtgccggattatgcctcccttaggtcactagttgcctcatccggcacactggagtttaacaatgaaagcttcaattggactggagtcactcaaaatggaacaagctctgcttgcaaaaggagatctaataacagtttctttagtagattgaattggttgacccacttaaaattcaaatacccagcattgaacgtgactatgccaaacaatgaaaaatttgacaaattgtacatttggggggttcaccacccgggtacggacaatgaccaaatcttcctgtatgctcaagcatcaggaagaatcacagtctctaccaaaagaagccaacaaactgtaatcccgaatatcggatctagacccagagtaaggaatatccccagcagaataagcatctattggacaatagtaaaaccgggagacatacttttgattaacagcacagggaatctaattgctcctaggggttacttcaaaatacgaagtgggaaaagctcaataatgagatcagatgcacccattggcaaatgcaattctgaatgcatcactccaaatggaagcattcccaatgacaaaccatttcaaaatgtaaacaggatcacatatggggcctgtcccagatatgttaagcaaaacactctgaaattggcaacagggatgcgaaatgtaccagagaaacaaactagaggcatatttggcgcaatcgcgggtttcatagaaaatggttgggagggaatggtggatggttggtacggtttcaggcatcaaaattctgagggaataggacaagcagcagatctcaaaagcactcaagcagcaatcaatcaaatcaatgggaagctgaataggttgatcgggaaaaccaacgagaaattccatcagattgaaaaagaattctcagaagtagaagggagaattcaggacctcgagaaatatgttgaggacactaaaatagatctctggtcatataacgcggagcttcttgttgccctggagaaccaacatacaattgatctaactgactcagaaatgaacaaactgtttgaaagaacaaagaagcaactgagggaaaatgctgaggatatgggcaatggttgtttcaaaatataccacaaatgtgacaatgcctgcataggatcaatcagaaatggaacttatgaccatgatgtatacagagatgaagcattaaacaaccggttccagatcaaaggcgttgagctgaagtcaggatacaaagattggatcctatggatttcctttgccatatcatgttttttgctttgtgttgctttgttggggttcatcatgtgggcctgccaaaaaggcaacattaggtgcaacatttgcatttga

SEQ ID NO: 31153 - RNA, 1701 nt, synthetic construct
  misc_feature 1..1701: note = hemagglutinin__InfluenzaA__ABC68093
  source 1..1701: mol_type = other RNA
atgaagactatcattgctttgagctacattttatgcctggttttcgctcaaaaacttcccggaaatgacaacagcacggcaacgctgtgcctggggcaccatgcagtgccaaacggaacgctagtgaaaacaatcacgaatgaccaaattgaagtgactaatgctactgagctggttcagagttcctcaacaagtagaatatgcgacagtcctcaccaaatccttgatggagaaaactgcacactaatagatgctctattgggagaccctcattgtgatggcttccaaaataaggaatgggacctttttgttgaacgcagcaaagcctacagcaactgttacccttatgatgtgccggattatgtctcccttaggtcactagttgcctcatcaggcacgctggagtttaacaatgaaagcttcaattggactggagtcgctcagaatggaacaagctctgcttgcaaaaggagatctgataaaagtttctttagtagattgaattggttgcaccaattaaaatacaaatatccagcactgaacgtgactatgccaaacaatgaaaaatttgacaaattgtacatttggggggttcaccacccgggtacagacagtgaccaaatcagcctatatgctcaagcatcagggagagtcacagtctctaccaaaagaagccaacaaactgtaatcccgaatatcggatctagaccctgggtaaggggtgtctccagcataataagcatctattggacaatagtaaaaccgggagacatacttttgattaacagcacagggaatctaattgctcctcggggttacttcaaaatacgaagtgggaaaagctcaataatgaggtcagatgcacccattggcaaatgcaattctgaatgcatcactccaaatggaagcattcccaatggcaaaccatttcaaaatgtaaacaggatcacatatggggcatgtcccagatatgttaagcaaaacactctgaaattggcaacagggatgcggaatgtgccagagaaacaaactagaggcatattcggtgcaatcgcgggcttcatagaaaatggttgggagggaatgatggacggttggtacggtttcaggcatcagaattctgagggcacagggcaagcagcagatcttaaaagcactcaagcagcaatcaaccaaatcaacgggaaactgaataggttaatcgagaaaacgaacgagaaattccatcaaattgaaaaagaattctcagaagtagaagggagaattcaggacctcgagaaatatgtcgaggacactaaaatagatctctggtcgtacaatgcggagcttcttgttgccctggagaaccaacatacaattgatctaactgactcagaaatgaacaaactgtttgaaagaacaaagaagcaactgagggaaaatgctgaggatatgggcaatggttgtttcaaaatataccacaaatgtgacaatgcctgcatagggtcaatcagaaatggaacttatgaccatgatgtatacagagacgaagcattgaacaaccggttccagatcaaaggtgttgagctgaagtcaggatacaaagattggatcctatggatttcctttgccacatcatgttttttgctttgtattgttttactggggttcatcatgtgggcctgccaaaaaggcaacattaggtgcaacatttgcatttga

SEQ ID NO: 31154 - RNA, 1701 nt, synthetic construct
  misc_feature 1..1701: note = hemagglutinin__InfluenzaA__ABC68222
  source 1..1701: mol_type = other RNA
atgaagactatcattgctttgagctacattttatgtctggttttcgctcaaaaacttcccggaaatgacaacagcacggcaacgctgtgcctggggcaccatgcagtgccaaacggaacgctagtgaaaacaatcacgaatgaccaaattgaagtgactaatgctactgagctggttcagagttcctcaacaggtggaatatgcgacagtcctcaccaaatccttgatggagaaaactgcacactaatagatgctctattgggagaccctcattgtgatggcttccaaaataaggaatgggacctttttgttgaacgcagcaaagcctacagcaactgttacccttatgatgtgccggattatgcctcccttaggtcactagttgcctcatccggcacactggagtttaacaatgaaagcttcaattggactggagtcgctcagaatggaacaagctctgcttgcaaaaggagatctaataaaagtttctttagtagattgaattggttgcaccaattaaaatacaaatacccagcactgaacgtgactatgccaaacaatgaaaaatttgacaaattgtacatttggggggttcaccacccgagtacggacagtgaccaaatcagcctatatgctcaagcaccagggagagtcacagtctctaccaaaagaagccaacaaactgtaatcccgaatatcggatctagaccctgggtaaggggtgtctccagcagaataagcatctattggacaatagtaaaaccgggagacatacttttgattaactgcacagggaatctaattgctcctcggggttacttcaaaatacgaagtgggaaaagctcaataatgaggtcagatgcatccattggcaaatgcaattctgaatgcatcactccaaatggaagcattcccaatgacaaaccatttcaaaatgtaaacaggatcacatatggggcctgtcccagatatgttaagcaaaacactctgaaattggcaacagggatgcggaatgtaccagagaaacaaactagaggcatattcggcgcaatcgcgggtttcatagaaaatggttgggagggaatggtggacggttggtacggtttcaggcatcaaaattctgagggcacaggacaagcagcagatctcaaaagcactcaagcagcaatcaaccaaatcaacgggaaactgaataggttaatcgagaaaacgaacgagaaattccatcaaattgaaaaagaattctcagaagtggaagggagaattcaggacctcgagaaatatgttgaggacactaaaatagatctctggtcgtacaacgcggagcttcttgttgccctggagaaccagcatacaattgatctaactgactcagaaatgaacaaactgtttgaaagaacaaagaagcaactgagggaaaatgctgaggatatgggcaatggttgtttcaaaatataccacaaatgtgacaatgcctgcatagggtcaatcagaaatgggacttatgaccatgatgtatacagagacgaagcattaaacaaccggttccagatcaaaggtgttgagctgaagtcaggatacaaagattggatcctatggatttcctttgccatatcatgttttttgctttgtgttgtcttgctggggttcatcatgtgggcctgccaaaaaggcaacattaggtgcaacatttgcatttga

SEQ ID NO: 31155 - RNA, 1701 nt, synthetic construct; identical to SEQ ID NO: 30946
  misc_feature 1..1701: note = hemagglutinin__InfluenzaA__ABC68233
  source 1..1701: mol_type = other RNA

SEQ ID NO: 31156 - RNA, 1707 nt, synthetic construct
  misc_feature 1..1707: note = hemagglutinin__InfluenzaA__ABC72655
  source 1..1707: mol_type = other RNA
atggagaaaatagtgcttctttttgcaatagtcagtcttgttaaaagtgatcagatttgcattggttaccatgcaaacaactcaacagagcaggttgacacaataatggaaaagaacgttactgttacacatgcccaagacatactggaaaagacacacaacgggaagctctgtgatctagatggagtgaagcctctaattttgagagattgtagtgtagctggatggctccttggaaacccaatgtgtgatgaattcatcaatgtgccggaatggtcttacatagtggagaagcccaatccagccaatgacctctgttacccaggggatttcaatgactatgaagaattgaaacacctattgagcagaataaaccattttgagaaaattcagatcatccccaaaagttcttggtccagtcatgaagcctcagtaggagtgagctcagtatgtccatatcagggaaagtcctcctttttcagaaatgtggtatggcttatcaaaaagaacagtacatacccaacaataaagaggagctacaataataccaaccaagaagatcttttggtactgtgggggattcaccatcctaatgatgcggcagagcagacaaagctctatcaaaacccaaccacctacatttccgttgggacatcaacactaaaccagagattggtaccaagaatagctactagatccaaagtaaacgggcaaagtggacggatggagttcttctggacaattttaaaaccgaatgatgcaatcaacttcgagagtaatggaaatttcattgctccagaatatgcatacaaaattgtcaagaaaggggactcaacaattatgaaaagtgaattggaatacggtaactgcaacaccaagtgtcaaactccaatgggggcgataaactctagtatgccattccacaatatacaccctctcaccatcggggaatgccccaaatatgtgaaatcaaacagattagtccttgcgactggactcagaaatagccctcaaagagagaaaagaagaaaaaagagaggattatttggagctatagcaggttttatagagggaggatggcagggaatggtagatggttggtatgggtaccaccatagcaatgagcaggggagtgggtacgctgcagacaaagaatccactcaaaaggcaatagatggagtcaccaataaggtcaactcgatcattgacaaaatgaacactcagtttgaggccgttggaagggaatttaacaacttagaaaggagaatagagaatctaaacaagaagatggaagacgggttcctagatgtctggacttataatgctgaacttctggttctcatggaaaatgagagaactctagactttcatgactcaaatgtcaagaacctttacgacaaggtccgattacagcttagggataatgcaaaggagctgggtaacggttgtttcgagttctatcataaatgtgataatgaatgtatggaaagtgtaagaaacggaacgtatgactacccgcagtattcagaagaagcaagactaaaaagagaggaaataagtggagtaaaattggaatcaataggaatttaccaaatactgtcaatttattctacagtggcgagttccctagcactggcaatcatggtagctggtctatccttatggatgtgctccaatgggtcgttacaatgcagaatttgcatttaa

SEQ ID NO: 31157 - RNA, 1701 nt, synthetic construct
  misc_feature 1..1701: note = hemagglutinin__InfluenzaA__ABC84400
  source 1..1701: mol_type = other RNA
atgaagactatcattgctttgagctacattctatgtctggttttcgctcaaaaacttcccggaaatgacaacagcacggcaacgctgtgccttgggcaccatgcagtaccaaacggaacgatagtgaaaacaatcacgaatgaccaaattgaagttactaatgctactgagctggttcagagttcctcaacaggtggaatatgcgacagtcctcatcagatccttgatggagaaaactgcacactaatagatgctctattgggagaccctcagtgtgatggcttccaaaataagaaatgggacctttttgttgaacgcagcaaagcctacagcaactgttacccttatgatgtgccggattatgcctcccttaggtcactagttgcctcatccggcacactggagtttaacaatgaaagcttcaattggactggagtcactcaaaatggaacaagctctgcttgcaaaaggagatctaataacagtttctttagtagattgaattggttgacccacttaaaattcaaatacccagcattgaacgtgactatgccaaacaatgaaaaatttgacaaattgtacatttggggggttcaccacccgggtacggacaatgaccaaatcagcctatatgctcaagcatcaggaagaatcacagtctctaccaaaagaagccaacaaactgtaatcccgaatatcggatctagacccagggtaagggatatccccagcagaataagcatctattggacaatagtaaaaccgggagacatacttttgattaacagcacagggaatctaattgcccctcggggttacttcaaaatacgaagtgggaaaagctcaataatgagatcagatgcacccattggcaaatgcaattctgaatgcatcactccaaatggaagcattcccaatgacaaaccatttcaaaatgtaaacaggatcacatatggggcctgtcccagatatgttaagcaaaacactctgaaattggcaacagggatgcgaaatgtaccagagaaacaaactagaggcatatttggcgcaattgcgggtttcatagaaaatggttgggagggaatggttgatggttggtacggtttcaggcatcaaaattctgagggaataggacaagcagcagatctcaaaagcactcaagcagcaatcaaccaaatcaatgggaagctgaataggttgatcggaaaaaccaacgagaaattccatcagattgaaaaagaattctcagaagtagaagggagaattcaggacctcgagaaatatgttgaggacactaaaatagatctctggtcatacaacgcggagcttcttgttgccctggagaaccaacatacaattgatctaactgactcagaaatgaacaaactgtttgaaagaacaaagaagcaactgagggaaaatgctgaggatatgggcaatggttgtttcaaaatataccacaaatgtgacaatgcctgcatagggtcaatcagaaatggaacttatgaccatgatgtatacagagatgaagcattaaacaaccggttccagatcaaaggtgttgagctgaagtcaggatacaaagattggatcctatggatttcctttgccatatcatgttttttgctttgtgttgctttgttggggttcatcatgtgggcctgccaaaaaggcaacattaggtgcaacatttgcatttga

SEQ ID NO: 31158 - RNA, 1701 nt, synthetic construct
  misc_feature 1..1701: note = hemagglutinin__InfluenzaA__ABC84411
  source 1..1701: mol_type = other RNA
atgaagactatcattgctttgagctacatttcatgtctggttttcgctcaaaaacttcccggaaatgacaacagcacggcaacgctgtgcctgggacaccatgcagtgccaaacggaacgctagtgaaaacaatcacgaatgaccaaattgaagtgactaatgctactgagctggttcagagttcctcaacaggtagaatatgcgacagtcctcaccgaatccttgatggagaaaactgcacactgatagatgctctattgggagaccctcattgtgatggcttccaaaataaggaatgggacctttttgttgaacgcagcaaagcctacagcaactgttacccttatgatgtgccggattatgcctcccttaggtcactagttgcctcatccggcactctggagtttaacaatgaaagcttcaattggactggagtcgctcagaatggaacaagctatgcttgcaaaaggagatctattaaaagtttctttagtagattgaattggttgcaccaattaaaatacaaatatccagcactgaacgtgactatgccaaacaatgacaaatttgacaaattgtacatttggggggttcaccacccgagtacggacagtgaccaaaccagcctatatgctcaagcatcagggagagtcacagtctctaccaaaagaagccaacaaactgtaatcccgaatatcggatctagaccctgggtaaggggtgtctccagcagaataagcatctattggacaatagtaaaaccgggagacatacttttgattaacagcacagggaatctaattgctcctcggggttacttcaaaatacgaagtgggaaaagctcaataatgaggtcagatgcacccattggcaaatgcaattctgaatgcatcactccaaatggaagcattcccaatgacaaaccatttcaaaatgtaaacaggatcacatatggggcctgtcccagatatgttaagcaaaacactctgaaattggcaacagggatgcggaatgtaccagagaaacaaactagaggcatattcggcgcaatcgcaggtttcatagaaaatggttgggagggaatggtagacggttggtacggtttcaggcaccaaaattctgagggcacaggacaagcagcagatcttaaaagcactcaagcagcaatcaaccaaatcaacgggaaactgaataggttaatcgagaaaacgaacgagaaattccatcaaattgaaaaagaattctcagaagtagaagggagaattcaggacctcgagaaatatgttgaggacactaaaatagatctctggtcgtacaacgcggagcttcttgttgccctggagaaccaacatacaattgatctaactgactcagaaatgaacaaactgtttgaaagaacaaggaagcaactgagggaaaatgctgaggatatgggcaatggttgtttcaaaatataccacaaatgtgacaatgcctgcatagggtcaatcagaaatggaacttatgaccatgatgtatacagagacgaagcattaaacaaccggttccagatcaaaggtgttgagctgaagtcaggatacaaagattggatcctatggatttcctttgccatatcatgttttttgctttgtgttgttttgctggggttcatcatgtgggcctgccaaaaaggcaacattaggtgcaacatttgcatttga

SEQ ID NO: 31159 - RNA, 1701 nt, synthetic construct
  misc_feature 1..1701: note = hemagglutinin__InfluenzaA__ABC84433
  source 1..1701: mol_type = other RNA
atgaagactatcattgctttgagctacattctatgtctggttttcgctcaaaaacttcccggaaatgacaacagaacggcaacgctgtgccttgggcaccatgcagtaccaaacggaacgatagtgaaaacaatcacgaatgaccaaattgaagttactaatgctactgagctggttcagagttcctcaacaggtggaatatgcgacagtcctcatcagatccttgatggagaaaactgcacactaatagatgctctattgggagaccctcagtgtgatggcttccaaaataagaaatgggacctttttgttgaacgcagcaaagcctacagcaactgttacccttatgatgtgccggattatgcctcccttaggtcactagttgcctcatccggcacactggagtttaacaatgaaagcttcaattggactggagtcactcaaaatggaacaagctctgcttgcaaaaggagatctaataacagtttctttagtagattgaattggttgacccatttaaaattcaaatacccagcattgaacgtgactatgccaaacaatgaaaaatttgacaaattgtacatttggggggttcaccacccgggtacgaacaatgaccaaatcagcctatatgctcaagcatcaggaagaatcacagtctctaccaaaagaagccaacaaactgtaatcccgaatatcggatctagacccagggtaagggatatccccagcagaataagcatctattggacaatagtaaaaccgggagacatacttttgattaacagcacagggaatctaattgctcctcggggttacttcaaaatacgaagtgggaaaagctcaataatgagatcagatgcacccattggcaaatgcaattctgaatgcatcactccaaatggaagcattcccaatgacaaaccatttcaaaatgtaaacaggatcacatatggggcctgtcccagatatgttaagcaaaacactctgaaattggcaacagggatgcgaaatgtaccagagaaacaaactagaggcatatttggcgcaatcgcgggtttcatagaaaatggttgggagggaatggtggatggttggtacggtttcaggcatcaaaattctgagggaataggacaagcagcagatctcaaaagcactcaagcagcaatcaaccaaatcaatgggaagctgaataggttgatcgggaaaaccaacgagaaattccatcagattgaaaaagaattctcagaagtagaagggagaattcaggacctcgagaaatatgttgaggacactaaaatagatctctggtcatacaacgcggagcttcttgttgccctggagaaccaacatacaattgatctaactgactcagaaatgaacaaactgtttgaaagaacaaagaagcaactgagggaaaatgctgaggatatgggcaatggttgtttcaaaatataccacaaatgtgacaatgcctgcatagggtcaatcagaaatggaacttatgaccatgatgtatacagagatgaagcattaaacaaccggttccagatcaaaggtgttgagctgaagtcaggatacaaagattggatcctatggatttcctttgccatatcatgttttttgctttgtgttgctttgttggggttcatcatgtgggcctgccaaaaaggcaacattaggtgcaacatttgcatttga

SEQ ID NO: 31160 - RNA, 1701 nt, synthetic construct; identical to SEQ ID NO: 31066
  misc_feature 1..1701: note = hemagglutinin__InfluenzaA__ABC84444
  source 1..1701: mol_type = other RNA

SEQ ID NO: 31161 - RNA, 1701 nt, synthetic construct
  misc_feature 1..1701: note = hemagglutinin__InfluenzaA__ABC84498
  source 1..1701: mol_type = other RNA
atgaagactatcattgctttgagctacattctatgtctggttttcgctcaaaaacttcccggaaatgacaacagcacggcaacgctgtgccttgggcaccatgcagtaccaaacggaacgatagtgaaaacaatcacgaatgaccaaattgaagttactaatgctactgagctggttcagagttcctcaacaggtggaatatgcgacagtcctcatcagatccttgatggagaaaactgcacactaatagatgctctattgggagaccctcagtgtgatggcttccaaaataagaaatgggacctttttgttgaacgcagcaaagcctacagcaactgttacccttatgatgtgccggattatgcctcccttaggtcactaattgcctcatccggcacactggagtttaacaatgaaagcttcaattggactggagtcactcaaaatggaacaagctctgcttgcaaaaggagatctaatagcagtttctttagtagattgaattggttgacccacttaaaattcaaatacccagcattgaacgtgactatgccaaacaatgaagaatttgacaaattgtacatttggggggttcaccacccgggtacatacaatgaccaaatcagcctatatgctcaagcatcaggaagaatcacagtctctaccaaaagaagccaacaaactgtaatcccgaatatcgggtctagacccagggtaagggatatccccagcagaataagcatctattggacaatagtaaaaccgggagacatacttttgattaacagcacagggaatctaattgctcctcggggttacttcaaaatacgaagtgggaaaagctcaataatgagatcagatgcacccattggcaaatgcaattctgaatgcatcactccaaatggaagcattcccaatgacaaaccatttcaaaatgtaaacaggatcacatatggggcctgtcccagatatgttaagcaaaacactctgaaattggcaacagggatgcgaaatgtaccagagaaacaaactagaggcatatttggcgcaatcgcgggtttcatagaaaatggttgggagggaatggtggatggttggtacggtttcaggcatcaaaattctgagggaataggacaagcagcagatctcaaaagcactcaagcagcaatcgaccaaatcaatgggaagctgaataggttgatcgggaaaaccaacgagaaattccatcagattgaaaaagaattctcagaagtagaagggagaattcaggacctcgagaaatatgttgaggacactaaaatagatctctggtcatacaacgcggagcttcttgttgccctggagaaccaacatacaattgatctaactgactcagaaatgaacaaactgtttgaaagaacaaagaagcaactgagggaaaatgctgaggatatgggcaatggttgtttcaaaatataccacaaatgtgacaatgcctgcatagggtcaatcagaaatggaacttatgaccatgatgtatacagagatgaagcattaaacaaccggttccagatcaaaggtgttgagctgaagtcaggatacaaagattggatcctatggatttcctttgccatatcatgttttttgctttgtgttgctttgttggggttcatcatgtgggcctgccaaaaaggcaacattaggtgcaacatttgcatttga

SEQ ID NO: 31162 - RNA, 1701 nt, synthetic construct; identical to SEQ ID NO: 31161
  misc_feature 1..1701: note = hemagglutinin__InfluenzaA__ABC84509
  source 1..1701: mol_type = other RNA

SEQ ID NO: 31163 - RNA, 1701 nt, synthetic construct
  misc_feature 1..1701: note = hemagglutinin__InfluenzaA__ABC84520
  source 1..1701: mol_type = other RNA
atgaagactatcattgctttgagctacattctatgtctggttttcgctcaaaaacttcccggaaatgacaacagcacggcaacgctgtgccttgggcaccatgcagtaccaaacggaacgatagtgaaaacaatcacgaatgaccaaattgaagttactaatgctactgagctggttcagagttcctcaacaggtggaatatgcgacagtcctcatcagatccttgatggagaaaactgcacactaatagatgctctattgggagaccctcagtgtgatggcttccaaaataagaaatgggacctttttgttgaacgcagcaaagcctacagcaactgttacccttatgatgtgccggattatgcctcccttaggtcactagttgcctcatccggcacactggagtttaacaatgaaagcttcaattggactggagtcactcaaaatggaacaagctctgcttgcaaaaggagatctaataacagtttctttagtagattgaattggttgacccacttaaaattcaaatacccagcattgaacgtgactatgccaaacaatgaaaaatttgacaaattgtacatttggggggttcaccacccgggtacggacaatgaccaaatcttcctgtatgctcaagcatcaggaagaatcacagtctctaccaaaagaagccaacaaactgtaatcccgaatatcggatctagacccagagtaagggatatccccagcagaataagcatctattggacaatagtaaaaccgggagacatacttttgattaacagcacagggaatctaattgctcctaggggttacttcaaaatacgaagtgggaaaagctcaataatgagatcagatgcacccattggcaaatgcaattctgaatgcatcactccaaatggaagcattcccaatgacaaaccatttcaaaatgtaaacaggatcacatatggggcctgtcccagatatgttaagcaaaacactctgaaattggcaacagggatgcgaaatgtaccagagaaacaaactagaggcatatttggcgcaatcgcgggtttcatagaaaatggttgggagggaatggtggatggttggtacggtttcaggcatcaaaattctgagggaataggacaagcagcagatctcaaaagcactcaagcagcaatcaatcaaatcaatgggaagctgaataggttgatcgggaaaaccaacgagaaattccatcagattgaaaaagaattctcagaagtagaagggagaattcaggacctcgagaaatatgttgaggacactaaaatagatctctggtcatacaacgcggagcttcttgttgccctggagaaccaacatacaattgatctaactgactcagaaatgaacaaactgtttgaaagaacaaagaagcaactgagggaaaatgctgaggatatgggcaatggttgtttcaaaatataccacaaatgtgacaatgcctgcataggatcaatcagaaatggaacttatgaccatgatgtatacagagatgaagcattaaacaaccggttccagatcaaaggcgttgagctgaagtcaggatacaaagattggatcctatggatttcctttgccatatcatgttttttgctttgtgttgctttgttggggttcatcatgtgggcctgccaaaaaggcaacattaggtgcaacatttgcatttga

SEQ ID NO: 31164 - RNA, 1701 nt, synthetic construct
  misc_feature 1..1701: note = hemagglutinin__InfluenzaA__ABC84531
  source 1..1701: mol_type = other RNA
atgaagactatcattgctttgagctacattttctgtctggttttcgcccaaaaacttcccggaaatgacaacagcacagcaacgctgtgcctgggacaccatgcagtgccaaacggaacgctagtgaaaacaatcacgaatgatcagattgaagtgactaatgctactgagctggttcagagttcctcaacaggtagaatatgcgacagtcctcaccgaatccttgatggaaaaaactgcacactgatagatgctctattgggagaccctcattgtgatggcttccaaaatgagaaatgggacctttttgttgaacgcagcaaagctttcagcaactgttacccttatgatgtgccggattatgcctcccttaggtcactagttgcctcatcaggcaccctggagtttatcaatgaaggcttcaattggactggagtcactcagagtgggggaagctatgcttgcaaaaggggatctgttaacagtttcttcagtagattgaattggttgtacgaatcagaaagcaaatatccagcgctgaacgtgactatgccaaacaatggcagatttgacaaattgtacatttggggggttcaccacccgagcacggacaaagaacaaaccaacctatatgttcgagcagcagggagagtcacagtctctaccaagagaagccagcaaactgtaatcccgaatatcgggtctagaccctgggtaaggggtctgtctagtagaataagcatctattggacaatagtaaaaccgggagacatactgttgattaatagcactgggaacctaattgctcctcggggttacttcaaaatacgcactgggaaaagctcaataatgaggtcagatgcacctattggcacctgcagttctgaatgcatcactccaaatggaagcattcccaatgacaaaccctttcaaaatgtaaacaagatcacatatggggcatgtcccaggtatgttaaacaaaacactctgaaattggcaacagggatgcggaatgtaccagagaaacaaactagaggcatattcggcgcaatagcaggtttcatagaaaatggttgggagggaatggtagacggttggtacggtttcaggcatcaaaattctgagggcacaggacaagcagcagatcttaaaagcactcaagcagcaatcgaccaaatcaacgggaaactgaataggttaatcgagaaaacgaacgagaaattccatcaaatcgaaaaggaattctcagaagtagaagggagaattcaggacctcgagaaatatgttgaagacactaaaatagatctctggtcttacaacgcggagcttcttgtcgccctggagaaccaacatacaattgatctgactgactcagaaatgaacaaactgtttgaaaaaacaaggaagcaactgagggaaaatgctgaggacatgggcaatggttgcttcaaaatataccacaaatgtgacaatgcttgcataggatcaatcagaaatggaacttatgaccatgatgtatacagagacgaagcattgaacaaccggtttcagatcaaaggtgttgagctgaagtcaggatacaaagactggatcctatggatttcctttgccatatcatgctttttactttgtgttgttttgctggggttcatcatgtgggcctgccaaaaaggcaacattaggtgcaacatttgcatttga

SEQ ID NO: 31165 - RNA, 1701 nt, synthetic construct; identical to SEQ ID NO: 31154
  misc_feature 1..1701: note = hemagglutinin__InfluenzaA__ABC84560
  source 1..1701: mol_type = other RNA

SEQ ID NO: 31166 - RNA, 1701 nt, synthetic construct
  misc_feature 1..1701: note = hemagglutinin__InfluenzaA__ABC84571
  source 1..1701: mol_type = other RNA
atgaagactatcattgctttgagctacattttatgtctggttttcgctcaaaaacttcccggaaatgacaacagcacggcaacgctgtgcctggggcaccatgcagtgccaaacggaacgctagtgaaaacaatcacgaatgaccaaattgaagtgaccaatgctactgagctggttcagagttcctcaacaggtggaatatgcgacagtcctcaccaaatcattgatggagaaaactgcacactaatagatgctctattgggagaccctcattgtgatggcttccaaaataaggaatgggacctttttgttgaacgcagcaaagcctacagcaactgttacccttatgatgtgccggattatgcctcccttagatcactagttgcctcatccggcacactggagtttaacaatgaaagcttcaattggactggagtcgctcagaatggaacaagctctgcttgcaaaaggagatctaataaaagtttctttagtagattgaattggttgcaccaattaaaatacaaatacccagcactgaacgtgactatgccaaacaatgaaaaatttgacaaattgtacatttggggggttcaccacccgagtacggacagtgaccaaatcagcctatatgctcaagcaccagggagagtcacagtctctaccaaaagaagccaacaaactgtaatcccgaatatcggatctagaccctgggtaaggggtgtctccagcagaataagcatctattggacaatagtaaaaccgggagacatacttttgattaactgcacagggaatctaattgctcctcggggttacttcaaaatacgaagtgggaaaagctcaataatgaggtcagatgcatccattggcaaatgcaattctgaatgcatcactccaaatggaagcattcccaatgacaaaccatttcaaaatgtaaacaggatcacatatggggcctgtcccagatatgttaagcaaaacactctgaaattggcaacagggatgcggaatgtaccagagaaacaaactagaggcatattcggcgcaatcgcgggtttcatagaaaatggttgggagggaatggtggacggttggtacggtttcaggcatcaaaattctgagggcacaggacaagcagcagatctcaaaagcactcaagcagcaatcaaccaaatcaacgggaaactgaataggttaatcgagaaaacgaacgagaaattccatcaaattgaaaaagaattctcagaagtggaagggagaattcaggacctcgagaaatatgttgaggacactaaaatagatctctggtcgtacaacgcggagcttcttgttgccctggagaaccagcatacaattgatctaactgactcagaaatgaacaaactatttgaaagaacaaagaagcaactgagggaaaatgctgaggatatgggcaatggttgtttcaaaatataccacaaatgtgacaatgcctgcatagggtcaatcagaaatgggacttatgaccatgatgtatacagagacgaagcattaaacaaccggttccagatcaaaggtgttgagctgaagtcaggatacaaagattggatcctatggatttcctttgccatatcatgttttttgctttgtgttgtcttgctggggttcatcatgtgggcctgccaaaaaggcaacattaggtgcaacatttgcatttga

SEQ ID NO: 31167 - RNA, 1701 nt, synthetic construct; identical to SEQ ID NO: 31154
  misc_feature 1..1701: note = hemagglutinin__InfluenzaA__ABC85754
  source 1..1701: mol_type = other RNA

SEQ ID NO: 31168 - RNA, 1701 nt, synthetic construct; identical to SEQ ID NO: 31139
  misc_feature 1..1701: note = hemagglutinin__InfluenzaA__ABC85765
  source 1..1701: mol_type = other RNA

SEQ ID NO: 31169 - RNA, 1701 nt, synthetic construct
  misc_feature 1..1701: note = hemagglutinin__InfluenzaA__ABC85776
  source 1..1701: mol_type = other RNA
atgaagactatcattgctttgagctacattttatgtctggttttcgctcaaaaacttcccggaaatgacaacagcacggcaacgctgtgcctggggcaccatgcagtgccaaacggaacgctagtgaaaacaatcacgaatgaccaaattgaagtgactaatgctactgagctggttcagagttcctcaacaggtggaatatgcgacagtcctcaccaaatccttgatggagaaaactgcacactaatagatgctctattgggagaccctcattgtgatggcttccaaaataaggaatgggacctttttgttgaacgcagcaaagcctacagcaactgttacccttatgatgtgccggattatgcctcccttaggtcactagttgcctcatccggcacactggagtttaacaatgaaagcttcaattggactggagtcgctcagaatggaacaagctctgcttgcaaaaggagatctaataaaagtttctttagtagattgaattggttgcaccaattaaaatacaaatacccagcactgaacgtgactatgccaaacaatgaaaaatttgacaaattgtacatttggggggttcaccacccgagtacggacagtgaccaaatcagcctatatgctcaagcaccagggagagtcacagtctctaccaaaagaagccaacaaactgtaatcccgaatatcggatctagaccctgggtaaggggtgtctccagcagaataagcatctattggacaatagtaaaaccgggagacatacttttgattaacttcacagggaatctaattgctcctcggggttacttcaaaatacgaagtgggaaaagctcaataatgaggtcagatgcatccattggcaaatgcaattctgaatgcatcactccaaatggaagcattcccaatgacaaaccatttcaaaatgtaaacaggatcacatatggggcctgtcccagatatgttaagcaaaacactctgaaattggcaacagggatgcggaatgtaccagagaaacaaactagaggcatattcggcgcaatcgcgggtttcatagaaaatggttgggagggaatggtggacggttggtacggtttcaggcatcaaaattctgagggcacaggacaagcagcagatctcaaaagcactcaagcagcaatcaaccaaatcaacgggaaactgaataggttaatcgagaaaacgaacgagaaattccatcaaattgaaaaagaattctcagaagtggaagggagaattcaggacctcgagaaatatgttgaggacactaaaatagatctctggtcgtacaacgcggagcttcttgttgccctggagaaccagcatacaattgatctaactgactcagaaatgaacaaactgtttgaaagaacaaagaagcaactgagggaaaatgctgaggatatgggcaatggttgtttcaaaatataccacaaatgtgacaatgcctgcatagggtcaatcagaaatgggacttatgaccatgatgtatacagagacgaagcattaaacaaccggttccagatcaaaggtgttgagctgaagtcaggatacaaagattggatcctatggatttcctttgccatatcatgttttttgctttgtgttgtcttgctggggttcatcatgtgggcctgccaaaaaggcaacattaggtgcaacatttgcatttga

SEQ ID NO: 31170 - RNA, 1701 nt, synthetic construct; identical to SEQ ID NO: 31154
  misc_feature 1..1701: note = hemagglutinin__InfluenzaA__ABC85787
  source 1..1701: mol_type = other RNA

SEQ ID NO: 31171 - RNA, 1701 nt, synthetic construct; identical to SEQ ID NO: 31137
  misc_feature 1..1701: note = hemagglutinin__InfluenzaA__ABC85798
  source 1..1701: mol_type = other RNA

SEQ ID NO: 31172 - RNA, 1701 nt, synthetic construct; identical to SEQ ID NO: 31139
  misc_feature 1..1701: note = hemagglutinin__InfluenzaA__ABC85820
  source 1..1701: mol_type = other RNA

SEQ ID NO: 31173 - RNA, 1701 nt, synthetic construct; identical to SEQ ID NO: 31135
  misc_feature 1..1701: note = hemagglutinin__InfluenzaA__ABC85831
  source 1..1701: mol_type = other RNA

SEQ ID NO: 31174 - RNA, 1701 nt, synthetic construct
  misc_feature 1..1701: note = hemagglutinin__InfluenzaA__ABC85842
  source 1..1701: mol_type = other RNA
atgaagactatcattgctttgagctacattctatgtctggttttcgctcaaaaacttcccggaaatgacaacagcacggcaacgctgtgccttgggcaccatgcagtaccaaacggaacgatagtgaaaacaatcacgaatgaccaaattgaagttactaatgctactgagctggttcagagttcctcaacaggtggaatatgcgacagtcctcatcagatccttgatggagaaaactgcacactaatagatgctctattgggagaccctcagtgtgatggcttccaaaataagaaatgggacctttttgttgaacgcagcaaagcctacagcaactgttacccttatgatgtgccggattatgcctcccttaggtcactaattgcctcatccggcacactggagtttaacaatgaaagcttcaattggactggagtcactcaaaatggaacaagctctgcttgcaaaaggagatctaatagcagtttctttagtagattgaattggttgacccacttaaaattcaaatacccagcattgaacgtgactatgccaaacaatgaagaatttgacaaattgtacatttggggggttcaccacccgggtacatacaatgaccaaatcagcctatatgctcaagcatcaggaagaatcacagtctctaccaaaagaagccaacaaactgtaatcccgaatatcgggtctagacccagggtaagggatatccccagcagaataagcatctattggacaatagtaaaaccgggagacatacttttgattaacagcacagggaatctaattgctcctcggggttacttcaaaatacgaagtgggaaaagctcaataatgagatcagatgcacccattggcaaatgcaattctgaatgcatcactccaaatggaagcattcccaatgacaaaccatttcaaaatgtaaacaggatcacatatggggcctgtcccagatatgtcaagcaaaacactctgaaattggcaacagggatgcgaaatgtaccagagaaacaaactagaggcatatttggcgcaatcgcgggtttcatagaaaatggttgggagggaatggtggatggttggtacggtttcaggcatcaaaattctgagggaataggacaagcagcagatctcaaaagcactcaagcagcaatcgaccaaatcaatgggaagctgaataggttgatcgggaaaaccaacgagaaattccatcagattgaaaaagaattctcagaagtagaagggagaattcaggacctcgagaaatatgttgaggacactaaaatagatctctggtcatacaacgcggagcttcttgttgccctggagaaccaacatacaattgatctaactgactcagaaatgaacaaactgtttgaaagaacaaagaagcaactgagggaaaatgctgaggatatgggcaatggttgtttcaaaatatatcacaaatgtgacaatgcctgcatagggtcaatcagaaatggaacttatgaccatgatgtatacagagatgaagcattaaacaaccggttccagatcaaaggtgttgagctgaagtcaggatacaaagattggatcctatggatttcctttgccatatcatgttttttgctttgtgttgctttgttggggttcatcatgtgggcctgccaaaaaggcaacattaggtgcaacatttgcatttga

SEQ ID NO: 31175 - RNA, 1701 nt, synthetic construct; identical to SEQ ID NO: 31139
  misc_feature 1..1701: note = hemagglutinin__InfluenzaA__ABC85853
  source 1..1701: mol_type = other RNA

SEQ ID NO: 31176 - RNA, 1701 nt, synthetic construct; identical to SEQ ID NO: 31135
  misc_feature 1..1701: note = hemagglutinin__InfluenzaA__ABC85864
  source 1..1701: mol_type = other RNA

SEQ ID NO: 31177 - RNA, 1701 nt, synthetic construct
  misc_feature 1..1701: note = hemagglutinin__InfluenzaA__ABC85886
  source 1..1701: mol_type = other RNA
atgaagactatcattgctttgagctacattctatgtctggttttcgctcaaaaacttcccggaaatgacaacagcacggcaacgctgtgccttgggcaccatgcagtaccaaacggaacgatagtgaaaacaatcacgaatgaccaaattgaagttactaatgctactgagctggttcagagttcctcaacaggtggaatatgcgacagtcctcatcagatccttgatggagaaaactgcacactaatagatgctctattgggagaccctcagtgtgatggcttccaaaataagaaatgggacctttttgttgaacgcagcaaagcctacagcaactgttacccttatgatgtgccggattatgcctcccttaggtcactaattgcctcatccggcacactggagtttaacaatgaaagcttcaattggactggagtcactcaaaatggaacaagctctgcttgcaaaaggagatctaatagcagtttctttagtagattgaattggttgacccacttaaaattcaaatacccagcattgaacgtgactatgccaaacaatgaagaatttgacaaattgtacatttggggggttcaccacccgggtacatacaatgaccaaatcagcctatatgctcaagcatcaggaagaatcacagtctctaccaaaagaagccaacaaactgtaatcccgaatatcgggtctagacccagggtaagggatatccccagcagaataagcatctattggacaatagtaaaaccgggagacatacttttgattaacagcacagggaatctaattgctcctcggggttacttcaaaatacgaagtgggaaaagctcaataatgagatcagatgcacccattggcaaatgcaattctgaatgcatcactccaaatggaagcattcccaatgacaaaccatttcaaaatgtaaacaggatcacatatggggcctgtcccagatatgtcaagcaaaacactctgaaattggcaacagggatgcgaaatgtaccagagaaacaaactagaggcatatttggcgcaatcgcgggtttcatagaaaatggttgggagggaatggtggatggttggtacggtttcaggcatcaaaattctgagggaataggacaagcagcagatctcaaaagcactcaagcagcaatcgaccaaatcaatgggaagctgaataggttgatcgggaaaaccaacgagaaattccatcagattgaaaaagaattctcagaagtagaagggagaattcaggacctcgagaaatatgttgaggacactaaaatagatctctggtcatacaacgcggagcttcttgttgccctggagaaccaacatacaattgatctaactgactcagaaatgaacaaactgtttgaaagaacaaagaagcaactgagggaaaatgctgaggatatgggcaatggttgtttcaaaatataccacaaatgtgacaatgcctgcatagggtcaatcagaaatggaacttatgaccatgatgtatacagagatgaagcattaaacaaccggttccagatcaaaggtgttgagctgaagtcaggatacaaagattggatcctatggatttcctttgccatatcatgctttttgctttgtgttgctttgttggggttcatcatgtgggcctgccaaaaaggcaacattaggtgcaacatttgcatttga

SEQ ID NO: 31178 - RNA, 1701 nt, synthetic construct; identical to SEQ ID NO: 31066
  misc_feature 1..1701: note = hemagglutinin__InfluenzaA__ABC85908
  source 1..1701: mol_type = other RNA

SEQ ID NO: 31179 - RNA, 1701 nt, synthetic construct
  misc_feature 1..1701: note = hemagglutinin__InfluenzaA__ABC85919
  source 1..1701: mol_type = other RNA
atgaagactatcattgctttgagctacattttatgcctggttttcgctcaaaaacttcccggaaatgacaacagcacggcaacgctgtgtctggggcatcatgcagtgccaaacggaacgctagtgaaaacaatcacgaatgaccaaattgaagtaactaatgctactgagctggttcagagttcctcaacaggtagaatatgcgacagtcctcaccaaatccttgatggagaaaactgcacactaatagatgctctattgggagaccctcattgtgatggcttccaaaataaggaatgggacctttttgttgaacgcagcaaagcctacagcaactgttacccttatgatgtgccggattatgtctcccttaggtcactagttgcctcatcaggcacgctggagtttaacaatgaaagcttcaattggactggagtcgctcagaatggaacaagctctgcttgcaaaaggagatctgataaaagtttctttagtagattgaattggttgcaccaattaaaatacaaatatccagcactgaacgtgactatgccaaacaatgaaaaatttgacaaattgtacatttggggggttcaccacccgggtacagacagtgaccaaatcagcctatatgctcaagcatcagggagagtcacagtctctaccaaaagaagccaacaaactgtaatcccgaatatcggatctagaccctgggtaaggggtgtctccagcagaataagcatctattggacaatagtaaaaccgggagacatacttttgattaacagcacagggaatctaattgctcctcggggttacttcaaaatacgaagtgggaaaagctcaataatgaggtcagatgcacccattggcaaatgcaattctgaatgcatcactccaaatggaagcattcccaatgacaaaccatttcaaaatgtaaacaggatcacatatggggcctgtcccagatatgttaagcaaaacactctgaaattggcaacagggatgcggaatgtgccagagaaacaaactagaggcatattcggtgcaatcgcgggcttcatagaaaatggttgggagggaatgatggacggttggtacggtttcaggcatcaaaattctgagggcacagggcaagcagcagatcttaaaagcactcaagcagcaatcaaccaaatcaacgggaaactgaataggttaatcgagaaaacgaacgagaaattccatcaaattgaaaaagaattctcagaagtagaagggagaattcaggacctcgagaaatatgttgaggacactaaaatagatctctggtcgtacaatgcggagcttcttgttgccctggagaaccaacatacaattgatctaactgactcagaaatgaacaaactgtttgaaagaacaaagaagcaactgagggaaaatgctgaggatatgggcaatggttgtttcaaaatataccacaaatgtgacaatgcctgcatagggtcaatcagaaatggaacttatgaccatgatgtatacagagacgaagcattgaacaaccggttccagatcaaaggtgtcgagctgaagtcaggatacaaagattgggtcctatggatttcctttgccatatcatgttttttgctttgtattgttttgatggggttcatcatgtgggcctgccaaaaaggcaacattaggtgcaacatttgcatttga

SEQ ID NO: 31180 - RNA, 1701 nt, synthetic construct; identical to SEQ ID NO: 31109
  misc_feature 1..1701: note = hemagglutinin__InfluenzaA__ABC85930
  source 1..1701: mol_type = other RNA

SEQ ID NO: 31181 - RNA, 1701 nt, synthetic construct; identical to SEQ ID NO: 31115
  misc_feature 1..1701: note = hemagglutinin__InfluenzaA__ABC85941
  source 1..1701: mol_type = other RNA

SEQ ID NO: 31182 - RNA, 1701 nt, synthetic construct
  misc_feature 1..1701: note = hemagglutinin__InfluenzaA__ABC85952
  source 1..1701: mol_type = other RNA
atgaagactatcattgctttgagctacattttatgcctggttttcgctcaaaaacttcccggaaatgacaacagcacggcaacgctgtgtctggggcatcatgcagtgccaaacggaacgctagtgaaaacaatcacgaatgaccaaattgaagtaactaatgctactgagctggttcagagttcctcaacaggtagaatatgcgacagtcctcaccaaatccttgatggagaaaactgcacactaatagatgctctattgggagaccctcattgtgatggcttccaaaataagaaatgggacctttttgttgaacgcagcaaagcctacagcaactgttacccttatgatgtgccggattatgtctcccttaggtcactagttgcctcatcaggcacgctggagtttaacaatgaaagcttcaattggactggagtcgctcagaatggaacaagctctgcttgcaaaaggagatctgataaaagtttctttagtagattgaattggttgcaccaattaaaatacaaatatccagcactgaacgtgactatgccaaacaatgaaaaatttgacaaattgtacatttggggggttcaccacccgggtacagacagtgaccaaatcagcctatatgctcaagcatcggggagagtcacagtctctaccaaaagaagccaacaaactgtaatcccgaatatcggatctagaccctgggtaaggggtgtctccagcagaataagcatctattggacaatagtaaaaccgggagacatacttttgattaacagcacagggaatctaattgctcctcggggttacttcaaaatacgaagtgggaaaagctcaataatgaggtcagatgcacccattggcaaatgcaattctgaatgcatcactccaaatggaagcattcccaatgacaaaccatttcaaaatgtaaacaggatcacatatggggcctgtcccagatatgttaagcaaaacactctgaaattggcaacagggatgcggaatgtgccagagaaacaaactagaggcatattcggtgcaatcgcgggcttcatagaaaatggttgggagggaatgatggacggttggtacggtttcaggcatcataattctgagggcacagggcaagcagcagatcttaaaagcactcaagcagcaatcaaccaaatcaacgggaaactgaataggttaatcgagaaaacgaacgagaaattccatcaaattgaaaaagaattctcagaagtagaagggagaattcaggacctcgagaaatatgttgaggacactaaaatagatctctggtcgtacaatgcggagcttcttgttgccctggagaaccaacatacaattgatctaactgactcagaaatgaacaaactgtttgaaagaacaaagaagcaactgagggaaaatgctgaggatatgggcaatggttgtttcaaaatataccacaaatgtgacaatgcctgcatagggtcaatcagaaatggaacttatgaccatgatgtatacagagacgaagcattgaacaaccggttccagatcaaaggtgttgagctgaagtcaggatacaaagattgggtcctatggatttcctttgccatatcatgttttttgctttgtattgttttgctggggttcatcatgtgggcctgccaaaaaggcaacattaggtgcaacatttgcatttga

SEQ ID NO: 31183 - RNA, 1701 nt, synthetic construct; identical to SEQ ID NO: 31066
  misc_feature 1..1701: note = hemagglutinin__InfluenzaA__ABC85974
  source 1..1701: mol_type = other RNA

SEQ ID NO: 31184 - RNA, 1701 nt, synthetic construct; identical to SEQ ID NO: 31066
  misc_feature 1..1701: note = hemagglutinin__InfluenzaA__ABC85985
  source 1..1701: mol_type = other RNA

SEQ ID NO: 31185 - RNA, 1701 nt, synthetic construct
  misc_feature 1..1701: note = hemagglutinin__InfluenzaA__ABC85996
  source 1..1701: mol_type = other RNA
atgaagactatcattgctttgagctacattctatgtctggttttcgctcaaaaacttcccggaaatgacaacagcacggcaacgctgtgccttgggcaccatgcagtaccaaacggaacgatagtgaaaacaatcacgaatgaccaaattgaagttactaatgctactgagctggttcagagttcctcaacaggtggaatatgcgacagtcctcatcagatccttgatggagaaaactgcacactaatagatgctctattgggagaccctcagtgtgatggcttccaaaataagaaatgggacctttttgttgaacgcagcaaagcctacagcaactgttacccttatgatgtgccggattatgcctcccttaggtcactagttgcctcatccggcacactggagtttaacaatgaaagcttcaattggactggagtcactcaaaatggaacaagctctgcttgcaaaaggagatctaataacagtttctttagtagattgaattggttgacccatttaaaattcaaatacccagcattgaacgtgactatgccaaacaatgaaaaatttgacaaattgtacatttggggggttcaccacccgggtacggacaatgaccaaatcagcctatatgctcaagcatcaggaagaatcacagtctctaccaaaagaagccaacaaactgtaatcccgaatatcggatctagacccagggtaagggatatccccagcagaataagcatctattggacaatagtaaaaccgggagacatacttttgattaacagcacagggaatctaattgctcctcggggttacttcaaaatacgaagtgggaaaagctcaataatgagatcagatgcacccattggcaaatgcaattctgaatgcatcactccaaatggaagcattcccaatgacaaaccatttcaaaatgtaaacaggatcacatatggggcctgtcccagatatgttaagcaaaacactctgaaattggcaacagggatgcgaaatgtaccagagaaacaaactagaggcatatttggcgcaatcgcgggtttcatagaaaatggttgggagggaatgatggatggttggtacggtttcaggcatcaaaattctgagggaataggacaagcagcagatctcaaaagcactcaagcagcaatcaaccaaatcaatgggaagctgaataggttgatcgggaaaaccaacgagaaattccatcagattgaaaaagaattctcagaagtagaagggagaattcaggacctcgagaaatatgttgaggacactaaaatagatctctggtcatacaacgcggagcttcttgttgccctggagaaccaacatacaattgatctaactgactcagaaatgaacaaactgtttgaaagaacaaagaagcaactgagggaaaatgctgaggatatgggcaatggttgtttcaaaatataccacaaatgtgacaatgcctgcatagggtcaatcagaaatggaacttatgaccatgatgtatacagagatgaagcattaaacaaccggttccagatcaaaggtgttgagctgaagtcaggatacaaagattggatcctatggatttcctttgccatatcatgttttttgctttgtgttgctttgttggggttcatcatgtgggcctgccaaaaaggcaacattaggtgcaacatttgcatttga

SEQ ID NO: 31186 - RNA, 1701 nt, synthetic construct; identical to SEQ ID NO: 30822
  misc_feature 1..1701: note = hemagglutinin__InfluenzaA__ABC86007
  source 1..1701: mol_type = other RNA

SEQ ID NO: 31187 - RNA, 1701 nt, synthetic construct
  misc_feature 1..1701: note = hemagglutinin__InfluenzaA__ABC86018
  source 1..1701: mol_type = other RNA
atgaagactatcattgctttgagctacattctatgtctggttttcgctcaaaaacttcccggaaatgacaacagcacggcaacgctgtgccttgggcaccatgcagtaccaaacggaacgatagtgaaaacaatcacgaatgaccaaattgaagttactaatgctactgagctggttcagagttcctcaacaggtggaatatgcgacagtcctcatcagatccttgatggagaaaactgcacaataatagatgctctattgggagaccctcagtgtgatggcttccaaaataagaaatgggacctttttgttgaacgcagcaaagcctacagcaactgttacccttatgatgtgccggattatgcctcccttaggtcactagttgcctcatccggcacactggagtttaacaatgaaagcttcaattggactggagtcactcaaaatggaacaagctctgcttgcaaaaggagatctaataacagtttctttagtagattgaattggttgacccatttaaaattcaaatacccagcattgaacgtgactatgccaaacaatgaaaaatttgacaaattgtacatttggggggttcaccacccgggtacggacaatgaccaaatcagcctatatgctcaagcatcaggaagaatcacagtctctaccaaaagaagccaacaaactgtaatcccgaatatcggatctagacccagggtaagggatatccccagcagaataagcatctattggacaatagtaaaaccgggagacatacttttgattaacagcacagggaatctaattgctcctcggggttacttcaaaatacgaagtgggaaaagctcaataatgagatcagatgcacccattggcaaatgcaattctgaatgcatcactccaaatggaagcattcccaatgacaaaccatttcaaaatgtaaacaggatcacatatggggcctgtcccagatatgttaagcaaaacactctgaaattggcaacagggatgcgaaatgtaccagagaaacaaactagaggcatatttggcgcaatcgcgggtttcatagaaaatggttgggagggaatggtggatggttggtacggtttcaggcatcaaaattctgagggaataggacaagcagcagatctcaaaagcactcaagcagcaatcaaccaaatcaatgggaagctgaataggttgatcgggaaaaccaacgagaaattccatcagattgaaaaagaattctcagaagtagaagggagaattcaggacctcgagaaatatgttgaggacactaaaatagatctctggtcatacaacgcggagcttcttgttgccctggagaaccaacatacaattgatctaactgactcagaaatgaacaaactgtttgaaagaacaaagaagcaactgagggaaaatgctgaggatatgggcaatggttgtttcaaaatataccacaaatgtgacaatgcctgcatagggtcaatcagaaatggaacttatgaccatgatgtatacagagatgaagcattaaacaaccggttccagatcaaaggtgttgagctgaagtcaggatacaaagattggatcctatggatttcctttgccatatcatgttttttgctttgtgttgctttgttggggttcatcatgtgggcctgccaaaaaggcaacattaggtgcaacatttgcatttga

SEQ ID NO: 31188 - RNA, 1701 nt, synthetic construct; identical to SEQ ID NO: 30822
  misc_feature 1..1701: note = hemagglutinin__InfluenzaA__ABC86029
  source 1..1701: mol_type = other RNA

SEQ ID NO: 31189 - RNA, 1701 nt, synthetic construct; identical to SEQ ID NO: 30826
  misc_feature 1..1701: note = hemagglutinin__InfluenzaA__ABC86040
  source 1..1701: mol_type = other RNA

SEQ ID NO: 31190 - RNA, 1701 nt, synthetic construct; identical to SEQ ID NO: 31020
  misc_feature 1..1701: note = hemagglutinin__InfluenzaA__ABC86124
  source 1..1701: mol_type = other RNA

SEQ ID NO: 31191 - RNA, 1701 nt, synthetic construct
  misc_feature 1..1701: note = hemagglutinin__InfluenzaA__ABC86137
  source 1..1701: mol_type = other RNA
atgaagactatcattgctttgagctacattttctgtctggttttcgcccaaaaccttcccggaaatgacaaaagcacagcaacgctgtgcctgggacaccatgcagtgccaaacggaacgctagtgaaaacaatcacgaatgatcagattgaagtgactaatgctactgagctggttcagagttcctcaacaggtagaatatgcgacagtcctcaccgaatccttgatgggaaaaactgcacactggtagatgctctattgggagaccctcattgtgatggctttcagaatgagaaatgggacctttttgttgaacgcagcaaagctttcagcaactgttacccttatgatgtgccagattatgcctcccttaggtcactagttgcctcgtcaggcaccctggagtttatcaatgaaagcttcaattggactggagtcactcagagtgggggaagctatgcttgcaaaaggggatctgataacagtttcttcagtagactgaattggttgtacgaatcagaaagcaaatatccagtgctgaacgtgactatgccaaacaatggcaattttgacaaactgtacatttggggggttcaccacccgagcacggacaaagaacaaaccaacctatatgttcgagcatcagggagagtcacagtctctaccaagagaagccagcaaactataatcccgaatatcgggtctagaccctgggtaaggggtctgtctagcagaataagcatctattggacaatagtaaaaccgggagacatactgttaattaatagtaatgggaacctaattgctcctcggggttacttcaaaatacgcactgggaaaagctcaataatgaggtcagatgcacctattggcacctgcagttctgaatgcatcactccaaatggaagcattcccaatgacaagccctttcaaaatgtaaacaagatcacatatggggcatgtcccaagtatgttaagcaaaacactctgaagttggcaacagggatgcggaatgtaccagagaaacaaactagaggcatattcggcgcaatagcaggtttcatagaaaatggttgggagggaatggtagacggttggtacggtttcaggcatcaaaattctgagggcacaggacaagcagcagatcttaaaagcactcaagcagcaatcgaccaaatcaatgggaaactgaatagggtaatcgagaaaacgaacgagaaattccatcaaatcgaaaaggaattctcagaagtagaagggagaattcaggacctcgagaaatacgttgaagacactaaaatagatctctggtcttacaacgcggaacttcttgtcgctctggagaaccaacatacaattgatctgactgactcggaaatgaacaaactgtttgaaaaaacaaggaggcaactgagggaaaatgctgaggacatgggcaatggttgcttcaaaatataccacaaatgtgacaatgcttgcatagggtcaatcagaaatggaacttatgaccatgatgtatacagagacgaagcattaaacaaccggtttcagatcaaaggtgttgagctgaagtcaggatacaaagactggatcctgtggatttcctttgccatatcatgctttttgctttgtgttgttttgctggggttcatcatgtgggcctgccaaaaaggcaacattaggtgcaacatttgcatttga

SEQ ID NO: 31192 - RNA, 1701 nt, synthetic construct
  misc_feature 1..1701: note = hemagglutinin__InfluenzaA__ABC97374
  source 1..1701: mol_type = other RNA
atgaagactatcattgctttgagctacattttctgtctggttctcggccaagactttccaggaaatgacaacagcacagcaacgctgtgcctgggacatcatgcggtgccaaacggaacactagtgaaaacaatcacaaatgatcagattgaagtgactaatgctactgagctggttcagagttcctcaacggggaaaatatgcaacaatcctcatcgaatccttgatggaatagactgcacactgatagatgctctattgggggaccctcattgtgatggctttcaaaatgagacatgggaccttttcgttgaacgcagcaaagctttcagcaactgttacccttatgatgtgccagattatgcctcccttaggtcactagttgcctcgtcaggcactctggagtttatcaatgaaggcttcacttggactggggtcactcagaatgggggaagcaatgcttgcaaaaggggacctgatagcggttttttcagtagactgaactggttgtacaaatcaggaagcacatatccagtgctgaacgtgactatgccaaacaatgacaattttgacaaactatacatttggggggttcaccacccgagcacggaccaagaacaaaccagcctatatgttcaagcatcagggagagtcacagtctctaccaagagaagccagcaaactataatcccgaatatcgggtctagaccctgggtaaggggtctgtctagtagaataagcatctattggacaatagttaaaccgggagacatactggtaattaatagtaatgggaacctaattgctcctcggggttatttcaaaatgcgcactgggaaaagctcaataatgaggtcagatgcacctattggcacctgcatttctgaatgcatcactccaaatggaagcattcccaatgacaagccctttcaaaacgtaaacaagatcacatatggggcatgtcccaagtatgttaagcaaaacaccctgaagttggcaacagggatgcggaatgtaccagagaaacaaactagaggcctattcggcgcaatagcaggtttcatagaaaatggttgggagggaatggtagacggttggtacggtttcaggcatcaaaattctgagggcacaggacaagcagcagatcttaaaagtactcaagcagccatcgaccaaatcaatgggaaactgaatagggtaatcgagaagacgaacgagaaattccatcaaatcgaaaaggaattctcagaagtagaagggagaattcaggacctcgagaaatacgttgaagacactaaaatagatctctggtcttacaatgcggagcttcttgtcgctctggagaaccaacatacaattgatctgactgactcggaaatgaacaaactgtttgaaaaaacaaggaggcaactgagggaaaatgctgaggacatgggcaatggttgcttcagaatataccacaaatgtgacaatgcttgcatagggtcaatcagaaatgggacttatgaccatgatgtatacagagacgaagcattaaacaaccggtttcagatcaaaggtgttgaactgaagtcaggatacaaagactggatcctgtggatttcctttgccatatcatgctttttgctttgtgttgttttgctggggttcatcatgtgggcctgccagaaaggcaacattaggtgcaacatttgcatttga

SEQ ID NO: 31193 - RNA, 1701 nt, synthetic construct; identical to SEQ ID NO: 30536
  misc_feature 1..1701: note = hemagglutinin__InfluenzaA__ABD15449
  source 1..1701: mol_type = other RNA

SEQ ID NO: 31194 - RNA, 1701 nt, synthetic construct
  misc_feature 1..1701: note = hemagglutinin__InfluenzaA__ABD15460
  source 1..1701: mol_type = other RNA
atgaagactatcattgctttgagctacattctatgtctggttttcgctcaaaaacttcccggaaatgacaacagcacggcaacgctgtgccttgggcaccatgcagtaccaaacggaacgatagtgaaaacaatcacgaatgaccaaattgaagttactaatgctactgagctggttcagatttcctcaacaggtggaatatgcgacagtccttatcagatccttgatggagaaaactgcacactaatagatgctctattgggagaccctcagtgtgatggcttccaaaataagaaatgggacctttttgttgaacgcagcaaagcctacagcaactgttacccttatgatgtgccggattatgcctcccttaggtcactagttgcctcatccggcacactggagtttaacaatgaaagcttcgattggactggagtcactcagaatggaacaagctctgcttgcaaaaggagatctaataaaagtttctttagtagattgaattggttgacccacttaaaatacaaatacccagcattgaacgtgactatgccaaacaatgaaaaatttgacaaattgtacatttggggggttcaccacccgggtacggacagtgaccaaatcagcctatatgctcaagcatcaggaagaatcacagtctctaccaaaagaagccaacaaactgtaatcccgaatatcggatctagacccagggtaagggatgtctccagccgaataagcatctattggacaatagtaaaaccgggagacatacttttgattaacagcacagggaatctaattgctcctcggggttacttcaaaatacgaagtgggaaaagctcaataatgagatcagatgcacccattggcaaatgcaattctgaatgcatcactccaaatggaagcattcccaatgacaaaccatttcaaaatgtaaacaggatcacatatggggcctgtcccagatatgttaagcaaaacactctgaaattggcaacagggatgcgaaatgtaccagagaaacaaactagaggcatatttggcgcaatcgcgggtttcatagaaaatggttgggagggaatggtggacggttggtacggtttcaggcatcaaaattctgagggcacaggacaagcagcagatctcaaaagcactcaagcagcaatcaaccaaatcaatgggaaactgaataggttaatcgggaaaacaaacgagaaattccatcagattgaaaaagaattctcggaagtagaaggaagaattcaggacctcgagaaatatgttgaggacactaaaatagatctctggtcatacaacgcggagcttcttgttgccctggagaaccaacatacaattgatctaactgactcagaaatgaacaaactgtttgaaagaacaaagaagcaactgagggaaaatgctgaggatatgggcaatggttgtttcaaaatataccacaaatgtgacaatgcctgcatagggtcaatcagaaatggaacttatgaccatgatgtgtacagagatgaagcattaaacaaccggtttcagatcaaaggtgttgagctgaagtcaggatacaaagattggatcctatggatttcctttgccatatcatgttttttgctttgtgttgctttgttggggttcatcatgtgggcctgccaaaaaggcaacattaggtgcaacatttgcatttga

SEQ ID NO: 31195 - RNA, 1701 nt, synthetic construct
  misc_feature 1..1701: note = hemagglutinin__InfluenzaA__ABD15471
  source 1..1701: mol_type = other RNA
atgaagactatcattgctttgagctacattctatgtctggttttcgctcaaaaacttcccggaaatgacaacagcacggcaacgctgtgccttgggcaccatgcagtaccaaacggaacgatagtgaaaacaatcacgaatgaccaaattgaagttactaatgctactgagctggtacagagttcctcaacaggtggaatatgcgacagtcctcatcagatccttgatggagaaaactgcacactaatagatgctctattgggagaccctcagtgtgatggcttccaaaataagaaatgggacctttttgttgaacgcagcaaagcctacagcaactgttacccttatgatgtgccggattatgcctcccttaggtcactagttgcctcatccggcacactggagtttaacaatgaaagcttcgattggactggagtcactcagaatggaacaagctctgcttgcaaaaggagatctaataaaagtttctttagtagattgaattggttgacccacttaaaatacaaatacccagcattgaacgtgactatgccaaacaatgaaaaatttgacaaattgtacatttggggggttcaccacccgggtacggacagtgaccaaatcagcctatatgctcaagcatcaggaagaatcacagtctctaccaaaagaagccaacaaactgtaatcccgaatatcggatctagacccagggtaagggatgtctccagccgaataagcatctattggacaatagtaaaaccgggagacatacttttgattaacagcacagggaatctaattgctcctcggggttacttcaaaatacgaagtgggaaaagctcaataatgagatcagatgcacccattggcaaatgcaattctgaatgcatcactccaaatggaagcattcccaatgacaaaccatttcaaaatgtaaacaggatcacatatggggcctgtcccagatatgttaagcaaaacactctgaaattggcaacagggatgcgaaatgtaccagagaaacaaactagaggcatatttggcgcaatcgcgggtttcatagaaaatggttgggagggaatggtggacggttggtacggtttcaggcatcaaaattctgagggcacaggacaagcagcagatctcaaaagcactcaagcagcaatcaaccaaatcaatgggaaactgaataggttaatcgggaaaacaaacgagaaattccatcagattgaaaaagaattctcagaagtagaagggagaattcaagacctcgagaaatatgttgaggacactaaaatagatctctggtcatacaacgcggagcttcttgttgccctggagaaccaacatacaattgatctaactgactcagaaatgaacaaactgtttgaaagaacaaagaagcaactgagggaaaatgctgaggatatgggcaatggttgtttcaaaatataccacaaatgtgacaatgcctgcatagggtcaatcagaaatggaacttatgaccatgatgtgtacagagatgaagcattaaacaaccggttccagatcaaaggtgttgagctgaagtcaggatacaaagattggatcctatggatttcctttgccatatcatgttttttgctttgtgttgctttgttggggttcatcatgtgggcctgccaaaaaggcaacattaggtgcaacatttgcatttga

SEQ ID NO: 31196 - RNA, 1701 nt, synthetic construct; identical to SEQ ID NO: 30540
  misc_feature 1..1701: note = hemagglutinin__InfluenzaA__ABD15482
  source 1..1701: mol_type = other RNA

SEQ ID NO: 31197 - RNA, 1701 nt, synthetic construct; identical to SEQ ID NO: 31194
  misc_feature 1..1701: note = hemagglutinin__InfluenzaA__ABD15493
  source 1..1701: mol_type = other RNA

SEQ ID NO: 31198 - RNA, 1701 nt, synthetic construct; identical to SEQ ID NO: 30771
  misc_feature 1..1701: note = hemagglutinin__InfluenzaA__ABD15526
  source 1..1701: mol_type = other RNA

SEQ ID NO: 31199 - RNA, 1701 nt, synthetic construct
  misc_feature 1..1701: note = hemagglutinin__InfluenzaA__ABD15537
  source 1..1701: mol_type = other RNA
atgaagactatcattgctttgagctacatttcatgtctggttttcgctcaaaaacttcccggaaatgacaacagcacggcaacgctgtgcctgggacaccatgcagtgccaaacggaacactagtgaaaacaatcacaaatgaccaaattgaagtgactaatgctactgagctggttcagagttcctcaacaggtagaatatgcgacagtcctcaccgaatccttgatggagaaaactgcacactgatagatgctctattgggagaccctcattgtgatggcttccaaaataaggaatgggacctttttgttgaacgcagcaaagcctacagcaactgttacccttatgatgtgccggattatgcctcccttaggtcactagttgcctcatccggcactctggagtttaacaatgaaagcttcaattggactggagtcgctcagaatggaacaagctatgcttgcaaaaggagatctattaaaagtttctttagtagattgaattggttgcaccaattaaaatacaaatatccagcactgaacgtgactatgccaaacaatgacaaatttgacaaattgtacatttggggggttcaccacccgagtacggacagtgaccaaaccagcctatatgctcaagcatcagggagagtcacagtctctaccaaaagaagccaacaaactgtaatcccgaatatcggatctagaccctgggtaaggggtgtctccagcagaataagcatctattggacaatagtaaaaccgggagacatacttttgattaacagcacagggaatctaattgctcctcggggttacttcaaaatacgaagtgggaaaagctcaataatgaggtcagatgcacccattggcaaatgcaattctgaatgcatcactccaaatggaagcattcccaatgacaaaccatttcaaaatgtaaacaggatcacatatggggcctgtcccagatatgttaagcaaaacactctgaaattggcaacagggatgcggaatgtaccagagaaacaaactagaggcatattcggcgcaatcgcaggtttcatagaaaatggttgggagggaatggtagacggttggtacggtttcaggcatcaaaattctgagggcacaggacaagcagcagatcttaaaagcactcaagcagcaatcaaccaaatcaacgggaaactgaataggttaatcgagaaaacgaacgagaaattccatcaaattgaaaaagaattctcagaagtagaagggagaattcaggacctcgagaaatatgttgaggacactaaaatagatctctggtcgtacaacgcggagcttcttgttgccctggagaaccaacatacaattgatctaactgactcagaaatgaacaaactgtttgaaagaacaaggaagcaactgagggaaaatgctgaggatatgggcaatggttgtttcaaaatataccacaaatgtgacaatgcctgcatagggtcaatcagaaatggaacttatgaccatgatgtatacagagacgaagcattaaacaaccggttccagatcaaaggtgttgagctgaagtcaggatacaaagattggatcctatggatttcctttgccatatcatgttttttgctttgtgttgttttgctggggttcatcatgtgggcctgccaaaaaggcaacattaggtgcaacatttgcatttga

SEQ ID NO: 31200 - RNA, 1701 nt, synthetic construct; identical to SEQ ID NO: 30967
  misc_feature 1..1701: note = hemagglutinin__InfluenzaA__ABD15548
  source 1..1701: mol_type = other RNA

SEQ ID NO: 31201 - RNA, 1701 nt, synthetic construct
  misc_feature 1..1701: note = hemagglutinin__InfluenzaA__ABD15559
  source 1..1701: mol_type = other RNA
atgaagactatcattgctttgagctacattttatgtctggttttcgctcaaaaaattcccggaaatgacaacagcacggcaacgctgtgcctgggacaccatgcagtgccaaacggaacgctagtgaaaacaatcacgaatgaccaaattgaagtgactaatgctactgagctggttcagagttcctcaacaggtagaatatgcgacagtcctcaccgaatccttgatggagaaaactgcacactgatagatgctctattgggagaccctcattgtgatggcttccaaaataaggaatgggacctttttgttgaacgcagcaaagcctacagcaactgttacccttatgatgtgccggattatgcctcccttaggtcactagttgcctcatccggcaccctggagtttaacaatgaaagcttcaattggactggagtcgctcagaatggaacaagctatgcttgcaaaaggagatctattaaaagtttctttagtagattgaattggttgcaccaattaaaatacaaatatccagcactgaacgtgactatgccaaacaatgacaaatttgacaaattgtacatttggggggttcaccacccgagtacggacagtgaccaaaccagcctatatgctcaagcatcagggagagtcacagtctctaccaaaagaagccaacaaactgtaatcccgaatatcggatctagaccctgggtaaggggtgtctccagcagaataagcatctattggacaatagtaaaaccgggagacatacttttgattaacagcacagggaatctaattgctcctcggggttacttcaaaatacgaagtgggaaaagctcaataatgaggtcagatgcacccattggcaaatgcaattctgaatgcatcactccaaatggaagcattcccaatgacaaaccatttcaaaatgtaaacaggatcacatatggggcctgtcccagatatgttaagcaaaacactctgaaattggcaacagggatgcggaatgtaccagagaaacaaactagaggcatattcggcgcaatcgcaggtttcatagaaaatggttgggagggaatggtagacggttggtacggtttcaggcatcaaaattctgagggcacaggacaagcagcagatcttaaaagcactcaagcagcaatcaaccaaatcaacgggaaactgaataggttaatcgagaaaacgaacgagaaattccatcaaattgaaaaagaattctcagaagtagaagggagaattcaggacctcgagaaatatgttgaggacactaaaatagatctctggtcgtacaacgcagagcttcttgttgccctggagaaccaacatacaattgatctaactgactcagaaatgaacaaactgtttgaaagaacaaggaagcaactaagggaaaatgctgaggatatgggcaatggttgcttcaaaatataccacaaatgtgacaatgcctgcatagggtcaatcagaaatggaacttatgaccatgatgtatacagagacgaagcattaaacaaccggttccagatcaaaggtgttgagctgaagtcaggatacaaagattggatcctatggatttcctttgccatatcatgttttttgctttgtgttgttttgctggggttcatcatgtgggcctgccaaaaaggcaacattaggtgcaacatttgcatttga

SEQ ID NO: 31202 - RNA, 1701 nt, synthetic construct; identical to SEQ ID NO: 30967
  misc_feature 1..1701: note = hemagglutinin__InfluenzaA__ABD15570
  source 1..1701: mol_type = other RNA

SEQ ID NO: 31203 - RNA, 1701 nt, synthetic construct; identical to SEQ ID NO: 31006
  misc_feature 1..1701: note = hemagglutinin__InfluenzaA__ABD15581
  source 1..1701: mol_type = other RNA

SEQ ID NO: 31204 - RNA, 1701 nt, synthetic construct
  misc_feature 1..1701: note = hemagglutinin__InfluenzaA__ABD15592
  source 1..1701: mol_type = other RNA
atgaagactatcattgctttgagctacatttcatgtctggttttcgctcaaaaacttcccggaaatgacaacagcacggcaacgctgtgcctgggacaccatgcagtgccaaacggaacactagtgaaaacaatcacaaatgaccaaattgaagtgactaatgctactgagctggttcagagttcctcaacaggtagaatatgcgacagtcctcaccgaatccttgatggagaaaactgcacactgatagatgctctattgggagaccctcattgtgatggcttccaaaataaggaatgggacctttttgttgaacgcagcaaagcctacagcaactgttacccttatgatgtgccggattatgcctcccttaggtcactagttgcctcatccggcactctggagtttaacaatgaaagcttcaattggactggagtcgctcagaatggaacaagctatgcttgcaaaaggagatctattaaaagtttctttagtagattgaattggttgcaccaattaaaatacaaatatccagcactgaacgtgactatgccaaacaatgacaaatttgacaaattgtacatttggggggttcaccacccgagtacggacagtgaccaaaccagcctatatgctcaagcatcagggagagtcacagtctctaccaaaagaagccaacaaactgtaatcccgaatatcggatctagaccctgggtaaggggtgtctccagcagaataagcatctattggacaatagtaaaaccgggagacatacttttgattaacagcacagggaatctaattgctcctcggggttacttcaaaatacgaagtgggaaaagctcaataatgaggtcagatgcacccattggcaaatgcaattctgaatgcatcactccaaatggaagcattcccaatgacaaaccatttcaaaatgtaaacaggatcacatatggggcctgtcccagatatgttaagcaaaacactctgaaattggcaacagggatgcggaatgtaccagagaaacaaactagaggcatattcggcgcaatcgcaggtttcatagaaaatggttgggagggaatggtagacggttggtacggtttcaggcatcaaaattctgagggcacaggacaagcagcagatcttaaaagcactcaagcagcaatcaaccaaatcaacgggaaactgaataggttaatcgagaaaacgaacgagaaattccatcaaattgaaaaagaattctcagaagtagaagggagaattcaggacctcgagaaatatgttgaggacactaaaatagatctctggtcgtacaacgcggagcttcttgttgccctggagaaccaacatacaattgatctaactgactcagaaatgaacaaactgtttgaaagaacaaggaagcaactgagggaaaatgctgaggatatgggcaatggttgtttcaaaatataccacaaatgtgacaatgcctgcatagggtcaatcagaaatggaacttatgaccatgatgtatacagagacgaagcattaaacaaccggttccagatcaaaggtgttgagctgaagtcaggatacaaagattggatcctatggatttcctttgccatatcatgttttttgctttgtgttgttttgctggggttcatcatgtgggcctgccaaaaaggcaacattagatgcaacatttgcatttga

SEQ ID NO: 31205 - RNA, 1701 nt, synthetic construct; identical to SEQ ID NO: 30967
  misc_feature 1..1701: note = hemagglutinin__InfluenzaA__ABD15603
  source 1..1701: mol_type = other RNA

SEQ ID NO: 31206 - RNA, 1701 nt, synthetic construct
  misc_feature 1..1701: note = hemagglutinin__InfluenzaA__ABD15614
  source 1..1701: mol_type = other RNA
atgaagactatcattgctttgagctacatttcatgtctggttttcgctcaaaaacttcccggaaatgacaacagcacggcaacgctgtgcctgggacaccatgcagtgccaaacggaacgctagtgaaaacaatcacgaatgaccaaattgaagtgactaatgctactgagctggttcagagttcctcaacaggtagaatatgcgacagtcctcaccgaatcctcgatggagaaaactgcacactgatagatgctctattgggagaccctcattgtgatggcttccaaaataaggaatgggacctttttgttgaacgcagcaaagcctacagcaactgttacccttatgatgtgccggattatgcctcccttaggtcactagttgcctcatccggcactctggagtttaacaatgaaagcttcaattggactggagtcgctcagaatggaacaagctatgcttgcaaaaggagatctattaaaagtttctttagtagattgaattggttgcaccaattaaaatacaaatatccagcactgaacgtgactatgccaaacaatgacaaatttgacaaattgtacatttggggggttcaccacccgagtacggacagtgaccaaaccagcctatatgctcaagcatcagggagagtcacagtctctaccaaaagaagccaacaaactgtaatcccgaatatcggatctagaccctgggtaaggggtgtctccagcagaataagcatctattggacaatagtaaaaccgggagacatacttttgattaacagcacagggaatctaattgctcctcggggttacttcaaaatacgaagtgggaaaagctcaataatgaggtcagatgcacccattggcaaatgcaattctgaatgcatcactccaaatggaagcattcccaatgacaaaccatttcaaaatgtaaacaggatcacatatggggcctgtcccagatatgttaagcaaaacactctgaaattggcaacagggatgcggaatgtaccagagaaacaaactagaggcatattcggcgcaatcgcaggtttcatagaaaatggttgggagggaatggtagacggttggtacggtttcaggcatcaaaattctgagggcacaggacaagcagcagatcttaaaagcactcaagcagcaatcaaccaaatcaacgggaaactgaataggttaatcgagaaaacgaacgagaaattccatcaaattgaaaaagaattctcagaagtagaagggagaattcaggacctcgagaaatatgttgaggacactaaaatagatctctggtcgtacaacgcggagcttcttgttgccctggagaaccaacatacaattgatctaactgactcagaaatgaacaaactgtttgaaagaacaaggaagcaactgagggaaaatgctgaggatatgggcaatggttgtttcaaaatataccacaaatgtgacaatgcctgcatagggtcaatcagaaatggaacttatgaccatgatgtatacagagacgaagcattaaacaaccggttccagatcaaaggtgttgagctgaagtcaggatacaaagattggatcctatggatttcctttgccatatcatgttttttgctttgtgttgttttgctggggttcatcatgtgggcctgccaaaaaggcaacattaggtgcaacatttgcatttga

SEQ ID NO: 31207 - RNA, 1701 nt, synthetic construct
  misc_feature 1..1701: note = hemagglutinin__InfluenzaA__ABD15625
  source 1..1701: mol_type = other RNA
atgaagactatcattgctttgagctacattctatgtctggttttcgctcaaaaacttcccggaaatgacaacagcacggcaacgctgtgccttgggcaccatgcagtaccaaacggaacgatagtgaaaacaatcacgaatgaccaaattgaagttactaatgctactgagctggtacagagttcctcaacaggtggaatatgcgacagtcctcatcagatccttgatggagaaaactgcacactaatagatgctctattgggagaccctcagtgtgatggcttccaaaataagaaatgggacctttttgttgaacgcagcaaagcctacagcaactgttacccttatgatgtgccggattatgcctcccttaggtcactagttgcctcatccggcacactggagtttaacaatgaaagcttcgattggactggagtcactcagaatggaacaagctctgcttgcaaaaggagatctaataaaagtttctttagtagattgaattggttgacccacttaaaatacaaatacccagcattgaacgtgactatgccaaacaatgaaaaatttgacaaattgtacatttggggggttcaccacccgggtacggacagtgaccaaatcagcctatatgctcaagcatcaggaagaatcacagtctctaccaaaagaagccaacaaactgtaatcccgaatatcggatctagacccagggtaagggatgtctccagccaaataagcatctattggacaatagtaaaaccgggagacatacttttgattaacagcacagggaatctaattgctcctcggggttacttcaaaatacgaagtgggaaaagctcaataatgagatcagatgcacccattggcaaatgcaattctgaatgcatcactccaaatggaagcattcccaatgacaaaccatttcaaaatgtaaacaggatcacatatggggcctgtcccagatatgttaagcaaaacactctgaaattggcaacagggatgcgaaatgtaccagagaaacaaactagaggcatatttggcgcaatcgcgggtttcatagaaaatggttgggagggaatggtggacggttggtacggtttcaggcatcaaaattctgagggcacaggacaagcagcagatctcaaaagcactcaagcagcaatcaaccaaatcaatgggaaactgaataggttaatcgggaaaacaaacgagaaattccatcagattgaaaaagaattctcagaagtagaagggagaattcaggacctcgtgaaatatgttgaggacactaaaatagatctctggtcatacaacgcggagcttcttgttgccctggagaaccaacatacaattgatctaactgactcagaaatgaacaaactgtttgaaagaacaaagaagcaactgagggaaaatgctgaggatatgggcaatggttgtttcaaaatataccacaaatgtgacaatgcctgcatagggtcaatcagaaatggaacttatgaccatgatgtgtacagagatgaagcattaaacaaccggttccagatcaaaggtgttgagctgaagtcaggatacaaagattggatcctatggatttcctttgccatatcatgttttttgctttgtgttgctttgttggggttcatcatgtgggcctgccaaaaaggcaacattaggtgcaacatttgcatttga

SEQ ID NO: 31208 - RNA, 1701 nt, synthetic construct
  misc_feature 1..1701: note = hemagglutinin__InfluenzaA__ABD15636
  source 1..1701: mol_type = other RNA
atgaagactatcattgctttgagctacattttatgtctggttttcgctcaaaaaattcccggaaatgacaacagcacggcaacgctgtgcctgggacaccatgcagtgccaaacggaacgctagtgaaaacaatcacgaatgaccaaattgaagtgactaatgctactgagctggttcagagttcctcaacaggtagaatatgcgacagtcctcaccgaatccttgatggagaaaactgcacactgatagatgctctattgggagaccctcattgtgatggcttccaaaataaggaatgggacctttttgttgaacgcagcaaagcctacagcaactgttacccttatgatgtgccggattatgcctcccttaggtcactagttgcctcatccggcaccctggagtttaacaatgaaagcttcaattggactggagtcgctcagaatggaacaagctatgcttgcaaaaggagatctattaaaagtttctttagtagattgaattggttgcaccaattaaaatacaaatatccagcactgaacgtgactatgccaaacaatgacaaatttgacaaattgtacatttggggggttcaccacccgagtacggacagtgaccaaaccagcctatatgctcaagcatcagggagagtcacagtctctaccaaaagaagccaacaaactgtaatcccgaatatcggatctagaccctgggtaaggggtgtctccagcagaataagcatctattggacaatagtaaaaccgggagacatacttttgattaacagcacagggaatctaattgctcctcggggttacttcaaaatacgaagtgggaaaagctcaataatgaggtcagatgcacccattggcaaatgcaattctgaatgcatcactccaaatggaagcattcccaatgacaaaccatttcaaaatgtaaacaggatcacatatggggcatgtcccagatatgttaagcaaaacactctgaaattggcaacagggatgcggaatgtaccagagaaacaaactagaggcatattcggcgcaatcgcaggtttcatagaaaatggttgggagggaatggtagacggttggtacggtttcaggcatcaaaattctgagggcacaggacaagcagcagatcttaaaagcactcaagcagcaatcaaccaaatcaacgggaaactgaataggttaatcgagaaaacgaacgagaaattccatcaaattgaaaaagaattctcagaagtagaagggagaattcaggacctcgagaaatatgttgaggacactaaaatagatctctggtcgtacaacgcggagcttcttgttgccctggagaaccaacatacaattgatctaactgactcagaaatgaacaaactgtttgaaagaacaaggaagcaactaagggaaaatgctgaggatatgggcaatggttgtttcaaaatataccacaaatgtgacaatgcctgcatagggtcaatcagaaatggaacttatgaccatgatgtatacagagacgaagcattaaacaaccggttccagatcaaaggtgttgagctgaagtcaggatacaaagattggatcctatggatttcctttgccatatcatgttttttgctttgtgttgttttgctggggttcatcatgtgggcctgccaaaaaggcaacattaggtgcaacatttgcatttga

SEQ ID NO: 31209 - RNA, 1701 nt, synthetic construct
  misc_feature 1..1701: note = hemagglutinin__InfluenzaA__ABD15680
  source 1..1701: mol_type = other RNA
atgaagactatcattgctttgagctacattttatgtctggttttcgctcaaaaacttcccggaaatgacaacagcacggcaacgctgtgcctggggcaccatgcagtgccaaacggaacgctagtgaaaacaatcacgaatgaccaaattgaagtgactaatgctactgagctggttcagagttcctcaacaggtggaatatgcgacagtcctcaccaaatccttgatggagaaaactgcacactaatagatgctctattgggagaccctcattgtgatggcttccaaaataaggaatgggacctttttgttgaacgcagcaaagcctacagcaactgttacccttatgatgtgccggattatgcctcccttaggtcactagttgcctcatccggcacactggagtttaacaatgaaagcttcaattggactggagtcgctcagaatggaacaagctctgcttgcaaaaggagatctaataaaagtttctttagtagattgaattggttgcaccaattaaaatacaaatacccagcactgaacgtgactatgccaaacaatgaaaaatttgacaaattgtacatttggggggttcaccacccgagtacggacagtgaccaaatcagcctatatgctcaagcaccagggagagtcacagtctctaccaaaagaagccaacaaactgtaatcccgaatatcggatctagaccctgggtaaggggtgtctccagcagaataagcatctattggacaatagtaaaaccgggagacatacttttgattaactgcacagggaatctaattgctcctcggggttacttcaaaatacgaagtgggaaaagctcaataatgaggtcagatgcatccattggcaaatgcaattctgaatgcatcactccaaatggaagcattcccaatgacaaaccatttcaaaatgtaaacaggatcacatatggggcctgtcccagatatgttaagcaaaacactctgaaattggcaacagggatgcggaatgtaccagagaaacaaaccagaggcatattcggcgcaatcgcgggtttcatagaaaatggttgggagggaatggtggacggttggtacggtttcaggcatcaaaattctgagggcacaggacaagcagcagatctcaaaagcactcaagcagcaatcaaccaaatcaacgggaaactgaataggttaatcgagaaaacgaacgagaaattccatcaaattgaaaaagaattctcagaagtggaagggagaattcaggacctcgagaaatatgttgaggacactaaaatagatctctggtcgtacaacgcggagcttcttgttgccctggagaaccagcatacaattgatctaactgactcagaaatgaacaaactgtttgaaagaacaaagaagcaactgagggaaaatgctgaggatatgggcaatggttgtttcaaaatataccacaaatgtgacaatgcctgcatagggtcaatcagaaatgggacttatgaccatgatgtatacagagacgaagcattaaacaaccggttccagatcaaaggtgttgagctgaagtcaggatacaaagattggatcctatggatttcctttgccatatcatgttttttgctttgtgttgtcttgctgggattcatcatgtgggcctgccaaaaaggcaacattaggtgcaacatttgcatttga

SEQ ID NO: 31210 - RNA, 1701 nt, synthetic construct
  misc_feature 1..1701: note = hemagglutinin__InfluenzaA__ABD15691
  source 1..1701: mol_type = other RNA
atgaagactatcattgctttgagctacattttatgtctggttttcgctcaaaaacttcccgtaaatgacaaaagcacggcaacgctgtgcctgggacaccatgcagtgccaaacggaacgctagtgaaaacaatcacgaatgaccacattgaagtgactaatgctactgagctggttcagagttccccaacaggtagaatatgcgacagtcctcaccaaatccttgatggagaaaactgcacactaatagatgctctattgggagaccctcattgtgatggcttccaaaataaggaatgggacctttttgttgaacgcagcacagcctacagcaactgttacccttatgatgtgccggattatgcctcccttaggtcactagttgcctcatccggcacactggagtttaacaatgaaagcttcaattggactggagtcgctcagaatggaacaagctctgcttgcaaaaggagatctattaaaagtttctttagtagattgaattggttgcaccaattaaaatacaaatatccagcactgaacgtgactatgccaaacaatgaaaaatttgacaaattgtacatttggggggttcaccacccgagtacggacagtgaccaaatcagcctatatgctcaagcatcagggagagtcacagtctctaccaaaagaagccaacaaactgtaatcccgaatatcggatctagaccctgggtaaggggtgtctccagcagaataagcatctattggacaatagtaaaaccgggagacatacttttgattaacagcacagggaatctaattgctcctcggggttacttcaaaatacgaagtgggaaaagctcaataatgaggtcaaatgcacccattggcaaatgcaattctgaatgcatcactccaaatggaagcattcccaatgacaaaccatttcaaaatgtaaacaggatcacatatggggcctgtcccagatatgttaagcaaaacactctgaaattggcaacagggatgcggaatgtaccagagaaacaaactagaggcatattcggcgcaattgcaggtttcatagaaaatggttgggaaggaatggtggacggttggtacggtttcaggcatcaaaattctgagggcacaggacaagcagcagatcttaaaagcactcaagctgcaatcaaccaaatcaacgggaaactgaataggttaatcgagaaaacaaacgagaaattccatcaaattgaaaaagaattctcagaagtagaagggagaattcaggacctcgagaaatatgttgaggacactaaaatagatctctggtcgtacaacgcggagcttcttgttgccctggagaaccaacatacaattgatctaactgactcagaaatgaacaaactgtttgaaagaacaaggaagcaactgagggaaaatgctgaggatatgggcaatggttgtttcaaaatataccacaaatgtgacaatgcctgcatagggtcaatcagaaatggaacttatgaccatgatgtatacagagacgaagcattaaacaaccggttccagatcaaaggtgttgagctgaagtcaggatacaaagattggatcctatggatttcctttgccatatcatgttttttgctttgtgttgttttgctggggttcatcatgtgggcctgccaaaaaggcaacattaggtgcaacatttgcatttga

SEQ ID NO: 31211 - RNA, 1701 nt, synthetic construct
  misc_feature 1..1701: note = hemagglutinin__InfluenzaA__ABD15702
  source 1..1701: mol_type = other RNA
atgaagactatcattgctttgagctacattttatgtctggttttcgctcaaaaacttcccggaaatgacaacagcacggcaacgctgtgcctggggcaccatgcagtgccaaacggaacgctagtgaaaacaatcacgaatgaccaaattgaagtgaccaatgctactgagctggttcagagttcctcaacaggtggaatatgcgacagtcctcaccaaatccttgatggagaaaactgcacactaatagatgctctattgggagaccctcattgtgatggcttccaaaataaggaatgggacctttttgttgaacgcagcaaagcctacagcaactgttacccttatgatgtgccggattatgcctcccttaggtcactagttgcctcatccggcacactggagtttaacaatgaaagcttcaattggactggagtcgctcagaatggaacaagctctgcttgcaaaaggagatctaataaaagtttctttagtagattgaattggttgcaccaattaaaatacaaatacccagcactgaacgtgactatgccaaacaatgaaaaatttgacaaattgtacatttggggggttcaccacccgagtacggacagtgaccaaaccagcctatatgctcaagcaccagggagagtcacagtctctaccaaaagaagccaacaaactgtaatcccgaatatcggatctagaccctgggtaaggggtgtctccagcagaataagcatctattggacaatagtaaaaccgggagacatacttttgattaactgcacagggaatctaattgctcctcggggttacttcaaaatacgaagtgggaaaagctcaataatgaggtcagatgcatccattggcaaatgcaattctgaatgcatcactccaaatggaagcattcccaatgacaaaccatttcaaaatgtaaacaggatcacatatggggcctgtcccagatatgttaagcaaaacactctgaaattggcaacagggatgcggaatgtaccagagaaacaaactagaggcatattcggcgcaatcgcgggtttcatagaaaatggttgggagggaatggtggacggttggtacggtttcaggcatcaaaattctgagggcacaggacaagcagcagatctcaaaagcactcaagcagcaatcaaccaaatcaacgggaaactgaataggttaatcgagaaaacgaacgagaaattccatcaaattgaaaaagaattctcagaagtggaagggagaattcaggacctcgagaaatatgttgaggacactaaaatagatctctggtcgtacaacgcggagcttcttgttgccctggagaaccagcatacaattgatctaactgactcagaaatgaacaaactatttgaaagaacaaagaagcaactgagggaaaatgctgaggatatgggcaatggttgtttcaaaatataccacaaatgtgacaatgcctgcatagggtcaatcagaaatgggacttatgaccatgatgtatacagagacgaagcattaaacaaccggttccagatcaaaggtgttgagctgaagtcaggatacaaagattggatcctatggatttcctttgccatatcatgttttttgctttgtgttgtcttgctggggttcatcatgtgggcctgccaaaaaggcaacattaggtgcaacatttgcatttga

SEQ ID NO: 31212 - RNA, 1701 nt, synthetic construct
  misc_feature 1..1701: note = hemagglutinin__InfluenzaA__ABD15724
  source 1..1701: mol_type = other RNA
atgaagactatcattgctttgagctacattttatgtctggttttcgctcaaaaacttcccggaaatgacaacagcacggcaacgctgtgcctggggcaccatgcagtgccaaacggaacgctagtgaaaacaatcacgaatgaccaaattgaagtgactaatgctactgagctggttcagagttcctcaacaggtggaatatgcgacagtcctcaccaaatccttgatggagaaaactgcacactaatagatgctctattgggagaccctcattgtgatggcttccaaaataaggaatgggacctttttgttgaacgcagcaaagcctacagcaactgttacccttatgatgtgccggattatgcctcccttaggtcactagttgcctcatccggcacactggagtttaacaatgaaagcttcaattggactggagtcgctcagaatggaacaagctctgcttgcaaaaggagatctaataaaagtttctttagtagattgaattggttgcaccaattaaaatacaaatacccagcactgaacgtggctatgccaaacaatgaaaaatttgacaaattgtacatttggggggttcaccacccgagtacggacagtgaccaaatcagcctatatgctcaagcaccagggagagtcacagtctctaccaaaagaagccaacaaactgtaatcccgaatatcggatctagaccctgggtaaggggtgtctccagcagaataagcatctattggacaatagtaaaaccgggagacatacttttgattaactgcacagggaatctaattgctcctcggggttacttcaaaatacgaagtgggaaaagctcaataatgaggtcagatgcatccattggcaaatgcaattctgaatgcatcactccaaatggaagcattcccaatgacaaaccatttcaaaatgtaaacaggatcacatatggggcctgtcccagatatgttaagcaaaacactctgaaattggcaacagggatgcggaatgtaccagagaaacaaactagaggcatattcggcgcaatcgcgggtttcatagaaaatggttgggagggaatggtggacggttggtacggtttcaggcatcaaaattctgagggcacaggacaagcagcagatctcaaaagcactcaagcagcaatcaaccaaatcaacgggaaactgaataggttaatcgagaaaacgaacgagaaattccatcaaattgaaaaagaattctcagaagtggaagggagaattcaggacctcgagaaatatgttgaggacactaaaatagatctctggtcgtacaacgcggagcttcttgttgccctggagaaccagcatacaattgatctaactgactcagaaatgaacaaactgtttgaaagaacaaagaagcaactgagggaaaatgctgaggatatgggcaatggttgtttcaaaatataccacaaatgtgacaatgcctgcatagggtcaatcagaaatgggacttatgaccatgatgtatacagagacgaagcattaaacaaccggttccagatcaaaggtgttgagctgaagtcaggatacaaagattggatcctatggatttcctttgccatatcatgttttttgctttgtgttgtcttgctggggttcatcatgtgggcctgccaaaaaggcaacattaggtgcaacatttgcatttga

SEQ ID NO: 31213 - RNA, 1701 nt, synthetic construct
  misc_feature 1..1701: note = hemagglutinin__InfluenzaA__ABD15746
  source 1..1701: mol_type = other RNA
atgaagactatcattgctttgagctacattttatgtctggttttcgctcaaaaacttcccgtaaatgacaacagcacggcaacgctgtgcctgggacaccatgcagtgccaaacggaacgctagtgaaaacaatcacgaatgaccacattgaagtgactaatgctactgagttggttcagagttcctcaacaggtagaatatgcgacagtcctcaccaaatccttgatggagaaaactgcacactaatagatgctctattgggagaccctcattgtgatggcttccaaaataaggaatgggacctttttgttgaacgcagcacagcctacagcaactgttacccttatgatgtgccggattatgcctcccttaggtcactagttgcctcatccggcacactggagtttaacaatgaaagcttcaattggactggagtcgctcagaatggaacaagctctgcttgcaaaaggagatctattaaaagtttctttagtagattgaattggttgcaccaattaaaatacaaatatccagcactgaacgtgactatgccaaacaatgaaaaatttgacaaattgtacatttggggggttcaccacccgagtacggacagtgaccaaatcagcctatatgctcaagcatcagggagagtcacagtctctaccaaaagaagccaacaaactgtaatcccgaatatcggatctagaccctgggtaaggggtatctccagcagaataagcatctattggacaatagtaaaaccgggagacatacttttgattaacagcacagggaatctaattgctcctcggggttactttaaaatacgaagtgggaaaagctcaataatgaggtcaaatgcacccattggcaaatgcaattctgaatgcatcactccaaatggaagcattcccaatgacaaaccatttcaaaatgtaaacaggatcacatatggggcctgtcccagatatgttaagcaaaacactctgaaattggcaacaggaatgcggaatgtaccagagaaacaaactagaggcatattcggcgcaatcgcgggtttcatagaaaatggttgggagggaatggtagacggttggtatggtttcaggcatcaaaattctgagggcacaggacaagcagcagatcttaaaagcactcaagcagcaatcaaccaaatcaacgggaaactgaataggttaatcgagaaaacaaacgagaaattccatcaaattgaaaaagaattctcagaagtagaagggagaattcaggacctcgagaaatatgttgaggacactaaaatagatctctggtcgtacaacgcggagcttcttgttgccctggagaaccaacatacaattgatctaacagactcagaaatgaacaaactgtttgaaagaacaaggaagcaactgagggaaaatgctgaggagatgggcaatggttgtttcaaaatataccacaaatgtgacaatgcctgcatagggtcaatcagaaatggaacttatgaccatgatgtatacagagacgaagcattaaacaaccggttccagatcaaaggtgttgagctgaagtcaggatacaaagattggatcctatggatttcctttgccatatcatgttttttgctttgtgttgttttgctggggttcatcatgtgggcctgccaaaaaggcaacattaggtgcaacatttgcatttga

SEQ ID NO: 31214 - RNA, 1701 nt, synthetic construct
  misc_feature 1..1701: note = hemagglutinin__InfluenzaA__ABD15757
  source 1..1701: mol_type = other RNA
atgaagactatcattgctttgagctacattttatgtctggttttcgctcaaaaacttcccgtaaatgacaacagcacggcaacgctgtgcctgggacaccatgcagtgccaaacggaacgctagtgaaaacaatcacgaatgaccacattgaagtgactaatgctactgagttggttcagagttcctcaacaggtagaatatgcgacagtcctcaccaaatccttgatggagaaaactgcacactaatagatgctctattgggagaccctcattgtgatggcttccaaaataaggaatgggacctttttgttgaacgcagcacagcctacagcaactgttacccttatgatgtgccggattatgcctcccttaggtcactagttgcctcatccggcacactggagtttaacaatgaaagcttcaattggactggagtcgctcagaatggaacaagctctgcttgcaaaaggagatctattaaaagtttctttagtagattgaattggttgcaccaattaaaatacaaatatccagcactgaacgtgactatgccaaacaatgaaaaatttgacaaattgtacatttggggggttcaccacccgagtacggacagtgaccaaatcagcctatatgctcaagcatcagggagagtcacagtctctaccaaaagaagccaacaaactgtaatcccgaatatcggatctagaccctgggtaaggggtgtctccagcagaataagcatctattggacaatagtaaaaccgggagacatacttttgattaacagcacagggaatctaattgctcctcggggttactttaaaatacgaagtgggaaaagctcaataatgaggtcaaatgcacccattggcaaatgcaattctgaatgcatcactccaaatggaagcattcccaatgacaaaccatttcaaaatgtaaacaggatcacatatggggcctgtcccagatatgttaagcaaaacactctgaaattggcaacaggaatgcggaatgtaccagagaaacaaactagaggcatattcggcgcaatcgcgggtttcatagaaaatggttgggagggaatggtagacggttggtatggtttcaggcatcaaaattctgagggcacaggacaagcagcagatcttaaaagcactcaagcagcaatcaaccaaatcaacgggaaactgaataggttaatcgagaaaacaaacgagaaattccatcaaattgaaaaagaattctcagaagtagaagggagaattcaggacctcgagaaatatgttgaggacactaaaatagatctctggtcgtacaacgcggagcttcttgttgccctggagaaccaacatacaattgatctaacagactcagaaatgaacaaactgtttgaaagaacaaggaagcaactgagggaaaatgctgaggagatgggcaatggttgtttcaaaatataccacaaatgtgacaatgcctgcatagggtcaatcagaaatggaacttatgaccatgatgtatacagagacgaagcattaaacaaccggttccagatcaaaggtgttgagctgaagtcaggatacaaagattggatcctatggatttcctttgccatatcatgttttttgctttgtgttgttttgctggggttcatcatgtgggcctgccaaaaaggcaacattaggtgcaacatttgcatttga

SEQ ID NO: 31215 - RNA, 1701 nt, synthetic construct; identical to SEQ ID NO: 31154
  misc_feature 1..1701: note = hemagglutinin__InfluenzaA__ABD15779
  source 1..1701: mol_type = other RNA

SEQ ID NO: 31216 - RNA, 1701 nt, synthetic construct; identical to SEQ ID NO: 31154
  misc_feature 1..1701: note = hemagglutinin__InfluenzaA__ABD15790
  source 1..1701: mol_type = other RNA

SEQ ID NO: 31217 - RNA, 1701 nt, synthetic construct; identical to SEQ ID NO: 31154
  misc_feature 1..1701: note = hemagglutinin__InfluenzaA__ABD16292
  source 1..1701: mol_type = other RNA

SEQ ID NO: 31218 - RNA, 1701 nt, synthetic construct; identical to SEQ ID NO: 31177
  misc_feature 1..1701: note = hemagglutinin__InfluenzaA__ABD16303
  source 1..1701: mol_type = other RNA

SEQ ID NO: 31219 - RNA, 1701 nt, synthetic construct
  misc_feature 1..1701: note = hemagglutinin__InfluenzaA__ABD16325
  source 1..1701: mol_type = other RNA
atgaagactatcattgctttgagctacatcctatgtctggttttcgctcaaaaacttcccggaaatgacaacagcacggcaacgctgtgccttgggcaccatgcagtaccaaacggaacgatagtgaaaacaatcacgaatgaccaaattgaagttactaatgctactgagctggttcagagttcctcaacaggtggaatatgcgacagtcctcatcagatccttgatggagaaaactgcacactaatagatgctctattgggagaccctcagtgtgatggcttccaaaataagaaatgggacctttttgttgaacgcagcaaagcctacagcaactgttacccttatgatgtgccggattatgcctcccttaggtcactaattgcctcatccggcacactggagtttaacaatgaaagcttcaattggactggagtcactcaaaatggaacaagctctgcttgcaaaaggagatctaatagcagtttctttagtagattgaattggttgacccacttaaaattcaaatacccagcattgaacgtgactatgccaaacaatgaagaatttgacaaattgtacatttggggggttcaccacccgggtacatacaatgaccaaatcagcctatatgctcaagcatcaggaagaatcacagtctctaccaaaagaagccaacaaactgtaatcccgaatatcgggtctagacccagggtaagggatatccccagcagaataagcatctattggacaatagtaaaaccgggagacatacttttgattaacagcacagggaatctaattgctcctcggggttacttcaaaatacgaagtgggaaaagctcaataatgagatcagatgcacccattggcaaatgcaattctgaatgcatcactccaaatggaagcattcccaatgacaaaccatttcaaaatgtaaacaggatcacatatggggcctgtcccagatatgttaagcaaaacactctgaaattggcaacagggatgcgaaatgtaccagagaaacaaactagaggcatatttggcgcaatcgcgggtttcatagaaaatggttgggagggaatggtggatggttggtacggtttcaggcatcaaaattctgagggaataggacaagcagcagatctcaaaagcactcaagcagcaatcgaccaaatcaatgggaagctgaataggttgatcgggaaaaccaacgagaaattccatcagattgaaaaagaattctcagaagtagaagggagaattcaggacctcgaaaaatatgttgaggacactaaaatagatctctggtcatacaacgcggagcttcttgttgccctggagaaccaacatacaattgatctaactgactcagaaatgaacaaactgtttgaaagaacaaagaagcaactgagggaaaatgctgaggatatgggcaatggttgtttcaaaatataccacaaatgtgacaatgcctgcatagggtcaatcagaaatggaacttatgaccatgatgtatacagagatgaagcattaaacaaccggttccagatcaaaggtgttgagctgaagtcaggatacaaagattggattctatggatttcctttgccatatcatgttttttgctttgtgttgctttgttggggttcatcatgtgggcctgccaaaaaggcaacattaggtgcaacatttgcatttga

SEQ ID NO: 31220 - RNA, 1701 nt, synthetic construct
  misc_feature 1..1701: note = hemagglutinin__InfluenzaA__ABD16336
  source 1..1701: mol_type = other RNA
atgaagactatcattgctttgagctacactctatgtctggttttcgctcaaaaacttcccggaaatgacaacagcacggcaacgctgtgccttgggcaccatgcagtaccaaacggaacgatagtgaaaacaatcacgaatgaccaaattgaagttactaatgctactgagctggttcagagttcctcaacaggtggaatatgcgacagtcctcatcagatccttgatggagaaaactgcacactaatagatgctctattgggagaccctcagtgtgatggcttccaaaataagaaatgggacctttttgttgaacgcagcaaagcctacagcaactgttacccttatgatgtgccggattatgcctcccttaggtcactaattgcctcatccggcacactggagtttaacaatgaaagcttcaattggactggagtcactcaaaatggaacaagctctgcttgcaaaaggagatctaatagcagtttctttagtagattgaattggttgacccacttaaaattcaaatacccagcattgaacgtgactatgccaaacaatgaagaatttgacaaattgtacatttggggggttcaccacccgggtacatacaatgaccaaatcagcctatatgctcaagcatcaggaagaatcacagtctctaccaaaagaagccaacaaactgtaatcccgaatatcgggtctagacccagggtaagggatatccccagcagaataagcatctattggacaatagtaaaaccgggagacatacttttgattaacagcacagggaatctaattgctcctcggggttacttcaaaatacgaagtgggaaaagctcaataatgagatcagatgcacccattggcaaatgcaattctgaatgcatcactccaaatggaagcattcccaatgacaaaccatttcaaaatgtaaacaggatcacatatggggcctgtcccagatatgttaagcaaaacactctgaaattggcaacagggatgcgaaatgtaccagagaaacaaactagaggcatatttggcgcaatcgcgggtttcatagaaaatggttgggagggaatggtggatggttggtacggtttcagacatcaaaattctgagggaataggacaagcagcagatctcaaaagcactcaagcagcaatcgaccaaatcaatgggaagctgaataggttgatcgggaaaaccaacgagaaattccatcagattgaaaaagaattctcagaagtagaagggagaattcaggacctcgagaaatatgttgaggacactaaaatagatctctggtcatacaacgcggagcttcttgttgccctggagaaccaacatacaattgatctaactgactcagaaatgaacaaactgtttgaaagaacaaagaagcaactgagggaaaatgctgaggatatgggcaatggttgtttcaaaatataccacaaatgtgacaatgcctgcatagggtcaatcagaaatggaacttatgaccatgatgtatacagagatgaagcattaaacaaccggttccagatcaaaggtgttgagctgaagtcaggatacaaagattggatcctatggatttcctttgccatatcatgttttttgctttgtgttgctttgttggggttcatcatgtgggcctgccaaaaaggcaacattaggtgcaacatttgcatttga

SEQ ID NO: 31221 - RNA, 1701 nt, synthetic construct; identical to SEQ ID NO: 31137
  misc_feature 1..1701: note = hemagglutinin__InfluenzaA__ABD16347
  source 1..1701: mol_type = other RNA

SEQ ID NO: 31222 - RNA, 1701 nt, synthetic construct
  misc_feature 1..1701: note = hemagglutinin__InfluenzaA__ABD16358
  source 1..1701: mol_type = other RNA
atgaagactatcattgctttgagctacattctatgtctggttttcgctcaaaaacttcccggaaatgacaacagcacggcaacgctgtgccttgggcaccatgcagtaccaaacggaacgatagtgaaaacaatcacgaatgaccaaattgaagttactaatgctactgagctggttcagagttcctcaacaggtggaatatgcgacagtcctcatcagatccttgatggagaaaactgcacactaatagatgctctattgggagaccctcagtgtgatggcttccaaaataagaaatgggacctttttgttgaacgcagcaaagcctacagcaactgttacccttatgatgtgccggattatgcctcccttaggtcactaattgcctcatccggcacactggagtttaacaatgaaagcttcaattggactggagtcactcaaaatggaacaagctctgcttgcaaaaggagatctaatagcagtttctttagtagattgaattggttgacccacttaaaattcaaatacccagcattgaacgtgactatgccaaacaatgaagaatttgacaaattgtacatttggggggttcaccacccgggtacatacaatgaccaaatcagcctatatgctcaagcatcaggaagaatcacagtctctaccaaaagaagccaacaaactgtaatcccgaatatcgggtctagacccagggtaagggatatccccagcagaataagcatctattggacaatagtaaaaccgggagacatacttttgattaacagcacagggaatctaattgctcctcggggttacttcaaaatacgaagtgggaaaagctcaataatgagatcagatgcacccattggcaaatgcaattctgaatgcatcactccaaatggaagcattcccaatgacaaaccatttcaaaatgtaaacaggatcacatatggggcctgtcccagatatgttaagcaaaacactctgaaattggcaacagggatgcgaaatgtaccagagaaacaaactagaggcatatttggtgcaatcgcgggtttcatagaaaatggttgggagggaatggtggatggttggtacggtttcaggcatcaaaattctgagggaataggacaagcagcagatctcaaaagcactcaagcagcaatcgaccaaatcaatgggaagctgaataggttgatcgggaaaaccaacgagaaattccatcagattgaaaaagaattctcagaagtagaagggagaattcaggacctcgagaaatatgttgaggacaccaaaatagatctctggtcatacaacgcggagcttcttgttgccctagagaaccaacatacaattgatctaactgacttagaaatgaacaaactgtttgaaagaacaaagaagcaactgagggaaaatgctgaggatatgggcaatggttgtttcaaaatataccacaaatgtgacaatgcctgcatagggtcaatcagaaatggaacttatgaccatgatgtatacagagatgaagcattaaacaaccggttccagatcaaaggtgttgagctgaagtcaggatacaaagattggatcctatggatttcctttgccatatcatgttttttgctttgtgttgctttgttggggttcatcatgtgggcctgccaaaaaggcaacattaggtgcaacatttgcatttga

SEQ ID NO: 31223 - RNA, 1701 nt, synthetic construct
  misc_feature 1..1701: note = hemagglutinin__InfluenzaA__ABD16472
  source 1..1701: mol_type = other RNA
atgaagactatcattgctttgagctacattctatgtctggttttcgctcaaaaacttcccggaaatgacaacagcacggcaacgctgtgccttgggcaccatgcagtaccaaacggaacgatagtgaaaacaatcacgaatgaccaaattgaagttactaatgctactgagctggttcagagttcctcaacaggtggaatatgcgacagtcctcatcagatccttgatggagaaaactgcacactaatagatgctctattgggagaccctcagtgtgatggcttccaaaataagaaatgggacctttttgttgaacgcagcaaagcctacagcaactgttacccttatgatgtgccggattatgcctcccttaggtcactaattgcctcatccggcacactggagtttaacaatgaaagcttcaattggactggagtcactcaaaatggaacaagctctgcttgcaaaaggagatctaatagcagtttctttagtagattgaattggttgacccacttaaaattcaaatacccagcattgaacgtgactatgccaaacaatgaagaatttgacaaattgtacatttggggggttcaccacccgggtacatacaatgaccaaatcagcctatatgctcaagcatcaggaagaatcacagtctctaccaaaagaagccaacaaactgtaatcccgaatatcgggtctagacccagggtaagggatatccccagcagaataagcatctattggacaatagtaaaaccgggagacatacttttgattaacagcacagggaatctaattgctcctcggggttacttcaaaatacgaagtgggaaaagctcaataatgagatcagatgcacccattggcaaatgcaattctgaatgcatcactccaaatggaagcattcccaatgacaaaccatttcaaaatgtaaacaggatcacatatggggcctgtcccagatatgttaagcaaaacactctgaaattggcaacagggatgcgaaatgtaccagagaaacaaactagaggcatatttggcgcaatcgcgggtttcatagaaaatggttgggagggaatggtggatggttggtacggtttcaggcatcaaaattctgagggaataggacaagcagcagatctcaaaagcactcaagcagcaatcgaccaaatcaatgggaagctgaataggttgatcgggaaaaccaacgagaaattccatcagattgaaaaagaattctcagaagtagaagggagaattcaggacctcgagaaatatgttgaggacactaaaatagatctctggtcatacaacgcggagcttcttgttgccctggagaaccaacatacaattgatctaactgactcagaaatgaacaaactgtttgaaagaacaaagaagcaactgagggaaaatgctgaggatatgggcaatggttgtttcaaaatataccacaaatgtgacaacgcctgcatagggtcaatcagaaatggaacttatgaccatgatgtatacagagatgaagcattaaacaaccggttccagatcaaaggtgttgagctgaagtcaggatacaaagattggatcctatggatttcctttgccatatcatgttttttgctttgtgttgctttgttggggttcatcatgtgggcctgccaaaaaggcaacattaggtgcaacatttgcatttga

SEQ ID NO: 31224 - RNA, 1701 nt, synthetic construct; identical to SEQ ID NO: 31137
  misc_feature 1..1701: note = hemagglutinin__InfluenzaA__ABD16483
  source 1..1701: mol_type = other RNA

SEQ ID NO: 31225 - RNA, 1701 nt, synthetic construct; identical to SEQ ID NO: 31139
  misc_feature 1..1701: note = hemagglutinin__InfluenzaA__ABD16494
  source 1..1701: mol_type = other RNA

SEQ ID NO: 31226 - RNA, 1701 nt, synthetic construct; identical to SEQ ID NO: 31161
  misc_feature 1..1701: note = hemagglutinin__InfluenzaA__ABD16505
  source 1..1701: mol_type = other RNA

SEQ ID NO: 31227 - RNA, 1701 nt, synthetic construct
  misc_feature 1..1701: note = hemagglutinin__InfluenzaA__ABD16516
  source 1..1701: mol_type = other RNA
atgaagactatcattgctttgagctacattctatgtatggttttcgctcaaaaacttcccggaaatgacaacagcacggcaacgctgtgccttgggcaccatgcagtaccaaacggaacgatagtgaaaacaatcacgaatgaccaaattgaagttactaatgctactgagctggttcagagttcctcaacaggtggaatatgcgacagtcctcatcagatccttgatggagaaaactgcacactaatagatgctctattgggagaccctcagtgtgatggcttccaaaataagaaatgggacctttttattgaacgcagcaaagcctacagcaactgttacccttatgatgtaccggattatgcctcccttagatcactagttgcctcatccggcacactggaatttaacaatgaaagcttcaattggactggagtcactcaaaatggaacaagctctgcttgcaaaaggagatctaataacagtttctttagtagattgaattggttgacccacttaaaattcaaatacccagcattgaacgtgactatgccaaacaatgaaaaatttgacaaattgtacatttggggggttcaccacccgggtacggacaatgaccaaatcagcctatatgctcaagcttcaggaagaatcacagtctctaccaaaagaagccaacaaactgtaatcccgaacatcggatctagacccagggtaagggatattcccagcagaataagcatctattggacaatagtaaaaccgggagacatacttttgattaacagcacagggaatctaattgctcctcggggttacttcaaaatacgaagtgggaaaagctcaataatgagatcagatgcacccattgacaaatgcaattctgaatgcatcactccaaatggaagcattcccaatgacaaaccatttcaaaatgtaaacaggatcacatatggggcctgtcccagatatgttaagcaaaacactctgaaattggcaacagggatgcgaaatgtaccagagaaacaaactagaggcatatttggcgcaatcgcgggtttcatagaaaatggttgggagggaatggtggatggttggtacggtttcaggcatcaaaattctgagggaataggacaagcagcagatctcaaaagcactcaagcagcaatcaaccaaatcaatgggaagctgaataggttgatcgggaaaaccaacgagaaattccatcagattgaaaaagaattctcagaagtagaagggagaattcaggacctcgagaaatatgttgaggacactaaagtagatctctggtcatacaacgcggagcttcttgttgccctggagaaccaacatacaattgatctaactgactcagaaatgaacaaactgtttgaaagaacaaagaagcaactgagggaaaatgctgaggatatgggcaatggttgtttcaaaatataccacaaatgtgacaatgcctgcatagggtcaatcagaaatggaacctatgaccatgatgtatacagagatgaagcattgaacaaccggttccagatcaaaggtgttgagctgaagtcaggatacaaagattggatcctatggatttcctttgccatatcatgttttttgctttgtgttgctttgttggggttcatcatgtgggcctgccaaaaaggcaacattaggtgcaacatttgcatttga

SEQ ID NO: 31228 - RNA, 1701 nt, synthetic construct
  misc_feature 1..1701: note = hemagglutinin__InfluenzaA__ABD16527
  source 1..1701: mol_type = other RNA
atgaagactatcattgctttgagctacattctatgtctggttttcgctcaaaaacttcccgaaaatgacaacagcacggcaacgctgtgccttgggcaccatgcagtaccaaacggaacgatagtgaaaacaatcacaaatgaccaaattgaagttactaatgctactgagctggttcagagttcctcaacaggtggaatatgcgacagtcctcatcagatccttgatggagaaaactgcacactaatagatgctctattgggagaccctcagtgtgatggcttccaaaataagaaatgggacctttttgttgaacgcagcaaagcctacagcaactgttacccttatgatgtgccggatcatgcctcccttaggtcactagttgcctcatccggcacactggagtttaacaatgaaagcttcgattggactggagtcactcagaatggaacaagctctgcttgcaaaaggagatctaataaaagtttctttagtagattgaattggttgacccacttaaaatacaaatacccagcattgaacgtgactatgccaaacaatgaaaaatttgacaaattgtacatttggggggttcaccacccgggtacggacagtgaccaaatcagcctatatgctcaagcatcaggaagaatcacagtctctaccaaaagaagccaacaaactgtaatcccgaatatcggatctagacccagggtaagggatgtctccagccgaataagcatctattggacaatagtaaaaccgggagacatacttttgattaacagcacagggaatctaattgctcctcggggttacttcaaaatacgaagtgggaaaagctcaataatgagatcagatgcacccattggcaaatgcaattctgaatgcatcactccaaatggaagcattcccaatgacaaaccatttcaaaatgtaaacaggatcacatatggggcctgtcccagatatgttaagcaaaacactctgaaattggcaacagggatgcgaaatgtaccagagaaacaaactagaggcatatttggcgcaatcgcgggtttcatagaaaatggttgggagggaatggtggacggttggtacggtttcaggcatcaaaattctgagggcacaggacaagcagcagatctcaaaagcactcaagcagcaatcaaccaaatcaatgggaaactgaataggttaatcgggaaaacaaacgagaaattccatcagattgaaaaagaattctcagaagtagaagggagaattcaggacctcgagaaatatgttgaggacactaaaatagatctctggtcatacaacgcggagcttcttgttgccctggagaaccaacatacaattgatctaactgactcagaaatgaacaaactgtttgaaagaacaaagaagcaactgagggaaaatgctgaggatatgggcaatggttgtttcaaaatataccacaaatgtgacaatgcctgcatagggtcaatcagaaatggaacttatgaccatgatgtgtacagagatgaagcattaaacaaccggttccagatcaaaggtgttgagctgaagtcaggatataaagattggatcctatggatttcctttgccatatcatgttttttgctttgtgttgctttgttggggttcatcatgtgggcctgccaaaaaggcaacattaggtgcgacatttgcatttga

SEQ ID NO: 31229 - RNA, 1701 nt, synthetic construct; identical to SEQ ID NO: 31020
  misc_feature 1..1701: note = hemagglutinin__InfluenzaA__ABD16538
  source 1..1701: mol_type = other RNA

SEQ ID NO: 31230 - RNA, 1701 nt, synthetic construct
  misc_feature 1..1701: note = hemagglutinin__InfluenzaA__ABD16549
  source 1..1701: mol_type = other RNA
atgaagactatcattgctttgagctacattctatgtctggttttcgctcaaaaacttcccggaaatgacaacagcacggcaacgctgtgccttgggcaccatgcagtaccaaacggaacgatagtgaaaacaatcacgaatgaccaaattgaagttactaatgctactgagctggttcagagttcctcaacaggtggaatatgcgacagtcctcatcagatccttgatggagaaaactgcacactaatagatgctctattgggagaccctcagtgtgatggcttccaaaataagaaatgggacctttttgttgaacgcagcaaagcctacagcaactgttacccttatgatgtgccggattacgcctcccttaggtcactaattgcctcatccggcacactggagtttaacaatgaaagcttcaattggactggagtcactcaaaatggaacaagctctgcttgcaaaaggagatctaatagcagtttctttagtagattgaattggttgacccacttaaaattcaaatacccagcattgaacgtgactatgccaaacaatgaagaatttgacaaattgtacatttggggggttcaccacccgggtacatacaatgaccaaatcagcctatatgctcaagcatcaggaagaatcacagtctctaccaaaagaagccaacaaactgtaatcccgaatatcgggtctagacccagggtaagggatatccccagcagaataagcatctattggacaatagtaaaaccgggagacatacttttgattaacagcacagggaatctaattgctcctcggggttacttcaaaatacgaagtgggaaaagctcaataatgagatcagatgcacccattggcaaatgcaattctgaatgcatcactccaaatggaagcattcccaatgacaaaccatttcaaaatgtaaacaggatcacatatggggcctgtcccagatatgttaagcaaaacactctgaaattggcaacagggatgcgaaatgtaccagagaaacaaactagaggcatatttggcgcaatcgcgggtttcatagaaaatggttgggagggaatggtggatggttggtacggtttcaggcatcaaaattctgagggaataggacaagcagcagatctcaaaagcactcaagcagcaatcgaccaaatcaatgggaagctgaataggttgatcgggaaaaccaacgagaaattccatcagattgaaaaagaattctcagaagtagaagggagaattcaggacctcgagaaatatgttgaggacactaaaatagatctctggtcatacaacgcggagcttcttgttgccctggagaaccaacatacaattgatctaactgactcagaaatgaacaaactgtttgaaagaacaaagaagcaactgagggaaaatgctgaggatatgggcaatggttgtttcaaaatataccacaaatgtgacaatgcctgcatagggtcaatcagaaatggaacttatgaccatgatgtatacagagatgaagcattaaacaaccggttccagatcaaaggtgttgagctgaagtcaggatacaaagattggatcctatggatttcctttgccatatcatgttttttgctttgtgttgctttgttggggttcatcgtgtgggcctgccaaaaaggcaacattaggtgcaacatttgcatttga

SEQ ID NO: 31231 - RNA, 1701 nt, synthetic construct; identical to SEQ ID NO: 31135
  misc_feature 1..1701: note = hemagglutinin__InfluenzaA__ABD16560
  source 1..1701: mol_type = other RNA

SEQ ID NO: 31232 - RNA, 1701 nt, synthetic construct
  misc_feature 1..1701: note = hemagglutinin__InfluenzaA__ABD16571
  source 1..1701: mol_type = other RNA
atgaagaccatcattgctttgagctacattttctgtctggttgtcgcccaaaaacttcccggaaatgacaacagcacagcaacgctgtgcctgggacatcatgcagtgccaaacggaacgatagtgaaaacaatcacgaatgaccaaattgaagtgactaatgctactgagctggtccagagttcctcaacaggtcgaatatgcaacagtcctcaccgaatccttgatggaaaaaactgcacactgatagatgctctattgggagaccctcattgtgatagcttccaaaataaggaatgggacctttttgttgaacgcagcaaagcttacagcaactgttacccttatgatgtgccggattatgcctcccttaggtcactagttgcctcatcaggcaccctggagtttatcaatgaagacttcaattggactggagtcgctcagagtgggggaagctatgcttgcaaaaggggatctgttaacagtttcttcagtagattgaattggttgcacgaatcagaatacaaatatccagcgctgaacgtgactatgccaaacaatggcaaatttgacaaattgtacatttggggggttcaccacccgagcacggacagagaacaaaccaacctatatgttcgagcatcagggagagtcacagtctccaccaaaagaagccagcaaactgtaatcccgaatatcgggtctagaccctgggtaaggggtctgtccagtagaataagcatctattggacaatagtaaaaccgggagacatactgttgattaatagcaccgggaacctaattgctcctcggggttacttcaaaatacgaactggaaaaagctcaataatgaggtcagatgcacccattggcacctgcagttctgaatgcatcactccaaatggaagcattcccaatgacaaaccctttcaaaatgtaaacaggatcacatatggggcatgtcccagatatgttaagcaaaacactctgaaattggcaacagggatgcggaatgtgccagagaaacaaactagaggcatattcggcgcaatcgcaggtttcatagaaaatggttgggagggaatggtagacggttggtacggtttcaggcatcaaaattctgagggcacaggacaagcagcagatcttaaaagcactcaagcagcaatcgaccaaatcaacgggaaactgaataggttaatcgagaaaacgaacgagaaattccatcaaatcgaaaaggaattctcagaagtagaagggagaattcaggacctcgagaaatatgttgaagacactaaaatagatctctggtcttacaacgcggagcttcttgtcgccctggagaaccaacatacaattgatctgactgactcagaaatgaacaaactgtttgaaaaaacaaggaagcaactgagggaaaatgctgaggacatgggcaatggttgcttcaagatataccacaaatgtgacaatgcctgcatagggtcaatcagaaatggaacttatgaccatgatgtatacagagacgaagcattaaacaaccggttccagatcaaaggtgttgagctgaagtcaggatacaaagactggatcctatggatttcctttgccatatcatgctttttgctttgtgttgttttgctggggttcatcatgtgggcctgccaaaaaggcaacattaggtgcaacatttgcatttga

SEQ ID NO: 31233 - RNA, 1701 nt, synthetic construct
  misc_feature 1..1701: note = hemagglutinin__InfluenzaA__ABD16718
  source 1..1701: mol_type = other RNA
atgaagactatcattgctttgagctacattttctgtctggttttcgcccaaaaacttcccggaaatgacaacagcacagcaacgctgtgcctgggacatcatgcagtgccaaacggaacgctagtgaaaacaatcacgaatgatcagattgaagtgactaatgctactgagctggttcagagttcctcaacaggtagaatatgcgacagtcctcaccgaatccttgatggaaaaaactgcacactgatagatgctctattgggagaccctcattgtgatggcttccaaaatgagaaatgggacctttttattgaacgcagcaaagctttcagcaactgttacccttatgatgtgccggattatgcctcccttaggtcactagttgcctcatcaggcaccctggagtttatcaatgaaggcttcaattggactggagtcactcagagtgggggaagctatgcttgcaaaaggggatctgttaacagtttcttcagtagattgaattggttgtacgaatcagaatacaaatatccagcgctgaacgtgactatgccaaacaatggcaaatttgacaaactgtacatttggggggttcaccacccgatcacggaaaaagaacaaaccaacctatatgttcgagcatcagggagagtcacagtctctaccaagagaagccagcaaactgtaatcccgaatatcgggtctagaccctgggtaaggggtctgtccagtagaataagcatctattggacaatagtaaaaccgggagacatactgttgattaatagcactgggaacctaattgctcctcggggttacttcaaaatacgcactgggaaaagctcaataatgaggtcagatgcacctattggcacctgcagttctgaatgcatcactccaaatggaagcattcccaatgacaaaccctttcaaaatgtaaacaagatcacatatggggcatgtcccaggtatgttaagcaaaacactctgaaattggcaacagggatgcggaatgtaccagagaaacaaactagaggcatattcggcgcaatagcaggtttcatagaaaatggttgggagggaatggtagacggttggtacggtttcaggcatcaaaattctgagggcacaggacaagcagcagatcttaaaagcactcaagcagcaatcgaccaaatcaacggaaaactgaataggttaatcgagaaaacgaacgagaaattccatcaaatcgaaaaggaattctcagaagtagaagggagaattcaggacctcgagaaatatgttgaagacactaaaatagatctctggtcttacaacgcggagcttcttgtcgccctggagaaccaacatacaattgatctgactgactcagaaatgaacaaactgtttgaaaaaacaaggaagcaactgagggaaaatgctgaggacatgggcaatggttgcttcaaaatataccacaaatgtgacaatgcttgcatagggtcaatcagaaatggaacttatgaccatgatgtatacagagacgaagcattaaacaaccggtttcagatcaaaggtgttgagctgaagtcaggatacaaagactggatcctatggatttcctttgccatatcatgctttttgctttgtgttgttttgctggggttcatcatgtgggcctgccaaaaaggcaacattaggtgcaacatttgcatttga

SEQ ID NO: 31234 - RNA, 1701 nt, synthetic construct
  misc_feature 1..1701: note = hemagglutinin__InfluenzaA__ABD16729
  source 1..1701: mol_type = other RNA
atgaagactatcattgctttgagctacattttctgtctggttttcgcccaaaaacttcccggaaatgacaacagcacagcaacgctgtgcttgggacatcatgcagtgccaaacggaacgctagtgaaaacaatcacgaatgatcagattgaagtgactaatgctactgagctggttcagagttcctcaacaggtagaatatgcgacagtcctcaccgaatccttgatgggaaaaactgcacactgatagatgctctattgggagaccctcattgtgatggcttccaaaatgagaaatgggacctttttgttgaacgcagcaaagctttcagcaactgttacccttatgatgtgccggattatgcctcccttaggtcactagttgcctcatcaggcaccttggagtttatcaatgaaggcttcaattggactggagtcactcagaatgggggaagctatacttgcaaaagaggatctgttaacagtttcttcagtagattgaattggttgtacgaatcagaaagcaaatatccagtgctgaacgtgactatgccaaataatggcaaatttgacaaattgtacatttggggggttcaccacccgagcacggacaaagaacaaaccaacttatatgttcgagcatcagggaaagtcacagtctctaccaagagaagccagcaaactgtaatcccgaatatcgggtctagaccctgggtaaggggtctgtctagtagaataagtatctattggacaatagtaaaaccgggagacatactgttaattaatagcactggaaacctaattgctcctcggggttacttcaaaatacgcactgggaaaagctcaataatgaggtcagatgcacctattggcacctgcagttctgaatgcatcactccaaatggaagcattcccaatgacaaaccctttcaaaatgtaaacaagatcacatatggagcatgtcccaggtatgttaagcaaaacactctgaagttggcaacagggatgcggaatgtaccagagaaacaaactagaggcatattcggcgcaatagcaggtttcatagaaaatggttgggagggaatggtagacggttggtacggtttcaggcatcaaaattctgagggcacaggacaagcagcagatcttaaaagcactcaagcagcaatcgaccaaatcaacgggaaactgaacaggttaatcgagaaaacgaacgagaaattccatcaaatcgaaaaggaattctcagaagtagaagggagaattcaggacctcgagaaatatgttgaagacactaaaatagatctctggtcttacaacgcggagcttcttgtcgccctggagaaccaacatacaattgatctgactgattcagaaatgaacaaactgtttgaaaaaacaaggaaacaactgagggaaaatgctgaggacatgggcaatggttgcttcaaaatataccacaaatgtgacaatgcttgcatagggtcaatcagaaatggaacttatgaccatgatgtatacagagacgaagcattaaacaaccggtttcagatcaaaggtgttgagctgaagtcaggatacaaagactggatcctatggatttcctttgccatatcatgctttttgctttgtgttgttttgctggggttcatcatgtgggcctgccaaaaaggcaacattaggtgcaacatttgcatttga

SEQ ID NO: 31235 - RNA, 1701 nt, synthetic construct
  misc_feature 1..1701: note = hemagglutinin__InfluenzaA__ABD16751
  source 1..1701: mol_type = other RNA
atgaagactatcattgctttgagctacattttctgtctggttttcgcccaagaccttccaggaaatgacaacagcacagcaactctgtgcctgggacatcatgcggtgccaaacggaacgctagtgaaaacaatcacgaatgatcagattgaagtgactaatgctactgaactggttcatagttcctcaacgggtaaaatatgcgacaatcctcatcgaatccttgatggaataaactgcacactgatagatgctctattgggggaccctcattgtgatggctttcaaaatgagaaatgggaccttttcgttgaacgcagcaaagctttcagcaactgttacccttatgatgtgccagattatgcctcccttaggtcactagttgcctcgtcaggcactctggagtttatcaatgaaggcttcaattggactggggtcactcagaatgggggaagcagtgcttgcaaaaggggacctgataacggttttttcagtagactgaactggttgtacaaatcaggaagcacatatccagtgcagaacgtgaccatgccaaacaatgacaactctgacaaactatacatttggggggttcaccacccgagcacggacaaagaacaaaccgacctatatgttcaagcatcagggaaagtcacagtctccaccaagagaagccagcaaactgtaatcccgaatgtcgggtctagaccctgggtaaggggtctgtctagtagagtaagcatctattggacaatagttaaaccgggagacatactggtaattaatagtaatggaaacctaattgctcctcggggttacttcaaaatgcgcactgggaaaagctcaataatgaggtcagatgcacctattggcacctgcagctctgaatgcatcactccaaatggaagcattcccaatgacaagccctttcaaaacgtaaacaagatcacatatggggcatgtcccaagtatgttaagcaaaacactctgaagttggcaacagggatgcggaatgtaccagagaaacaaactagaggcatattcggcgcaatagcaggtttcatagaaaatggttgggagggaatgatagacggttggtacggtttcaggcatcaaaattctgagggcacaggacaagcagcagatcttaaaagcactcaagcagccatcgaccaaatcaatgggaaactgaatagggtaatcgagaagacgaacgagaaattccatcaaatcgaaaaggaattctcagaagtagaagggagaattcaggacctcgagaaatacgttgaagacactaaaatagatctctggtcttacaatgcggagcttcttgtcgctctggagaaccaacatacaattgatctgactgactcggaaatgaacaaactgtttgaaaaaacaaggaggcaactgagggaaaatgctgaggacatgggcaatggttgcttcaaaatataccacaaatgtgacaatgcttgcatagggtcaatcagaaatgggacttatgaccatgatgtatacagagacgaagcattaaacaaccggtttcagatcaaaggtgttgaactgaagtcaggatacaaagactggatcctgtggatttcctttgccatatcatgctttttgctttgtgttgttttgctggggttcatcatgtgggcctgccagaaaggcaacattaggtgcaacatttgcatttga

SEQ ID NO: 31236 - RNA, 1701 nt, synthetic construct; identical to SEQ ID NO: 31191
  misc_feature 1..1701: note = hemagglutinin__InfluenzaA__ABD16762
  source 1..1701: mol_type = other RNA

SEQ ID NO: 31237 - RNA, 1701 nt, synthetic construct
  misc_feature 1..1701: note = hemagglutinin__InfluenzaA__ABD17323
  source 1..1701: mol_type = other RNA
atgaagactatcattgctttgagctacattttctgtctggttctcggccaagactttccaggaaatgacaacagcacagcaacgctgtgcctgggacatcatgcggtgccaaacggaacactagtgaaaacaatcacaaatgatcagattgaagtgactaatgctactgagctggttcagagttcctcaacggggaaaatatgcaacaatcctcatcgaatccttgatggaatagactgcacactgatagatgctctattgggggaccctcattgtgatggctttcaaaatgagacatgggaccttttcgttgaacgcagcaaagctttcagcaactgttacccttatgatgtgccagattatgcctcccttaggtcactagttgcctcgtcaggcactctggagtttatcaatgaaggcttcacttggactggggtcactcagaatgggggaagcaatgcttgcaaaaggggacctgatagcggttttttcagtagactgaactggttgtacaaatcaggaagcacatatccagtgctgaatgtgactatgccaaacaatgacaattttgacaaactatacatttggggggttcaccacccgagcacggaccaagaacaaaccagcctatatgttcaagcatcagggagagtcacagtctctaccaagagaagccagcaaactataatcccgaatatcgggtctagaccctgggtaaggggtctgtctagtagaataagcatctattggacaatagttaaaccgggggacatactggtaattaatagtaatgggaacctaattgctcctcggggttatttcaaaatgcgcactgggaaaagctcaataatgaggtcagatgcacctattggcacctgcatttctgaatgcatcactccaaatggaagcattcccaatgacaagccctttcaaaacgtaaacaagatcacatatggggcatgtcccaagtatgttaagcaaaacaccctgaagttggcaacagggatgcggaatgtaccagagaaacaaactagaggcctattcggcgcaatagcaggtttcatagaaaatggttgggagggaatgatagacggttggtacggtttcaggcatcaaaattctgagggcacaggacaagcagcagatcttaaaagcactcaagcagccatcgaccaaatcaatgggaaactgaatagggtaatcgagaagacgaacgagaaattccatcaaatcgaaaaggaattctcagaagtagaagggagaattcaggacctcgagaaatacgttgaagacactaaaatagatctctggtcttacaatgcggagcttcttgtcgctctggagaaccaacatacaattgatctgactgactcggaaatgaacaaactgtttgaaaaaacaaggaggcaactgagggaaaatgctgaggacatgggcaatggttgcttcaaaatataccacaaatgtgacaatgcttgcatagggtcaatcagaaatgggacttatgaccatgatgtatacagagacgaagcattaaacaaccggtttcagatcaaaggtgttgaactgaagtcaggatacaaagactggatcctgtggatttcctttgccatatcatgctttttgctttgtgttgttttgctggggttcatcatgtgggcctgccagaaaggcaacattaggtgcaacatttgcatttga

SEQ ID NO: 31238 - RNA, 1701 nt, synthetic construct; identical to SEQ ID NO: 31066
  misc_feature 1..1701: note = hemagglutinin__InfluenzaA__ABD38134
  source 1..1701: mol_type = other RNA

SEQ ID NO: 31239 - RNA, 1698 nt, synthetic construct
  misc_feature 1..1698: note = hemagglutinin__InfluenzaA__ABD60779
  source 1..1698: mol_type = other RNA
atgaaagtaaaactactggttctgttatgtacatttacagctacatatgcagacacaatatgtataggctaccatgccaacaactcaaccgacactgttgacacagtacttgagaagaatgtgacagtgacacactctgtcaacctacttgaggacagtcacaatggaaaactatgtctactaaaaggaatagccccactacaattgggtaattgcagcgttgccggatggatcttaggaaacccagaatgcgaattactgatttccaaggaatcatggtcctacattgtagaaacaccaaatcctgaaaatggaacatgttacccagggtatttcgccgactatgaggaactgagggagcaattgagttcagtatcttcatttgagaggttcgaaatattccccaaagagagctcatggcccaaccacaccgtaaccggagtatcagcatcatgctcccataacgggaaaagcagtttttacagaaatttgctatggctgacggggaagaatggtttgtacccaaacctgagcaagtcctatgcaaacaacaaagagaaagaagtccttgtactatggggtgttcatcacccgcctaacataggggaccaaagggccctctatcatacagaaaatgcttatatctctgtagtgtcttcacattatagcagaagattcaccccagaaatagccaaaagacccaaggtaagagatcaggaaggaagaatcaactactactggactctgctggaacccggggatacaataatatttgaggcaaatggaaatctaatagcgccaaggtatgctttcgcactgagtagaggctttggatcaggaatcatcacctcaaatgcaccaatggatgaatgtgatgcgaagtgtcaaacacctcagggagctataaacagcagtcttcctttccagaatgtacacccagtcacaataggagagtgtccaaagtatgtcaggagtgcaaaattaaggatggttacaggactaaggaacatcccatccattcaatccagaggtttgtttggagccattgccggtttcattgaaggggggtggactggaatggtagatggttggtatggttatcatcatcagaatgagcaaggatctgggtatgctgcagatcaaaaaagcacacaaaatgccattaacgggattacaaacaaggtgaattctgtaattgagaaaatgaacactcaattcacagctgtgggcaaagaattcaacaaattggaaagaaggatggaaaacttaaataaaaaggttgatgatgggtttctagacatttggacatataatgcagaattgttggttctactggaaaatgaaaggactttggatttccatgactccaacgtgaagaatctgtatgagaaagtaaaaagccaattaaagaataatgccaaagaaataggaaacgggtgttttgaattctatcacaagtgtaacgatgaatgcatggagagtgtgaaaaatggaacttatgactatccaagatattccgaagaatcaaagttaaacagggagaaaattgatggagtgaaattggaatcaatgggagtctatcagattctggcgatctactcaacagtcgccagttccctggttcttttggtctccctgggggcaatcagcttctggatgtgttccaatgggtctttgcagtgtagaatatgcatctaa

SEQ ID NO: 31240 - RNA, 1701 nt, synthetic construct
  misc_feature 1..1701: note = hemagglutinin__InfluenzaA__ABD60790
  source 1..1701: mol_type = other RNA
atgaagactatcattgctttgagctacattttctgtctggttctcggccaagactttccaggaaatgacaacagcacagcaacgctgtgcctgggacatcatgcggtgccaaacggaacactagtgaaaacaatcacaaatgatcagattgaagtgactaatgctactgagctggttcagagttcctcaacggggaaaatatgcaacaatcctcatcgaatccttgatggaatagactgcacactgatagatgctttattgggggaccctcattgtgatggctttcaaaatgagacatgggaccttttcgttgaacgcagcaaagctttcagcaactgttacccttatgatgtgccagattatgcctccctcaggtcactagttgcctcgtcaggcactctggagtttatcaatgaaggcttcacttggactggggtcactcagaatgggggaagcaatgcttgcaaaaggggacctgatagcggttttttcagtagactgaactggttgtacaaatcgggaagcacatatccagtgctgaacgtgactatgccaaacaatgacaattttgacaaactatacatttggggggttcaccacccgagcacggaccaagaacaaaccagcctatatgttcaagcatcagggagagtcacagtctccaccaagagaagccagcaaactataatcccgaatatcgggtctagaccctgggtaaggggtctgtctagtagaataagcatctattggacaatagttaaaccgggagacatactgataattaatagtaatgggaacctaattgctcctcggggttatttcaaaatgcgcactgggaaaagctcaataatgaggtcagatgcacctattggcacctgcatttctgaatgcatcactccaaatggaagcattcccaatgacaagccctttcaaaacgtaaacaagatcacatatggggcatgtcccaagtatgttaagcaaaacaccctgaagttggcaacagggatgcggaatgtaccagagaaacaaactagaggcatattcggcgcaatagcaggtttcatagaaaatggttgggagggaatgatagacggttggtacggtttcaggcatcaaaattctgagggcacaggacaagcagcagatcttaaaagcactcaagcagccatcgaccaaatcaatgggaaactgaataggataatcgagaagacgaacgagaaattccatcaaatcgaaaaggaattctcagaagtagaagggagaattcaggacctcgagaaatacgttgaagacactaaaatagatctctggtcttacaatgcggagcttcttgtcgctctggagaaccaacatacaattgatctgactgactcggaaatgaacaaactgtttgaaaaaacaaggaggcaactgagggaaaatgctgaggacatgggcaatggttgcttcaaaatataccacaaatgtgacaatgcttgcatagggtcaatcagaaatgggacttatgaccatgatgtatacagagacgaagcattaaacaaccggtttcagatcaaaggtgttgaactgaagtcaggatacaaagactggatcctgtggatttcctttgccatatcatgctttttgctttgtgttgttttgctggggttcatcatgtgggcctgccagaaaggcaacattaggtgcaacatttgcatttga

SEQ ID NO: 31241 - RNA, 1701 nt, synthetic construct
  misc_feature 1..1701: note = hemagglutinin__InfluenzaA__ABD60801
  source 1..1701: mol_type = other RNA
atgaagactatcattgctttgagctacattttatgtctggttttcgctcaaaaacttcccggaaatgacaacagcacagcaacgctgtgcctgggacatcatgcagtgccaaacggaacgctagtgaaaacaatcacgaatgatcaaattgaagtgactaatgctactgagctggttcagagttcctcaacaggtagactatgcgacagtcctcaccgaatccttgatggaaaaaactgcacactgatagatgctctattgggagaccctcattgtgatggcttccaaaataaggaatgggacctttttgttgaacgcagcaaagcttacagcaactgttacccttatgatgtgccggattatgcctcccttaggtcactagttgcctcatcaggcaccctggagtttatcaatgaagacttcaattggactggagtcgctcaggatgggggaagctatgcttgcagaaggggatctgttaacagtttctttagtagattgaattggttgcacaaattagaatacaaatatccagcgctgaacgtgactatgccaaacaatggcaaatttgacaaattgtacatttggggggttcaccacccgagcacggacagtgaccaaaccagcctatatgttcgagcatcagggagagtcacagtctctaccaaaagaagccaacaaactgtaatcccgaatatcgggtctagaccctgggtaaggggtcagtccagtagaatgagcatctattggacaatagtaaaaccgggagacatacttttgattaatagcacagggaatctaattgctcctcggggttacttcaaaatacgaaatgggaaaagctcaataatgagatcagatgcacccattggcaactgcagttctgaatgcatcactccaaatggaagcattcccaatgacaaaccttttcaaaatgtaaacaggatcacatatggggcctgccccagatatgttaagcaacacactctgaaattggcaacagggatgcggaatgtaccagagaaacaaactagaggcatattcggcgcaatcgcaggtttcatagaaaatggttgggagggaatggtagacggttggtacggtttcaggcatcaaaattctgagggcacaggacaagcagcagatcttaaaagcactcaagcagcaatcgaccaaatcaacgggaaactgaataggttaatcgagaaaacgaacgagaaattccatcaaatcgaaaaagaattctcagaagtagaagggagaattcaggacctcgagaaatatgttgaagacactaaaatagatctctggtcttacaacgcggagcttcttgttgccctggagaaccaacatacaattgatctaacggactcagaaatgaacaaactgtttgaaagaacaaggaagcaactgagggaaaatgctgaggacatgggcaatggttgcttcaaaatataccacaaatgtgacaatgcctgcatagggtcaatcagaaatggaacttatgaccatgatgtatacagagacgaagcattaaacaaccggttccagatcaaaggtgttgagctaaagtcaggatacaaagattggatcctatggatttcctttgccatatcatgctttttgctttgtgttgttttgctggggttcatcatgtgggcctgccaaaaaggcaacattaggtgcaacatttgcatttga

SEQ ID NO: 31242 - RNA, 1701 nt, synthetic construct
  misc_feature 1..1701: note = hemagglutinin__InfluenzaA__ABD60812
  source 1..1701: mol_type = other RNA
atgaagactatcattgctttgagctacattctatgtctgattttcgctcaaaaacttcccggaaatgacaacagcacggcaacgctgtgccttgggcaccatgcagtaccaaacggaacgatagtgaaaacaatcacgaatgaccaaattgaagttactaatgctactgagctggttcagagttcctcaacaggtggaatatgcgacagtcctcatcagatccttgatggagaaaactgcacactaatagatgctctattgggagaccctcagtgtgatggcttccaaaataagaaatgggacctttttgttgaacgcagcaaagcctacagcaactgttacccttatgatgtgccggattatgcctcccttaggtcactagttgcctcatccggcacactggagtttaacaatgaaagcttcaattggactggagtcactcaaaatggaacaagctctgcttgcaaaaggagatctaataacagtttctttagtagattgaattggttgacccacttaaaattcaaatacccagcattgaacgtgactatgccaaacaatgaaaaatttgacaaattgtacatttggggggttcaccacccgggtacggacaatgaccaaatcttcctgtatgctcaagcatcaggaagaatcacagtctctaccaaaagaagccaacaaactgtaatcccgagtatcggttctagacccagagtaaggaatatccccagcagaataagcatctattggacaatagtaaaaccgggagacatacttttgattaacagcacagggaatctaattgctcctaggggttacttcaaaatacgaagtgggaaaagctcaataatgagatcagatgcacccattggcaaatgcaattctgaatgcatcactccaaatggaagcattcccaatgacaaaccatttcaaaatgtaaacaggatcacatatggggcctgtcccagatatgttaagcaaaacactctgaaattggcaacagggatgcgaaatgtaccagagaaacaaactagaggcatatttggcgcaatcgcgggtttcatagaaaatggttgggagggaatggtggatggttggtacggtttcaggcatcaaaattctgagggaataggacaagcagcagatctcaaaagcactcaagcagcaatcaatcaaatcaatgggaagctgaataggttgatcgggaaaaccaacgagaaattccatcagattgaaaaagaattctcagaagtagaagggagaattcaggacctcgagaaatatgttgaggacactaaaatagatctctggtcatacaacgcggagcttcttgttgccctggagaaccaacatacaattgatctaactgactcagaaatgaacaaactgtttgaaagaacaaagaagcaactgagggaaaatgctgaggatatgggcaatggttgtttcaaaatataccacaaatgtgacaatgcctgcataggatcaatcagaaatggaacttatgaccatgatgtatacagagatgaagcattaaacaaccggttccagatcaaaggcgttgagctgaagtcaggatacaaagattggatcctatggatttcctttgccatatcatgttttttgctttgtgttgctttgttggggttcatcatgtgggcctgccaaaaaggcaacattaggtgcaacatttgcatttga

SEQ ID NO: 31243 - RNA, 1701 nt, synthetic construct; identical to SEQ ID NO: 31161
  misc_feature 1..1701: note = hemagglutinin__InfluenzaA__ABD60823
  source 1..1701: mol_type = other RNA

SEQ ID NO: 31244 - RNA, 1701 nt, synthetic construct
  misc_feature 1..1701: note = hemagglutinin__InfluenzaA__ABD60845
  source 1..1701: mol_type = other RNA
atgaagactatcattgctttgagctacattttatgtctggttttcgctcaaaaacttcccgtaaatgacaacagcacggcaacgctgtgcctgggacaccatgcagtgccaaacggaacgctagtgaaaacaatcacgaatgaccacattgaagtgactaatgctactgagctggttcagagttcctcaacaggtagaatatgcgacagtcctcaccaaatccttgatggagaaaactgcacactaatagatgctctattgggagacccccattgtgatggcttccaaaataaggaatgggacctttttgttgaacgcagcacagcctacagcaactgttacccttatgatgtgccggattatgcctcccttaggtcactagttgcctcatccggcacacttgagtttaacaatgaaagcttcaattggactggagtcgatcagaatggaacaagctctgcttgcaaaaggagatctactaaaagtttctttagtagattgaattggttgcaccaattaaaatacaaatatccagcactgaacgtgactatgccaaacaatgaaaaatttgacaaattgtacatttggggggttcaccatccgagtacggacagtgaccaaatcagcctatatgctcaagcatcagggagagtcacagtctctaccaaaagaagccaacaaactgtaaccccgaatatcggatctagaccctgggtaaggggtgtctccagcagaataagcatttattggacaatagtaaaaccgggagacatacttttgattaacagcacagggaatctaattgctcctcggggttacttcaaaatacgaagtgggaaaagctcaataatgaggtcaaatgcactcattggcaaatgcaattctgaatgcatcactccaaatggaagcattcccaatgacaaaccatttcaaaatgtaaacaggatcacatatggggcctgtcccagatatgttaagcaaaacactctgaaattggcaacagggatgcggaatgtaccagagaaacaaactagaggcatattcggcgcaatcgcaggtttcatagaaaatggttgggagggaatggtggacggttggtacggtttcaggcatcaaaattctgagggcacaggacaagcagcagatcttaaaagcactcaagcagcaatcaaccaaatcaacgggaaactgaataggttaatcgagaaaacaaacgagaaattccatcaaattgaaaaagaattctcagaagtagaagggagaattcaggacctcgagaaatatgttgaggacactaaaatagatctctggtcgtacaacgcggagcttcttgttgccctggagaaccaacatacaattgatctaactgactcagaaatgaacaaactgttcgaaagaacaaggaaacaactgagggaaaatgctgaggatatgggcaatggttgtttcaaaatataccacaaatgtgacaatgcctgcatagggtcaatcagaaatggaacttatgaccatgatgtatacagagacgaagcattaaacaaccggttccagatcaaaggtgttgagctgaagtcaggatacaaagattggatcctatggatttcctttgccatatcatgttttttgctttgtgttgttttgctggggttcatcatgtgggcctgccaaaaaggcaacattaggtgcaacatttgcatttga

SEQ ID NO: 31245 - RNA, 1698 nt, synthetic construct
  misc_feature 1..1698: note = hemagglutinin__InfluenzaA__ABD60878
  source 1..1698: mol_type = other RNA
atgaaagtaaaactactggtcctgttatgtacatttacagctacatatgcagacacaatatgtatagggtaccatgccaacaactcaaccgacactgttgacacagtacttgagaagaatgtgacagtgacacactctgtcaacctacttgaggacagtcacaatggaaaactatgtctactaaaaggaatagccccactacaattgggtaattgcagcgttgccggatggatcttaggaaacccagaatgcgaattactgatttccaaggaatcatggtcctacattgtagaaacaccaaatcctgagaatggaacatgttacccagggtatttcgccgactatgaggaactgagggagcaattgagttcagtatcttcatttgagagattcgaaatattccccaaagaaagctcatggcccaaccacaccgtaaccggagtatcagcatcatgctcccataatgggaaaagcagtttttacagaaatttgctatggctgacggggaagaatggtttgtacccaaacctgagcaagtcctatgcaaacaacaaagagaaagaagtccttgtactatggggtgttcatcacccgcctaacataggggaccaaaaggccctctatcatacagaaaatgcttatgtctctgtagtgtcttcacattatagcagaagattcaccccagaaatagccaaaagacccaaagtaagagatcaggaaggaagaatcaactactactggactctgctggaacccggggatacaataatatttgaggcaaatggaaatctaatagcgccacggtatgctttcgcactgagtagaggctttggatcaggaatcatcacctcaaatgcaccaatggatgaatgtgatgcgaagtgtcaaacacctcagggagctataaacagcagtcttcctttccagaacgtacacccagtcacaataggagagtgtccaaagtatgtcaggagtgcaaaattaaggatggttacaggactaaggaacatcccatccattcaatccagaggtttgtttggagccattgccggtttcattgaaggggggtggactggaatggtagatgggtggtatggttatcatcatcagaatgagcaaggatctggctatgccgcagatcaaaaaagcacacaaaatgccattaacgggattacaaacaaggtgaattctgtaattgagaaaatgaacactcaattcacagctgtgggcaaagaattcaacaaattggaaagaaggatggaaaacttaaataaaaaagttgatgatgggtttctagacatttggacatataatgcagaattgttggttctactggaaaatgaaaggactttggatttccatgactccaatgtgaagaatctgtatgagaaagtaaaaagccaattaaagaataatgccaaagaaataggaaacgggtgttttgaattctatcacaagtgtaacaatgaatgcatggagagtgtgaaaaatggaacttatgactatccaaaatattccgaagaatcaaagttaaacagggagaaaattgatggagtgaaattggaatcaatgggagtctatcagattctggcgatctactcaactgtcgccagttccctggttcttttggtctccctgggggcaatcagcttctggatgtgttccaatgggtctttgcagtgtagaatatgcatctga

SEQ ID NO: 31246 - RNA, 1698 nt, synthetic construct
  misc_feature 1..1698: note = hemagglutinin__InfluenzaA__ABD60889
  source 1..1698: mol_type = other RNA
atgaaagtaaaactactggtcctgttatgtacatttacagctacatatgcagacacaatatgtatagggtaccatgccaacaactcaaccgacactgttgacacagtacttgagaagaatgtgacagtgacacactctgtcaacctacttgaggacagtcacaatggaaaactatgtctactaaaaggaatagccccactacaattgggtaattgcagcgttgccggatggatcttaggaaacccagaatgcgaattactgatttccaaggaatcatggtcctacattgtagaaacaccaaatcctgagaatggaacatgttacccagggtatttcgccgactatgaggaactgagggagcaattgagttcagtatcttcatttgagagattcgaaatattccccaaagaaagctcatggcccaaccacaccgtaaccggagtatcagcatcatgctcccataatgggaaaagcagtttttacagaaatttgctatggctgacggggaagaatggtttgtacccaaacctgagcaagtcctatgcaaacaacaaagagaaagaagtccttgtactatggggtgttcatcacccgcctaacataggggaccaaagggccctctatcatacagaaaatgcttatgtctctgtagtgtcttcacattatagcagaagattcaccccagaaatagccaaaagacccaaagtaagagatcaggaaggaagaatcaactactactggactctgctggaacccggggatacaataatatttgaggcaaatggaaatctaatagcgccacggtatgctttcgcactgagtagaggctttggatcaggaatcatcacctcaaatgcaccaatggatgaatgtgatgcgaagtgtcaaacacctcagggagctataaacagcagtcttcctttccagaacgtacacccagtcacaataggagagtgtccaaagtatgtcaggagtgcaaaattaaggatggttacaggactaaggaacatcccatccattcaatccagaggtttgtttggagccattgccggtttcattgaaggggggtggactggaatggtagatgggtggtatggttatcatcatcagaatgagcaaggatctggctatgccgcagatcaaaaaagcacacaaaatgccattaacgggattacaaacaaggtgaattctgtaattgagaaaatgaacactcaattcacagctgtgggcaaagaattcaacaaattggaaagaaggatggaaaacttaaataaaaaagttgatgatgggtttctagacatttggacatataatgcagaattgttggttctactggaaaatgaaaggactttggatttccatgactccaatgtgaagaatctgtatgagaaagtaaaaagccaattaaagaataatgccaaagaaataggaaacgggtgttttgaattctatcacaagtgtaacaatgaatgcatggagagtgtgaaaaatggaacttatgactatccaaaatattccgaagaatcaaagttaaacagggagaaaattgatggagtgaaattggaatcaatgggagtctatcagattctggcgatctactcaactgtcgccagttccctggttcttttggtctccctgggggcaatcagcttctggatgtgttccaatgggtctttgcagtgtagaatatgcatctga

SEQ ID NO: 31247 - RNA, 1698 nt, synthetic construct
  misc_feature 1..1698: note = hemagglutinin__InfluenzaA__ABD60900
  source 1..1698: mol_type = other RNA
atgaaagtaaaacgactggtcctgttatgtacatttacagctacatatgcagacacaatatgtatagggtaccatgccaacaactcaaccgacactgttgacacagtacttgagaagaatgtgacagtgacacactctgtcaacctacttgaggacagtcacaatggaaaactatgtctactaaaaggaatagccccactacaattgggtaattgcagcgttgccggatggatcttaggaaacccagaatgcgaattactgatttccaaggaatcatggtcctacattgtagaaacaccaaatcctgagaatggaacatgttacccagggtatttcgccgactatgaggaactgagggagcaattgagttcagtatcttcatttgagagattcgaaatattccccaaagaaagctcatggcccaaccacaccgtaaccggagtatcagcatcatgctcccataatgggaaaagcagtttttacagaaatttgctatggctgacggggaagaatggtttgtacccaaacctgagcaagtcctatgcaaacaacaaagagaaagaagtccttgtactatggggtgttcatcacccgcctaacataggggaccaaaaggccctctatcatacagaaaatgcttatgtctctgtagtgtcttcacattatagcagaagattcaccccagaaatagccaaaagacccaaagtaagagatcaggaaggaagaatcaactactactggactctgctggaacccggggatacaataatatttgaggcaaatggaaatctaatagcgccacggtatgctttcgcactgagtagaggctttggatcaggaatcatcacctcaaatgcaccaatggatgaatgtgatgcgaagtgtcaaacacctcagggagctataaacagcagtcttcctttccagaacgtacacccagtcacaataggagagtgtccaaagtatgtcaggagtgcaaaattaaggatggttacaggactaaggaacatcccatccattcaatccagaggtttgtttggagccattgccggtttcattgaaggggggtggactggaatggtagatgggtggtatggttatcatcatcagaatgagcaaggatctggctatgccgcagatcaaaaaagcacacaaaatgccattaacgggattacaaacaaggtgaattctgtaattgagaaaatgaacactcaattcacagctgtgggcaaagaattcaacaaattggaaagaaggatggaaaacttaaataaaaaagttgatgatgggtttctagacatttggacatataatgcagaattgttggttctactggaaaatgaaaggactttggatttccatgactccaatgtgaagaatctgtatgagaaagtaaaaagccaattaaagaataatgccaaagaaataggaaacgggtgttttgaattctatcacaagtgtaacaatgaatgcatggagagtgtgaaaaatggaacttatgactatccaaaatattccgaagaatcaaagttaaacagggagaaaattgatggagtgaaattggaatcaatgggagtctatcagattctggcgatctactcaactgtcgccagttccctggttcttttggtctccctgggggcaatcagcttctggatgtgttccaatgggtctttgcagtgtagaatatgcatctga

SEQ ID NO: 31248 - RNA, 1698 nt, synthetic construct
  misc_feature 1..1698: note = hemagglutinin__InfluenzaA__ABD60911
  source 1..1698: mol_type = other RNA
atgaaagcaaaactaatggtcctgttatgtacatttacagctacatatgcagacacaatatgtatcggctaccatgccaacaactcaaccgacactgttgacacagtacttgagaagaatgtgacagtgacacactctgtcaacctacttgaggacagtcacaatggaaaactatgtctactaaaaggaatagccccactacaattgggtaactgcagcgttgccggatggatcttaggaaacccagaatgcgaattactgatttccaaggaatcatggtcctacattgtagaaacaccaaatcctgagaatggaacatgttacccaggatatttcgccgactatgaggaactgagggagcaattgagttcagtatcttcatttgagagattcgaaatattccccaaagaaagctcatggcccaaccacaccgtaaccggagtatcagcatcatgctcccataatgggaaaagcagtttttacagaaatttgctatggctgacggggaagaatggtttgtacccaaacctgagcaagtcctatgcaaacaacaaagagaaagaagtccttgtactatggggtgttcatcacccgcctaacataggggaccaaagggccctctatcatacagaaaatgcttatgtctctgtagtgtcttcacattatagcagaagattcaccccagaaatagccaaaagacccaaagtaagagatcaggaaggaagaatcaactactactggactctgctggaacccggggatacaataatatttgaggcaaatggaaatctaatagcgccatggtatgctttcgcactgagtagaggctttggatcaggaatcatcacctcaaatgcaccaatgggtgaatgtgatgcgaagtgtcaaacacctcagggagctataaacagcagtcttcctttccagaatgtacacccagtcacaataggagaatgtccaaagtatgtcaggagtgcaaaattaaggatggttacaggactaaggaacatcccatccattcaatccagaggtttgtttggagccattgccggtttcattgaaggggggtggactggaatggtagatgggtggtatggttatcatcatcagaatgagcaaggatctggctatgctgcagatcaaaaaagcacacaaaatgccattgacgggattacaaacaaggtgaattctataattgagaaaatgaacactcaattcacagctgtgggcaaagaattcaacaaattggaaagaaggatggaaaacttaaataaaaaagttgatgatgggtttctagacatttggacatataatgcagaattgttggttctactggaaaatgaaaggactttggatttccatgactccaatgtgaagaatctgtatgagaaagtaaaaagccaattaaagaataatgccaaagaaataggaaacgggtgttttgaattctatcacaagtgtaacaatgaatgcatggagagtgtgaaaaatggaacttatgactatccaaaatattccgaagaatcaaagttaaacagggagaaaattgatggagtgaaattggaatcaatgggagtctatcagattctggcgatctactcaactgtcgccagttccctggttcttttggtctccctgggggcaatcagcttctggatgtgttccaatgggtcgttgcagtgtagaatatgcatctga

SEQ ID NO: 31249 - RNA, 1701 nt, synthetic construct
  misc_feature 1..1701: note = hemagglutinin__InfluenzaA__ABD60922
  source 1..1701: mol_type = other RNA
atgaagactatcattgctttgagctacattctatgtctggttttcgctcaaaaacttcccggaaatgacaacagcacggcaacgctgtgccttgggcaccatgcagtaccaaacggaacgatagtgaaaacaatcacgaatgaccaaattgaagttactaatgctactgagctggtacagagttcctcaacaggtggaatatgcgacagtcctcatcagatccttgatggagaaaactgcacactaatagatgctctattgggagaccctcagtgtgatggcttccaaaataagaaatgggacctttttgttgaacgcagcaaagcctacagcaactgttacccttatgatgtgccggattatgcctcccttaggtcactagttgcctcatccggcacactggagtttaacaatgaaagcttcgattggactggagtcactcagaatggaacaagctctgcttgcaaaaggagatctaataaaagtttctttagtagattgaattggttgacccacttaaaatacaaatacccagcattgaacgtgactatgccaaacaatgaaaaatttgacaaattgtacatttggggggttcaccacccgggtacggacagtgaccaaatcagcctatatgctcaagcatcaggaagaatcacagtctctaccaaaagaagccaacaaactgtaatcccgaatatcggatctagacccagggtaagggatgtctccagccgaataagcatctattggacaatagtaaaaccgggagacatacttttgattaacagcacagggaatctaattgctcctcggggttacttcaaaatacgaagtgggaaaagctcaataatgagatcagatgcacccattggcaaatgcaattctgaatgcatcactccaaatggaagcattcccaatgacaaaccatttcaaaatgtaaacaggatcacatatggggcctgtcccagatatgttaagcaaaacactctgaaattggcaacagggatgcgaaatgtaccagagaaacaaactagaggcatatttggcgcaatcgcgggtttcatagaaaatggttgggagggaatggtggacggttggtacggtttcaggcatcaaaattctgagggcacaggacaagcagcagatctcaaaagcactcaagcagcaatcaaccaaatcaatgggaaactgaataggttaatcgggaaaacaaacgagaaattccatcagattgaaaaagaattctcagaagtagaagggagaattcaggacctcgagaaatatgttgaggacactaaaatagatctctggtcatacaacgcggagcttcttgttgccctggagaaccaacatacaattgatctaactgactcagagatgaacaaactgtttgaaagaacaaagaagcaactgagggaaaatgctgaggatatgggcaatggttgtttcaaaatataccacaaatgtgacaatgcctgcatagggtcaatcagaaatggaacttatgaccatgatgtgtacagagatgaagcattaaacaaccggttccagatcaaaggtgttgagctgaagtcaggatacaaagattggatcctatggatttcctttgccatatcatgttttttgctttgtgttgctttgttggggttcatcatgtgggcctgccaaaaaggcaacattaggtgcaacatttgcatttga

SEQ ID NO: 31250 - RNA, 1701 nt, synthetic construct
  misc_feature 1..1701: note = hemagglutinin__InfluenzaA__ABD60933
  source 1..1701: mol_type = other RNA
atgaaagcaaaactactggtcctgttatgtgcactttcagctacagatgcagacacaatatgtataggctaccatgcgaacaactcaaccgacactgttgacacagtactcgaaaagaacgtgacagtgacacactctgtcaacctacttgaggacagtcacaacggaaaactatgcagactaaaaggaatagccccactacaattggggaaatgcagcattgccggatggatcttaggaaacccagaatgcgaatcactggtttctaagaaatcatggtcctacattgcagaaacaccaaactccgagaatggaacatgttacccaggatatttcgccgactatgaggaattgagggagcaattgagctcagtatcatcattcgagagattcgaaatattccccaaggaaagatcatggcccaaacacaacgtaaccagaggcgtaacggcatcatgctcccataaggggaaaagcagtttttacagaaatttgctatggctgacggagaaaaatggctcgtacccaaatctgagcaagtcctatgtgaacaacaaagagaaagaagtccttgtactatggggtgttcatcacccgtctaacatagaggaccaaaagaccatctatcggaaagaaaatgcttatgtctctgtagtgtcttcaaattataacaggagattcaccccagaaatagcagaaagacccaaagtaagaggtcaagcagggagaattaactactactggactctgctggaacccggggacacaataatatttgaggcaaatggaaatctaatagcgccatggcatgctttcgcactgaatagaggctttgggtcaggaatcatcacctcaaacgcatcgatggatgaatgtgacacgaagtgtcaaacaccccagggagctataaacagtagtcttcctttccagaatatacacccagtcacaataggggagtgcccaaaatacgtcaggagtacaaaattgaggatggttacaggactaaggaacatcccatccattcaatccagaggtctgtttggagccattgccggtttcattgaagggggatggactggaatgatagatggatggtatggttatcatcatcagaatgaacagggatctggctatgctgcggatcaaaaaagcacacaaaatgccattaacgggattacaaacaaggtgaactctgttatcgagaaaatgaacactcaattcacagctgtgggtaaagaattcaacaaattagaaaaaaggatggaaaacttaaataaaaaagttgatgatggatttctggacatttggacatataatgcagaattgttggttctactggaaaatgaaaggactttggattttcatgactcaaatgtgaagaatctgtatgagaaagtaaaaagccaattaaagaataatgccaaagaaataggaaacgggtgttttgaattctaccacaagtgtaacaatgaatgcatggaaagtgtaaaaaatggaacttatgactatccaaaatattcagaggaatcaaagttaaacagggaaaaaattgatggagtgaaattggaatcaatgggagtctatcagattctggcgatctactcaactgtcgccagttcactggtgcttttggtctccctgggggcaatcagcttctggatgtgttctaatgggtctttgcagtgcagaatatgcatctga

SEQ ID NO: 31251 - RNA, 1701 nt, synthetic construct
  misc_feature 1..1701: note = hemagglutinin__InfluenzaA__ABD60944
  source 1..1701: mol_type = other RNA
atgaaagcaaaactactggtcctgttatgtgcactttcagctacagatgcagacacaatatgtataggctaccatgcgaacaactcaaccgacactgttgacacagtactcgaaaagaacgtgacagtgacacactctgtcaacctacttgaggacagtcacaacggaaaactatgcagactaaaaggaatagccccactacaattggggaaatgcagcattgccggatggatcttaggaaacccagaatgcgaatcactgttttctaagaaatcatggtcctacattgcagaaacaccaaactccgagaatggaacatgttacccaggatatttcgccgactatgaggaactgagggagcaattgagttcagtatcatcattcgagagattcgaaatattccccaaggaaagatcatggcccaaacacaacgtaaccagaggagtaacggcatcatgctcccataaggggaaaagcagtttttacagaaatttgctatggctgacggagaaaaatggctcgtacccaaatctgagcaagtcctatgtgaacaacaaagagaaagaagtccttgtactatggggtgttcatcacccgtctaacatagaggaccaaaagaccatctatcggaaagaaaatgcttatgtctctgtagtgtcttcaaattataacaggagattcaccccagaaatagcagaaagacccaaagtaagaggtcaagcagggagaattaactactactggactctgctggaacccggggacacaataatatttgaggcaaatggaaatctaatagcgccatggtatgctttcgcactgagtagaggctttgggtcaggaatcatcacctcaaacgcatcgatggatgaatgtgacacgaagtgtcaaacaccccagggagctataaacagtagtcttcctttccagaatgtacacccagtcacaataggagagtgcccaaaatacgtcaggagtacaaaattaaggatggttacaggactaaggaacatcccatccattcaatccagaggtctgtttggagccattgccggtttcattgaagggggatggactggaatgatagatggatggtatggttatcatcatcagaatgaacagggatctggctatgctgcggatcaaaaaagcacacaaaatgccattaacgggattacaaacaaggtgaactctgttatcgagaaaatgaacactcaattcacagctgtgggtaaagaattcaacaaattagaaaaaaggatggaaaacttaaataaaaaagttgatgatggatttctggacatttggacatataatgcagaattgttggttctactggaaaatgaaaggactttggattttcatgactcaaatgtgaagaatctgtatgagaaagtaaaaagccaattaaagaataatgccaaagaaataggaaacgggtgttttgaattctaccacaagtgtaacaatgaatgcatggaaagtgtaaaaaatggaacttatgactatccaaaatattcagaggaatcaaagttaaacagggaaaaaattgatggagtgaaattggaatcaatgggagtctatcagattctggcgatctactcaactgtcgccagttcactggtgcttttggtctccctgggggcaatcagcttctggatgtgttctaatgggtctttgcagtgcagaatatgcatctga

SEQ ID NO: 31252 - RNA, 1701 nt, synthetic construct
  misc_feature 1..1701: note = hemagglutinin__InfluenzaA__ABD60955
  source 1..1701: mol_type = other RNA
atgaaagcaaaactactagtcctgttatgtgcatttacagctacatatgcagacacaatatgtataggctaccatgcgaacaactcaaccgacactgttgacacagtacttgagaagaacgtgacagtgacacactctgtcaacctacttgaggacagtcacaacggaaaactatgtcgactaaagggaatagccccactacaattgggtaattgcagcgttgccggatggatcttaggaaacccaaaatgcgaatcactgttttctaaggaatcatggtcctacattgcagaaacaccaaaccctgagaatggaacatgttacccagggtatttcgccgactatgaggaactgagggagcaattgagttcagtatcatcattcgagagattcgaaatattccccaaagaaagctcatggcccaaccacaccgtaaccaaaggagtaacgacatcatgctcccataatgggaaaagcagtttttacagaaatttgctatggctgacggagaagaatggcttgtacccaaatctgagcaagtcctatgtaaacaacaaagagaaagaagtccttgtactatggggtgttcatcacccgtctaacataagggaccaaagggccatctatcatacagaaaatgcttatgtctctgtagtgtcttcacattatagcagaagattcaccccagaaatagcaaaaagacccaaagtaagagatcaagaaggaagaattaactactactggactctgctggaacccggggacacaataatatttgaggcaaatggaaatctaatagcgccatggtatgctttcgcactgagtagaggctttgggtcaggaatcatcacctcaaacgcatcaatggatgaatgtgacgcgaagtgtcaaacaccccagggagctataaacagtagtcttcctttccagaatgtacacccagtcacaataggagagtgtccaaagtatgtcaggagtacaaaattaaggatggttacaggactaaggaacatcccatccattcaatccagaggtttgtttggagccattgccggtttcattgaaggggggtggactggaatgatagatggatggtatggttatcatcatcagaatgaacaaggatctggctatgctgcggaccaaaaaagcacacaaaatgccattaacgggattacaaacaaggtgaattctgtaatcgagaaaatgaacactcaattcacagctgtgggcaaagaattcaacaaattagaaagaaggatggaaaacttaaataaaaaagttgatgatggatttctggacatttggacatataatgcagaattgttggttctactggaaaatggaaggactttggattttcatgactcaaatgtgaagaatctgtatgagaaagtaaaaagccaattgaagaataatgccaaagaaatagggaacgggtgttttgaattctatcacaagtgtaacaatgaatgcatggaaagtgtgaaaaatggaacttatgactatccaaaatattccgaagaatcaaagttaaacaggggaaaaattgatggagtgaaattggaatcaatgggagtctatcagattctggcgatctactcaactgtcgccagttcactggtgcttttggtctccctgggggcaatcagcttctggatgtgttctaatgggtctttgcagtgtagaatatgcatctga

SEQ ID NO: 31253 - RNA, 1701 nt, synthetic construct
  misc_feature 1..1701: note = hemagglutinin__InfluenzaA__ABD61260
  source 1..1701: mol_type = other RNA
atgaagactatcattgctttgagctacattctatgtctggttttcgctcaaaaacttcccggaaatgacaacagcacggcaacgctgtgccttgggcaccatgcagtaccaaacggaacgatagtgaaaacaatcacgaatgaccaaattgaagttactaatgctactgagctggttcagagttcctcaacaggtggaatatgcgacagtcctcatcagatccttgatggagaaaactgcacactaatagatgctctattgggagaccctcagtgtgatggcttccaaaataagaaatgggacctttttgttgaacgcagcaaagcctacagcaactgttacccttatgatgtgccggattatgcctcccttaggtcactagttgcctcatccggcacactggagtttaacaatgaaagcttcgattggactggagtcactcagaatggaacaagctctgcttgcaaaaggagatctaataaaagtttctttagtagattgaattggttgacccacttaaaatacaaatacccagcattgaacgtgactatgccaaacaatgaaaaatttgacaaattgtacatttggggggttcaccacccgggtacggacagtgaccaaatcagcctatatgctcaagcatcaggaagaatcacagtctctaccaaaagaagccaacaaactgtaatcccgaatatcggatctagacccagggtaagggatgtctccagccgaataagcatctattggacaatagtaaaaccgggagacatacttttgattaacagcacagggaatctaattgctcctcggggttacttcaaaatacgaagtgggaaaagctcaataatgagatcagatgcacccattggcaaatgcaattctgaatgcatcactccaaatggaagcattcccaatgacaaaccatttcaaaatgtaaacaggatcacatatggggcctgtcccagatatgttaagcaaaacactctgaaattggcaacagggatgcgaaatgtaccagagaaacaaactagaggcatatttggcgcaatcgcgggtttcatagaaaatggttgggagggaatggtggacggttggtacggtttcaggcatcaaaattctgagggcacaggacaagcagcagatctcaaaagcactcaagcagcaatcaaccaaatcaatgggaaactgaataggttaatcgggaaaacaaacgagaaattccatcagattgaaaaagaattctcagaagtagaagggagaattcaggacctcgagaaatatgttgaggacactaaaatagatctctggtcatacaacgcggagcttcttgttgccctggagaaccaacatacaattgatctaactgactcagaaatgaacaaactgtttgaaagaacaaagaagcaactgagggaaaatgctgaggatatgggcaatggttgtttcaaaatataccacaaatgtgacaatgcctgcatagggtcaatcagaaatggaacttatgaccatgatgtgtacagagatgaagcattaaacaaccggttccagatcaaaggtgttgagctgaagtcaggatacaaagattggatcctatggatttcctttgccatatcatgttttttgctttgtgttgctttgttggggttcatcatgtgggcctgccaaaaaggcaacattaggtgcaacatttgcatttga

SEQ ID NO: 31254 - RNA, 1701 nt, synthetic construct
  misc_feature 1..1701: note = hemagglutinin__InfluenzaA__ABD61271
  source 1..1701: mol_type = other RNA
atgaagactatcattgctttgagctacattctatgtctggttttcgctcaaaaacttcccggaaatgacaacagcacggcaacgctgtgccttgggcaccatgcagtaccaaacggaacgatagtgaaaacaatcacgaatgaccaaattgaagttactaatgctactgagctggtacagagttcctcaacaggtggaatatgcgacagtcctcatcagatccttgatggagaaaactgcacactaatagatgctctattgggagaccctcagtgtgatggcttccaaaataagaaatgggacctttttgttgaacgcagcaaagcctacagcaactgttacccttatgatgtgccggattatgcctcccttaggtcactagttgcctcatccggcacactggagtttaacaatgaaagcttcgattggactggagtcactcagaatggaacaagctctgcttgcaaaaggagatctaataaaagtttctttagtagattgaattggttgacccacttaaaatacaaatacccagcattgaacgtgactatgccaaacaatgaaaaatttgacaaattgtacatttggggggttcatcacccgggtacggacagtgaccaaatcagcctatatgctcaagcatcaggaagaatcacagtctctaccaaaagaagccaacaaactgtaatcccgaatatcggatctagacccagggtaagggatgtctccagccgaataagcatctattggacaatagtaaaaccgggagacatacttttgattaacagcacagggaatctaattgctcctcggggttacttcaaaatacgaagtgggaaaagctcaataatgagatcagatgcacccattggcaaatgcaattctgaatgcatcactccaaatggaagcattcccaatgacaaaccatttcaaaatgtaaacaggatcacatatggggcctgtcccagatatgttaagcaaaacactctgaaattggcaacagggatgcgaaatgtaccagagaaacaaactagaggcatatttggcgcaatcgcgggtttcatagaaaatggttgggagggaatggtggacggttggtacggtttcaggcatcaaaattctgagggcacaggacaagcagcagatctcaaaagcactcaagcagcaatcaaccaaatcaatgggaaactgaataggttaatcgggaaaacaaacgagaaattccatcagattgaaaaagaattctcagaagtagaagggagaattcaggacctcgagaaatatgttgaggacactaaaatagatctctggtcatacaacgcggagcttcttgttgccctggagaaccaacatacaattgatctaactgactcagagatgaacaaactgtttgaaagaacaaagaagcaactgagagaaaatgctgaggatatgggcaatggttgtttcaaaatataccacaaatgtgacaatgcctgcatagggtcaatcagaaatggaacttatgaccatgatgtgtacagagatgaagcattaaacaaccggttccagatcaaaggtgttgagctgaagtcaggatacaaagattggatcctatggatttcctttgccatatcatgttttttgctttgtgttgctttgttggggttcatcatgtgggcctgccaaaaaggcaacattaggtgcaacatttgcatttga

SEQ ID NO: 31255 - RNA, 1701 nt, synthetic construct; identical to SEQ ID NO: 30790
  misc_feature 1..1701: note = hemagglutinin__InfluenzaA__ABD61282
  source 1..1701: mol_type = other RNA

SEQ ID NO: 31256 - RNA, 1701 nt, synthetic construct; identical to SEQ ID NO: 31024
  misc_feature 1..1701: note = hemagglutinin__InfluenzaA__ABD61293
  source 1..1701: mol_type = other RNA

SEQ ID NO: 31257 - RNA, 1701 nt, synthetic construct; identical to SEQ ID NO: 31242
  misc_feature 1..1701: note = hemagglutinin__InfluenzaA__ABD61304
  source 1..1701: mol_type = other RNA

SEQ ID NO: 31258 - RNA, 1701 nt, synthetic construct; identical to SEQ ID NO: 31154
  misc_feature 1..1701: note = hemagglutinin__InfluenzaA__ABD61315
  source 1..1701: mol_type = other RNA

SEQ ID NO: 31259 - RNA, 1701 nt, synthetic construct
  misc_feature 1..1701: note = hemagglutinin__InfluenzaA__ABD61337
  source 1..1701: mol_type = other RNA
atgaagactatcattgctttgagctacattttatgtctggttttcgctcaaaaacttcccgtaaatgacaacagcacggcaacgctgtgcctgggacaccatgcagtgccaaacggaacgctagtgaaaacaatcacgaatgaccacattgaagtgactaatgctactgagctggttcagagttcctcaacaggtagaatatgcgacagtcctcaccaaatccttgatggagaaaactgcacactaatagatgctctattgggagaccctcattgtgatggcttccaaaataaggaatgggacctttttgttgaacgcagcacagcctacagcaactgttacccttatgatgtgccggattatgcctcccttaggtcactagttgcctcatccggcacactggagtttaacaatgaaagcttcaattggactggagtcgctcagaatggaacaagctctgcttgcaaaaggagatctattaaaagtttctttagtagattgaattggttgcaccaattaaaatacaaatatccagcactgaacgtgactatgccaaacaatgaaaaatttgacaaattgtacatttggggggttcaccacccgagtacggacagtgaccaaatcagcctgtatgctcaagcatcagggagagtcacagtctctaccaaaagaagccaacaaactgtaatcccgaatatcggatctagaccctgggtaaggggtgtctccagcagaataagcatctattggacaatagtaaaaccgggagacatacttttgattaacagcacagggaatctaattgctcctcggggttactttaaaatacgaagtgggaaaagctcaataatgaggtcaaatgcacccattggcaaatgcaattctgaatgcatcactccaaatggaagcattcccaatgacaaaccatttcaaaatgtaaacaggatcacatatggggcctgtcccagatatgttaagcaaaacactctgaaattggcaacagggatgcggaatgtaccagagaaacaaactagaggcatattcggcgcaatcgcgggtttcatagaaaatggttgggagggaatggtggacggttggtacggtttcaggcatcaaaattctgagggcacaggacaagcagcagatcttaaaagcactcaagcagcaatcaaccaaatcaacgggaaactgaataggttaatcgagaaaacaaacgagaaattccatcaaattgaaaaagaattctcagaagtagaagggagaattcaggacctcgagaaatatgttgaggacactaaaatagatctctggtcgtacaacgcggagcttcttgttgccctggagaaccaacatacaattgatctaactgactcagaaatgaacaaactgtttgaaagaacaaggaagcaactgagggaaaatgctgaggatatgggcaatggttgtttcaaaatataccacaaatgtgacaatgcctgcatagggtcaatcagaaatggaacttatgaccatgatgtatacagagacgaagcattaaacaaccggttccagatcaaaggtgttgagctgaagtcaggatacaaagattggatcctatggatttcctttgccatatcatgttttttgctttgtgttgttttgctggggttcatcatgtgggcctgccaaaaaggcaacattaggtgcaacatttgcatttga

SEQ ID NO: 31260 - RNA, 1701 nt, synthetic construct
  misc_feature 1..1701: note = hemagglutinin__InfluenzaA__ABD61348
  source 1..1701: mol_type = other RNA
atgaagactatcattgctttgagctacattttatgtctggttttcgctcaaaaacttcccgtaaatgacaacagcacggcaacgctgtgcctgggacaccatgcagtgccaaacggaacgctagtgaaaacaatcacgaatgaccacattgaagtgactaatgctactgagctggttcagagttcctcaacaggtagaatatgcgacagtcctcaccaaatccttgatggagaaaactgcacactaatagatgctctattgggagaccctcattgtgatggcttccaaaataaggaatgggacctttttgttgaacgcagcacagcctacagcaactgttacccttatgatgtgccggattatgcctcccttaggtcactagttgcctcatccggcacactggagtttaacaatgaaagcttcaattggactggagtcgctcagaatggaacaagctctgcttgcaaaaggagatctattaaaagtttctttagtagattgaattggttgcaccaattaaaatacaaatatccagcactgaacgtgactatgccaaacaatgaaaaatttgacaaattgtacatttggggggttcaccatccgagtacggacagtgaccaaatcagcctatatgctcaagcatcagggagagtcacagtctctaccaaaagaagccaacaaactgtaatcccgaatatcggatctagaccctgggtaaggggtgtctccagcagaataagcatctattggacaatagtaaaaccgggagacatacttttgattaacagcacagggaatctaattgctcctcggggttactttaaaatacgaagtgggaaaagctcaataatgaggtcaaatgcacccattggcaaatgcaattctgaatgcatcactccaaatggaagcattcccaataacaaaccatttcaaaatgtaaacaggatcacatatggggcatgtcccagatatgttaagcaaaacactctgaaattggcaacagggatgcggaatgtaccagagaaacaaactagaggcatattcggcgcaatcgcgggtttcatagaaaatggttgggagggaatggtggacggttggtacggtttcaggcatcaaaattctgagggcacaggacaagcagcagatcttaaaagcactcaagcagcaatcaaccaaatcaacgggaaactgaataggttaatcgagaaaacaaacgagaaattccatcaaattgaaaaagaattctcagaagtagaagggagaattcaggacctcgagaaatatgttgaggacactaaaatagatctctggtcgtacaacgcggagcttcttgttgccctggagaaccaacatacaattgatctaactgactcagaaatgaacaaactgtttgaaagaacaaggaagcaactgagggaaaatgctgaggatatgggcaatggttgtttcaaaatataccacaaatgtgacaatgcctgcatagggtcaatcagaaatggaacttatgaccatgatgtatacagagacgaagcattaaacaaccggttccagatcaaaggtgttgagctgaagtcaggatacaaagattggatcctatggatttcctttgccatatcatgttttttgctttgtgttgttttgctggggttcatcatgtgggcctgccaaaaaggcaacattaggtgcaacatttgcatttga

SEQ ID NO: 31261 - RNA, 1701 nt, synthetic construct; identical to SEQ ID NO: 30794
  misc_feature 1..1701: note = hemagglutinin__InfluenzaA__ABD61359
  source 1..1701: mol_type = other RNA

SEQ ID NO: 31262 - RNA, 1701 nt, synthetic construct; identical to SEQ ID NO: 31214
  misc_feature 1..1701: note = hemagglutinin__InfluenzaA__ABD61370
  source 1..1701: mol_type = other RNA

SEQ ID NO: 31263 - RNA, 1701 nt, synthetic construct; identical to SEQ ID NO: 31154
  misc_feature 1..1701: note = hemagglutinin__InfluenzaA__ABD61381
  source 1..1701: mol_type = other RNA

SEQ ID NO: 31264 - RNA, 1701 nt, synthetic construct
  misc_feature 1..1701: note = hemagglutinin__InfluenzaA__ABD61392
  source 1..1701: mol_type = other RNA
atgaagactatcattgctttgagctacattttatgtctggttttcgctcaaaaacttcccggaaatgacaacagcacggcaacgctgtgcctggggcaccatgcagtgccaaacggaacgctagtgaaaacaatcacgaatgaccaaattgaagtgactaatgctactgagctggttcagagttcctcaacaggtggaatatgcgacagtcctcaccaaatccttgatggagaaaactgcacactaatagatgctctattgggagaccctcattgtgatggcttccaaaataaggaatgggacctttttgttgaacgcagcaaagcctacagcaactgttacccttatgatgtgccggattatgcctcccttaggtcactagttgcctcatccggcacactggagtttaacaatgaaagcttcaattggactggagtcgctcagaatggaacaagctctgcttgcaaaaggggatctaataaaagtttctttagtagattgaattggttgcaccaattaaaatacaaatacccagcactgaacgtgactatgccaaacaatgaaaaatttgacaaattgtacatttggggggttcaccacccgagtacggacagtgaccaaatcagcctatatgctcaagcaccagggagagtcacagtctctaccaaaagaagccaacaaactgtaatcccgaatatcggatctagaccctgggtaaggggtgtctccagcagaataagcatctattggacaatagtaaaaccgggagacatacttttgattaactgcacagggaatctaattgctcctcggggttacttcaaaatacgaagtgggaaaagctcaataatgaggtcagatgcatccattggcaaatgcaattctgaatgcatcactccaaatggaagcattcccaatgacaaaccatttcaaaatgtaaacaggatcacatatggggcctgtcccagatatgttaagcaaaacactctgaaattggcaacagggatgcggaatgtaccagagaaacaaactagaggcatattcggcgcaatcgcgggtttcatagaaaatggttgggagggaatggtggacggttggtacggtttcaggcatcaaaattctgagggcacaggacaagcagcagatctcaaaagcactcaagcagcaatcaaccaaatcaacgggaaactgaataggttaatcgagaaaacgaacgagaaattccatcaaattgaaaaagaattctcagaagtggaagggagaattcaggacctcgagaaatatgttgaggacactaaaatagatctctggtcgtacaacgcggagcttcttgttgccctggagaaccagcatacaattgatctaactgactcagaaatgaacaaactgtttgaaagaacaaagaagcaactgagggaaaatgctgaggatatgggcaatggttgtttcaaaatataccacaaatgtgacaatgcctgcatagggtcaatcagaaatgggacttatgaccatgatgtatacagagacgaagcattaaacaaccggttccagatcaaaggtgttgagctgaagtcaggatacaaagattggatcctatggatttcctttgccatatcatgttttttgctttgtgttgtcttgctggggttcatcatgtgggcctgccaaaaaggcaacattaggtgcaacatttgcatttga

SEQ ID NO: 31265 - RNA, 1701 nt, synthetic construct
  misc_feature 1..1701: note = hemagglutinin__InfluenzaA__ABD61403
  source 1..1701: mol_type = other RNA
atgaagactatcattgctttgagctacattttatgtctggttttcgctcaaaaacttcccgtaaatgacaacagcacggcaacgctgtgcctgggacaccatgcagtgccaaacggaacgctagtgaaaacaatcacgaatgaccacattgaagtgactaatgctactgagctggttcagagttcctcaacaggtagaatatgcgacagtcctcaccaaatccttgatggagaaaactgcacactaatagatgctctattgggagacccccattgtgatggcttccaaaataaggaatgggacctttttgttgaacgcagcacagcctacagcaactgttacccttatgatgtgccggattatgcctcccttaggtcactagttgcctcatccggcacacttgagtttaacaatgaaagcttcaattggactggagtcgatcagaatggaacaagctctgcttgcaaaaggagatctactaaaagtttctttagtagattgaattggttgcaccaattaaaatacaaatatccagcactgaacgtgactatgccaaacaatgaaaaatttgacaaattgtacatttggggggttcaccatccgagtacggacagtgaccaaatcagcctatatgctcaagcatcagggagagtcacagtctctaccaaaagaagccaacaaactgtaaccccgaatatcggatctagaccctgggtaaggggtgtctccagcagaataagcatttattggacaatagtaaaaccgggagacatacttttgattaacagcacagggaatctaattgctcctcggggttacttcaaaatacgaagtgggaaaagctcaataatgaggtcaaatgcactcattggcaaatgcaattctgaatgcatcactccaaatggaagcattcccaatgacaaaccattccaaaatgtaaacaggatcacatatggggcctgtcccagatatgttaagcaaaacactctgaaattggcaacagggatgcggaatgtaccagagaaacaaactagaggcatattcggcgcaatcgcaggtttcatagaaaatggttgggagggaatggtggacggttggtacggtttcaggcatcaaaattctgagggcacaggacaagcagcagatcttaaaagcactcaagcagcaatcaaccaaatcaacgggaaactgaataggttaatcgagaaaacaaacgagaaattccatcaaattgaaaaagaattctcagaagtagaagggagaattcaggacctcgagaaatatgttgaggacactaaaatagatctctggtcgtacaacgcggagcttcttgttgccctggagaaccaacatacaattgatctaactgactcagaaatgaacaaactgttcgaaagaacaaggaaacaactgagggaaaatgctgaggatatgggcaatggttgtttcaaaatataccacaaatgtgacaatgcctgcatagggtcaatcagaaatggaacttatgaccatgatgtatacagagacgaagcattaaacaaccggttccagatcaaaggtgttgagctgaagtcaggatacaaagattggatcctatggatttcctttgccatatcatgttttttgctttgtgttgttttgctggggttcatcatgtgggcctgccaaaaaggcaacattaggtgcaacatttgcatttga

SEQ ID NO: 31266 - RNA, 1701 nt, synthetic construct
  misc_feature 1..1701: note = hemagglutinin__InfluenzaA__ABD61529
  source 1..1701: mol_type = other RNA
atgaagactatcattgctttgagctacattttctgtctggttttcgcccaaaaacttcccggaaatgacaacagcacagcaacgctgtgcctgggacatcatgcagtgccaaacggaacgctagtgaaaacaatcacgaatgatcagattgaagtgactaatgctactgagctggttcagagttcctcaacaggtagaatatgcgacagtcctcaccgaatccttgatgggaaaaactgcacactgatagatgctctattgggagaccctcattgtgatggcttccaaaatgagaaatgggacctttttgttgaacgcagcaaagctttcagcaactgttacccttatgatgtgccggattatgcctcccttaggtcactagttgcctcatcaggcaccctggagtttatcaatgaaggcttcaattggactggagtcactcagagtgggggaagctatgcttgcaaaaggggatctgttaacagtttcttcagtagattgaattggttgtacgaatcagaaagcaaatatccagtgctgaacgtgactatgccaaacaatggcaaatttgacaaattgtacatttggggggttcaccacccgagcacggacaaagaacaaaccaacctatatgttcgagcatcagggagagtcacagtctctaccaagagaagccagcaaactgtaatcccgaatatcgggtctagaccctgggtaaggggtctgtctagcagaataagtatctattggacaatagtaaaaccgggagacatactgttaattaatagcactgggaacctaattgctcctcggggttacttcaaaatacgcactgggaaaagctcaataatgaggtcagatgcacctattggcacctgcagttctgaatgcatcactccaaatggaagcattcccaatgacaaaccctttcaaaatgtaaacaagatcacatatggggcatgtcccaggtatgttaagcaaaacactctgaagttggcaacagggatgcggaatgtaccagagaaacaaactagaggcatattcggcgcaatagcaggtttcatagaaaatggttgggagggaatggtagacggttggtacggtttcaggcatcaaaattctgagggcacaggacaagcagcagatcttaaaagcactcaagcagcaatcgaccaaatcaacgggagactgaataggttaatcgagaaaacgaacgagaaattccatcaaatcgaaaaggaattctcagaagtagaagggagaattcaggacctcgagaaatatgttgaagacactaaaatagatctctggtcttacaacgcggagcttcttgtcgccctggagaaccaacatacaattgatctgactgactcagaaatgaacaaactgtttgaaaaaacaaggaagcaactgagggaaaatgctgaggacatgggcaatggttgcttcaaaatataccacaaatgtgacaatgcttgcatagggtcaatcagaaatggaacttatgaccatgatgtatacagagacgaagcattaaacaaccggtttcagatcaaaggtgttgagctgaagtcaggatacaaagactggatcctatggatttcctttgccatatcatgctttttgctttgtgttgttttgctggggttcatcatgtgggcctgccaaaaaggcaacattaggtgcaacatttgcatttga

SEQ ID NO: 31267 - RNA, 1698 nt, synthetic construct; identical to SEQ ID NO: 31245
  misc_feature 1..1698: note = hemagglutinin__InfluenzaA__ABD61540
  source 1..1698: mol_type = other RNA

SEQ ID NO: 31268 - RNA, 1701 nt, synthetic construct
  misc_feature 1..1701: note = hemagglutinin__InfluenzaA__ABD61757
  source 1..1701: mol_type = other RNA
atgaagactatcattgctttgagctacattttctgtctggttttcgcccaagaccttccaggaaatgacaacagcacagcaactctgtgcctgggacatcatgcggtgccaaacggaacgctagtgaaaacaatcacgaatgatcagattgaagtgactaatgctactgaactggttcagagttcctcaacgggtaaaatatgcgacaatcctcatcgaatccttgatggaataaactgcacactgatagatgctctattgggggaccctcattgtgatggctttcaaaatgagaaatgggaccttttcgttgaacgcagcaaagctttcagcaactgttacccttatgatgtgccagattatgcctcccttaggtcactagttgcctcgtcaggcactctggagtttatcaatgaaggcttcaattggactggggtcactcagaatgggggaagcagtgcttgcaaaaggggacctgataacggttttttcagtagactgaactggttgtacaaatcaggaagcacatatccagtgcagaacgtgaccatgccaaacaatgacaactctgacaaactatacatttggggggttcaccacccgagcacggacaaagaacaaaccgacctatatgttcaagcatcagggaaagtcacagtctccaccaagagaagccagcaaactgtaatcccgaatgtcgggtctagaccctgggtaaggggtctgtctagtagagtaagcatctattggacaatagttaaaccgggagacatactggtaattaatagtaatggaaacctaattgctcctcggggttacttcaaaatgcgcactgggaaaagctcaataatgaggtcagatgcacctattggcacctgcagctctgaatgcatcactccaaatggaagcattcccaatgacaagccctttcaaaacgtaaacaagatcacatatggggcatgtcccaagtatgttaagcaaaacactctgaagttggcaacagggatgcggaatgtaccagagaaacaaactagaggcatattcggcgcaatagcaggtttcatagaaaatggttgggagggaatgatagacggttggtacggtttcaggcatcaaaattctgagggcacaggacaagcagcagatcttaaaagcactcaagcagccatcgaccaaatcaatgggaaactgaatagggtaatcgagaagacgaacgagaaattccatcaaatcgaaaaggaattctcagaagtagaagggagaattcaggacctcgagaaatacgttgaagacactaaaatagatctctggtcttacaatgcggagcttcttgtcgctctggagaaccaacatacaattgatctgactgactcggaaatgaacaaactgtttgaaaaaacaaggaggcaactgagggaaaatgctgaggacatgggcaatggttgcttcaaaatataccacaaatgtgacaatgcttgcatagggtcaatcagaaatgggacttatgaccatgatgtatacagagacgaagcattaaacaaccggtttcagatcaaaggtgttgaactgaagtcaggatacaaagactggatcctgtggatttcctttgccatatcatgctttttgctttgtgttgttttgctggggttcatcatgtgggcctgccagaaaggcaacattaggtgcaacatttgcatttga

SEQ ID NO: 31269 - RNA, 1701 nt, synthetic construct
  misc_feature 1..1701: note = hemagglutinin__InfluenzaA__ABD61777
  source 1..1701: mol_type = other RNA
atgaagactatcattgctttgagctacattttctgtctgggtttcgcccaaaaacttcccggaaatgacaacagcacagcaacgctgtgcctgggacaccatgcagtgccaaacggaacgctagtgaaaacaatcacgaatgatcagattgaagtgactaatgctactgagctggttcagagttcctcaacaggtagaatatgcgacagtcctcaccgaatccttgatgggaaaaactgcacactgatagatgctctattgggagaccctcattgtgatggcttccaaaatgagaaatgggacctttttgttgaacgcagcaaagctttcagcaactgttacccttatgatgtgccggattatgcctcccttaggtcactagttgcctcatcaggcaccctggagtttatcaatgaaggcttcaattggactggagtcactcagagtgggggaagctatgcttgcaaaaggggatctgttaacagtttcttcagtagattgaattggttgtacgaatcagaaagcaaatatccagcgctgaacgtgactatgccaaacaatggcaaatttgacaaattgtacatttggggggttcaccacccgagcacggacaaagaacaaaccaacctatatgttcgagcatcagggagagtcacagtctctaccaagagaagccagcaaactgtaatcccgaatatcgggtctagaccctgggtaaggggtctgtctagtagaataagcatctattggacaatagtaaaaccgggagacatactgttgattaatagcactggaaacctaattgctcctcggggttacttcaaaatacgcactgggaaaagctcaataatgaggtcagatgcacctattggcacctgcagttctgaatgcatcactccaaatggaagcattcccaatgacaaaccctttcaaaatgtaaacaagatcacatatggggcatgtcccaggtatgttaaacaaaacactctgaaattggcaacagggatgcggaatgtaccagagaaacaaactagaggcatattcggcgcaatagcaggtttcatagaaaatggttgggagggaatggtagacggttggtacggtttcaggcatcaaaattctgagggcacaggacaagcagcagatcttaaaagcactcaagcagcaatcgaccaaatcaacgggaaactgaataggttaatcgagaaaacgaacgagaaattccatcaaatcgaaaaggaattctcagaagtagaagggagaattcaggacctcgagaaatatgttgaagacactaaaatagatctctggtcttacaacgcggagcttcttgtcgccctggagaaccaacatacaattgatctgactgactcagaaatgaacaaactgtttgaaaaaacaaggaagcaactgagggaaaatgctgaggacatgggcaatggttgcttcaaaatataccacaaatgtgacaatgcttgcataggatcaatcagaaatggaacttatgaccatgatgtatacagagacgaagcattgaacaaccggtttcagatcaaaggtgttgagctgaagtcaggatacaaagactggatcctatggatttcctttgccatatcatgctttttgctttgtgttgttttgctggggttcatcatgtgggcctgccaaaaaggcaacattaggtgcaacatttgcatttga

SEQ ID NO: 31270 - RNA, 1701 nt, synthetic construct
  misc_feature 1..1701: note = hemagglutinin__InfluenzaA__ABD77598
  source 1..1701: mol_type = other RNA
atgaagactatcattgctttgagctacattttatgtctggttttcgctcaaaaacttcccgtaaatgacaacagcacggcaacgctgtgcctgggacaccatgcagtgccaaacggaacgctagtgaaaacaatcacgaatgaccacattgaagtgactaatgctactgagctggttcagagttccccaacaggtagaatatgcgacagtcctcaccaaatccttgatggagaaaactgcacactaatagatgctctattgggagaccctcattgtgatggcttccaaaataaggaatgggacctttttgttgaacgcagcacagcctacagcaactgttacccttatgatgtgccggattatgcctcccttaggtcactagttgcctcatccggcacactggagtttaacaatgaaagcttcaattggactggagtcgctcagaatggaacaagctctgcttgcaaaaggagatctattaaaagtttctttagtagattgaattggttgcaccaattaaaatacaaatatccagcactgaacgtgactatgccaaacaatgaaaaatttgacaaattgtacatttggggggttcaccacccgagtacggacagtgaccaaatcagcctatatgctcaagcatcagggagagtcacagtctctaccaaaagaagccaacaaactgtaatcccgaatatcggatctagaccctgggtaaggggtgtctccagcagaataagcatctattggacaatagtaaaaccgggagacatacttttgattaacagcacagggaatctaattgctcctcggggttacttcaaaatacgaagtgggaaaagctcaataatgaggtcaaatgcacccattggcaaatgcaattctgaatgcatcactccaaatggaagcattcccaatgacaaaccatttcaaaatgtaaacaggatcacatatggggcctgtcccagatatgttaagcaaaacactctgaaattggcaacagggatgcggaatgtaccagagaaacaaactagaggcatattcggcgcaattgcaggtttcatagaaaatggttgggaaggaatggtggacggttggtacggtttcaggcatcaaaattctgagggcacaggacaagcagcagatcttaaaagcactcaagctgcaatcaaccaaatcaacgggaaactgaataggttaatcgagaaaacaaacgagaaattccatcaaattgaaaaagaattctcagaagtagaagggagaattcaggacctcgagaaatatgttgaggacactaaaatagatctctggtcgtacaacgcggagcttcttgttgccctggagaaccaacatacaattgatctaactgactcagaaatgaacaaactgtttgaaagaacaaggaagcaactgagggaaaatgctgaggatatgggcaatggttgtttcaaaatataccacaaatgtgacaatgcctgcatagggtcaatcagaaatggaacttatgaccatgatgtatacagagacgaagcattaaacaaccggttccagatcaaaggtgttgagctgaagtcaggatacaaagattggatcctatggatttcctttgccatatcatgttttttgctttgtgttgttttgctggggttcatcatgtgggcctgccaaaaaggcaacattaggtgcaacatttgcatttga

SEQ ID NO: 31271 - RNA, 1701 nt, synthetic construct
  misc_feature 1..1701: note = hemagglutinin__InfluenzaA__ABD77609
  source 1..1701: mol_type = other RNA
atgaagactatcattgctttgagctacattttatgtctggttttcgctcaaaaacttcccggaaatgacaacagcacggcaacgctgtgcctggggcaccatgcagtgccaaacggaacgctagtgaaaacaatcacgaatgaccaaattgaagtgactaatgctactgagctggttcagagttcctcaacaggtggaatatgcgacagtcctcaccaaatccttgatggagaaaactgcacactaatagatgctctattgggagaccctcattgtgatggcttccaaaataaggaatgggacctttttgttgaacgcagcaaagcctacagcaactgttacccttatgatgtgccggattatgcctcccttaggtcactagttgcctcatccggcacactggagtttaacaatgaaagcttcaattggactggagtcgctcagaatggaacaagctctgcttgcaaaaggagatctaataaaagtttctttagtagattgaattggttgcaccaattaaaatacaaatacccagcactgaacgtgactatgccaaacaatgaaaaatttgacaaattgtacatttggggggttcaccacccgagtacggacagtgaccaaatcagcctatatgctcaagcaccagggagagtcacagtctctaccaaaagaagccaacaaactgtaatcccgaatatcggatctagaccctgggtaaggggtgtctccagcagaataagcatctattggacaatagtaaaaccgggagacatacttttgattaactgcacagggaatctaattgctcctcggggttacttcaaaatacgaagtgggaaaagctcaataatgaggtcagatgcatccattggcaaatgcaattctgaatgcatcactccaaatggaagcattcccaatgacaaaccatttcaaaatgtaaacaggatcacatatggggcctgtcccagatatgttaagcaaaacactctgaaattggcaacagggatgcggaatgtaccagagaaacaaactagaggcatattcggcgcaatcgcgggtttcatagaaaatggttgggagggaatggtggacggttggtacggtttcaggcatcaaaattctgagggcacaggacaagcagcagatctcaaaagcactcaagcagcaatcaaccaaatcaacgggaaactgaataggttaatcgagaaaacgaacgagaaattccatcaaattgaaaaagaattctcagaagtggaagggagaattcaggacctcgagaaatatgttgaggacactaaaatagatctctggtcgtacaacgcggagcttcttgttgccctggagaaccagcatacaattgatctaactgactcagaaatgaacaaactgtttgaaagaacaaagaagcaactgagggaaaatgctgaggatatgggcaatggttgtttcaaaatataccacaaatgtgacaatgcctgcatagggtcaatcagaaatgggacttatgaccatgatgtatacagagacgaagcattaaacaaccggttccagatcaaaggtgttgagttgaagtcaggatacaaagattggatcctatggatttcctttgccatatcatgttttttgctttgtgttgtcttgctggggttcatcatgtgggcctgccaaaaaggcaacattaggtgcaacatttgcatttga

SEQ ID NO: 31272 - RNA, 1701 nt, synthetic construct
  misc_feature 1..1701: note = hemagglutinin__InfluenzaA__ABD77620
  source 1..1701: mol_type = other RNA
atgaagactatcattgctttgagctacattttatgtctggttttcgctcaaaaacttcccggaaatgacaacagcacggcaacgctgtgcctggggcaccatgcagtgccaaacggaacgctagtgaaaacaatcacgaatgaccaaattgaagtgactaatgctactgagctggttcagagttcctcaacaggtggaatatgcgacagtcctcaccaaatccttgatggagaaaactgcacactaatagatgctctattgggagaccctcattgtgatggcttccaaaataaggaatgggacctttttgttgaacgcagcaaagcctacagcaactgttacccttatgatgtgccggattatgcctcccttaggtcactagttgcctcatccggcacactggagtttaacaatgaaagcttcaattggactggagtcgctcagaatggaacaagctctgcttgcaaaaggagatctaataaaagtttctttagtagattgaattggttgcaccaattaaaatacaaatacccagcactgaacgtgactatgccaaacaatgaaaaatttgacaaattgtacatttggggggttcaccacccgagtacggacagtgaccaaatcagcctatatgctcaagcaccagggagagtcacagtctctaccaaaagaagccaacaaactgtaatcccgaatatcggatctagaccctgggtaaggggtgtctccagcagaataagcatctattggacaatagtaaaaccgggagacatacttttgattaactgcacagggaatctaattgctcctcggggttacttcaaaatacgaagtgggaaaagctcaataatgaggtcagatgcatccattggcaaatgcaattctgaatgcatcactccaaatggaagcattcccaatgacaaaccatttcaaaatgtaaacaggatcacatatggggcctgtcccagatatgttaagcaaaacactctgaaattggcaacagggatgcggaatgtaccagagaaacaaactagaggcatattcggcgcaatcgcgggtttcatagaaaatggttgggagggaatggtggacggttggtacggtttcaggcatcaaaattctgagggcacaggacaagcagcagatctcaaaagcactcaagcagcaatcaaccaaatcaacgggaaactgaataggttaatcgagaaaacgaacgagaaattccatcaaattgaaaaagaattctcagaggtggaagggagaattcaggacctcgagaaatatgttgaggacactaaaatagatctctggtcgtacaacgcggagcttcttgttgccctggagaaccagcatacaattgatctaactgactcagaaatgaacaaactgtttgaaagaacaaagaagcaactgagggaaaatgctgaggatatgggcaatggttgtttcaaaatataccacaaatgtgacaatgcctgcatagggtcaatcagaaatgggacttatgaccatgatgtatacagagacgaagcattaaacaaccggttccagatcaaaggtgttgagttgaagtcaggatacaaagattggatcctatggatttcctttgccatatcatgttttttgctttgtgttgtcttgctggggttcatcatgtgggcctgccaaaaaggcaacattaggtgcaacatttgcatttga

SEQ ID NO: 31273 - RNA, 1701 nt, synthetic construct; identical to SEQ ID NO: 31271
  misc_feature 1..1701: note = hemagglutinin__InfluenzaA__ABD77631
  source 1..1701: mol_type = other RNA

SEQ ID NO: 31274 - RNA, 1701 nt, synthetic construct; identical to SEQ ID NO: 31271
  misc_feature 1..1701: note = hemagglutinin__InfluenzaA__ABD77642
  source 1..1701: mol_type = other RNA

SEQ ID NO: 31275 - RNA, 1701 nt, synthetic construct; identical to SEQ ID NO: 31271
  misc_feature 1..1701: note = hemagglutinin__InfluenzaA__ABD77653
  source 1..1701: mol_type = other RNA

SEQ ID NO: 31276 - RNA, 1698 nt, synthetic construct; identical to SEQ ID NO: 31245
  misc_feature 1..1698: note = hemagglutinin__InfluenzaA__ABD77708
  source 1..1698: mol_type = other RNA

SEQ ID NO: 31277 - RNA, 1698 nt, synthetic construct
  misc_feature 1..1698: note = hemagglutinin__InfluenzaA__ABD77719
  source 1..1698: mol_type = other RNA
atgaaagtaaaactactggtcctgttatgtacatttacagctacatatgcagacacaatatgtatagggtaccatgccaacaactcaaccgacactgttgacacagtacttgagaagaatgtgacagtgacacactctgtcaacctacttgaggacagtcacaatggaaaactatgtctactaaaaggaatagccccactacaattgggtaattgcagcgttgccggatggatcttaggaaacccagaatgcgaattactgatttccaaggaatcatggtcctacattgtagaaacaccaaatcctgagaatggaacatgttacccagggtatttcgccgactatgaggaactgagggagcaattgagttcagtatcttcatttgagagattcgaaatattccccaaagaaagctcatggcccaaccacaccgtaaccggagtatcagcatcatgctcccataatgggaaaagcagtttttacagaaatttgctatggctgacggggaagaatggtttgtacccaaacctgagcaagtcctatgcaaacaacaaagagaaagaagtccttgtactatggggtgttcatcacccgcctaacataggggaccaaagggccctctatcatacagaaaatgcttatgtctctgtagtgtcttcacattatagcagaagattcaccccagaaatagccaaaagacccaaagtaagaaatcaggaaggaagaatcaactactactggactctgctggaacccggggatacaataatatttgaggcaaatggaaatctaatagcgccacggtatgctttcgcactgagtagaggctttggatcaggaatcatcacctcaaatgcaccaatggatgaatgtgatgcgaagtgtcaaacacctcagggagctataaacagcagtcttcctttccagaacgtacacccagtcacaataggagagtgtccaaagtatgtcaggagtgcaaaattaaggatggttacaggactaaggaacatcccatccattcaatccagaggtttgtttggagccattgccggtttcattgaaggggggtggactggaatggtagatgggtggtatggttatcatcatcagaatgagcaaggatctggctatgccgcagatcaaaaaagcacacaaaatgccattaacgggattacaaacaaggtgaattctgtaattgagaaaatgaacactcaattcacagctgtgggcaaagaattcaacaaattggaaagaaggatggaaaacttaaataaaaaagttgatgatgggtttctagacatttggacatataatgcagaattgttggttctactggaaaatgaaaggactttggatttccatgactccaatgtgaagaatctgtatgagaaagtaaaaagccaattaaagaataatgccaaagaaataggaaacgggtgttttgaattctatcacaagtgtaacaatgaatgcatggagagtgtgaaaaatggaacttatgactatccaaaatattccgaagaatcaaagttaaacagggagaaaattgatggagtgaaattggaatcaatgggagtctatcagattctggcgatctactcaactgtcgccagttccctggttcttttggtctccctgggggcaatcagcttctggatgtgttccaatgggtctttgcagtgtagaatatgcatctga

SEQ ID NO: 31278 - RNA, 1698 nt, synthetic construct
  misc_feature 1..1698: note = hemagglutinin__InfluenzaA__ABD77730
  source 1..1698: mol_type = other RNA
atgaaagtaaaactactggtcctgttatgtacatttacagctacatatgcagacacaatatgtatagggtaccatgccaacaactcaaccgacactgttgacacagtacttgagaagaatgtgacagtgacacactctgtcaacctacttgaggacagtcacaatggaaaactatgtctactaaaaggaatagccccactacaattgggtaattgcagcgttgccggatggatcttgggaaacccagaatgcgaattactgatttccaaggaatcatggtcctacattgtagaaacaccaaatcctgagaatggaacatgttacccagggtatttcgccgactatgaggaactgagggagcaattgagttcagtatcttcatttgagagattcgaaatattccccaaagaaagctcatggcccaaccacaccgtaaccggagtatcagcatcatgctcccataatgggaaaagcagtttttacagaaatttgctatggctgacggggaagaatggtttgtacccaaacctgagcaagtcctatgcaaacaacaaagagaaagaagtccttgtactatggggtgttcatcacccgcctaacataggggaccaaaaggccctctatcatacagaaaatgcttatgtctctgtagtgtcttcacattatagcagaagattcaccccagaaatagccaaaagacccaaagtaagagatcaggaaggaagaatcaactactactggactctgctggaacccggggatacaataatatttgaggcaaatggaaatctaatagcgccacggtatgctttcgcactgagtagaggctttggatcaggaatcatcacctcaaatgcaccaatggatgaatgtgatgcgaagtgtcaaacacctcagggagctataaacagcagtcttcctttccagaacgtacacccagtcacaataggagagtgtccaaagtatgtcaggagtgcaaaattaaggatggttacaggactaaggaacatcccatccattcaatccagaggtttgtttggagccattgccggtttcattgaaggggggtggactggaatggtagatgggtggtatggttatcatcatcagaatgagcaaggatctggctatgccgcagatcaaaaaagcacacaaaatgccattaacgggattacaaacaaggtgaattctgtaattgagaaaatgaacactcaattcacagctgtgggcaaagaattcaacaaattggaaagaaggatggaaaacttaaataaaaaagttgatgatgggtttctagacatttggacatataatgcagaattgttggttctactggaaaatgaaaggactttggatttccatgactccaatgtgaagaatctgtatgagaaagtaaaaagccaattaaagaataatgccaaagaaataggaaacgggtgttttgaattctatcacaagtgtaacaatgaatgcatggagagtgtgaaaaatggaacttatgactatccaaaatattccgaagaatcaaagttaaacagggagaaaattgatggagtgaaattggaatcaatgggagtctatcagattctggcgatctactcaactgtcgccagttccctggttcttttggtctccctgggggcaatcagcttctggatgtgttccaatgggtctttgcagtgtagaatatgcatctga

SEQ ID NO: 31279 - RNA, 1701 nt, synthetic construct; identical to SEQ ID NO: 31271
  misc_feature 1..1701: note = hemagglutinin__InfluenzaA__ABD77752
  source 1..1701: mol_type = other RNA

SEQ ID NO: 31280 - RNA, 1701 nt, synthetic construct; identical to SEQ ID NO: 31271
  misc_feature 1..1701: note = hemagglutinin__InfluenzaA__ABD77763
  source 1..1701: mol_type = other RNA

SEQ ID NO: 31281 - RNA, 1701 nt, synthetic construct
  misc_feature 1..1701: note = hemagglutinin__InfluenzaA__ABD77774
  source 1..1701: mol_type = other RNA
atgaagactatcattgctttgagctacattttatgtctggttttcgctcaaaaacttcctgtaaatgacaacagcacggcaacgctgtgcctgggacaccatgcagtgccaaacggaacgctagtgaaaacaatcacgaatgacaacattgaagtgactaatgctactgagctggttcagagttcctcaacaggtagaatatgcgacagtcctcaccaaatccttgatggagaaaactgcacactaatagatgctctattgggagaccctcattgtgatggcttccaaaataaggaatgggacctttttgttgaacgcagcacagcctacagcaactgttacccttatgatgtgccggattatgcctcccttaggtcactagttgcctcatccggcacactggagtttaacaacgaaagcttcaattggactggagtcgatcagaatggaacaagctctgcttgcaaaaggagatctaataaaagtttctttagtagattgaattggttgcaccaattaaaatacaaatatccagcactgaacgtgactatgccaaacaatgaaaaatttgacaaattgtacatttggggggttcaccacccgagtacggacagtgaccaaatcagcctatatgctcaagcatcagggagagtcacagtctctaccaaaagaagccaacaaactgtaatcccgaatatcggatctagaccctgggtaaggggtgtctccagcagaataagcatctattggacaatagtaaaaccgggagacatacttttgattaacagcacagggaatctaattgctcctcggggttacttcaaaatacgaagtgggaaaagctcaataatgaggtcaaatgcacccattggaaaatgcaattctgaatgcatcactcaaaatggaagcattcccaatgacaaaccatttcaaaatgtaaacaggatcacatatggggcctgtcccagatatgttaaacaaaacactctgaaattggcaacagggatgcggaatgtaccagagaaacaaactagaggcatattcggcgcaatcgcaggtttcatagaaaatggttgggagggaatggtggacggttggtacggtttcaggcatcaaaattctgagggcacaggacaagcagcagatcttaaaagcactcaagcagcaatcaaccaaatcaacgggaaactgaataggttaatcgagaaaacaaacgagaaattccatcaaattgaaaaagaattctcagaagtagaaggaagaatccaggacctcgagaaatatgttgaggacactaaaatagatctctggtcgtacaacgcggagcttcttgttgccctggagaaccaacatacaattgatctaactgactcagaaatgaacaaactgttcgaaagaacaaggaagcaactgagggaaaatgctgaggatatgggcaatggttgtttcaaaatataccacaaatgtgacaatgcctgcatagggtcaatcagaaatggaacttatgaccatgatgtatacagagacgaagcattaaacaaccggttccagatcaaaggtgttgagctgaagtcaggatacaaagattggatcctatggatttcctttgccatatcatgttttttgctttgtgttgttttgctggggttcatcatgtgggcctgccaaaaaggcaacattaggtgcaacatttgcatttaa

SEQ ID NO: 31282 - RNA, 1701 nt, synthetic construct
  misc_feature 1..1701: note = hemagglutinin__InfluenzaA__ABD77785
  source 1..1701: mol_type = other RNA
atgaagactatcattgctttgagctacattttatgtctggttttcgctcaaaaacttcccgtaaatgacaacagcacggcaacgctgtgcctgggacaccatgcagtgccaaacggaacgctagtgaaaacaatcacgaatgacaacattgaagtgactaatgctactgagctggttcagagttcctcaacaggtagaatatgcgacagtcctcaccaaatccttgatggagaaaactgcacactaatagatgctctattgggagaccctcattgtgatggcttccaaaataaggaatgggacctttttgttgaacgcagcacagcctacagcaactgttacccttatgatgtgccggattatgcctcccttaggtcactagttgcctcatccggcacactggagtttaacaacgaaagcttcaattggactggagtcgatcagaatggaacaagctctgcttgcaaaaggagatctaataaaagtttctttagtagattgaattggttgcaccaattaaaatacaaatatccagcactgaacgtgactatgccaaacaatgaaaaatttgacaaattgtacatttggggggttcaccacccgagtacggacagtgaccaaatcagcctatatgctcaagcatcagggagagtcacagtctctaccaaaagaagccaacaaactgtaatcccgaatatcggatctagaccctgggtaaggggtgtctccagcagaataagcatctattggacaatagtaaaaccgggagacatacttttgattaacagcacagggaatctaattgctcctcggggttacttcaaaatacgaagtgggaaaagctcaataatgaggtcaaatgcacccattggaaaatgcaattctgaatgcatcactcaaaatggaagcattcccaatgacaaaccatttcaaaatgtaaacaggatcacatatggggcctgtcccagatatgttaaacaaaacactctgaaattggcaacagggatgcggaatgtaccagagaaacaaactagaggcatattcggcgcaatcgcaggtttcatagaaaatggttgggagggaatggtggacggttggtacggtttcaggcatcaaaattctgagggcacaggacaagcagcagatcttaaaagcactcaagcagcaatcaaccaaatcaacgggaaactgaataggttaatcgagaaaacaaacgagaaattccatcaaattgaaaaagaattctcagaagtagaaggaagaatccaggacctcgagaaatatgttgaggacactaaaatagatctctggtcgtacaacgcggagcttcttgttgccctggagaaccaacatacaattgatctaactgactcagaaatgaacaaactgttcgaaagaacaaggaagcaactgagggaaaatgctgaggatatgggcaatggttgtttcaaaatataccacaaatgtgacaatgcctgcatagggtcaatcagaaatggaacttatgaccatgatgtatacagagacgaagcattaaacaaccggttccagatcaaaggtgttgagctgaagtcaggatacaaagattggatcctatggatttcctttgccatatcatgttttttgctttgtgttgttttgctggggttcatcatgtgggcctgccaaaaaggcaacattaggtgcaacatttgcatttaa

SEQ ID NO: 31283 - RNA, 1701 nt, synthetic construct
  misc_feature 1..1701: note = hemagglutinin__InfluenzaA__ABD77807
  source 1..1701: mol_type = other RNA
atgaaagcaaaactactgatcctgttatgtgcactttcagctacagatgcagacacaatatgtataggctaccatgcgaacaactcaaccgacactgttgacacagtactcgaaaagaatgtgacagtgacacactctgtaaacctactcgaagacagccacaacgggaaattatgcagattaaaaggaatagccccactacaattggggaaatgtaacattgccggatggatcttaggaaacccagaatgcgaatcactgctttctaagagatcatggtcctacattgcagaaacaccaaactctgagaatggaacatgttacccaggagatttcgccgactatgaggaactgagggagcaattgagctcagtgtcatcattcgagagattcgaaatattccccaaggaaagatcatggcccaaacacaacataaccagaggagtaacggcagcatgctcccatgcggggaaaagcagtttttacaaaaatttgctctggctgacggagacaaatggctcatacccaaagctgagcaagtcctatgtgaacaataaagagaaagaagtccttgtgctatggggtgttcatcacccgtctaacatagaggatcaaaagaccctctatcggaaagaaaatgcttatgtctctgtagtgtcttcaaattataacaggagattcaccccggaaatagcagaaagacccaaagtaagaggtcaagcagggagaatgaactattactggactttgctagaacccggagacacaataatatttgaggcaaatggaaatctaatagcgccatggtatgctttcgcactgagtagaggctttggatcaggaatcatcacctcaaacgcatcaatggatgaatgtgacacgaagtgtcaaacaccccagggagctataaacagtagtctcccttttcagaatatacacccagtcacaataggagagtgcccaaaatacgtcaagagtaccaaattgaggatggttacaggattaaggaacatcccatccattcaatccagaggtctgtttggagccattgccggtttcattgaggggggatggactggaatgatagatggatggtatggttaccatcatcagaatgaacagggatctggctatgctgcggatcaaaaaagcacacaaaatgcaattaacgggattacaaataaggtgaactctgttatcgagaaaatgaacactcaattcacagctgtgggtaaagaattcaacaaattagaaaaaagaatggaaaacttaaataaaaaagttgatgatggatttctggacatttggacatataatgcagaattgttggttctactggaaaatgaaaggactttggatttccatgactcaaatgtgaagaatctgtatgagaaagtaaaaaaccaattaaggaataatgcaaaggaaataggaaacgggtgttttgagttctaccacaagtgtaacaatgaatgcatggaaagtgtaaaaaatggaacttatgattacccaaaatattcagaggaatcaaagttaaacagggaaaaaattgatggagtgaaattggaatcaatgggggtctatcagattctggcgatctactcaactgtcgccagttcactggtgcttctggtctccctgggggcaatcagcttctggatgtgttctaatgggtctttgcaatgcagaatatgcatctga

SEQ ID NO: 31284 - RNA, 1701 nt, synthetic construct
  misc_feature 1..1701: note = hemagglutinin__InfluenzaA__ABD77818
  source 1..1701: mol_type = other RNA
atgaaagcaaaactgctggtcctgttatgtgcactttcagctacagatgcagacacaatatgtataggctaccatgcgaacaactcaaccgatactgttgacacagtactcgaaaagaacgtgacagtgacacactctgtcaacctacttgaggacagtcacaacggaaaactatgcagactaaaaggaatagccccactacaattggggaaatgcagcattgccggatggatcttaggaaacccagaatgtgaatcactgttttctaagaaatcatggtcctacattgcagaaacaccaaactccgagaatgggacatgttacccagggtatttcgccgactatgaggaactgagggagcaattgagttcagtatcatcattcgagagattcgaaatattccccaaggaaagttcatggcccaaacacaccgtaaccagaggagtaacggcttcatgctcccataaggggaaaagcagtttttacagaaatttgctatggctgacggagaaaaatggctcgtacccaaatctgagcaagtcctatgtgaacaacaaagagaaagaagtccttgtactatggggtgttcatcacccgtcaaacatagaggaccaaaagaccatctatcgtaaagaaaatgcttatgtctctgtagtgtcttcacattataacagaagattcaccccagaaatagcaaaacgacccaaagtaagagatcaagaagggagaattaactactactggactctgctggaacccggggacacaataatatttgaggcaaatggaaatctaatagcgccatggtatgctttcgcactgagtagaggctttgggtcaggaatcatcacctcaaacgcatcaatggatgaatgtgacgcgaagtgtcaaacaccccagggagctataaacagtagtcttcctttccagaatgtacacccagtcacaataggagagtgcccaaaatacgtcaggagtacaaaattaaggatggtcacaggactaaggaacattccatccattcaatccagaggtttgtttggagccattgctggtttcattgaagggggatggactggaatgatagatggatggtatggttatcatcatcagaatgaacagggatccggctatgctgcagatcaaaaaagcacacaaaatgccattaacgggattacaaacaaggtgaactctgttatcgagaaaatgaacactcaattcacagctgtaggtaaagaattcaacaaattagaaaaaaggatggaaaacttaaataaaaaagttgatgatgggtttctggacatttggacatataatgcagaattgttggttctactggaaaatgaaaggactttggattttcatgactcaaatgtgaagaacctgtatgagaaggtaaaaagccaattaaagagtaatgccaaagaaataggaaacgggtgttttgaattctaccacaagtgtaacaatgaatgcatggaaagtgtaaaaaatggaacttatgactatccaaaatattcagaggaatcaaagttaaacagggaaaaaattgatggagtgaaattggaatcaatgggagtctatcagattctggcgatctactcaactgtcgccagttcactggtgcttttggtctccctgggggcaatcagcttctggatgtgttctaatgggtctttgcagtgcagaatatgcatctga

SEQ ID NO: 31285 - RNA, 1701 nt, synthetic construct
  misc_feature 1..1701: note = hemagglutinin__InfluenzaA__ABD77829
  source 1..1701: mol_type = other RNA
atgaagactatcattgctttgagctacattttatatctggttttcgctcaaaaacttcccggaaatgacaacagcacggcaacgctgtgcctgggacaccatgcagtgccaaacggaacactagtgaaaacaatcacgaatgaccaaattgaagtgactaatgctactgagctggttcagagttcctcaacaggtagactatgcgacagtcctcaccgaatccttgacgggaaaaactgcacactgatagatgctctattgggagaccctcattgtgatggcttccaaaataaggaatgggacctttttgttgaacgcagcaaagcttacagcgactgttacccttatgatgtgccggattatgcttcccttaggtcactagttgcctcatccggcaccctggagtttaccaatgaaggcttcaattggactggagtcgctcagaatggaacaagctatgcttgcaaaaggggatctgttaaaagtttctttagtagattgaattggttgcacaaattagaatacaaatatccagcactgaacgtgactatgccaaacaatgacaaatttgacaaattgtacatttggggggttcaccacccgagtacggacagtgaccaaaccagcctatatgttcaagcatcagggagagtcacagtctctaccaaaagaagccaacaaactgtaatcccgaatatcgggtctagaccctgggtaaggggggtctccagcagaataagcatctattggacaatagtaaaaccgggagacatacttttgattaatagcacagggaatctaattgcccctcggggttacttcaaaatacgaagtgggaaaagctcaataatgaggtcagatgcacccattggcaactgcaattctgaatgcatcactccaaatggaagcattcccaatgacaaaccttttcaaaatgtaaacaggatcacatatggggcctgtcccagatatgttaagcaaaacactctgaaattggcaacagggatgcggaatgtaccagagaaacaaactagaggcatattcggcgcaatcgcaggtttcatagaaaatggttgggagggaatggtagacggttggtacggtttcaggcatcaaaattctgagggcacaggacaagcagcagatcttaaaagcactcaagcagcaatcaaccaaatcaatgggaaactgaataggttaatcgagaaaacgaacgagaaattccatcaaatcgaaaaagaattctcagaagtagaagggagaattcaggacctcgagaaatatgttgaagacactaaaatagatctctggtcttacaacgcagagcttcttgttgccctggagaaccaacatacaattgatctaactgactcagaaatgaacaaactgtttgaaagaacaaggaagcaactgagggaaaatgctgaggacatgggcaatggttgcttcaaaatataccacaaatgtgacaatgcctgcataggttcaatcagaaatggaacttatgaccatgatgtatacagagacgaagcattaaacaaccggttccagatcaaaggtgttgagctgaagtcaggatacaaagattggatcctatggatttcctttgccatatcatgctttttgctttgtgttgttttgctggggttcatcatgtgggcctgccaaaaaggcaacattaggtgcaacatttgcatttga

SEQ ID NO: 31286 - RNA, 1701 nt, synthetic construct
  misc_feature 1..1701: note = hemagglutinin__InfluenzaA__ABD77862
  source 1..1701: mol_type = other RNA
atgaagactatcattgctttgagctacattttatgtctggttttcgctcaaaaacttcccggaaatgacaacagcacggcaacgctgtgcctgggacaccatgcagtgccaaacggaacgctagtgaaaacaatcacgaatgaccaaattgaagtgactaatgctactgagctggttcagagttcctcaacaggtagaatatgcgacagtcctcaccgaatccttgatggaaaaaactgcacactgatagatgctctattgggagaccctcattgtgatggcttccaaaataaggaatgggacctttttgttgaacgcagcaaagcttacagcgactgttacccttatgatgtgccggattatgcttcccttaggtcactagttgcctcatccggcaccctggagtttaccaatgaaggcttcaattggactggagtcgctcaggatggaacaagctatgcttgcaaaaggggatctgttaaaagtttctttagtagattgaattggttgcacaaattagaatacaaatatccagcactgaacgtgactatgccaaacaatgacaaatttgacaaattgtacatttggggggttcaccacccgagtacggacagtgaccaaaccagcatatatgttcaagcatcagggagagtcacagtctctaccaaaagaagccaacaaactgtaatcccgaatatcgggtctagaccctgggtaaggggggtctccagcagaataagcatctattggacaatagtaaaaccgggagacatacttttgattaatagcacagggaatctaattgcccctcggggttacttcaaaatacgaagtgggaaaagctcaataatgaggtcagatgcacccattggcaactgcaattctgaatgcatcactccaaatggaagcattcccaatgacaaaccttttcagaatgtaaacaggatcacatatggggcctgtcccagatatgttaagcaaaacactctgaaattggcaacagggatgcggaatgtaccagagaaacaaactagaggcatattcggcgcaatcgcaggtttcatagaaaatggttgggagggaatggtagacggttggtacggtttcaggcatcaaaattctgagggcacaggacaagcagcagatcttaaaagcactcaagcagcaatcaaccaaatcaatgggaaactgaataggttaatcgagaaaacgaacgagaaattccatcaaatcgaaaaagaattctcagaagtagaagggagaattcaggacctcgagaaatatgttgaagacactaaaatagatctctggtcttacaacgcagagcttcttgttgccctggagaaccaacatacaattgatctaactgactcagaaatgaacaaactgtttgaaagaacaaggaagcaactgagggaaaatgctgaggacatgggcaatggttgcttcaaaatataccacaaatgtgacaatgcctgcatagggtcaatcagaaatggaacttatgaccatgatgtatacagagacgaagcattaaacaaccggttccagatcaaaggtgttgagctgaagtcaggatacaaagattggatcctatggatttcctttgccatatcatgctttttgctttgtgttgttttgctggggttcatcatgtgggcctgccaaaaaggcaacattaggtgcaacatttgcatttga

SEQ ID NO: 31287 - RNA, 1701 nt, synthetic construct
  misc_feature 1..1701: note = hemagglutinin__InfluenzaA__ABD77884
  source 1..1701: mol_type = other RNA
atgaagactattattgctttgagctacattttatgtctggttttcgctcaaaaacttcccggaaatgacaacagcacggcaacgctgtgcctgggacaccatgcagtgccaaacggaacgctagtgaaaacaatcacgaatgaccaaattgaagtgactaatgctactgagcttgttcagggttcctcaacaggtagaatatgcgacagtcctcaccgaatccttgatggaaaaaactgcacactgatagatgctctattgggagaccctcattgtgatggcttccaaaataaggaatgggacctttttgttgaacgcagcaaagcttacagcaactgttacccttatgatgtgccggattatgcctcccttaggtcactagttgcctcatccggcaccctggagtttaacaatgaaagcttcaattggactggagtcgcccagaatggaacaagctatgcttgcaaaaggagatctgttaaaagtttctttagtagattgaattggttgcacaaattagaatacaaatatccagcactgaacgtgactatgccaaacaatgacaaatttgacaaattgtacatttggggggttcaccacccgagtacggacagtgaccaaaccagcctatatgttcaagcatcagggagagtcacagtctctaccaaaagaagccaacaaactgtaatcccgaatatcggatctagaccctgggtaaggggtgtctccagcagaataagcatatattggacaatagtaaaaccgggagacatacttttgattaacagcacagggaatctaattgctcctcggggttacttcaaaatacgaagtgggaaaagctcaataatgaggtcagatgcacccattgacaactgcaattctgaatgcatcactccaaatggaagcattcccaatgacaaaccatttcaaaatgtaaacaggatcacatatggggcctgtcccagatatgttaagcaaaacactctgaaattggcaacagggatgcggaatgtaccagagaaacaaactagaggcatattcggcgcaatcgcaggtttcatagaaaatggttgggagggaatggtagacggttggtacggtttcaggcatcaaaattctgagggcacaggacaagcagcagatcttaaaagcactcaagcagcaatcaaccaaatcaacgggaaactgaataggttaatcgagaaaacgaacgagaaattccatcaaattgaaaaagaattctcagaagtagaagggagaattcaggacctagagaaatatgttgaagacactaaaatagatctctggtcgtacaacgcggagcttcttgttgccctggagaaccaacatacaattgatctaactgactcagaaatgaacaaactgtttgaaagaacaaggaagcaactgagggaaaatgctgaggacatgggcaatggttgcttcaaaatataccacaaatgtgacaatgcctgcatagggtcaatcagaaatggaacttatgaccatgatgtatacagagacgaagcattaaacaaccggttccagatcaaaggtgttgagctgaagtcaggatacaaagattggatcctatggatttcctttgccatatcatgttttttgctttgtgttgttttgctggggttcatcatgtgggcctgccaaaaaggcaacattaggtgcaacatttgcatttga

SEQ ID NO: 31288 - RNA, 1701 nt, synthetic construct
  misc_feature 1..1701: note = hemagglutinin__InfluenzaA__ABD77895
  source 1..1701: mol_type = other RNA
atgaagactattattgctttgagctacattttatgtctggttttcgctcaaaaacttcccggaaatgacaacagcacggcaacgctgtgcctgggacaccatgcagtgccaaacggaacgctagtgaaaacaatcacgaatgaccaaattgaagtgactaatgctactgagctggttcagagttcctcaacaggtagaatatgcgacagtcctcaccgaatccttgatggaaaaaactgcacactgatagatgctctattgggagaccctcattgtgatggcttccaaaataaggaatgggacctttttgttgaacgcagcaaagcttacagcaactgttacccttatgatgtgccggattatgcctcccttaggtcactagttgcctcatccggcaccctggagtttaacaatgaaagcttcaattggactggagtcgcccagaatggaacaagctatgcttgcaaaaggagatctgttaaaagtttctttagtagattgaattggttgcacaaattagaatacaaatatccagcactgaacgtgactatgccaaacaatgacaaatttgacaaattgtacatttggggggttcaccacccgagtacggacagtgaccaaaccagcctatatgttcaagcatcagggagagtcacagtctctaccaaaagaagccaacaaactgtaatcccgaatatcggatctagaccctgggtaaggggtatctccagcagaataagcatatattggacaatagtaaaaccgggagacatacttttgattaacagcacagggaatctaattgctcctcggggttacttcaaaatacgaagtgggaaaagctcaataatgaggtcagatgcacccattgacaactgcaattctgaatgcatcactccaaatggaagcattcccaatgacaaaccatttcaaaatgtaaacaggatcacatatggggcctgtcccagatatgttaagcaaaacactctgaaattggcaacagggatgcggaatgtaccagagaaacaaactagaggcatattcggcgcaatcgcaggtttcatagaaaatggttgggagggaatggtagacggttggtacggtttcaggcatcaaaattctgagggcacaggacaagcagcagatcttaaaagcactcaagcagcaatcaaccaaatcagcgggaaactgaataggttaatcgagaaaacgaacgagaaattccatcaaatcgaaaaagaattctcagaagtagaagggagaattcaggacctcgagaaatatgttgaagacactaaaatagatctctggtcgtacaacgcggagcttcttgttgccctggagaaccaacatacaattgatctaactgactcagaaatgaacaaactgtttgaaagaacaaggaagcaactgagggaaaatgctgaggacatgggcaatggttgcttcaaaatataccacaaatgtgacaatgcctgcatagggtcaatcagaaatggaacttatgaccatgatgtatacagagacgaagcattaaacaaccggttccagatcaaaggtgttgagctgaagtcaggatacaaagattggatcctatggatttcctttgccatatcatgttttttgctttgtgttgttttgctggggttcatcatgtgggcctgccaaaaaggcaacattaggtgcaacatttgcatttga

SEQ ID NO: 31289 - RNA, 1701 nt, synthetic construct
  misc_feature 1..1701: note = hemagglutinin__InfluenzaA__ABD77906
  source 1..1701: mol_type = other RNA
atgaagactattattgctttgagctacattttatgtctggttttcgctcaaaaacttcccggaaatgacaacagcacggcaacgctgtgcctgggacaccatgcagtgccaaacggaacgctagtgaaaacaatcacgaatgaccaaattgaagtgactaatgctactgagcttgttcagggttcctcaacaggtagaatatgcgacagtcctcaccgaatccttgatggaaaaaactgcacactgatagatgctctattgggagaccctcattgtgatggcttccaaaataaggaatgggacctttttgttgaacgcagcaaagcttacagcaactgttacccttatgatgtgccggattatgcctcccttaggtcactagttgcctcatccggcaccctggagtttaacaatgaaagcttcaattggactggagtcgcccagaatggaacaagctatgcttgcaaaaggagatctgttaaaagtttctttagtagattgaattggttgcacaaattagaatacaaatatccagcactgaacgtgactatgccaaacaatgacaaatttgacaaattgtacatttggggggttcaccacccgagtacggacagtgaccaaaccagcctatatgttcaagcatcagggagagtcacagtctctaccaaaagaagccaacaaactgtaatcccgaatatcggatctagaccctgggtaaggggtgtctccagcagaataagcatatattggacaatagtaaaaccgggagacatacttttgattaacagcacagggaatctaattgctcctcggggttacttcaaaatacgaagtgggaaaagctcaataatgaggtcagatgcacccattgacaactgcaattctgaatgcatcactccaaatggaagcattcccaatgacaaaccatttcaaaatgtaaacaggatcacatatggggcctgtcccagatatgttaagcaaaacactctgaaattggcaacagggatgcggaatgtaccagagaaacaaactagaggcatattcggcgcaatcgcaggtttcatagaaaatggttgggagggaatggtagacggttggtacggtttcaggcatcaaaattctgagggcacaggacaagcagcagatcttaaaagcactcaagcagcaatcaaccaaatcaacgggaaactgaataggttaatcgagaaaacgaacgagaaattccatcaaattgaaaaagaattctcagaagtagaagggagaattcaggacctcgagaaatatgttgaagacactaaaatagatctctggtcgtacaacgcggagcttcttgttgccctggagaaccaacatacaattgatctaactgactcagaaatgaacaaactgtttgaaagaacaaggaagcaactgagggaaaatgctgaggacatgggcaatggttgcttcaaaatatatcacaaatgtgacaatgcctgcatagggtcaatcagaaatggaacttatgaccatgatgtatacagagacgaagcattaaacaaccggttccagatcaaaggtgttgagctgaagtcaggatacaaagattggatcctatggatttcctttgccatatcatgttttttgctttgtgttgttttgctggggttcatcatgtgggcctgccaaaaaggcaacattaggtgcaacatttgcatttga

SEQ ID NO: 31290 - RNA, 1698 nt, synthetic construct
  misc_feature 1..1698: note = hemagglutinin__InfluenzaA__ABD77917
  source 1..1698: mol_type = other RNA
atgaaagtaaaactactggtcctgttatgtacatttacagctacatatgcagacacaatatgtatagggtaccatgccaacaactcaaccgacactgttgacacagtacttgagaagaatgtgacagtgacacactctgtcaacctacttgaggacagtcacaatggaaaactatgtctactaaaaggaatagccccactacaattgggtaattgcagcgttgccggatggatcttaggaaacccagaatgcgaattactgatttccaaggaatcatggtcctacattgtagaaacaccaaatcctgagaatggaacatgttacccagggtatttcgccgactatgaggaactgagggagcaattgagttcagtatcttcatttgagagattcgaaatattccccaaagaaagctcatggcccaaccacaccgtaaccggagtatcagcatcatgctcccataatgggaaaagcagtttttacagaaatttgctatggctgacggggaagaatggtttgtacccaaacctgagcaagtcctatgcaaacaacaaagagaaagaagtccttgtactatggggtgttcatcacccgcctaacatagggaaccaaaaggccctctatcatacagaaaatgcttatgtctctgtagtgtcttcacattatagcagaagattcaccccagaaatagccaaaagacccaaagtaagagatcaggaaggaagaatcaactactactggactctgctggaacccggggatacaataatatttgaggcaaatggaaatctaatagcgccacggtatgctttcgcactgagtagaggctttggatcaggaatcatcacctcaaatgcaccaatggatgaatgtgatgcgaagtgtcaaacacctcagggagctataaacagcagtcttcctttccagaacgtacacccagtcacaataggagagtgtccaaagtatgtcaggagtgcaaaattaaggatggttacaggactaaggaacatcccatccattcaatccagaggtttgtttggagccattgccggtttcattgaaggggggtggactggaatggtagatgggtggtatggttatcatcatcagaatgagcaaggatctggctatgccgcagatcaaaaaagcacacaaaatgccattaacgggattacaaacaaggtgaattctgtaattgagaaaatgaacactcaattcacagctgtgggcaaagaattcaacaaattggaaagaaggatggaaaacttaaataaaaaagttgatgatgggtttctagacatttggacatataatgcagaattgttggttctactggaaaatgaaaggactttggatttccatgactccaatgtgaagaatctgtatgagaaagtaaaaagccaattaaagaataatgccaaagaaataggaaacgggtgttttgaattctatcacaagtgtaacaatgaatgcatggagagtgtgaaaaatggaacttatgactatccaaaatattccgaagaatcaaagttaaacagggagaaaattgatggagtgaaattggaatcaatgggagtctatcagattctggcgatctactcaactgtcgccagttccctggttcttttggtctccctgggggcaatcagcttctggatgtgttccaatgggtctttgcagtgtagaatatgcatctga

SEQ ID NO: 31291 - RNA, 1698 nt, synthetic construct
  misc_feature 1..1698: note = hemagglutinin__InfluenzaA__ABD77928
  source 1..1698: mol_type = other RNA
atgaaagtaaaactactggtcctgttatgtacatttacagctacatatgcagacacaatatgtatagggtaccatgccaacaactcaaccgacactgttgacacagtacttgagaagaatgtgacagtgacacactctgtcaacctacttgaggacagtcacaatggaaaactatgtctactaaaaggaatagccccactacaattgggtaattgcagcgttgccggatggatcttaggaaacccagaatgcgaattactgatttccaaggaatcatggtcctacattgtagaaacaccaaatcctgagaatggaacatgttacccagggtatttcgccgactatgaggaactgagggagcaattgagttcagtatcttcatttgagagattcgaaatattccccaaagaaagctcatggcccaaccacaccgtaaccggagtatcagcatcatgctcccataatgggaaaagcagtttttacagaaatttgctatggctgacggggaagaatggtttgtacccaaacctgagcaagtcctatgcaaacaacaaagagaaaaaagtccttgtactatggggtgttcatcacccgcctaacataggggaccaaaaggccctctatcatacagaaaatgcttatgtctctgtagtgtcttcacattatagcagaagattcaccccagaaatagccaaaagacccaaagtaagagatcaggaaggaagaatcaactactactggactctgctggaacccggggatacaataatatttgaggcaaatggaaatctaatagcgccacggtatgctttcgcactgagtagaggctttggatcaggaatcatcacctcaaatgcaccaatggatgaatgtgatgcgaagtgtcaaacacctcagggagctataaacagcagtcttcctttccagaacgtacacccagtcacaataggagagtgtccaaagtatgtcaggagtgcaaaattaaggatggttacaggactaaggaacatcccatccattcaatccagaggtttgtttggagccattgccggtttcattgaaggggggtggactggaatggtagatgggtggtatggttatcatcatcagaatgagcaaggatctggctatgccgcagatcaaaaaagcacacaaaatgccattaacgggattacaaacaaggtgaattctgtaattgagaaaatgaacactcaattcacagctgtgggcaaagaattcaacaaattggaaagaaggatggaaaacttaaataaaaaagttgatgatgggtttctagacatttggacatataatgcagaattgttggttctactggaaaatgaaaggactttggatttccatgactccaatgtgaagaatctgtatgagaaagtaaaaagccaattaaagaataatgccaaagaaataggaaacgggtgttttgaattctatcacaagtgtaacaatgaatgcatggagagtgtgaaaaatggaacttatgactatccaaaatattccgaagaatcaaagttaaacagggagaaaattgatggagtgaaattggaatcaatgggagtctatcagattctggcgatctactcaactgtcgccagttccctggttcttttggtctccctgggggcaatcagcttctggatgtgttccaatgggtctttgcagtgtagaatatgcatctga

SEQ ID NO: 31292 - RNA, 1698 nt, synthetic construct
  misc_feature 1..1698: note = hemagglutinin__InfluenzaA__ABD77939
  source 1..1698: mol_type = other RNA
atgaaagtaaaactactggtcctgttatgtacatttacagctacatatgcagacacaatatgtatagggtaccatgccaacaactcaaccgacactgttgacacagtgcttgagaagaatgtgacagtgacacactctgtcaacctacttgaggacagtcacaatggaaaactatgtctactaaaaggaatagccccactacaattgggtaattgcagcgttgccggatggatcttaggaaacccagaatgcgaattactgatttccaaggaatcatggtcctacattgtagaaacaccaaatcctgagaatggaacatgttacccagggtatttcgccgactatgaggaactgagggagcaattgagttcagtatcttcatttgagagattcgaaatattccccaaagaaagctcatggcccaaccacaccgtaaccggagtatcagcatcatgctcccataatgggaaaagcagtttttacagaaatttgctatggctgacggggaagaatggtttgtacccaaacctgagcaagtcctatgcaaacaacaaagagaaagaagtccttgtactatggggtgttcatcacccgcctaacataggggaccaaagggccctctatcatacagaaaatgcttatgtctctgtagtgtcttcacattatagcagaagattcaccccagaaatagccaaaagacccaaagtaagagatcaggaaggaagaatcaactactactggactctgctggaacccggggatacaataatatttgaggcaaatggaaatctaatagcgccacggtatgctttcgcactgagtagaggctttggatcaggaatcatcacctcaaatgcaccaatggatgaatgtgatgcgaagtgtcaaacacctcagggagctataaacagcagtcttcctttccagaacgtacacccagtcacaataggagagtgtccaaagtatgtcaggagtgcaaaattaaggatggttacaggactaaggaacatcccatccattcaatccagaggtttgtttggagccattgccggtttcattgaaggggggtggactggaatggtagatgggtggtatggttatcatcatcagaatgagcaaggatctggctatgccgcagatcaaaaaagcacacaaaatgccattaacgggattacaaacaaggtgaattctgtaattgagaaaatgaacactcaattcacagctgtgggcaaagaattcaacaaattggaaagaaggatggaaaacttaaataaaaaagttgatgatgggtttctagacatttggacatataatgcagaattgttggttctactggaaaatgaaaggactttggatttccatgactccaatgtgaagaatctgtatgagaaagtaaaaagccaattaaagaataatgccaaagaaataggaaacgggtgttttgaattctatcacaagtgtaacaatgaatgcatggagagtgtgaaaaatggaacttatgactatccaaaatattccgaagaatcaaagttaaacagggagaaaattgatggagtgaaattggaatcaatgggagtctatcagattctggcgatctactcaactgtcgccagttccctggttcttttggtctccctgggggcaatcagcttctggatgtgttccaatgggtctttgcagtgtagaatatgcatctga

SEQ ID NO: 31293 - RNA, 1698 nt, synthetic construct; identical to SEQ ID NO: 31246
  misc_feature 1..1698: note = hemagglutinin__InfluenzaA__ABD77950
  source 1..1698: mol_type = other RNA

SEQ ID NO: 31294 - RNA, 1698 nt, synthetic construct
  misc_feature 1..1698: note = hemagglutinin__InfluenzaA__ABD77961
  source 1..1698: mol_type = other RNA
atgaaagtaaaactactggtcctgttatgtacatttacagctacatatgcagacacaatatgtatagggtaccatgccaacaactcaaccgacactgttgacacagtacttgagaagaatgtgacagtgacacactctgtcaacctacttgaggacagtcacaatggaaaactatgtctactaaaaggaatagccccactacaattgggtaattgcagcgttgccggatggatcttaggaaacccagaatgcgaattactgatttccaaggaatcatggtcctacattgtagaaacaccaaatcctgagaatggaacatgttacccagggtatttcgccgactatgaggaactgagggagcaattgagttcagtatcttcatttgagagattcgaaatattccccaaagaaagctcatggcccaaccacaccgtaaccggagtatcagcatcatgctcccataatgggaaaagcagtttttacagaaatttgctatggctgacggggaagaatggtttgtacccaaacctgagcaagtcctatgcaaacaacaaagagaaagaagtccttgtactatggggtgttcatcacccgcccaacataggggaccaaaaggccctctatcatacagaaaatgcttatgtctctgtagtgtcttcacattatagcagaagattcaccccagaaatagccaaaagacccaaagtaagagatcaggaaggaagaatcaactactactggactctgctggaacccggggatacaataatatttgaggcaaatggaaatctaatagcgccacggtatgctttcgcactgagtagaggctttggatcaggaatcatcacctcaaatgcaccaatggatgaatgtgatgcgaagtgtcaaacacctcagggagctataaacagcagtcttcctttccagaacgtacacccagtcacaataggagagtgtccaaagtatgtcaggagtgcaaaattaaggatggttacaggactaaggaacatcccatccattcaatccagaggtttgtttggagccattgccggtttcattgaaggggggtggactggaatggtagatgggtggtatggttatcatcatcagaatgagcaaggatctggctatgccgcagatcaaaaaagcacacaaaatgccattaacgggattacaaacaaggtgaattctgtaattgagaaaatgaacactcaattcacagctgtgggcaaagaattcaacaaattggaaagaaggatggaaaacttaaataaaaaagttgatgatgggtttctagacatttggacatataatgcagaattgttggttctactggaaaatgaaaggactttggatttccatgactccaatgtgaagaatctgtatgagaaagtaaaaagccaattaaagaataatgccaaagaaataggaaacgggtgttttgaattctatcacaagtgtaacaatgaatgcatggagagtgtgaaaaatggaacttatgactatccaaaatattccgaagaatcaaagttaaacagggagaaaattgatggagtgaaattggaatcaatgggagtctatcagattctggcgatctactcaactgtcgccagttccctggttcttttggtctccctgggggcaatcagcttctggatgtgttccaatgggtctttgcagtgtagaatatgcatctga

SEQ ID NO: 31295 - RNA, 1698 nt, synthetic construct
  misc_feature 1..1698: note = hemagglutinin__InfluenzaA__ABD77983
  source 1..1698: mol_type = other RNA
atgaaagtaaaactactggtcctgttatgtacatttacagctacatatgcagacacaatatgtatagggtaccatgccaacaactcaaccgacactgttgacacagtacttgagaagaatgtgacagtgacacactctgtcaacctacttgaggacagtcacaatggaaaactatgtctactaaaaggaatagccccactacaattgggtaattgcagcgttgccggatggatcttaggaaacccagaatgcgaattactgatttccaaggaatcatggtcctacattgtagaaacaccaaatcctgagaatggaacatgttacccagggtatttcgccgactatgaggaactgagggagcaattgagttcagtatcttcatttgagagattcgaaatattccccaaagaaagctcatggcccaaccacaccgtaaccggagtatcagcatcatgctcccataatgggaaaagcagtttttacagaaatttgctatggctgacggggaagaatggtttgtacccaaacctgagcaagtcctatgcaaacaacaaagagaaagaagtccttgtactatggggtgttcatcacccgcctaacataggggaccaaagggccctctatcatacagaaaatgcttatgtctctgtagtgtcttcacattatagcagaagattcaccccagaaatagccaaaagacccaaagtaagagatcaggaaggaagaatcaactactactggactctgctggaacctggggatacaataatatttgaggcaaatggaaatctaatagcgccacggtatgctttcgcactgagtagaggctttggatcaggaatcatcacctcaaatgcaccaatggatgaatgtgatgcgaagtgtcaaacacctcagggagctataaacagcagtcttcctttccagaacgtacacccagtcacaataggagagtgtccaaagtatgtcaggagtgcaaaattaaggatggttacaggactaaggaacatcccatccattcaatccagaggtttgtttggagccattgccggtttcattgaaggggggtggactggaatggtagatgggtggtatggttatcatcatcagaatgagcaaggatctggctatgccgcagatcaaaaaagcacacaaaatgccattaacgggattacaaacaaggtgaattctgtaattgagaaaatgaacactcaattcacagctgtgggcaaagaattcaacaaattggaaagaaggatggaaaacttaaataaaaaagttgatgatgggtttctagacatttggacatataatgcagaattgttggttctactggaaaatgaaaggactttggatttccatgactccaatgtgaagaatctgtatgagaaagtaaaaagccaattaaagaataatgccaaagaaataggaaacgggtgttttgaattctatcacaagtgtaacaatgaatgcatggagagtgtgaaaaatggaacttatgactatccaaaatattccgaagaatcaaagttaaacagggagaaaattgatggagtgaaattggaatcaatgggagtctatcagattctggcgatctactcaactgtcgccagttccctggttcttttggtctccctgggggcaatcagcttctggatgtgttccaatgggtctttgcagtgtagaatatgcatctga

SEQ ID NO: 31296 - RNA, 1698 nt, synthetic construct; identical to SEQ ID NO: 31246
  misc_feature 1..1698: note = hemagglutinin__InfluenzaA__ABD77994
  source 1..1698: mol_type = other RNA

SEQ ID NO: 31297 - RNA, 1698 nt, synthetic construct; identical to SEQ ID NO: 31245
  misc_feature 1..1698: note = hemagglutinin__InfluenzaA__ABD78005
  source 1..1698: mol_type = other RNA

SEQ ID NO: 31298 - RNA, 1698 nt, synthetic construct; identical to SEQ ID NO: 31245
  misc_feature 1..1698: note = hemagglutinin__InfluenzaA__ABD78016
  source 1..1698: mol_type = other RNA

SEQ ID NO: 31299 - RNA, 1698 nt, synthetic construct; identical to SEQ ID NO: 31246
  misc_feature 1..1698: note = hemagglutinin__InfluenzaA__ABD78027
  source 1..1698: mol_type = other RNA

SEQ ID NO: 31300 - RNA, 1698 nt, synthetic construct
  misc_feature 1..1698: note = hemagglutinin__InfluenzaA__ABD78038
  source 1..1698: mol_type = other RNA
atgaaagtaaaactactggtcctgttatgtacatttacagctacatatgcagacacaatatgtatagggtaccatgccaacaactcaaccgacactgttgacacagtacttgagaagaatgtgacagtgacacactctgtcaacctacttgaggacagtcacaatggaaaactatgtctactaaaaggaatagccccactacaattgggtaattgcagcgttgccggatggatcttaggaaacccagaatgcgaattactgatttccaaggaatcatggtcctacattgtagaaacaccaaatcctgagaatggaacatgttacccagggtatttcgccgactatgaggaactgagggagcaattgagttcagtatcttcatttgagagattcgaaatattccccaaagaaagctcatggcccaaccacaccgtaaccggagtatcagcatcatgctcccataatgggaaaagcagtttttacagaaatttgctatggctgacggggaagaatggtttgtacccaaacctgagcaagtcctatgcaaacaacaaagagaaagaagtccttgtactatggggtgttcatcacccgcctaacataggggaccaaagggccctctatcatacagaaaatgcttatgtctctgtagtgtcatcacattatagcagaagattcaccccagaaatagccaaaagacccaaagtaagagatcaggaaggaagaatcaactactactggactctgctggaacccggggatacaataatatttgaggcaaatggaaatctaatagcgccacggtatgctttcgcactgagtagaggctttggatcaggaatcatcacctcaaatgcaccaatggatgaatgtgatgcgaagtgtcaaacacctcagggagctataaacagcagtcttcctttccagaacgtacacccagtcacaataggagagtgtccaaagtatgtcaggagtgcaaaattaaggatggttacaggactaaggaacatcccatccattcaatccagaggtttgtttggagccattgccggtttcattgaaggggggtggactggaatggtagatgggtggtatggttatcatcatcagaatgagcaaggatctggctatgccgcagatcaaaaaagcacacaaaatgccattaacgggattacaaacaaggtgaattctgtaattgagaaaatgaacactcaattcacagctgtgggcaaagaattcaacaaattggagagaaggatggaaaacttaaataaaaaagttgatgatgggtttctagacatttggacatataatgcagaattgttggttctactggaaaatgaaaggactttggatttccatgactccaatgtgaagaatctgtatgagaaagtaaaaagccaattaaagaataatgccaaagaaataggaaacgggtgttttgaattctatcacaagtgtaacaatgaatgcatggagagtgtgaaaaatggaacttatgactatccaaaatattccgaagaatcaaagttaaacagggagaaaattgatggagtgaaattggaatcaatgggagtctatcagattctggcgatctactcaactgtcgccagttccctggttcttttggtctccctgggggcaatcagcttctggatgtgttccaatgggtctttgcagtgtagaatatgcatctga

SEQ ID NO: 31301 - RNA, 1701 nt, synthetic construct; identical to SEQ ID NO: 31282
  misc_feature 1..1701: note = hemagglutinin__InfluenzaA__ABD78049
  source 1..1701: mol_type = other RNA

SEQ ID NO: 31302 - RNA, 1698 nt, synthetic construct
  misc_feature 1..1698: note = hemagglutinin__InfluenzaA__ABD78060
  source 1..1698: mol_type = other RNA
atgaaagcaaaactactggtcctgttatgtacatttacagctacatacgcagacacaatatgtataggctaccatgccaacaactcaaccgacactgttgacacagtacttgagaagaatgtgacagtgacacactctgtcaacctacttgaggacagtcacaatggaaaactatgtctactaaaaggaatagccccactacaattgggtaattgcagcgttgccggatggatcttaggaaacccagaatgcgaattactgatttccaaggaatcatggtcctacattgtagaaacaccaaatcccgagaatggaacatgttacccagggtatttcgccgactatgaggaactgagggagcaattgagttcagtatcttcatttgagagattcgaaatattccccaaaggaagctcatggcccaaccacaccgtaaccggagtatcagcatcatgctcccataatgggaaaagcagtttttacagaaatttgctatggctgacggggaagaatggtttgtacccaaacctgagcatgtcctatgtaaacaacaaagagaaagaagtccttgtgctatggggtgttcatcacccacctaacataggggaccaaagggccctctaccatacagaaaatgcttatgtctctgtagtgtcttcacattatagcagaagattcaccccagaaatagccaaaagacccaaagtaagagatcaggaaggaagaatcaactactactggactctgctggaacccggggacacaataatatttgaggcaaatggaaatctaatagcgccatggtatgctttcgcactgagtagaggctttggatcaggaatcatcacctcaaatgcaccaatggatgaatgtgatgcgaagtgtcaaacacctcagggagctataaacagtagtcttcctttccagaatgtacacccagttacaataggagagtgtccaaagtatgtcaggagtgcaaaattaaggatggttacaggactaaggaacatcccatccattcaatccagaggtttgtttggagccattgccggtttcattgaaggggggtggactggaatggtagatgggtggtatggttatcatcatcagaatgagcaaggatctggctatgctgcagatcaaaaaagcacacaaaatgccattaacgggattacaaacaaggtgaattctgtaattgagaaaatgaacactcaattcacagctgtgggcaaagaattcaacaaattagaaagaaggatggaaaacttaaataaaaaagttgatgatgggtttctagacatttggacatataatgcagaattgttggttctactggaaaatgaaaggactttggatttccatgactccaatgtgaagaatctgtatgagaaagtaaaaagccaattaaagaataatgccaaagaaataggaaacgggtgttttgaattctatcacaagtgtaacaatgaatgcatggaaagtgtgaaaaatggaacttatgactatccaaaatattccgaagaatcaaagttaaacagggagaaaattgatggagtaaaattggaatcaatgggagtatatcagattctggcgatctactcaactgtcgccagttccctggttcttttggtctccctgggggcaatcagcttctggatgtgttccaatgggtctttgcagtgtagaatatgcatctga

SEQ ID NO: 31303 - RNA, 1698 nt, synthetic construct
  misc_feature 1..1698: note = hemagglutinin__InfluenzaA__ABD78071
  source 1..1698: mol_type = other RNA
atgaaagcaaaactactggtcctgttatgtacatttacagctacatacgcagacacaatatgtataggctaccatgccaacaactcaaccgacactgttgacacagtacttgagaagaatgtgacagtgacacactctgtcaacctacttgaggacagtcacaatggaaaactatgtctactaaaaggaatagccccactacaattgggtaattgcagcgttgccggatggatcttaggaaacccagaatgcgaattactgatttccaaggaatcatggtcctacattgtagaaacaccaaatcccgagaatggaacatgttacccagggtatttcgccgactatgaggaactgagggagcaattgagttcagtatcttcatttgagagattcgaaatattccccaaaggaagctcatggcccaaccacaccgtgaccggagtatcagcatcatgctcccataatgggaaaagcagtttttacagaaatttgctatggctgacggggaagaatggtttgtacccaaacctgagcatgtcctatgtaaacaacaaagagaaagaagtccttgtgctatggggtgttcatcacccacctaacataggggaccaaagggccctctaccatacagaaaatgcttatgtctctgtagtgtcttcacattatagcagaagattcaccccagaaatagccaaaagacccaaagtaagagatcaggaaggaagaatcaactactactggactctgctggaacccggggacacaataatatttgaggcaaatggaaatctaatagcgccatggtatgctttcgcactgagtggaggctttggatcaggaatcatcacctcaaatgcaccaatgggtgaatgtgatgcgaagtgtcaaacacctcagggagctataaacagtagtcttcctttccagaatgtacacccagttacaataggagagtgtccaaagtatgtcaggagtgcaaaattaaggatggttacaggactaaggaacatcccatccattcaatccagaggtttgtttggagccattgccggtttcattgaaggggggtggactggaatggtagatgggtggtatggttatcatcatcagaatgagcaaggatctggctatgctgcagatcaaaaaagcacacaaaatgccattaacgggattacaaacaaggtgaattctgtaattgagaaaatgaacactcaattcacagctgtgggcaaagaattcaacaaattagaaagaaggatggaaaacttaaataaaaaagttgatgatgggtttctagacatttggacatataatgcagaattgttggttctactggaaaatgaaaggactttggatttccatgactccaatgtgaagaatctgtatgagaaagtaaaaagccaattaaagaataatgccaaagaaataggaaacgggtgttttgaattctatcacaagtgtaacaatgaatgcatggaaagtgtgaaaaatggaacttatgactatccaaaatattccgaagaatcaaagttaaacagggagaaaattgatggagtaaaattggaatcaatgggagtctatcagattctggcgatctactcaactgtcgccagttccctggttcttttggtctccctgggggcaatcagcttctggatgtgttccaatgggtctttgcagtgtagaatatgcatctga

SEQ ID NO: 31304 - RNA, 1698 nt, synthetic construct
  misc_feature 1..1698: note = hemagglutinin__InfluenzaA__ABD78093
  source 1..1698: mol_type = other RNA
atgaaagcaaaactactggtcctgttatgtacatttacagctacatacgcagacacaatatgtataggctaccatgccaacaactcaaccgacactgttgacacagtacttgagaagaatgtgacagtgacacactctgtcaacctacttgaggacagtcacaatggaaaactatgtctactaaaaggaatagccccactacaattgggtaattgcagcgttgccggatggatcttaggaaacccagaatgcgaattactgatttccaaggaatcatggtcctacattgtagaaacaccaaatcccgagaatggaacatgttacccagggtatttcgccgactatgaggaactgagggagcaattgagttcagtatcttcatttgagagattcgaaatattccccaaaggaagctcatggcccaaccacaccgtgaccggagtatcagcatcatgctcccataatgggaaaagcagtttttacagaaatttgctatggctgacggggaagaatggtttgtacccaaacctgagcatgtcctatgtaaacaacaaagagaaagaagtccttgtgctatggggtgttcatcacccacctaacataggggaccaaagggccctctaccatacagaaaatgcttatgtctctgtagtgtcttcacattatagcagaagattcaccccagaaatagccaaaagacccaaagtaagagatcaggaaggaagaatcaactactactggactctgctggaacccggggacacaataatatttgaggcaaatggaaatctaatagcgccatggtatgctttcgcactgagtagaggctttggatcaggaatcatcacctcaaatgcaccaatgggtgaatgtgatgcgaagtgtcaaacacctcagggagctataaacagtagtcttcctttccagaatgtacacccagttacaataggagagtgtccaaagtatgtcaggagtgcaaaattaaggatggttacaggactaaggaacatcccatccattcaatccagaggtttgtttggagccattgccggtttcattgaaggggggtggactggaatggtagatgggtggtatggttatcatcatcagaatgagcaaggatctggctatgctgcagatcaaaaaagcacacaaaatgccattaacgggattacaaacaaggtgaattctgtaattgagaaaatgaacactcaattcacagctgtgggcaaagaattcaacaaattagaaagaaggatggaaaacttaaataaaaaagttgatgatgggtttctagacatttggacatataatgcagaattgttggttctactggaaaatgaaaggactttggatttccatgactccaatgtgaagaatctgtatgagaaagtaaaaagccaattaaagaataatgccaaagaaataggaaacgggtgttttgaattctatcacaagtgtaacaatgaatgcatggaaagtgtgaaaaatggaacttatgactatccaaaatattccgaagaatcaaagttaaacagggagaaaattgatggagtaaaattggaatcaatgggagtctatcagattctggcgatctactcaactgtcgccagttccctggttcttttggtctccctgggggcaatcagcttctggatgtgttccaatgggtctttgcagtgtagaatatgcatctga

SEQ ID NO: 31305 - RNA, 1701 nt, synthetic construct
  misc_feature 1..1701: note = hemagglutinin__InfluenzaA__ABD78115
  source 1..1701: mol_type = other RNA
atgaagactatcattgctttgagctacattttatgtctggttttcgctcaaaaacttcccggaaatgacaacagcacggcaacgctgtgcctgggacaccatgcagtgccaaacggaacgctagtgaaaacaatcacgaatgaccaaattgaagtgactaatgctactgagctggttcagagttcctcaacaggtagaatatgcgacagtcctcaccgaatccttgatggaaaaaactgcacactgatagatgctctattgggagaccctcattgtgatggcttccaaaataaggaatgggacctttttgttgaacgcagcaaagcttacagcgactgttacccttatgatgtgccggattatgcttcccttaggtcactagttgcctcatccggcaccctggagtttaccaatgaaggcttcaattggactggagtcgctcaggatggaacaagctatgcttgcaaaaggggatctgttaaaagtttctttagtagattgaattggttgcacaaattagaatacaaatatccagcactgaacgtgactatgccaaacaatgacaaatttgacaaattgtacatttggggggttcaccacccgagtacggacagtgaccaaaccagcctatatgttcaagcatcagggagagtcacagtctctaccaaaagaagccaacaaactgtaatcccgaatatcgggtctagaccctgggtaaggggggtctccagcagaataagcatctattggacaatagtaaaaccgggagacatacttttgattaatagcacagggaatctaattgcccctcggggttacttcaaaatacgaagtgggaaaagctcaataatgaggtcagatgcacccattggcaactgcaattctgaatgcatcactccaaatggaagcattcccaatgacaaaccttttcagaatgtaaacaggatcacatatggggcctgtcccagatatgttaagcaaaacactctgaaattggcaacagggatgcggaatgtaccagagaaacaaactagaggcatattcggcgcaatcgcaggtttcatagaaaatggttgggagggaatggtagacggttggtacggtttcaggcatcaaaattctgagggcacaggacaagcagcagatcttaaaagcactcaagcagcaatcaaccaaatcaatgggaaactgaataggttaatcgagaaaacgaacgagaaattccatcaaatcgaaaaagaattctcagaagtagaagggagaattcaggacctcgagaaatatgttgaagacactaaaatagatctctggtcttacaacgcagagcttcttgttgccctggagaaccaacatacaattgatctaactgactcagaaatgaacaaactgtttgaaagaacaaggaagcaactgagggaaaatgctgaggacatgggcaatggttgcttcaaaatataccacaaatgtgacaatgcctgcatagggtcaatcagaaatggaacttatgaccatgatgtatacagaaacgaagcattaaacaaccggttccagatcaaaggtgttgagctgaagtcaggatacaaagattggatcctatggatttcctttgccatatcatgctttttgctttgtgttgttttgctggggttcatcatgtgggcctgccaaaaaggcaacattaggtgcaacatttgcatttga

SEQ ID NO: 31306 - RNA, 1701 nt, synthetic construct
  misc_feature 1..1701: note = hemagglutinin__InfluenzaA__ABD78126
  source 1..1701: mol_type = other RNA
atgaagactatcattgctttgagctacattttatgtctggttttcgctcaaaaacttcccggaaatgacaacagcacggcaacgctgtgcctgggacaccatgcagtgccaaacggaacgctagtgaaaacaatcacgaatgaccaaattgaagtgactaatgctactgagctggttcagagttcctcaacaggtagaatatgcgacagtcctcaccgaatccttgatggaaaaaactgcacactgatagatgctctattgggagaccctcattgtgatggcttccaaaataaggaatgggacctttttgttgaacgcagcaaagcttacagcgactgttacccttatgatgtgccggattatgcttcccttaggtcactagttgcctcatccggcaccctggagtttaccaatgaaggcttcaattggactggagtcgctcaggatggaacaagctatgcttgcaaaaggggatctgttaaaagtttctttagtagattgaattggttgcacaaattagaatacaaatatccagcactgaacgtgactatgccaaacaatgacaaatttgacaaattgtacatttggggggttcaccacccgagtacggacagtgaccaaaccagcctatatgttcaagcatcagggagagtcacagtctctaccaaaagaagccaacaaactgtaatcccgaatatcgggtctagaccctgggtaaggggggtctccagcataataagcatctattggacaatagtaaaaccgggagacatacttttgattaatagcacagggaatctaattgcccctcggggttacttcaaaatacgaagtgggaaaagctcaataatgaggtcagatgcacccattggcaactgcaattctgaatgcatcactccaaatggaagcattcccaatgacaaaccttttcagaatgtaaacaggatcacatatggggcctgtcccagatatgttaagcaaaacactctgaaattggcaacagggatgcggaatgtaccagagaaacaaactagaggcatattcggcgcaatcgcaggtttcatagaaaatggttgggagggaatggtagacggttggtacggtttcaggcatcaaaattctgagggcacaggacaagcagcagatcttaaaagcactcaagcagcaatcaaccaaatcaatgggaaactgaataggttaatcgagaaaacgaacgagaaattccatcaaatcgaaaaagaattctcagaagtagaagggagaattcaggacctcgagaaatatgttgaagacactaaaatagatctctggtcttacaacgcagagcttcttgttgccctggagaaccaacatacaattgatctaactgactcagaaatgaacaaactgtttgaaagaacaaggaagcaactgagggaaaatgctgaggacatgggcaatggttgcttcaaaatataccacaaatgtgacaatgcctgcatagggtcaatcagaaatggaacttatgaccatgatgtatacagagacgaagcattaaacaaccggttccagatcaaaggtgttgagctgaagtcaggatacaaagattggatcctatggatttcctttgccatatcatgctttttgctttgtgttgttttgctggggttcatcatgtgggcctgccaaaaaggcaacattaggtgcaacatttgcatttga

SEQ ID NO: 31307 - RNA, 1701 nt, synthetic construct
  misc_feature 1..1701: note = hemagglutinin__InfluenzaA__ABD79032
  source 1..1701: mol_type = other RNA
atgaagactatcattgctttgagctacattttctgtctggttctcggccaagactttccaggaaatgacaacagcacagcaacgctgtgcctgggacatcatgcggtgccaaacggaacactagtgaaaacaatcacaaatgatcagattgaagtgactaatgctactgagctggttcagagttcctcaacggggaaaatatgcaacaatcctcatcgaatccttgatggaatagactgcacactgatagatgctctattgggggaccctcattgtgatggctttcaaaatgagacatgggaccttttcgttgaacgcagcaaagctttcagcaactgttacccttatgatgtgccagattatgcctcccttaggtcactagttgcctcgtcaggcactctggagtttatcagtgaaggcttcacttggactggggtcactcagaatgggggaagcaatgcttgcaaaaggggacctgatatcggttttttcagtagactgaactggttgtacaaatcaggaagcacatatccagtgctgaacgtgactatgccaaacaatgacaattttgacaaactatacatttggggggttcaccacccgagcacggaccaagaacaaaccagcctatatgttcaagcatcagggagagtcacagtctctaccaagagaagccagcaaactataatcccgaatatcgggtctagaccctgggtaaggggtctgtctagtagaataagcatctattggacaatagttaaaccgggagacatactggtaattaatagtaatgggaacctaattgctcctcggggttattttaaaatgcgcactgggaaaagctcaataatgaggtcagatgcacctattggcacctgcatttctgaatgcatcactccaaatggaagcattcccaatgacaagccctttcaaaacgtaaacaagatcacatatggggcatgtcccaagtatgttaagcaaaacaccctgaagttggcaacagggatgcggaatgtaccagagaaacaaactagaggcctattcagcgcaatagcaggtttcatagaaaatggttgggagggaatgatagacggttggtacggtttcaggcatcaaaattctgagggcacaggacaagcagcagatcttaaaagcactcaagcagccatcgaccaaatcaatgggaaactgaatagggtaatcgagaagacgaacgagaaattccatcaaatcgaaaaggaattctcagaagtagaagggagaattcaggacctcgagaaatacgttgaagacactaaaatagatctctggtcttacaatgcggagcttcttgtcgctctggagaaccaacatacaattgatctgactgactcggaaatgaacaaactgtttgaaaaaacaaggaggcaactgagggaaaatgctgaggacatgggcaatggttgcttcaaaatataccacaaatgtgacaatgcttgcatagggtcaatcagaaatgggacttatgaccatgatgtatacagagacgaagcattaaacaaccggtttcagatcaaaggtgttgaactgaagtcaggatacaaagactggatcctgtggatttcctttgccatatcatgctttttgctttgtgttgttttgctggggttcatcatgtgggcctgccagaaaggcaacattaggtgcaacatttgcatttga

SEQ ID NO: 31308 - RNA, 1701 nt, synthetic construct
  misc_feature 1..1701: note = hemagglutinin__InfluenzaA__ABD79112
  source 1..1701: mol_type = other RNA
atgaaagcaaaactactgatcctgttatgtgcactttcagccacagatgcagacacaatatgtataggctaccatgcgaacaactcaaccgacactgttgatacagtactcgaaaagaatgtgacagtgacacactctgtaaacctactcgaagacagccacaacgggaaattatgcagattaaaaggaatagccccactacaattggggaaatgtaacattgccggatggatcttaggaaacccagaatgcgaatcactgctttctaagagatcatggtcctacattgcagaaacaccaaactctgagaatggagcatgttatccaggagatttcgccgactatgaggaactgagggagcaattgagctcagtatcatcattcgagagattcgaaatattccccaagggaagatcatggcccgaacacaacatagacataggagtaacagcagcatgctcccatgcggggaaaagcagtttttacaaaaatttgctctggctaacggagaaagatggctcatacccaaatctgaacaagtcctatgtgaacaagaaagagaaagaagtccttatactatggggtgttcatcacccgcctaacatagagaatcaaaagaccctctatcggaaagaaaatgcttatgtctctgtagtgtcttcaaattataacaggagattcaccccggaaatagcagaaagacccaaagtaagaggtcaagcagggagaataaactattactggactttgctagaacccggagacacaataatatttgaggcaaatggaaatctaatagcgccatggtatgctttcgcactaaatagaggcattgggtcaggaatcatcacctcaaacgcatcaatggatgaatgtgacacaaagtgtcaaacaccccagggagctataaacagtagtctccctttccagaatatacacccattcacaataggagagtgcccaaaatacgtcaggagtaccaaattgaggatggttacaggactaaggaacatcccatccattcaatccagaggtctgtttggagccattgccggtttcattgaagggggatgggatggaatgatagatggatggtatggttaccatcatcagaatgaacagggatctggctatgctgcggatcaaaaaagcacacaaaatgccattaacgggattacaaataaggtaaactctgttatcgagaaaatgaacactcaattcactgctgtgggtaaagaattcaacaaattagaaaaaagaatggaaaacttaaataaaaaagttgatgatggatttctggacatttggacatataatgcagaattgttggttctactggaaaacgaaaggactttggatttccatgactcaaatgtgaagaatctgtatgagaaagtaaaaaaccaattaaggaataatgccaaagaaataggaaacgggtgttttgagttctaccacaagtgtaacaatgaatgcatggaaagtgtaaaaaatggaacttatgattacccaaaattttcagaggaatcaaagttaaacagggaaaaaattgatggagtgaaattggaatcaatgggggtctatcagattctggcgatctactcaactgtcgccagttcactggtgcttctggtctccctgggggcaatcagcttctggatgtgttctaatgggtctttgcagtgcagaatatgcatctga

SEQ ID NO: 31309 - RNA, 1701 nt, synthetic construct
  misc_feature 1..1701: note = hemagglutinin__InfluenzaA__ABD79123
  source 1..1701: mol_type = other RNA
atgaagactatcattgctttgagctacattttatgtctggttttcgctcaaaaacttcccggaaatgacaacagcacggcaacgctgtgcctgggacaccatgcagtgccaaacggaacgctagtgaaaacaatcacgaatgaccaaattgaagtgactaatgctactgagctggttcagagttcctcaacaggtagaatatgcgacagtcctcaccaaatccttgatggaaaaaactgcacactgatagatgctctattgggagaccctcattgtgatggcttccaaaataaggaatgggacctttttgttgaacgcagcacagcttacagcaactgttacccttatgatgtgccggattatgcctcccttaggtcactagttgcctcatccggcaccctggagtttaccaaagaaggcttcaattggactggagtcgctcaggatggaacaagctatgcttgcaaaaggggatctgttaaaagtttctttagtagattgaattggttgcacaaattagaatacaaatatccagcactgaacgtgactatgccaaacaatgacaaatttgacaaattgtacatttggggggttcaccacccgagtacggacagtgaccaaaccagcctatatgttcaagcatcagggagagtcacagtctctaccaaaagaagccaacaaactgtaatcccgaatatcgggtctagaccctgggtaaggggtgtctccagcagaataagcatctattggacaatagtaaaaccgggagacatacttttgattaacagcacagggaatctaattgctcctcggggttacttcaaaatacgaagtgggaaaagctcaataatgaggtcggatgcacccattgacaactgcaattctgaatgcattactccaaatggaagcatttccaatgacaaaccttttcaaaatgtaaacaggatcacatatggggcctgtcccagatatgttaagcaaaacactctgaaattggcaacagggatgcggaatgtaccagagaaacaaactagaggcatattcggcgcaatcgcaggtttcatagaaaatggttgggagggaatggtagacggttggtacggtttcaggcatcaaaattctgaaggcacaggacaagcagcagatcttaaaagcactcaagcagcaatcaaccaaatcaacgggaaactgaataggttaatcgagaaaacgaacgagaaattccatcaaatcgaaaaagaattctcagaagtagaagggagaattcaggacctcgagaaatatgttgaagacactaaaatagatctctggtcttacaacgcggagcttcttgttgccctggagaaccaacatacaattgatctaactgactcagaaatgaacaaactgtttgaaagaacaagaaagcaactgagggaaaatgctgaggacatgggcaatggttgcttcagaatataccacaaatgtgacaatgcctgcatagggtcaatcagaaatggaacttatgaccatgatgtatacagagacgaagcattaaacaaccggttccagatcaaaggtgttgagctgaagtcaggatacaaagattggatcctatggatttcctttgccatatcatgctttttgctttgtgttgttttgctggggttcattatgtgggcctgccaaaaaggcaacattaggtgcaacatttgcatttga

SEQ ID NO: 31310 - RNA, 1701 nt, synthetic construct
  misc_feature 1..1701: note = hemagglutinin__InfluenzaA__ABD79134
  source 1..1701: mol_type = other RNA
atgaagactatcattgctttgagctacattttatgtctggttttcgctcaaaaacttcccggaaatgacaacagcacggcaacgctgtgcctgggacaccatgcagtgccaaacggaacgctagtgaaaacaatcacgaatgaccaaattgaagtgactaatgctactgagctggttcagagttcctcaacaggtagaatatgcgacagtcctcaccaaatccttgatggaaaaaactgcacactgatagatgctctattgggagaccctcattgtgatggcttccaaaataagaaatgggacctttttgttgaacgcagcacagcttacagcaactgttacccttatgatgtgccggattatgcctcccttaggtcactagttgcctcatccggcaccctggagtttaccaaagaaggcttcaattggactggagtcgctcaggatggaacaagctatgcttgcaaaaggggatctgttaaaagtttctttagtagattgaattggttgcacaaattagaatacaaatatccagcactgaacgtgactatgccaaacaatgacaaatttgacaaattgtacatttggggggttcaccacccgagtacggacagtgaccaaaccagcctatatgttcaagcatcagggagagtcacagtctctaccaaaagaagccaacaaactgtaatcccgaatatcgggtctagaccctgggtaaggggtgtctccagcagaataagcatctattggacaatagtaaaaccgggagacatacttttgattaacagcacagggaatctaattgctcctcggggttacttcaaaatacgaagtgggaaaagctcaataatgaggtcggatgcacccattgacaactgcaattctgaatgcattactccaaatggaagcatttccaatgacaaaccttttcaaaatgtaaacaggatcacatatggggcctgtcccagatatgttaagcaaaacactctgaaattggcaacagggatgcggaatgtaccagagaaacaaactagaggcatattcggcgcaatcgcaggtttcatagaaaatggttgggagggaatggtagacggttggtacggtttcaggcatcaaaattctgaaggcacaggacaagcagcagatcttaaaagcactcaagcagcaatcaaccaaatcaacgggaaactgaacaggttaatcgagaaaacgaacgagaaattccatcaaatcgaaaaagaattctcagaagtagaagggagaattcaggacctcgagaaatatgttgaagacactaaaatagatctctggtcttacaacgcggagcttcttgttgccctggagaaccaacatacaattgatctaactgactcagaaatgaacaaactgtttgaaagaacaagaaagcaactgagggaaaatgctgaggacatgggcaatggttgcttcaaaatataccacaaatgtgacaatgcctgcatagggtcaatcagaaatggaacttatgaccatgatgtatacagagacgaagcattaaacaaccggttccagatcaaaggtgttgagctgaagtcaggatacaaagattggatcctatggatttcctttgccatatcatgctttttgctttgtgttgttttgctggggttcattatgtgggcctgccaaaaaggcaacattaggtgcaacatttgcatttga

SEQ ID NO: 31311 - RNA, 1701 nt, synthetic construct
  misc_feature 1..1701: note = hemagglutinin__InfluenzaA__ABD79145
  source 1..1701: mol_type = other RNA
atgaagactatcattgctttgagctacattttatgtctggttttcgctcaaaaacttcccggaaatgacaacagcacggcaacgctgtgcctgggacaccatgcagtgccaaacggaacgctagtgaaaacaatcacgaatgaccaaattgaagtgactaatgctactgagctggttcagagttcctcaacaggtagaatatgcgacagtcctcaccaaatccttgatggaaaaaactgcacactgatagatgctctattgggagaccctcattgtgatggcttccaaaataaggaatgggacctttttgttgaacgcagcacagcttacagcaactgttacccttatgatgtgccggattatgcctcccttaggtcactagttgcctcatccggcaccctggagtttaccaaagaaggcttcaattggaccggagtcgctcaggatggaacaagctatgcttgcaaaaggggatctgttaaaagtttctttagtagattgaattggttgcacaaattagaatacaaatatccagcactgaacgtgactatgccaaacaatgacaaatttgacaaattgtacatttggggggttcaccacccgagtacggacagtgaccaaaccagcctatatgttcaagcatcagggagagtcacagtctctaccaaaagaagccaacaaactgtaatcccgaatatcgggtctagaccctgggtaaggggtgtctccagcagaataagcatctattggacaatagtaaaaccgggagacatacttttgattaacagcacagggaatctaattgctcctcggggttacttcaaaatacgaagtgggaaaagctcaataatgaggtcggatgcacccattgacaactgcaattctgaatgcattactccaaatggaagcatttccaatgacaaaccttttcaaaatgtaaacaggatcacatatggggcctgtcccagatatgttaagcaaaacactctgaaattggcaacagggatgcggaatgtaccagagaaacaaactagaggcatattcggcgcaatcgcaggtttcatagaaaatggttgggagggaatggtagacggttggtacggtttcaggcatcaaaattctgaaggcacaggacaagcagcagatcttaaaagcactcaagcagcaatcaaccaaatcaacgggaaactgaataggttaatcgagaaaacgaacgagaaattccatcaaatcgaaaaagaattctcagaagtagaagggagaattcaggacctcgagaaatatgttgaagacactaaaatagatctctggtcttacaacgcggagcttcttgttgccctggagaaccaacatacaattgatctaactgactcagaaatgaacaaactgtttgaaagaacaagaaagcaactgagggaaaatgctgaggacatgggcaatggttgcttcaaaatataccacaaatgtgacaatgcctgcatagggtcaatcagaaatggaacttatgaccatgatgtatacagagacgaagcattaaacaaccggttccagatcaaaggtgttgagctgaagtcaggatacaaagattggatcctatggatttcctttgccatatcatgctttttgctttgtgttgttttgctggggttcattatgtgggcctgccaaaaaggcaacattaggtgcaacatttgcatttga

SEQ ID NO: 31312 - RNA, 1701 nt, synthetic construct
  misc_feature 1..1701: note = hemagglutinin__InfluenzaA__ABD79156
  source 1..1701: mol_type = other RNA
atgaagactatcattgctttgagctacattttatgtctggttttcgctcaaaaacttcccggaaatgacaacagcacggcaacgctgtgcctgggacaccatgcagtgccaaacggaacgctagtgaaaacaatcacgaatgaccaaattgaagtgactaatgctactgagctggttcagagttcctcaacaggtagaatatgcgacagtcctcaccaaatccttgatggaaaaaactgcacactgatagatgctctattgggagaccctcattgtgatggcttccaaaataaggaatgggacctttttgttgaacgcagcacagcttacagcaactgttacccttatgatgtgccggattatgcctcccttaggtcactagttgcctcatccggcaccctggagtttaccaaagaaggcttcaattggactggagtcgctcaggatggaacaagctatgcttgcaaaaggggatctgttaaaagtttctttagtagattgaattggttgcacaaattagaatacaaatatccagcactgaacgtgactatgccaaacaatgacaaatttgacaaattgtacatttggggggttcaccacccgagtacggacagtgaccaaaccagcctatatgttcaagcatcagggagagtcacagtctctaccaaaagaagccaacaaactgtaatcccgaatatcgggtctagaccctgggtaaggggtgtctccagcagaataagcatctattggacaatagtaaaaccgggagacatacttttgattaacagcacagggaatctaattgctcctcggggttacttcaaaatacgaagtgggaaaagctcaataatgaggtcggatgcacccattgacaactgcaattctgaatgcattactccaaatggaagcatttccaatgacaaaccttttcaaaatgtaaacaggatcacatatggggcctgtcccagatatgttaagcaaaacactctgaaattggcaacagggatgcggaatgtaccagagaaacaaactagaggcatattcggcgcaatcgcaggtttcatagaaaatggttgggagggaatggtagacggttggtacggtttcaggcatcaaaattctgaaggcacaggacaagcagcagatcttaaaagcactcaagcagcaatcaaccaaatcaacgggaaactgaataggttaatcgagaaaacgaacgagaaattccatcaaatcgaaaaagaattctcagaagtagaagggagaattcaggacctcgagaaatatgttgaagacactaaaatagatctctggtcttacaacgcggagcttcttgttgccctggagaaccaacatacaattgatctaactgactcagaaatgaacaaactgtttgaaagaacaagaaagcaactgagggaaaatgctgaggacatgggcaatggttgcttcaaaatataccacaaatgtgacaatgcctgcatagggtcaatcagaaatggaacttatgaccatgatgtatacagagacgaagcattaaacaaccggttccagatcaaaggtgttgagctgaagtcaggatacaaagattggatcctatggatttcctttgccatatcatgctttttgctttgtgttgttttgctggggttcattatgtgggcctgccaaaaaggcaacattaggtgcaacatttgcatttga

SEQ ID NO: 31313 - RNA, 1701 nt, synthetic construct
  misc_feature 1..1701: note = hemagglutinin__InfluenzaA__ABD79167
  source 1..1701: mol_type = other RNA
atgaagactatcattgctttgagctacattttatgtctggttttcgctcaaaaacttcccggaaatgacaacagcacggcaacgctgtgcctgggacaccatgcagtgccaaacggaacgctagtgaaaacaatcacgaatgaccaaattgaagtgactaatgctactgagctggttcagagttcctcaacaggtagaatatgcgacagtcctcaccaaatccttgatggaaaaaactgcacactgatagatgctctattgggagaccctcattgtgatggcttccaaaataaggaatgggacctttttgttgaacgcagcacagcttacagcaactgttacccttatgatgtgccggattatgcctcccttaggtcactagttgcctcatccggcaccctggaatttaccaaagaaggcttcaattggactggagtcgctcaggatggaacaagctatgcttgcaaaaggggatctgttaaaagtttctttagtagattgaattggttgcacaaattagaatacaaatatccagcactgaacgtgactatgccaaacaatgacaaatttgacaaattgtacatttggggggttcaccacccgagtacggacagtgaccaaaccagcctatatgttcaagcatcagggagagtcacagtctctaccaaaagaagccaacaaactgtaatcccgaatatcgggtctagaccctgggtaaggggtgtctccagcagaataagcatctattggacaatagtaaaaccgggagacatacttttgattaacagcacagggaatctaattgctcctcggggttacttcaaaatacgaagtgggaaaagctcaataatgaggtcggatgcacccattgacaactgcaattctgaatgcattactccaaatggaagcattcccaatgacaaaccttttcaaaatgtaaacaggatcacatatggggcctgtcccagatatgttaagcaaaacactctgaaattggcaacagggatgcggaatgtaccagagaaacaaactagaggcatattcggcgcaatcgcaggtttcatagaaaatggttgggagggaatggtagacggttggtacggtttcaggcatcaaaattctgaaggcacaggacaagcagcagatcttaaaagcactcaagcagcaatcaaccaaatcaacgggaaactgaataggttaatcgagaaaacgaacgagaaattccatcaaatcgaaaaagaattctcagaagtagaagggagaattcaggacctcgagaaatatgttgaagacactaaaatagatctctggtcttacaacgcggagcttcttgttgccctggagaaccaacatacaattgatctaactgactcagaaatgaacaaactgtttgaaagaacaagaaagcaactgagggaaaatgctgaggacatgggcaatggttgcttcaaaatataccacaaatgtgacaatgcctgcatagggtcaatcagaaatggaacttatgaccatgatgtatacagagacgaagcattaaacaaccggttccagatcaaaggtgttgagctgaagtcaggatacaaagattggatcctatggatttcctttgccatatcatgctttttgctttgtgttgttttgctggggttcattatgtgggcctgccaaaaaggcaacattagatgcaacatttgcatttga

SEQ ID NO: 31314 - RNA, 1701 nt, synthetic construct; identical to SEQ ID NO: 31312
  misc_feature 1..1701: note = hemagglutinin__InfluenzaA__ABD79178
  source 1..1701: mol_type = other RNA

SEQ ID NO: 31315 - RNA, 1701 nt, synthetic construct
  misc_feature 1..1701: note = hemagglutinin__InfluenzaA__ABD79189
  source 1..1701: mol_type = other RNA
atgaagactatcattgctttgagctacattttatgtctggttttcgctcaaaaacttcccggaaatgacaacagcacggcaacgctgtgcctgggacaccatgcagtgccaaacggaacgctagtgaaaacaatcacgaatgaccaaattgaagtgactaatgctactgagctggttcagagttcctcaacaggtagaatatgcgacagtcctcaccaaatccttgatggaaaaaactgcacactgatagatgctctattgggagaccctcattgtgatggcttccaaaataaggaatgggacctttttgttgaacgcagcacagcttacagcaactgttacccttatgatgtgccggattatgcctcccttaggtcactagttgcctcatccggcaccctggagtttaccaaagaaggcttcaattggactggagtcgctcaggatggaacaagctatgcttgcaaaaggggatctgttaaaagtttctttagtagattgaattggttgcacaaattagaatacaaatatccagcactgaacgtgactatgccaaacaatgacaaatttgacaaattgtacatttggggggttcaccacccgagtacggacagtgaccaaaccagcctatatgttcaagcatcagggagagtcacagtctctaccaaaagaagccaacaaactgtaatcccgaatatcgggtctagaccctgggtaaggggtgtctccagcagaataagcatctattggacagtagtaaaaccgggagacatacttttgattaacagcacagggaatctaattgctcctcggggttacttcaaaatacgaagtgggaaaagctcaataatgaggtcggatgcacccattgacagctgcaattctgaatgcattactccaaatggaagcatttccaatgacaaaccttttcaaaatgtaaacaggatcacatatggggcctgtcccagatatgttaagcaaaacactctgaaattggcaacagggatgcggaatgtaccagagaaacaaactagaggcatattcggcgcaatcgcaggtttcatagaaaatggttgggagggaatggtagacggttggtacggtttcaggcatcaaaattctgaaggcacaggacaagcagcagatcttaaaagcactcaagcagcaatcaaccaaatcaacgggaaactgaataggttaatcgagaaaacgaacgagaaattccatcaaatcgaaaaagaattctcagaagtagaagggagaattcaggacctcgagaaatatgttgaagacactaaaatagatctctggtcttacaacgcggagcttcttgttgccctggagaaccaacatacaattgatctaactgactcagaaatgaacaaactgtttgaaagaacaagaaagcaactgagggaaaatgctgaggacatgggcaatggttgcttcaaaatataccacaaatgtgacaatgcctgcatagggtcaatcagaaatggaacttatgaccatgatgtatacagagacgaagcattaaacaaccggttccagatcaaaggtgttgagctgaagtcaggatacaaagattggatcctatggatttcctttgccatatcatgctttttgctttgtgttgttttgctggggttcattatgtgggcctgccaaaaaggcaacattaggtgcaacatttgcatttga

SEQ ID NO: 31316 - RNA, 1701 nt, synthetic construct; identical to SEQ ID NO: 31312
  misc_feature 1..1701: note = hemagglutinin__InfluenzaA__ABD79200
  source 1..1701: mol_type = other RNA

SEQ ID NO: 31317 - RNA, 1701 nt, synthetic construct
  misc_feature 1..1701: note = hemagglutinin__InfluenzaA__ABD79211
  source 1..1701: mol_type = other RNA
atgaagactatcattgctttgagctacattttatgtctggttttcgctcaaaaacttcccggaaatgacaacagcacggcaacgctgtgcctgggacaccatgcagtgccaaacggaacgctagtgaaaacaatcacgaatgaccaaattgaagtgactaatgctactgagctggttcagagttcctcaacaggtagaatatgcgacagtcctcaccaaatccttgatggaaaaaactgcacactgatagatgctctattgggagaccctcattgtgatggcttccaaaataaggaatgggacctttttgttgaacgcagcacagcttacagcaactgttacccttatgatgtgccggattatgcctcccttaggtcactagttgcctcatccggcaccctggagtttaccaaagaaggcttcaattggactggagtcgctcaggatggaacaagctatgcttgcaaaaggggatctgttaaaagtttctttagtagattgaattggttgcacaaattagaatacaaatatccagcactgaacgtgactatgccaaacaatgacaaatttgacaaattgtacatttggggggttcaccacccgagtacggacagtgaccaaaccagcctatatgttcaagcatcagggagagtcacagtctctaccaaaagaagccaacaaactgtaatcccgaatatcgggtctagaccctggataaggggtgtctccagcagaataagcatctattggacaatagtaaaaccgggagacatacttttgattaacagcacagggaatctaattgctcctcggggttacttcaaaatacgaagtgggaaaagctcaataatgaggtcggatgcacccattgacaactgcaattctgaatgcattactccaaatggaagcatttccaatgacaaaccttttcaaaatgtaaacaggatcacatatggggcctgtcccagatatgttaagcaaaacactctgaaattggcaacagggatgcggaatgtaccagagaaacaaactagaggcatattcggcgcaatcgcaggtttcatagaaaatggttgggagggaatggtagacggttggtacggtttcaggcatcaaaattctgaaggcacaggacaagcagcagatcttaaaagcactcaagcagcaatcaaccaaatcaacgggaaactgaataggttaatcgagaaaacgaacgagaaattccatcaaatcgaaaaagaattctcagaagtagaagggagaattcaggacctcgagaaatatgttgaagacactaaaatagatctctggtcttacaacgcggagcttcttgttgccctggagaaccaacatacaattgatctaactgactcagaaatgaacaaactgtttgaaagaacaagaaagcaactgagggaaaatgctgaggacatgggcaatggttgcttcaaaatataccacaaatgtgacaatgcctgcatagggtcaatcagaaatggaacttatgaccatgatgtatacagagacgaagcattaaacaaccggttccagatcaaaggtgttgagctgaagtcaggatacaaagattggatcctatggatttcctttgccatatcatgctttttgctttgtgttgttttgctggggttcattatgtgggcctgccaaaaaggcaacattaggtgcaacatttgcatttga

SEQ ID NO: 31318 - RNA, 1701 nt, synthetic construct; identical to SEQ ID NO: 31313
  misc_feature 1..1701: note = hemagglutinin__InfluenzaA__ABD79222
  source 1..1701: mol_type = other RNA

SEQ ID NO: 31319 - RNA, 1701 nt, synthetic construct; identical to SEQ ID NO: 31313
  misc_feature 1..1701: note = hemagglutinin__InfluenzaA__ABD79233
  source 1..1701: mol_type = other RNA

SEQ ID NO: 31320 - RNA, 1701 nt, synthetic construct
  misc_feature 1..1701: note = hemagglutinin__InfluenzaA__ABD79244
  source 1..1701: mol_type = other RNA
atgaagactatcattgctttgagctacattttatgtctggttttcgctcaaaaacttcccggaaatgacaacagcacggcaacgctgtgcctgggacaccatgcagtgccaaacggaacgctagtgaaaacaatcacgaatgaccaaattgaagtgactaatgctactgagctggttcagagttcctcaacaggtagaatatgcgacagtcctcaccaaatccttgatggaaaaaactgcacactgatagatgctctattgggagaccctcattgtgatggcttcaaaaataaggaatgggacctttttgttgaacgcagcacagcttacagcaactgttacccttatgatgtgccggattatgcctcccttaggtcactagttgcctcatccggcaccctggagtttaccaatgaaggcttcaattggactggagtcgctcaggatggaacaagctatgcttgcaaaaggggatctgttaaaagtttctttagtagattgaattggttgcacaaattagaatacaaatatccagcactgaacgtgactatgccaaacaatgacaaatttgacaaattgtacatttggggggttcaccacccgagtacggacagtgaccaaaccagcctatatgttcaagcatcagggagagtcacagtctctaccaaaagaagccaacaaactgtaatcccgaatatcgggtctagaccctgggtaaggggtgtctccagcagaataagcatctattggacaatagtaaaaccgggagacatacttttgattaacagcacagggaatctaattgctcctcggggttacttcaaaatacgaagtgggaaaagctcaataatgaggtcggatgcacccattgacaactgcaattctgaatgcatcactccaaatggaagcattcccaatgacaaaccttttcaaaatgtaaacaggatcacatatggggcctgtcccagatatgttaagcaaaacactctgaaattggcaacagggatgcggaatgtaccagagaaacaaactagaggcatattcggcgcaatcgcaggtttcatagaaaatggttgggagggaatggtagacggttggtacggtttcaggcatcaaaattctgaaggcacaggacaagcagcagatcttaaaagcactcaagcagcaatcaaccaaatcaacgggaaactgaataggttaatcgagaaaacgaacgagaaattccatcaaatcgaaaaagaattctcagaagtagaagggagaattcaggacctcgagaaatatgttgaagacactaaaatagatctctggtcttacaacgcggagcttcttgttgccctggagaaccaacatacaattgatctaactgactcagaaatgaacaaactgtttgaaagaacaagaaagcaactgagggaaaatgctgaggacatgggcaatggttgcttcaaaatataccacaaatgtgacaatgcctgcatagggtcaatcagaaatggaacttatgaccatgatgtatacagagacgaagcattaaacaataggttccagatcaaaggtgttgagctgaagtcaggatacaaagattggatcctatggatttcctttgccatatcatgctttttgctttgtgttgttttgctggggttcatcatgtgggcctgccaaaaaggcaacattaggtgcaacatttgcatttga

SEQ ID NO: 31321 - RNA, 1701 nt, synthetic construct; identical to SEQ ID NO: 30822
  misc_feature 1..1701: note = hemagglutinin__InfluenzaA__ABD94734
  source 1..1701: mol_type = other RNA

SEQ ID NO: 31322 - RNA, 1701 nt, synthetic construct; identical to SEQ ID NO: 31139
  misc_feature 1..1701: note = hemagglutinin__InfluenzaA__ABD94745
  source 1..1701: mol_type = other RNA

SEQ ID NO: 31323 - RNA, 1701 nt, synthetic construct
  misc_feature 1..1701: note = hemagglutinin__InfluenzaA__ABD94767
  source 1..1701: mol_type = other RNA
atgaagactatcattgctttgagctacattttatgtctggttttcgctcaaaaacttcccgtaaatgacaacagcacggcaacgctgtgcctgggacaccatgcagtgccaaacggaacgctagtgaaaacaatcacgaatgacaacattgaagtgactaatgctactgagctggttcagagttcctcaacaggtagaatatgcgacagtcctcaccaaatccttgatggagaaaactgcacactaatagatgctctattgggagaccctcattgtgatggcttccaaaataaggaatgggacctttttgttgaacgcagcacagcctacagcaactgttacccttatgatgtgccggattatgcctcccttaggtcactagttgcctcatccggcacactggagtttaacaacgaaagcttcaattggactggagtcgatcagaatggaacaagctctgcttgcaaaaggagatctaataaaagtttctttagtagattgaattggttgcaccaattaaaatacaaatatccagcactgaacgtgactatgccaaacaatgaaaaatttgacaaattgtacatttggggggttcaccacccgagtacggacagtgaccaaatcagcctatatgctcaagcatcagggagagtcacagtctctaccaaaagaagccaacaaaatgtaatcccgaatatcggatctagaccctgggtaaggggtgtctccagcagaataagcatctattggacaatagtaaaaccgggagacatacttttgattaacagcacagggaatctaattgctcctcggggttacttcaaaatacgaagtgggaaaagctcaataatgaggtcaaatgcacccattggaaaatgcaattctgaatgcatcactccaaatggaagcattcccaatgacaaaccatttcaaaatgtaaacaggatcacatatggggcctgtcccagatatgttaaacaaaacactctgaaattggcaacagggatgcggaatgtaccagagaaacaaactagaggcatattcggcgcaatcgcaggtttcatagaaaatggttgggagggaatggtggacggttggtacggtttcaggcatcaaaattctgagggcacaggacaagcagcagatcttaaaagcactcaagcagcaatcaaccaaatcaacgggaaactgaataggttaatcgagaaaacaaacgagaaattccatcaaattgaaaaagaattctcagaagtagaaggaagaatccaggacctcgagaaatatgttgaggacactaaaatagatctctggtcgtacaacgcggagcttcttgttgccctggagaaccaacatacaattgatctaactgactcagaaatgaacaaactgttcgaaagaacaaggaagcaactgagggaaaatgctgaggatatgggcaatggttgtttcaaaatataccacaaatgtgacaatgcctgcatagggtcaatcagaaatggaacttatgaccatgatgtatacagagacgaagcattaaacaaccggttccagatcaaaggtgttgagctgaagtcaggatacaaagattggatcctatggatttcctttgccatatcatgttttttgctttgtgttgttttgctggggttcatcatgtgggcctgccaaaaaggcaacattaggtgcaacatttgcatttaa

SEQ ID NO: 31324 - RNA, 1698 nt, synthetic construct
  misc_feature 1..1698: note = hemagglutinin__InfluenzaA__ABD94778
  source 1..1698: mol_type = other RNA
atgaaagcaaaactactggtcctgttatgtacatttacagctacatacgcagacacaatatgtataggctaccatgccaacaactcaaccgacactgttgacacagtacttgagaagaatgtgacagtgacacactctgtcaacctacttgaggacagtcacaatggaaaactatgtctactaaaaggaatagccccactacaattgggtaattgcagcgttgccggatggatcttaggaaacccagaatgcgaattactgatttccaaggaatcatggtcctacattgtagaaacaccaaatcccgagaatggaacatgttacccagggtatttcgccgactatgaggaactgagggagcaattgagttcagtatcttcatttgagagattcgaaatattccccaaaggaagctcatggcccaaccacaccgtgaccggagtatcagcatcatgctcccataatgggaaaagcagtttttacagaaatttgctatggctgacggggaagaatggtttgtacccaaacctgagcatgtcctatgtaaacaacaaagagaaagaagtccttgtgctatggggtgttcatcacccacctaacataggggaccaaagggccctctaccatacagaaaatgcttatgtctctgtagtgtcttcacattatagcagaagattcaccccagaaatagccaaaagacccaaagtaagagatcaggaaggaagaatcaactactactggactctgctggaacccggggacacaataatatttgaggcaaatggaaatctaatagcgccatggtatgctttcgcactgagtagaggctttggatcaggaatcatcacctcaaatgcaccaatgggtgaatgtgatgcgaagtgtcaaacacctcagggagctataaacagtagtcttcctttccagaatgtacacccagttacaataggagagtgtccaaagtatgtcaggagtgcaaaattaaggatggttacaggactaaggaacatcccatccattcaatccagaggtttgtttggagccattgccggtttcattgaaggggggtggactggaatggtagatgggtggtatggttatcatcatcagaatgagcaaggatctggctatgctgcagatcaaaaaagcacacaaaatgccattaacgggattacaaacaaggtgaattctgtaattgagaaaatgaacactcaattcacagctgtgggcaaagaattcaacaaattagaaagaaggatggaaaacttaaataaaaaagttgatgatgggtttctagacatttggacatataatgcagaattgttggttctactggaaaatgaaaggactttggatttccatgactccaatgtgaagaatctgtatgagaaagtaaaaagccaattaaagaataatgccaaagaaataggaaacgggtgttttgaattctatcacaagtgtaacaatgaatgcatggaaagtgtgaaaaatggaacttatgactatccaaaatattccgaagaatcaaagttaaacagggagaaaattgatggggtaaaattggaatcaatgggagtctatcagattctggcgatctactcaactgtcgccagttccctggttcttttggtctccctgggggcaatcagcttctggatgtgttccaatgggtctttgcagtgtagaatatgcatctga

SEQ ID NO: 31325 - RNA, 1698 nt, synthetic construct; identical to SEQ ID NO: 31304
  misc_feature 1..1698: note = hemagglutinin__InfluenzaA__ABD94789
  source 1..1698: mol_type = other RNA

SEQ ID NO: 31326 - RNA, 1701 nt, synthetic construct
  misc_feature 1..1701: note = hemagglutinin__InfluenzaA__ABD94822
  source 1..1701: mol_type = other RNA
atgaagactatcattgctttgagctacattttatgtctggttttcgctcaaaaaattcccggaaatgacaacagcacggcaacgctgtgcctgggacaccatgcagtgccaaacggaacgctagtgaaaacaatcacgaatgaccaaattgaagtgactaatgctactgagctggttcagagttcctcaacaggtagaatatgcgacagtcctcaccgaatccttgatggagaaaactgcacactgatagatgctctattgggagaccctcattgtgatggcttccaaaataaggaatgggacctttttgttgaacgcagcaaagcctacagcaactgttacccttatgatgtgccggattatgcctcccttaggtcactagttgcctcatccggcaccctggagtttaacaatgaaagcttcaattggactggagtcgctcagaatggaacaagctatgcttgcaaaaggagttctattaaaagtttctttagtagattgaattggttgcaccaattaaaatacaaatatccagcactgaacgtgactatgccaaacaatgacaaatttgacaaattgtacatttggggggttcaccacccgagtacggacagtgaccaaaccagcctatatgctcaagcatcagggagagtcacagtctctaccaaaagaagccaacaaactgtaatcccaaatatcggatctagaccctgggtaaggggtgtctccagcagaataagcatctattggacaatagtaaaaccgggagacatacttttgattaatagcacagggaatctaattgctcctcggggttacttcaaaatacgaagtgggaaaagctcaataatgaggtcagatgcacccattggcaaatgcaattctgaatgcatcactccaaatggaagcattcccaatgacaaaccatttcaaaatgtaaacaggatcacatatggggcctgtcccagatatgttaagcaaaacactctgaaattggcaacagggatgcggaatgtaccagagaaacaaactagaggcatattcggcgcaatcgcaggtttcatagaaaatggttgggagggaatggtagacggttggtacggtttcaggcatcaaaattctgagggcacaggacaagcagcagatcttaaaagcactcaagcagcaatcaaccaaatcaacgggaaactgaataggttaatcgagaaaacgaacgagaaattccatcaaattgaaaaagaattctcagaagtagaagggagaattcaggacctcgagaaatatgttgaggacactaaaatagatctctggtcgtacaacgcggagcttcttgttgccctggagaaccaacatacaattgatctaactgactcagaaatgaacaaactgtttgaaagaacaaggaagcaactaagggaaaatgctgaggatatgggcaatggttgtttcaaaatataccacaaatgtgacaatgcctgcatagggtcaatcagaaatggaacttatgaccatgatgtatacagagacgaagcattaaacaaccggttccagatcaaaggtgttgagctgaagtcaggatacaaagattggatcctatggatttcctttgccatatcatgttttttgctttgtgttgttttgctggggttcatcatgtgggcctgccaaaaaggcaacattaggtgcaacatttgcatttga

SEQ ID NO: 31327 - RNA, 1701 nt, synthetic construct
  misc_feature 1..1701: note = hemagglutinin__InfluenzaA__ABD94833
  source 1..1701: mol_type = other RNA
atgaagactatcattgctttgagctacattttatgtctggttttcgctcaaaaacttcccggaaatgacaacagcacggcaacgctgtgcctgggacaccatgcagtgccaaacggaacgctagtgaaaacaatcacgaatgaccaaattgaagtgactaatgctactgagctggttcagagttcctcaacaggtagaatatgcgacagtcctcaccgaatccttgatggaaaaaactgcacactgatagatgctctattgggagaccctcattgtgatggcttccaaaataaggaatgggacctttttgttgaacgcagcaaagcttacagcgactgttacccttatgatgtgccggattatgcttcccttaggtcactagttgcctcatccggcaccctagagtttaccaatgaaggcttcaattggactggagtcgctcaggatggaacaagctatgcttgcaaaaggggatctgttaaaagtttctttagtagattgaattggttgcacaaattagaatacaaatatccagcactgaacgtgactatgccaaacaatgacaaatttgacaaattgtacatttggggggttcaccacccgagtacggacagtgaccaaaccagcctttatgttcaagcatcagggagagtcacagtctctaccaaaagaagccaacaaactgtaatcccgaatatcgggtctagaccctgggtaaggggggtctccagcagaataagcatctattggacaatagtaaaaccgggagacatacttttgattaatagcacagggaatctaattgcccctcggggttacttcaaaatacgaagtgggaaaagctcaataatgaggtcagatgcacccattggcaactgcaattctgaatgcatcactccaaatggaagcattcccaatgacaaaccttttcaaaatgtaaacaggatcacatatggggcctgtcccagatatgttaagcaaaacactctgaaattggcaacagggatgcggaatgtaccagagaaacaaactagaggcatattcggcgcaatcgcaggtttcatagaaaatggttgggagggaatggtagacggttggtacggtttcaggcatcaaaattctgagggcacaggacaagcagcagatcttaaaagcactcaagcagcaatcaaccaaatcaatgggaaactgaataggttaatcgagaaaacgaacgagaaattccatcaaatcgaaaaagaattctcagaagtagaagggagaattcaggacctcgaaaaatatgttgaagacactaaaatagatctctggtcttacaacgcagagcttcttgttgccctggagaaccaacatacaattgatctaactgactcagaaatgaacaaactgtttgaaagaacaaggaagcaactgagggaaaatgctgaggacatgggcaatggttgcttcaaaatataccacaaatgtgacaatgcctgcatagggtcaatcagaaatggaacttatgaccatgatgtatacagagacgaagcattaaacaaccggttccagatcaaaggtgttgagctgaagtcaggatacaaagattggatcctatggatttcctttgccatatcatgctttttgctttgtgttgttttgctggggttcatcatgtgggcctgccaaaaaggcaacattaggtgcaacatttgcatttga

SEQ ID NO: 31328 - RNA, 1701 nt, synthetic construct
  misc_feature 1..1701: note = hemagglutinin__InfluenzaA__ABD94844
  source 1..1701: mol_type = other RNA
atgaagactatcattgctttgagctacattttatgtatggttttcgctcaaaaacttcccggaaatgacaacagcacggcaacgctgtgcctgggacaccatgcagtgccaaacggaacgctagtgaaaacaatcacgaatgaccaaattgaagtgactaatgctactgagctggttcagagttcctcaacaggtagaatatgcgacagtcctcaccgaatccttgatggaaaaaactgcacactgatagatgctctattgggagaccctcattgtgatggcttccaaaataaggaatgggacctttttgttgaacgcagcaaagcttacagcaactgttacccttatgatgtgccggattatgcctcccttaggtcactagttgcctcatccggcaccctggagtttaacaatgaaagcttcaattggactggagtcgctcagaatggaacaagctatgcttgcaaaaggagatctgttaaaagtttcttcagtagattgaattggttgcacaaattagaatacaaatatccagcactgaacgtgactatgccaaacaatgacaaatttgacaaattgtacatttggggggttcaccacccgagtacggacagtgaccaaaccagcctatatgttcaagcatcagggagagtcacagtctctaccaaaagaagccaacaaactgtaatcccgaatatcggatctagaccctgggtaaggggtgtctccagcataataagcatctattggacaatagtaaaaccgggagacatacttttgattaacagcacagggaatctaattgctcctcggggttacttcaaaatacgaagtgggaaaagctcaataatgaggtcagatgcacccattggcaactgcaattctgaatgcatcactccaaatggaagcattcccaatgacaaaccatttcaaaatgtaaacaggatcacatatggggcctgtcccagatatgttaagcaaaacactctgaaattggcaacagggatgcggaatgtaccagagaaacaaactagaggcatattcggcgcaatcgcaggtttcatagaaaatggttgggagggaatggtagacggttggtacggtttcaggcatcaaaattctgagggcacaggacaagcagcagatcttaaaagcactcaagcagcaatcaaccaaatcaacgggaaactgaataggttaatcgagaaaacgaacgagaaattccatcaaatcgaaaaagaattctcagaagtagaagggagaattcaggacctcgagaaatatgttgaagacactaaaatagatctctggtcgtacaacgcggagcttcttgttgccctggagaaccaacatacaattgatctaactgactcagaaatgaacaaactgtttgaaagaacaaggaagcaactgagggaaaatgctgaggacatgggcaatggttgcttcaaaatataccacaaatgtgacaatgcctgtatagggtcaatcagaaatggaacttatgaccatgatgtatacagagacgaagcattaaacaaccggttccagatcaaaggtgttgagctgaagtcaggatacaaagattggatcctatggatttcctttgccatatcatgttttttgctttgtgttgttttgctggggttcatcatgtgggcctgccaaaaaggcaacattaggtgcaacatttgcatttga

SEQ ID NO: 31329 - RNA, 1701 nt, synthetic construct
  misc_feature 1..1701: note = hemagglutinin__InfluenzaA__ABD94855
  source 1..1701: mol_type = other RNA
atgaagactattattgctttgagctacattttatgtctggttttcgctcaaaaacttcccggaaatgacaacagcacggcaacgctgtgcctgggacaccatgcagtgccaaacggaacgctagtgaaaacaatcacgaatgaccaaattgaagtgactaatgctactgagctggttcagggttcctcaacaggtagaatatgcgacagtcctcaccgaatccttgatggaaaaaactgcacactgatagatgctctattgggagaccctcattgtgatggcttccaaaataaggaatgggacctttttgttgaacgcagcaaagcttacagcaactgttacccttatgatgtgccggattatgcctcccttaggtcactagttgcctcatcaggcaccctggagtttaacaatgaaagcttcaattggactggagtcgcccagaatggaacaagctatgcttgcaaaaggggatctgttaaaagtttctttagtagattgaattggttgcacaaattagaatacaaatatccagcactgaacgtgactatgccaaacaatgacaaatttgacaaattgtacatttggggggttcaccacccgagtacggacagtgaccaaaccagcctatatgttcaagcatcagggagagtcacagtctctaccaaaagaagccaacaaactgtaatcccgaatatcggatctagaccctgggtaaggggtgtctccagcagaataagcatatattggacaatagtaaaaccgggagacatacttttgattaacagcacagggaatctaattgctcctcggggttacttcaaaatacgaagtgggaaaagctcaataatgaggtcagatgcacccattgacaactgcaattctgaatgcatcactccaaatggaagcattcccaatgacaaaccatttcaaaatgtaaacaggatcacatatggggcctgtcccagatatgttaagcaaaacactctgaaattggcaacagggatgcggaatgtaccagagaaacaaactagaggcatattcggcgcaatcgcaggtttcatagaaaatggttgggagggaatggtagacggttggtacggtttcaggcatcaaaattctgagggcacaggacaagcagcagatcttaaaagcactcaagcagcaatcaaccaaatcaacgggaaactgaataggttaatcgagaaaacgaacgagaaattccatcaaatcgaaaaagaattctcagaagtagaagggagaattcaggacctcgagaaatatgttgaagacactaaaatagatctctggtcgtacaacgcggagcttcttgttgccctggagaaccaacatacaattgatctaactgactcagaaatgaacaaactgtttgaaagaacaaggaagcaactgagggaaaatgctgaggacatgggcaatggttgcttcaaaatataccacaaatgtgacaatgcctgcatagggtcaatcagaaatggaacttatgaccatgatgtatacagagacgaagcattaaacaaccggttccagatcaaaggtgttgagctgaagtcaggatacaaagattggatcctatggatttcctttgccatatcatgttttttgctttgtgttgttttgttggggttcatcatgtgggcctgccaaaaaggcaacattaggtgcaacatttgcatttga

SEQ ID NO: 31330 - RNA, 1701 nt, synthetic construct
  misc_feature 1..1701: note = hemagglutinin__InfluenzaA__ABD94866
  source 1..1701: mol_type = other RNA
atgaagactatcattgctttgagctacatttcatgtctggttttcgctcaaaaacttcccggaaatgacaacagcacggcaacgctgtgcctgggacaccatgcagtgccaaacggaacgctagtgaaaacaatcacgaatgaccaaattgaagtgactaatgctactgagctggttcagagttcctcaacaggtagaatatgcgacggtcctcaccaaatccttgatggaaaaaactgcacactgatagatgctctattaggagaccctcattgtgatggcttccaaaataaggaatgggacctttttgttgaacgcagcaaagcttacagcaactgttacccttatgatgtgccggattatgcctcccttaggtcactagttgcctcttccggcaccctggagtttaccaatgaaagcttcaattggactggagtcgctcagaatggaacaagctatgcttgcaaaaggggatctgttaaaagtttctttagtagattgaattggttgcacaaattagaatacaaatatccagcactaaacgtgactatgccaaacaatgacaaatttgacaaattgtacatttggggggttcaccacccgagtacggacagtgaccaaaccagcctatatgttcaatcatcagggagaatcacagtctctaccaaaagaagccaacaaactgtaaccccgaatatcgggtctagaccctgggtaaggggtgtctccagcagaataagcatctattggacaatagtaaaaccgggagacatacttttgattaccagcacagggaatctaattgctcctcggggttacttcaaaatacgaagggggaaaagctcaataatgaggtcagatgcacccattgacaactgcaattctgaatgcatcactccaaatggaagcattcccaatgacaaaccttttcaaaatgtaaacaggatcacatatggggcctgtcccagatatgttaagcaaaacactctgaaattggcaacagggatgcggaatgtaccagagaaacaaactagaggcatattcggcgcaatcgcaggtttcatagaaaatggttgggagggaatggtagacggttggtacggtttcaggcatcaaaattctgagggcacaggacaagcagcagatcttaaaagcactcaagcagcaatcaaccaaatcaacgggaaactgaataggttaatcgagaaaacgaacgagaaatttcatcaaatcgaaaaagaattctcagaagtagaagggagaattcaggacctcgagaaatatgttgaagacactaaaatagatctctggtcttacaacgcggagcttcttgttgccctggagaatcaacatacaattgatctaactgactcagaaatgaacaaactgtttgaaagaacaaggaagcaactgagggaaaatgctgaggacatgggcaatggttgcttcaaaatataccacaaatgtgacaatgcatgcatagggtcaatcagaaatggaacttatgaccatgatgtatacagagacgaagcattaaacaaccggttccagatcaaaggtgttgagctgaaatcaggatacaaagattggatcctatggatttcctttgccatatcatgctttttgctttgtgttgttttgctggggttcatcatgtgggcctgccaaaaaggcaacattaggtgcaacatttgcatttga

SEQ ID NO: 31331 - RNA, 1701 nt, synthetic construct
  misc_feature 1..1701: note = hemagglutinin__InfluenzaA__ABD94877
  source 1..1701: mol_type = other RNA
atgaagactattattgctttgagctacattttatgtctggttttcgctcaaaaacttcccggaaatgacaacagcacggcaacgctgtgcctgggacaccatgcagtgccaaacggaacgctagtgaaaacaatcacgaatgaccaaattgaagtgactaatgctactgagctggttcagagttcctcaacaggtagaatatgcgacagtcctcaccgaatccttgatggaaaaaactgcacactgatagatgctctattgggagaccctcattgtgatggcttccaaaataaggaatgggacctttttgttgaacgcagcaaagcttacagcaactgttacccttatgatgtgccggattatgcctcccttaggtcactagttgcctcatccggcaccctggagtttaacaatgaaagcttcaattggactggagtcgcccagaatggaacaagctatgcttgcaaaaggagatctgttaaaagtttctttagtagattgaattggttgcacaaattagaatacaaatatccagcactgaacgtgactatgccaaacaatgacaaatttgacaaattgtacatttggggggttcaccacccgagtacggacagtgaccaaaccagcctatatgttcaagcatcagggagagtcacagtctctaccaaaagaagccaacaaactgtaatcccgaatatcggatctagaccctgggtaaggggtgtctccagcaggataagcatatattggacaatagtaaaaccgggagacatacttttgattaacagcacagggaatctaattgctcctcggggttacttcaaaatacgaagtggaaaaagctcaataatgaggtcagatgcacccattgacaactgcaattctgaatgcatcactccaaatggaagcattcccaatgacaaaccatttcaaaatgtaaacaggatcacatatggggcctgtcccagatatgttaagcaaaacactctgaaattggcaacagggatgcggaatgtaccagagaaacaaactagaggcatattcggcgcaatcgcaggtttcatagaaaatggttgggagggaatggtagacggttggtacggtttcaggcatcaaaattctgagggcacaggacaagcagcagatcttaaaagcactcaagcagcaatcaaccaaatcaacgggaaactgaataggttaatcgagaaaacgaacgagaaattccatcaaatcgaaaaagaattctcagaagtagaagggagaattcaggacctcgagaaatatgttgaagacactaaaatagatctctggtcgtacaacgcggagcttcttgttgccctggagaaccaacatacaattgatctaactgactcagaaatgaacaaactgtttgaaagaacaaggaagcaactgagggaaaatgctgaggacatgggcaatggttgcttcaaaatataccacaaatgtgacaatgcctgcatagggtcaatcagaaatggaacttatgaccatgatgtatacagagacgaagcattaaacaaccggttccagatcaaaggtgttgagctgaagtcaggatacaaagattggatcctatggatttcctttgccatatcatgttttttgctttgtgttgttttgctggggttcatcatgtgggcctgccaaaaaggcaacattaggtgcaacatttgcatttga

SEQ ID NO: 31332 - RNA, 1701 nt, synthetic construct
  misc_feature 1..1701: note = hemagglutinin__InfluenzaA__ABD94888
  source 1..1701: mol_type = other RNA
atgaagactatcattgctttgagctacattttatgtctggttttcgctcaaaaacttcccggaaatgacaacagcacggcaacgctgtgcctgggacaccatgcagtgccaaacggaacgctagtgaaaacaatcacgaatgaccaaattgaagtgactaatgctactgagctggttcagagttcctcaacaggtagaatatgcgacagtcctcaccgaatccttgatggaaaaaactgcacactgatagatgctctattgggagaccctcattgtgatggcttcaaaaataaggaatgggacctttttgttgaacgcagcacagcttacagcaactgttacccttatgatgtgccggattatgcctcccttaggtcactagttgcctcatccggcaccctggagtttaccaatgaaggcttcaattggactggagtcgctcaggatggaacaagctatgcttgcaaaaggggatctgttaaaagtttctttagtagattgaattggttgcacaaattagaatacaaatatccagcactgaacgtgactatgccaaacaatgacaaatttgacaaattgtacatttggggggttcaccacccgagtacggacagtgaccaaaccagcctatatgttcaagcatcagggagagtcacagtctctaccaaaagaagccaacaaactgtaatcccgaatatcgggtctagaccctgggtaaggggtgtctccagcagaataagcatctattggacaatagtaaaaccgggagacatacttttgattaacagcacagggaatctaattgctcctcggggttacttcaaaatacgaagtgggaaaagctcaataatgaggtcagatgcacccattgacaactgcaattctgaatgcatcactccaaatggaagcattcccaatgacaaaccttttcaaaatgtaaacaggatcacatatggggcctgtcccagatatgttaagcaaaacactctaaaattggcaacagggatgcggaatgtaccagagaaacaaactagaggcatattcggcgcaatcgcaggtttcatagaaaatggttgggagggaatggtagacggttggtacggtttcaggcatcaaaattctgagggcacaggacaagcagcagatcttaaaagcactcaagcagcaatcaaccaaatcaacgggaaactgaataggttaatcgagaaaacgaacgagaaattccatcaaatcgaaaaagaattctcagaagtagaagggagaattcaggacctcgagaaatatgttgaagacactaaaatagatctctggtcttacaacgcggagcttcttgttgccctggagaaccaacatacaattgatctaactgactcagaaatgaacaaactgtttgaaagaacaagaaagcaactgagggaaaatgctgaggacatgggcaatggttgcttcaaaatatatcacaaatgtgacaatgcctgcatagggtcaatcagaaatggaacttatgaccatgatgtatacagagacgaagcattaaacaaccggttccagatcaaaggtgttgagctgaagtcaggatacaaagattggatcctatggatttcctttgccatatcatgctttttgctttgtgttgttttgctggggttcatcatgtgggcctgccaaaaaggcaacattaggtgcaacatttgcatttga

SEQ ID NO: 31333 - RNA, 1701 nt, synthetic construct; identical to SEQ ID NO: 31312
  misc_feature 1..1701: note = hemagglutinin__InfluenzaA__ABD94899
  source 1..1701: mol_type = other RNA

SEQ ID NO: 31334 - RNA, 1701 nt, synthetic construct
  misc_feature 1..1701: note = hemagglutinin__InfluenzaA__ABD94910
  source 1..1701: mol_type = other RNA
atgaagactatcattgctttgagctacattctatgtctggttttcgctcaaaaacttcccggaaatgacaacagcacggcaacgctgtgcctgggacaccatgcagtgccaaacggaacgctagtgaaaacaatcacgaatgaccaaattgaagtgactaatgctactgagctggttcagaattcctcaacaggtaggatatgtgacagtcctcaccgaatccttgatgggaaaaactgcacactgatagatgctctattgggagaccctcattgtgatggcttccaaaataaggaatgggacctttttgttgaacgcagcaaagcttacagcaactgttacccttatgatgtgccggattatgcctcccttaggtcactagttgcctcatccggcaccctggagtttaacaatgaaagcttcaattggactggagtcgctcagaatggaacaagctatgcttgcaaaaggagatctgttaaaagtttctttagtagattgaattggttgcacaaattagaatacaaatatccagcactgaacgtgactatgccaaacaatgacaaatttgacaaattgtacatttggggggttcaccacccgagtacggacagtgaccaaaccagcctatatgttcaagcatcagggagagtcacagtctctaccaaaagaagccaacaaactgtaatcccgaatatcggatctagaccctgggtaaggggtgtctccagcagaataagcatctattggacaatagtaaaaccgggagacatacttttgattaacagcacagggaatctaattgctcctcggggttacttcaaaatacgaagtgggaaaagctcaataatgaggtcagatgcacccattggcaactgcaattctgaatgcatcactccaaatggaagcattcccaatgacaaaccatttcaaaatgtaaacaggatcacatatggggcctgtcccagatatgttaagcaaaacactctgaaattggcaacagggatgcggaatgtaccagagaaacaaactagaggcatattcggcgcaatcgcaggtttcatagaaaatggttgggagggaatggtagacggttggtacggtttcaggcatcaaaattctgagggcacaggacaagcagcggatcttaaaagcactcaagcagcaatcaaccaaatcaacgggaaactgaataggttaatcgagaaaacgaacgagaaattccatcaaatcgaaaaagaattctcagaagtagaagggagaattcaggacctcgagaaatatgttgaagacactaaaatagatctctggtcgtacaacgcggagcttcttgttgccctggagaaccaacatacaattgatctaactgactcagaaatgaacaaactgtttgaaagaacaaggaagcaactgagggaaaatgctgaggacatgggcaatggttgcttcagaatataccacaaatgtgacaatgcctgcatagggtcaatcagaaatggaacttatgaccatgatgtatacagagacgaagcattaaacaaccggttccagatcaaaggtgttgagctgaagtcaggatacaaagattggatcctatggatttcctttgccatatcatgttttttgctttgtgttgttttgctggggttcatcatgtgggcctgccaaaaaggcaacattaggtgcaacatttgcatttga

SEQ ID NO: 31335 - RNA, 1701 nt, synthetic construct
  misc_feature 1..1701: note = hemagglutinin__InfluenzaA__ABD94921
  source 1..1701: mol_type = other RNA
atgaagactatcattgctttgagctacattttatgtctggttttcgctcaaaaacttcccggaaatgacaacagcacggcaacgctgtgcctgggacaccatgcagtgccaaacggaacgctagtgaaaacaatcacgaatgaccaaattgaagtgactaatgctactgagctggttcagagttcctcaacaggtagaatatgcgacggtcctcaccaaatccttgatggaaaaaactgcacactgatagatgctctattgggagaccctcattgtgatggcttccaaaataaggaatgggacctttttgttgaacgcagcaaagcttacagcaactgttacccttatgatgtgccggattatgcctcccttaggtcactagttgcctcatccggcaccctggagtttaccaatgaaagcttcaattggactggagtcgctcagaatggaacaagctatgcttgcaaaaggggatctgttaaaagtttctttagtagattgaattggttgcacaaattagaatacaaatatccagcactaaacgtgactatgccaaacaatgacaaatttgacaaattgtacatttggggggttcaccacccgagtacggacagtgaccaaaccagcctatatgttcaatcatcagggagagtcacagtctctaccaaaagaagccaacaaactgtaaccccgaatatcgggtctagaccctgggtaaggggtgtctccagcagaataagcatctattggacaatagtaaaaccgggagacatacttttgattaacagcacagggaatctaattgctcctcggggttacttcaaaatacgaagggggaaaagctcaataatgaggtcagatgcacccattgacaactgcaattctgaatgcatcactccaaatggaagcattcccaatgacaaaccttttcaaaatgtaaacaggatcacatatggggcctgtcccagatatgttaagcaaaacactctgaaattggcaacagggatgcggaatgtaccagagaaacaaactagaggcatattcggcgcaatcgcaggtttcatagaaaatggttgggagggaatggtagacggttggtacggtttcaggcatcaaaattctgagggcacaggacaagcagcagatcttaaaagcactcaagcagcaatcaaccaaatcaacgggaaactgaataggttaatcgagaaaacgaacgagaaatttcatcaaatcgaaaaagaattctcagaagtagaagggagaattcaggacctcgagaaatatgttgaagacactaaaatagatctctggtcttacaacgcggagcttcttgttgccctggagaatcaacatacaattgatctaactgactcagaaatgaacaaactgtttgaaagaacaaggaagcaactgagggaaaatgctgaggacatgggcaatggttgcttcaaaatataccacaaatgtgacaatgcatgcatagggtcaatcagaaatggaacttatgaccatgatgtatacagagacgaagcattaaacaaccggttccagatcaaaggtgttgagctgaagtcaggatacaaagattggatcctatggatttcctttgccatatcatgctttttgctttgtgttgttttgctggggttcatcatgtgggcctgccaaaaaggcaacattaggtgcaacatttgcatttga

SEQ ID NO: 31336 - RNA, 1701 nt, synthetic construct; identical to SEQ ID NO: 31312
  misc_feature 1..1701: note = hemagglutinin__InfluenzaA__ABD94932
  source 1..1701: mol_type = other RNA

SEQ ID NO: 31337 - RNA, 1698 nt, synthetic construct
  misc_feature 1..1698: note = hemagglutinin__InfluenzaA__ABD94943
  source 1..1698: mol_type = other RNA
atgaaagtaaaactactgatcctgttatgtacatttacagctacatatgcagacacaatatgtataggctaccatgccaacaactcaaccgacactgttgacacagtacttgagaagaatgtgacagtgacacactctgtcaacctacttgaggacagtcacaatggaaaactgtgcctactaaaaggaatagcccccctacaattgggtaattgcagcgttgccggatggatcttaggaaacccagaatgcgaattactgatttccaaggaatcatggtcctacattgtagaaacaccaaatcctgagaatggagcatgttacccagggtatttcgccgactatgaggagctaagggagcaattgagttcagtatcttcatttgagagattcgaaatattccccaaagaaagctcatggcccaaccacaccgtaaccggagtatcagcatcatgctcccataatgggaaaagcagtttttacagaaatttgctatggctgacggggaagaatggtttgtacccaaacctgagcaagtcctatgcaaacaacaaaaagaaagaagtccttatactatggggtgttcatcacccgcctaacataggggaccaaaggaccctctatcacacagaaaatgcttatgtctctgtagtgtcttcacattatagcagaagattcaccccagaaataaccaaaaggcccaaagtaagagatcaggaaggaagaatcaactactactggactctgctggaacccggggatacaataatatttgaggcaaatggaaatctaatagcgccatggtatgctttcgcactgagtagaggctttggatcaggaatcatcacctcaaatgcaccaatggatgaatgtgatgcgaagtgtcaaacacctcagggagctataaacagcagtcttcctttccagaatgtacacccagtcacaataggagagtgtccaaagtatgtcaggagtgcaaaattaaggatggttacaggactaaggaacatcccatccattcaatccagaggtttgtttggagccattgccggtttcattgaaggggggtggactggaatggtagatgggtggtatggttatcatcatcagaatgagcaaggatctggctatgctgcagatcaaaaaagcacacaaaatgccattaacgggattacaaacaaggtgaattctgtaattgagaaaatgaacactcaattcacagctgtgggcaaagaattcaacaaattggaaagaaggatggaaaacttaaataaaaaggttgatgatgggtttctagacatttggacatataatgcagaattgttggttctactggaaaatgaaaggactttggatttccacgactccaatgtgaagaatctgtacgagaaagtaaaaagccaattaaagaataatgccaaagaaataggaaatgggtgttttgaattctatcacaagtgtaacaatgaatgcatggagagtgtgaaaaatggaacttatgactatccaaaatattccgaagaatcaaagttaaacagggaaaaaattgatggagtgaaattggactcaatgggggtctatcagattctggcgatctactcaactgtcgccagttccctggttcttttggtctccctgggggcaatcagcttctggatgtgttccaatgggtctttgcagtgtagaatatgcatctga

SEQ ID NO: 31338 - RNA, 1701 nt, synthetic construct; identical to SEQ ID NO: 31137
  misc_feature 1..1701: note = hemagglutinin__InfluenzaA__ABD94954
  source 1..1701: mol_type = other RNA

SEQ ID NO: 31339 - RNA, 1698 nt, synthetic construct
  misc_feature 1..1698: note = hemagglutinin__InfluenzaA__ABD94965
  source 1..1698: mol_type = other RNA
atgaaagtaaaactactggtcctgttatgtacatttacagctacatatgcagacacaatatgtatagggtaccatgccaacaactcaaccgacactgttgacacagtacttgagaagaatgtgacagtgacacactctgtcaacctacttgaggacagtcacaatggaaaactatgtctactaaaaggaatagccccactacaattgggtaattgcagcgttgccggatggatcttaggaaacccagaatgcgaattactgatttccaaggaatcatggtcctacattgtagaaacaccaaatcctgagaatggaacatgttacccagggtatttcgccgactatgaggaactgagggagcaattgagttcagtatcttcatttgagagattcgaaatattccccaaagaaagctcatggcccaaccacaccgtaaccggagtatcagcatcatgctcccataatgggaaaagcagtttttacagaaatttgctatggctgacggggaagaatggtttgtacccaaacctgagcaagtcctatgcaaacaacaaagagaaagaagtccttgtactatggggtgttcatcacccgcctaacataggggaccaaagggccctctatcatacagaaaatgcttatgtctctgtagtgtcatcacattatagcagaagattcaccccagaaatagccaaaagacccaaagtaagagatcaggaaggaagaatcaactactactggactctgctggaacccggggatacaataatatttgaggcaaatggaaatctaatagcgccacggtatgctttcgcactgagtagaggctttggatcaggaatcatcacctcaaatgcaccaatggatgaatgtgatgcgaagtgtcaaacacctcagggagctataaacagcagtcttcctttccagaacgtacacccagtcacaataggagagtgtccaaagtatgtcaggagtgcaaaattaaggatggttacaggactaaggaacatcccatccattcaatccagaggtttgtttggagccattgccggtttcattgaaggggggtggactggaatggtagatgggtggtatggttatcatcatcagaatgagcaaggatctggctatgccgcagatcaaaaaagcacacaaaatgccattaacgggattacaaacaaggtgaattctgtaattgagaaaatgaacactcaattcacagctgtgggcaaagaattcaacaaattggagagaaggatggaaaacttaaataaaaaggttgatgatgggtttctagacatttggacatataatgcagaattgttggttctactggaaaatgaaaggactttggatttccatgactccaatgtgaagaatctgtatgagaaagtaaaaagccaattaaagaataatgccaaagaaataggaaacgggtgttttgaattctatcacaagtgtaacaatgaatgcatggagagtgtgaaaaatggaacttatgactatccaaaatattccgaagaatcaaagttaaacagggagaaaattgatggagtgaaattggaatcaatgggagtctatcagattctggcgatctactcaactgtcgccagttccctggttcttttggtctccctgggggcaatcagcttctggatgtgttccaatgggtctttgcagtgtagaatatgcatctga

SEQ ID NO: 31340 - RNA, 1698 nt, synthetic construct; identical to SEQ ID NO: 31245
  misc_feature 1..1698: note = hemagglutinin__InfluenzaA__ABD94987
  source 1..1698: mol_type = other RNA

SEQ ID NO: 31341 - RNA, 1698 nt, synthetic construct; identical to SEQ ID NO: 31245
  misc_feature 1..1698: note = hemagglutinin__InfluenzaA__ABD94998
  source 1..1698: mol_type = other RNA

SEQ ID NO: 31342 - RNA, 1698 nt, synthetic construct
  misc_feature 1..1698: note = hemagglutinin__InfluenzaA__ABD95009
  source 1..1698: mol_type = other RNA
atgaaagtaaaactactggtcctgttatgtacatttacagctacatatgcagacacaatatgtatagggtaccatgccaacaactcaaccgacactgttgacacagtacttgagaagaatgtgacagtgacacactcagtcaacctacttgaggacagtcacaatggaaaactatgtctactaaaaggaatagccccactacaattgggtaattgcagcgttgccggatggatcttaggaaacccagaatgcgaattactgatttccaaggaatcatggtcctacattgtagaaacaccaaatcctgagaatggaacatgttacccagggtatttcgccgactatgaggaactgagggagcaattgagttcagtatcttcatttgagagattcgaaatattccccaaagaaagctcatggcccaaccacaccgtaaccggagtatcagcatcatgctcccataatgggaaaagcagtttttacagaaatttgctatggctgacggggaagaatggtttgtacccaaacctgagcaagtcctatgcaaacaacaaagagaaagaagtccttgtactatggggtgttcatcacccgcctaacataggggaccaaaaggccctctatcatacagaaaatgcttatgtctctgtagtgtcttcacattatagcagaagattcaccccagaaatagccaaaagacccaaagtaagagatcaggaaggaagaatcaactactactggactctgctggaacccggggatacaataatatttgaggcaaatggaaatctaatagcgccacggtatgctttcgcactgagtagaggctttggatcaggaatcatcacctcaaatgcaccaatggatgaatgtgatgcgaagtgtcaaacacctcagggagctataaacagcagtcttcctttccagaacgtacacccagtcacaataggagagtgtccaaagtatgtcaggagtgcaaaattaaggatggttacaggactaaggaacatcccatccattcaatccagaggtttgtttggagccattgccggtttcattgaaggggggtggactggaatggtagatgggtggtatggttatcatcatcagaatgagcaaggatctggctatgccgcagatcaaaaaagcacacaaaatgccattaacgggattacaaacaaggtgaattctgtaattgagaaaatgaacactcaattcacagctgtgggcaaagaattcaacaaattggaaagaaggatggaaaacttaaataaaaaagttgatgatgggtttctagacatttggacatataatgcagaattgttggttctactggaaaatgaaaggactttggatttccatgactccaatgtgaagaatctgtatgagaaagtaaaaagccaattaaagaataatgccaaagaaataggaaacgggtgttttgaattctatcacaagtgtaacaatgaatgcatggagagtgtgaaaaatggaacttatgactatccaaaatattccgaagaatcaaagttaaacagggagaaaattgatggagtgaaattggaatcaatgggagtctatcagattctggcgatctactcaactgtcgccagttccctggttcttttggtctccctgggggcaatcagcttctggatgtgttccaatgggtctttgcagtgtagaatatgcatctga

SEQ ID NO: 31343 - RNA, 1698 nt, synthetic construct; identical to SEQ ID NO: 31246
  misc_feature 1..1698: note = hemagglutinin__InfluenzaA__ABD95020
  source 1..1698: mol_type = other RNA

SEQ ID NO: 31344 - RNA, 1698 nt, synthetic construct
  misc_feature 1..1698: note = hemagglutinin__InfluenzaA__ABD95031
  source 1..1698: mol_type = other RNA
atgaaagtaaaactactggtcctgttatgtacatttacagctacatatgcagacacaatatgtatagggtaccatgccaacaactcaaccgacactgttgacacagtacttgagaagaatgtgacagtgacacactctgtcaacctacttgaggacagtcacaatggaaaactatgtctactaaaaggaatagccccactacaattgggtaattgcagcgttgccggatggatcttaggaaacccagaatgcgaattactgatttccaaggaatcatggtcctacattgtagaaacaccaaatcctgagaatggaacatgttacccagggtatttcaccgactatgaggaactgagggagcaattgagttcagtatcttcatttgagagattcgaaatattccccaaagaaagctcatggcccaaccacaccgtaaccggagtatcagcatcatgctcccataatgggaaaagtagtttttacagaaatttgctatggctgacggggaagaatggtttgtacccaaacctgagaaggtcctatgcaaacaacaaagagaaagaagtccttgtactatggggtgttcatcacccgcctaacataggggaccaaaaggccctctatcatacagaaaatgcttatgtctctgtagtgtcttcacattatagcagaagattcaccccagaaatagccaaaagacccaaagtaagaggtcaggaaggaagaatcaactactactggactctgctggaacccggggatacaataatatttgaggcaaatggaaatctaatagcgccacggtatgctttcgcactgagtagaggctttggatcaggaatcatcacctcaaatgcaccaatggatgaatgtgatgcgaagtgtcaaacacctcagggagctataaacagcagtcttcctttccagaacgtacacccagtcacaataggagagtgtccaaagtatgtcaggagtgcaaaattaaggatggttacaggactaaggaacatcccatccattcaatccagaggtttgtttggagccattgccggtttcattgaaggggggtggactggaatggtagatgggtggtatggttatcatcatcagaatgagcaaggatctggctatgccgcagatcaaaaaagcacacaaaatgccattaacgggattacaaacaaggtgaattctataattgagaaaatgaacactcaattcacagctgtgggcaaagaattcaacaaattggaaagaaggatggaaaacttaaataaaaaagttgatgatgggtttctagacatttggacatataatgcagaattgttggttctactggaaaatgaaaggactttggatttccatgactccaatgtgaagaatctgtatgagaaagtaaaaagccaattaaagaataatgccaaagaaataggaaacgggtgttttgaattctatcacaagtgtaacaatgaatgcatggagagtgtgaaaaatggaacttatgactatccaaaatattccgaagaatcaaagttaaacagggagaaaattgatggagtgaaattggaatcaatgggagtctatcagattctggcgatctactcaactgtcgccagttccctggttcttttggtctccctgggggcaatcagcttctggatgtgttccaatgggtctttgcagtgtagaatatgcatctga

SEQ ID NO: 31345 - RNA, 1698 nt, synthetic construct
  misc_feature 1..1698: note = hemagglutinin__InfluenzaA__ABD95042
  source 1..1698: mol_type = other RNA
atgaaagcaaaactactggtcctgttatgtacatttacagctacatacgcagacacaatatgtataggctaccatgccaacaactcaaccgacactgttgacacagtacttgagaagaatgtgacagtgacacactctgtcaacctacttgaggacagtcacaatggaaaactatgtctactaaaaggaatagccccactacaattgggtaattgcagcgttgccggatggatcttaggaaacccagaatgcgaattactgatttccaaggaatcatggtcctacattgtagaaacaccaaatcccgagaatggaacatgttacccagggtatttcgccgactatgaggaactgagggagcaattgagttcagtatcttcatttgagagatttgaaatattccccaaaggaagctcatggcccaaccacaccgtgaccggagtatcagcatcatgctcccataatgggaaaagcagtttttacagaaatttgctatggctgacggggaagaatggtttgtacccaaacctgagcatgtcctatgtaaacaacaaagggaaagaagtccttgtgctatggggtgttcatcacccacctaacataggggaccaaagggccctctaccatacagaaaatgcttatgtctctgtagtgtcttcacattatagcagaagattcaccccagaaatagccaaaagacccaaagtaagagatcaggaaggaagaatcaactactactggactctgctggaacccggggacacaataatatttgaggcaaatggaaatctaatagcgccatggtatgctttcgcactgagtagaggctttggatcaggaatcatcacctcaaatgcaccaatgggtgaatgtgatgcgaagtgtcaaacacctcagggagctataaacagtagtcttcctttccagaatgtacacccagttacaataggagagtgtccaaagtatgtcaggagtgcaaaattaaggatggttacaggactaaggaacatcccatccattcaatccagaggtttgtttggagccattgccggtttcattgaaggggggtggactggaatggtagatgggtggtatggttatcatcatcagaatgagcaaggatctggctatgctgcagatcaaaaaagcacacaaaatgccattaacgggattacaaacaaggtgaattctgtaattgagaaaatgaacactcaattcacagctgtgggcaaagaattcaacaaattagaaagaaggatggaaaacttaaataaaaaagttgatgatgggtttctagacatttggacatataatgcagaattgttggttctactggaaaatgaaaggactttggatttccatgactccaatgtgaagaatctgtatgagaaagtaaaaagccaattaaagaataatgccaaagaaataggaaacgggtgttttgaattctatcacaagtgtaacaatgaatgcatggaaagtgtgaaaaatggaacttatgactatccaaaatattccgaagaatcaaagttaaacagggagaaaattgatggagtaaaattggaatcaatgggagtctatcagattctggcgatctactcaactgtcgccagttccctggttcttttggtctccctgggggcaatcagcttctggatgtgttccaatgggtctttgcagtgtagaatatgcatctga

SEQ ID NO: 31346 - RNA, 1698 nt, synthetic construct
  misc_feature 1..1698: note = hemagglutinin__InfluenzaA__ABD95053
  source 1..1698: mol_type = other RNA
atgaaagcaaaactactggtcctgttatgtacatttacagctacatacgcagacacaatatgtataggctaccatgccaacaactcaaccgacactgttgacacagtacttgagaagaatgtgacagtgacacactctgtcaacctacttgaggacagtcacaatggaaaactatgtctactaaaaggaatagccccactacaattgggtaattgcagcgttgccggatggatcttaggaaacccagaatgcgaattactgatttccaaggaatcatggtcctacattgtagaaacaccaaatcccgagaatggaacatgttacccagggtatttcgccgactatgaggaactgagggagcaattgagttcagtatcttcatttgagagattcgaaatattccccaaaggaagctcatggcccaaccacaccgtgaccggagtatcagcatcatgctcccataatgggaaaagcagtttttacagaaatttgctatggctgacggggaagaatggtttgtacccaaacctgagcatgtcctatgtaaacaacaaagggaaagaagtccttgtgctatggggtgttcatcacccacctaacataggggaccaaagggccctctaccatacagaaaatgcttatgtctctgtagtgtcttcacattatagcagaagattcaccccagaaatagccaaaagacccaaagtaagagatcaggaaggaagaatcaactactactggactctgctggaacccggggacacaataatatttgaggcaaatggaaatctaatagcgccatggtatgctttcgcactgagtagaggctttggatcaggaatcatcacctcaaatgcaccaatgggtgaatgtgatgcgaagtgtcaaacacctcagggagctataaacagtagtcttcctttccagaatgtacacccagttacaataggagagtgtccaaagtatgtcaggagtgcaaaattaaggatggttacaggactaaggaacatcccatccattcaatccagaggtttgtttggagccattgccggtttcattgaaggggggtggactggaatggtagatgggtggtatggttatcatcatcagaatgagcaaggatctggctatgctgcagatcaaaaaagcacacaaaatgccattaacgggattacaaacaaggtgaattctgtaattgagaaaatgaacactcaattcacagctgtgggcaaagaattcaacaaattagaaagaaggatggaaaacttaaataaaaaagttgatgatgggtttctagacatttggacatataatgcagaattgttggttctactggaaaatgaaaggactttggatttccatgactccaatgtgaagaatctgtatgagaaagtaaaaagccaattaaagaataatgccaaagaaataggaaacgggtgttttgaattctatcacaagtgtaacaatgaatgcatggaaagtgtgaaaaatggaacttatgactatccaaaatattccgaagaatcaaagttaaacagggagaaaattgatggagtaaaattggaatcaatgggagtctatcagattctggcgatctactcaactgtcgccagttccctggttcttttggtctccctgggggcaatcagcttctggatgtgttccaatgggtctttgcagtgtagaatatgcatctga

SEQ ID NO: 31347 - RNA, 1698 nt, synthetic construct; identical to SEQ ID NO: 31304
  misc_feature 1..1698: note = hemagglutinin__InfluenzaA__ABD95064
  source 1..1698: mol_type = other RNA

SEQ ID NO: 31348 - RNA, 1698 nt, synthetic construct
  misc_feature 1..1698: note = hemagglutinin__InfluenzaA__ABD95075
  source 1..1698: mol_type = other RNA
atgaaagcaaaactactggtcctgttatgtacatttacagctacatacgcagacacaatatgtataggctaccatgccaacaactcaaccgacactgttgacacagtacttgagaagaatgtgacagtgacacactctgtcaacctacttgaggacagtcacaatggaaaactatgtctactaaaaggaatagccccactacaattgggtaattgcagcgttgccggatggatcttaggaaacccagaatgcgaattactgatttccaaggaatcatggtcctacattgtagaaacaccaaatcccgagaatggaacatgttacccagggtatttcgccgactatgaggaactgagggagcaattgagttcagtatcttcatttgagagattcgaaatattccccaaaggaagctcatggcccaaccacaccgtgaccggagtatcagcatcatgctcccataatgggaaaagcagtttttacagaaatttgctatggctgacggggaagaatggtttgtacccaaacctgagcatgtcctatgtaaacaacaaagagaaagaagtccttgtgctatggggtgttcatcacccacctaacataggggaccaaagggccctctaccatacagaaaatgcttatgtctctgtagtgtcttcacattatagcagaagattcaccccagaaatagccaaaagacccaaagtaagagatcaggaaggaagaatcaactactactggactctgctggaacccggggacacaataatatttgaggcaaatggaaatctaatagcgccatggtatgctttcgcactgagtaaaggctttggatcaggaatcatcacctcaaatgcaccaatgggtgaatgtgatgcgaagtgtcaaacacctcagggagctataaacagtagtcttcctttccagaatgtacacccagttacaataggagagtgtccaaagtatgtcaggagtgcaaaattaaggatggttacaggactaaggaacatcccatccattcaatccagaggtttgtttggagccattgccggtttcattgaaggggggtggactggaatggtagatgggtggtatggttatcatcatcagaatgagcaaggatctggctatgctgcagatcaaaaaagcacacaaaatgccattaacgggattacaaacaaggtgaattctgtaattgagaaaatgaacactcaattcacagctgtgggcaaagaattcaacaaattagaaagaaggatggaaaacttaaataaaaaagttgatgatgggtttctagacatttggacatataatgcagaattgttggttctactggaaaatgaaaggactttggatttccatgactccaatgtgaagaatctgtatgagaaagtaaaaagccaattaaagaataatgccaaagaaataggaaacgggtgttttgaattctatcacaagtgtaacaatgaatgcatggaaagtgtgaaaaatggaacttatgactatccaaaatattccgaagaatcaaagttaaacagggagaaaattgatggagtaaaattggaatcaatgggagtctatcagattctggcgatctactcaactgtcgccagttccctggttcttttggtctccctgggggcaatcagcttctggatgtgttccaatgggtctttgcagtgtagaatatgcatctga

SEQ ID NO: 31349 - RNA, 1698 nt, synthetic construct; identical to SEQ ID NO: 31346
  misc_feature 1..1698: note = hemagglutinin__InfluenzaA__ABD95086
  source 1..1698: mol_type = other RNA

SEQ ID NO: 31350 - RNA, 1698 nt, synthetic construct; identical to SEQ ID NO: 31304
  misc_feature 1..1698: note = hemagglutinin__InfluenzaA__ABD95097
  source 1..1698: mol_type = other RNA

SEQ ID NO: 31351 - RNA, 1698 nt, synthetic construct
  misc_feature 1..1698: note = hemagglutinin__InfluenzaA__ABD95119
  source 1..1698: mol_type = other RNA
atgaaagcaaaactactgatcctgttatgtacatttacagctacatacgcagacacaatatgtataggctaccatgccaacaactcaaccgacactgttgacacagtacttgagaagaatgtgacagtgacacactctgtcaacctacttgaggacagtcacaatggaaaactatgtctactaaaaggaatagccccactacaattgggtaattgcagcgttgccggatggatcttaggaaacccagaatgcgaattactgatttccaaggaatcatggtcctacattgtagaaacaccaaatcccgagaatggaacatgttacccagggtatttcgccgactatgaggaactgagggagcaattgagttcagtatcttcatttgagagattcgaaatattccccaaaggaagctcatggcccaaccacaccgtgaccggagtatcagcatcatgctcccataatgggaaaagcagtttttacagaaatttgctatggctgacggggaagaatggtttgtacccaaacctgagcatgtcctatgtaaacaacaaagagaaagaagtccttgtgctatggggtgttcatcacccacctaacataggggaccaaagggccctctaccatacagaaaatgcttatgtctctgtagtgtcttcacattatagcagaagattcaccccagaaatagccaaaagacccaaagtaagagatcaggaaggaagaatcaactactactggactctgctggaacccggggacacaataatatttgaggcaaatggaaatctaatagcgccatggtatgctttcgcactgagtagaggctttggatcaggaatcatcacctcaaatgcaccaatgggtgaatgtgatgcgaagtgtcaaacacctcagggagctataaacagtagtcttcctttccagaatgtacacccagttacaataggagagtgtccaaagtatgtcaggagtgcaaaattaaggatggttacaggactaaggaacatcccatccattcaatccagaggtttgtttggagccattgccggtttcattgaaggggggtggactggaatggtagatgggtggtatggttatcatcatcagaatgagcaaggatctggctatgctgcagatcaaaaaagcacacaaaatgccattaacgggattacaaacaaggtgaattctgtaattgagaaaatgaacactcaattcacagctgtgggcaaagaattcaacaaattagaaagaaggatggaaaacttaaataaaaaagttgatgatgggtttctagacatttggacatataatgcagaattgttggttctactggaaaatgaaaggactttggatttccatgactccaatgtgaagaatctgtatgagaaagtaaaaagccaattaaagaataatgccaaagaaataggaaacgggtgttttgaattctatcacaagtgtaacaatgaatgcatggaaagtgtgaaaaatggaacttatgactatccaaaatattccgaagaatcaaagttaaacagggagaaaattgatggggtaaaattggaatcaatgggagtctatcagattctggcgatctactcaactgtcgccagttccctggttcttttggtctccctgggggcaatcagcttctggatgtgttccaatgggtctttgcagtgtagaatatgcatctga

SEQ ID NO: 31352 - RNA, 1698 nt, synthetic construct
  misc_feature 1..1698: note = hemagglutinin__InfluenzaA__ABD95130
  source 1..1698: mol_type = other RNA
atgaaagcaaaactactggtcctgttatgtacatttacagctacatacgcagacacaatatgtataggctaccatgccaacaactcaaccgacactgttgacacagtacttgagaagaacgtgacagtgacacactctgtcaacctacttgaggacagtcacaatggaaaactatgtctactaaaaggaatagccccactacaattgggtaattgcagcgttgccggatggatcttaggaaacccagaatgcgaattactgatttccaaggaatcatggtcctacattgtagaaacaccaaatcccgagaatggaacatgttacccagggtatttcgccgactatgaggaactgagggagcaattgagttcagtatcttcatttgagagattcgaaatattccccaaaggaagctcatggcccaaccacaccgtgaccggagtatcagcatcatgctcccataatgggaaaagcagtttttacagaaatttgctatggctgacggggaagaatggttcgtacccaaacctgagcatgtcctatgtaaacaacaaagagaaagaagtccttgtgctatggggtgttcatcacccacctaacataggggaccaaagggccctctaccatacagaaaatgcttatgtctctgtagtgtcttcacattatagcagaagattcaccccagaaatagccaaaagacccaaagtaagagatcaggaaggaagaatcaactactactggactctgctggaacccggggacacaataatatttgaggcaaatggaaatctaatagcgccatggtatgctttcgcactgagtagaggctttggatcaggaatcatcacctcaaatgcaccaatgggtgaatgtgatgcgaagtgtcaaacacctcagggagctataaacagtagtcttcctttccagaatgtacacccagttacaataggagagtgtccaaagtatgtcaggagtgcaaaattaaggatggttacaggactaaggaacatcccatccattcaatccagaggtttgtttggagccattgccggtttcattgaaggggggtggactggaatggtagatgggtggtatggttatcatcatcagaatgagcaaggatctggctatgctgcagatcaaaaaagcacacaaaatgccattaacgggattacaaacaaggtgaattctgtaattgagaaaatgaacacccaattcacagctgtgggcaaagaattcaacaaattagaaagaaggatggaaaacttaaataaaaaagttgatgatgggtttctagacatttggacatataatgcagaattgttggttctactggaaaatgaaaggactttggatttccatgactccaatgtgaagaatctgtatgagaaagtaaaaagccaattaaagaataatgccaaagaaataggaaacgggtgttttgaattctatcacaagtgtaacaatgaatgcatggaaagtgtgaaaaatggaacttatgactatccaaaatattccgaagaatcaaagttaaacagggagaaaattgatggagtaaaattggaatcaatgggagtctatcagattctggcgatctactcaactgtcgccagttccctggttcttttggtctccctgggggcaatcagcttctggatgtgttccaatgggtctttgcagtgtagaatatgcatctga

SEQ ID NO: 31353 - RNA, 1698 nt, synthetic construct; identical to SEQ ID NO: 31304
  misc_feature 1..1698: note = hemagglutinin__InfluenzaA__ABD95141
  source 1..1698: mol_type = other RNA

SEQ ID NO: 31354 - RNA, 1698 nt, synthetic construct; identical to SEQ ID NO: 31304
  misc_feature 1..1698: note = hemagglutinin__InfluenzaA__ABD95152
  source 1..1698: mol_type = other RNA

SEQ ID NO: 31355 - RNA, 1698 nt, synthetic construct; identical to SEQ ID NO: 31351
  misc_feature 1..1698: note = hemagglutinin__InfluenzaA__ABD95163
  source 1..1698: mol_type = other RNA

SEQ ID NO: 31356 - RNA, 1698 nt, synthetic construct; identical to SEQ ID NO: 31346
  misc_feature 1..1698: note = hemagglutinin__InfluenzaA__ABD95174
  source 1..1698: mol_type = other RNA

SEQ ID NO: 31357 - RNA, 1698 nt, synthetic construct
  misc_feature 1..1698: note = hemagglutinin__InfluenzaA__ABD95185
  source 1..1698: mol_type = other RNA
atgaaagcaaaactactggtcctgttatgtacatttacagctacatacgcagacacaatatgtataggctaccatgccaacaactcaaccgacactgttgacacagtacttgagaagaatgtgacagtgacacactctgtcaacctacttgaggacagtcacaatggaaaactatgtctactaaaaggaatagccccactacaattgggtaattgcagcgttgccggatggatcttaggaaacccagaatgcgaattactgatttccaaggaatcatggtcctacattgtagaaacaccaaatcccgagaatggaacatgttacccagggtatttcgccgactatgaggaactgagggagcaattgagttcagtatcttcatttgagagattcgaaatattccccaaaggaagctcatggcccaaccacaccgtgaccggagtatcagcatcatgctcccataatggggaaagcagtttttacagaaatttgctatggctgacggggaagaatggtttgtacccaaacctgagcatgtcctatgtaaacaacaaagagaaagaagtccttgtgctatggggtgttcatcacccacctaacataggggaccaaagggccctctaccatacagaaaatgcttatgtctctgtagtgtcttcacattatagcagaagattcaccccagaaatagccaaaagacccaaagtaagagatcaggaaggaagaatcaactactactggactctgctggaacccggggacacaataatatttgaggcaaatggaaatctaatagcgccatggtatgctttcgcactgagtagaggctttggatcaggaatcatcacctcaaatgcaccaatgggtgaatgtgatgcgaagtgtcaaacacctcagggagctataaacagtagtcttcctttccagaatgtacacccagttacaataggagagtgtccaaagtatgtcaggagtgcaaaattaaggatggttacaggactaaggaacatcccatccattcaatccagaggtttgtttggagccattgccggtttcattgaaggggggtggactggaatggtagatgggtggtatggttatcatcatcagaatgagcaaggatctggctatgctgcagatcaaaaaagcacacaaaatgccattaacgggattacaaacaaggtgaattctgtaattgagaaaatgaacacccaattcacagctgtgggcaaagaattcaacaaattagaaagaaggatggaaaacttaaataaaaaagttgatgatgggtttctagacatttggacatataatgcagaattgttggttctactggaaaatgaaaggactttggatttccatgactccaatgtgaagaatctgtatgagaaagtaaaaagccaattaaagaataatgccaaagaaataggaaacgggtgttttgaattctatcacaagtgtaacaatgaatgcatggaaagtgtgaaaaatggaacttatgactatccaaaatattccgaagaatcaaagttaaacagggagaaaattgatggagtaaaattggaatcaatgggagtctatcagattctggcgatctactcaactgtcgccagttccctggttcttttggtctccctgggggcaatcagcttctggatgtgttccaatgggtctttgcagtgtagaatatgcatctga

SEQ ID NO: 31358 - RNA, 1698 nt, synthetic construct
  misc_feature 1..1698: note = hemagglutinin__InfluenzaA__ABD95196
  source 1..1698: mol_type = other RNA
atgaaagcaaaactactggtcctgttatgtacatttacagctacatacgcagacacaatatgtataggctaccatgccaacaactcaaccgacactgttgacacagtacttgagaagaatgtgacagtgacacactctgtcaacctacttgaggacagtcacaatggaaaactatgtctactaaaaggaatagccccactacaattgggtaattgcagcgttgccggatggatcttaggaaacccagaatgcgaattactgatttccaaggaatcatggtcctacattgtagaaacaccaaatcccgagaatggaacatgttacccagggtatttcgccgactatgaggaactgagggagcaattgagttcagtatcttcatttgagagattcgaaatattccctaaaggaagctcatggcccaaccacaccgtgaccggagtatcagcatcatgctcccataatgggaaaagcagtttttacagaaatttgctatggctgacggggaagaatggtttgtacccaaacctgagcatgtcctatgtaaacaacaaagggaaagaagtccttgtgctatggggtgttcatcacccacctaacataggggaccaaagggccctctaccatacagaaaatgcttatgtctctgtagtgtcttcacattatagcagaagattcaccccagaaatagccaaaagacccaaagtaagagatcaggaaggaagaatcaactactactggactctgctggaacccggggacacaataatatttgaggcaaatggaaatctaatagcgccatggtatgctttcgcactgagtagaggctttggatcaggaatcatcacctcaaatgcaccaatgggtgaatgtgatgcgaagtgtcaaacacctcagggagctataaacagtagtcttcctttccagaatgtacacccagttacaataggagagtgtccaaagtatgtcaggagtgcaaaattaaggatggttacaggactaaggaacatcccatccattcaatccagaggtttgtttggagccattgccggtttcattgaaggggggtggactggaatggtagatgggtggtatggttatcatcatcagaatgagcaaggatctggctatgctgcagatcaaaaaagcacacaaaatgccattaacgggattacaaacaaggtgaattctgtaattgagaaaatgaacactcaattcacagctgtgggcaaagaattcaacaaattagaaagaaggatggaaaacttaaataaaaaagttgatgatgggtttctagacatttggacatataatgcagaattgttggttctactggaaaatgaaaggactttggatttccatgactccaatgtgaagaatctgtatgagaaagtaaaaagccaattaaagaataatgccaaagaaataggaaacgggtgttttgaattctatcacaagtgtaacaatgaatgcatggaaagtgtgaaaaatggaacttatgactatccaaaatattccgaagaatcaaagttaaacagggagaaaattgatggagtaaaattggaatcaatgggagtctatcagattctggcgatctactcaactgtcgccagttccctggttcttttggtctccctgggggcaatcagcttctggatgtgttccaatgggtctttgcagtgtagaatatgcatctga

SEQ ID NO: 31359 - RNA, 1698 nt, synthetic construct
  misc_feature 1..1698: note = hemagglutinin__InfluenzaA__ABD95207
  source 1..1698: mol_type = other RNA
atgaaagtaaaactactggtcctgttatgtacatttacagctacatatgcagacacaatatgtataggctaccatgccaacaactcaaccgacactgttgacacagtacttgagaagaatgtgacagtgacacactctgtcaacctacttgaggacagtcacaatggaaaactatgtctactaaaaggaatagccccactacaattgggtaattgcagcgttgccggatggatcttaggaaacccagaatgcgaattactgatttccaaggaatcatggtcctacattgtagaaacaccaaatcctgagaatggaacatgttacccagggtatttcgccgactatgaggaactgagggagcaattgagttcagtatcttcatttgagaggttcgaaatattccccaaagaaagctcatggcccaaccacaccgtaaccggagtatcagcatcatgctcccataatgggaaaagcagtttttacagaaatttgctatggctgacggggaagaatggtttgtacccaaacctgagcaagtcctatgcaaacaacaaagagaaagaagtccttgtactatggggtgttcatcacccgcctaacataggggaccaaagggccctctatcatacagaaaatgcttatgtctctgtagtgtcttcacattatagcagaagattcaccccagaaatagccaaaagacccaaagtaagagatcaggaaggaagaatcaactactactggactctgctggaacccggggatacaataatatttgaggcaaatggaaatctaatagcgccaaggtatgctttcgcactgagtagaggctttggatcaggaatcatcacctcaaatgcaccaatggatgaatgtgatgcgaagtgtcaaacacctcagggagctataaacagcagtcttcctttccagaatgtacacccagtcacaataggagagtgtccaaagtatgtcaggagtgcaaaattaaggatggttacaggactaaggaacatcccatccattcaatccagaggtttgtttggagccattgccggtttcattgaaggggggtggactggaatggtagatggttggtatggttatcatcatcagaatgagcaaggatctggctatgctgcagatcaaaaaagcacacaaaatgccattaacgggattacaaacaaggtgaattctgtaattgagaaaatgaacactcaattcacagctgtgggcaaagaattcaacaaattggaaagaaggatggaaaacttaaataaaaaagttgatgatgggtttctagacatttggacatataatgcagaattgttggttctactggaaaatgaaaggactttggatttccatgactccaatgtgaagaatctgtatgagaaagtaaaaagccaattaaagaataatgccaaagaaataggaaacgggtgttttgaattctatcacaagtgtaacgatgaatgcatggagagtgtgaaaaatggaacttatgactatccaaaatattccgaagaatcaaagttaaacagggagaaaattgatggagtgaaattggaatcaatgggagtctatcagattctggcgatctactcaacagtcgccagttccctggttcttttggtctccctgggggcaatcagcttctggatgtgttccaatgggtctttgcagtgtagaatatgcatctaa

SEQ ID NO: 31360 - RNA, 1698 nt, synthetic construct; identical to SEQ ID NO: 31304
  misc_feature 1..1698: note = hemagglutinin__InfluenzaA__ABD95218
  source 1..1698: mol_type = other RNA

SEQ ID NO: 31361 - RNA, 1698 nt, synthetic construct
  misc_feature 1..1698: note = hemagglutinin__InfluenzaA__ABD95229
  source 1..1698: mol_type = other RNA
atgaaagcaaaactactgatcctgttatgtacatttacagctacatacgcagacacaatatgtataggctaccatgccaacaactcaaccgacactgttgacacagtacttgagaagaatgtgacagtgacacactctgtcaacctacttgaggacagtcacaatggaaaactatgtctactaaaaggaatagccccactacaattgggtaattgcagcgttgccggatggatcttaggaaacccagaatgcgaattactgatttccaaggaatcatggtcctacattgtagaaacaccaaatcccgagaatggaacatgttacccagggtatttcgccgactatgaggaactgagggagcaattgagttcagtatcttcatttgagagattcgaaatattccccaaaggaagctcatggcccaaccacaccgtgaccggagtatcagcatcatgctcccataatgggaaaagcagtttttacagaaatttgctatggctgacggggaagaatggtttgtacccaaacctgagcatgtcctatgtaaacaacaaagagaaagaagtccttgtgctatggggtgttcatcacccacctaacataggggaccaaagggccctctaccatacagaaaatgcttatgtctctgtagtgtcttcacattatagcagaagattcaccccagaaatagccaaaagacccaaagtaagagatcaggaaggaagaatcaactactactggactctgctggaacccggggacacaataatatttgaggcaaatggaaatctaatagcgccatggtatgctttcgcactgagtagaggctttggatcaggaatcatcacctcaaatgcaccaatgggtgaatgtgatgcgaagtgtcaaacacctcagggagctataaacagtagtcttcctttccagaatgtacacccagttacaataggagagtgtccaaagtatgtcaggagtgcaaaattaaggatggttacaggactaaggaacatcccatccattcaatccagaggtttgtttggagccattgccggtttcattgaaggggggtggactggaatggtagatgggtggtatggttatcatcatcagaatgagcaaggatctggctatgctgcagatcaaaagagcacacaaaatgccattaacgggattacaaacaaggtgaattctgtaattgagaaaatgaacactcaattcacagctgtgggcaaagaattcaacaaattagaaagaaggatggaaaacttaaataaaaaagttgatgatgggtttctagacatttggacatataatgcagaattgttggttctactggaaaatgaaaggactttggatttccatgactccaatgtgaagaatctgtatgagaaagtaaaaagccaattaaagaataatgccaaagaaataggaaacgggtgttttgaattctatcacaagtgtaacaatgaatgcatggaaagtgtgaaaaatggaacttatgactatccaaaatattccgaagaatcaaagttaaacagggagaaaattgatggggtaaaattggaatcaatgggagtctatcagattctggcgatctactcaactgtcgccagttccctggttcttttggtctccctgggggcaatcagcttctggatgtgttccaatgggtctttgcagtgtagaatatgcatctga

SEQ ID NO: 31362 - RNA, 1698 nt, synthetic construct
  misc_feature 1..1698: note = hemagglutinin__InfluenzaA__ABD95240
  source 1..1698: mol_type = other RNA
atgaaagcaaaactgctggtcctgttatgtacatttacagctacatacgcagacacaatatgtataggctaccatgccaacaactcaaccgacactgttgacacagtacttgagaagaatgtgacagtgacacactctgtcaacctacttgaggacagtcacaatggaaaactatgtctactaaaaggaatagccccactacaattgggtaattgcagcgttgccggatggatcttaggaaacccagaatgcgaattactgatttccaaggaatcatggtcctacattgtagaaacaccaaatcccgagaatggaacatgttacccagggtatttcgccgactatgaggaactgagggagcaattgagttcagtatcttcatttgagagattcgaaatattccccaaaggaagctcatggcccaaccacaccgtgaccggagtatcagcatcatgctcccataatgggaaaagcagtttttacagaaatttgctatggctgacggggaagaatggtttgtacccaaacctgagcatgtcctatgtaaacaacaaagagaaagaagtccttgtgctatggggtgttcatcacccacctaacataggggaccaaagggccctctaccatacagaaaatgcttatgtctctgtagtgtcttcacattatagcagaagattcaccccagaaatagccaaaagacccaaagtaagagatcaggaaggaagaatcaactactactggactctgctggaacccggggacacaataatatttgaggcaaatggaaatctaatagcgccatggtatgctttcgcactgagtagaggctttggatcaggaatcatcacctcaaatgcaccaatgggtgaatgtgatgcgaagtgtcaaacacctcagggagctataaacagtagtcttcctttccagaatgtacacccagttacaataggagagtgtccaaagtatgtcaggagtgcaaaattaaggatggttacaggactaaggaacatcccatccattcaatccagaggtttgtttggagccattgccggtttcattgaaggggggtggactggaatggtagatgggtggtatggttatcatcatcagaatgagcaaggatctggctatgctgcagatcaaaaaagcacacaaaatgccattaacgggattacaaacaaggtgaattctgtaattgagaaaatgaacactcaattcacagctgtgggcaaagaattcaacaaattagaaagaaggatggaaaacttaaataaaaaagttgatgatgggtttctagacatttggacatataatgcagaattgttggttctactggaaaatgaaaggactttggatttccatgactccaatgtgaagaatctgtatgagaaagtaaaaagccaattaaagaataatgccaaagaaataggaaacgggtgttttgaattctatcacaagtgtaacaatgaatgcatggaaagtgtgaaaaatggaacttatgactatccaaaatattccgaagaatcaaagttaaacagggagaaaattgatggagtaaaattggaatcaatgggagtctatcagattctggcgatctactcaactgtcgccagttccctggttcttttggtctccctgggggcaatcagcttctggatgtgttccaatgggtctttgcagtgtagaatatgcatctga

SEQ ID NO: 31363 - RNA, 1698 nt, synthetic construct
  misc_feature 1..1698: note = hemagglutinin__InfluenzaA__ABD95251
  source 1..1698: mol_type = other RNA
atgaaagcaaaactactggtcctgttatgtacatttacagctacatacgcagacacaatatgtataggctaccatgccaacaactcaaccgacactgttgacacagtacttgagaagaatgtgacagtgacacactctgtcaacctacttgaggacagtcacaatggaaaactatgtctactaaaaggaatagccccactacaattgggtaattgcagcgttgccggatggatcttaggaaacccagaatgcgaattactgatttccaaggaatcatggtcctacattgtagaaacaccaaatcccgagaatggaacatgttacccagggtatttcgccgactatgaggaactgagggagcaattgagttcagtatcttcatttgagagattcgaaatattccccaaaggaagctcatggcccaaccacaccgtgaccggagtatcagcatcatgctcccataatgggaaaagcagtttttacagaaatttgctatggctgacggggaagaatggtttgtacccaaacctgagcatgtcctatgtaaacaacaaagggaaagaagtccttgtgctatggggtgttcatcacccacctaacataggggaccaaagggccctctaccatacagaaaatgcttatgtctctgtagtgtcttcacattatagcagaagattcaccccagaaatagccaaaagacccaaagtaagagatcaggaaggaagaatcaactactactggactctgctggaacccggggacacaataatatttgaggcaaatggaaatctaatagcgccatggtatgctttcgcactgagtagaggctttggatcaggaatcatcacctcaaatgcaccaatgggtgaatgtgatgcgaagtgtcaaacacctcagggagctataaacagtagtcttcctttccagaatgtacacccagttacaataggagagtgtccaaagtatgtcaggagtgcaaaattgaggatggttacaggactaaggaacatcccatccattcaatccagaggtttgtttggagccattgccggtttcattgaaggggggtggactggaatggtagatgggtggtatggttatcatcatcagaatgagcaaggatctggctatgctgcagatcaaaaaagcacacaaaatgccattaacgggattacaaacaaggtgaattctgtaattgagaaaatgaacactcaattcacagctgtgggcaaagaattcaacaaattagaaagaaggatggaaaacttaaataaaaaagttgatgatgggtttctagacatttggacatataatgcagaattgttggttctactggaaaatgaaaggactttggatttccatgactccaatgtgaagaatctgtatgagaaagtaaaaagccaattaaagaataatgccaaagaaataggaaacgggtgttttgaattctatcacaagtgtaacaatgaatgcatggaaagtgtgaaaaatggaacttatgactatccaaaatattccgaagaatcaaagttaaacagggagaaaattgatggagtaaaattggaatcaatgggagtctatcagattctggcgatctactcaactgtcgccagttccctggttcttttggtctccctgggggcaatcagcttctggatgtgttccaatgggtctttgcagtgtagaatatgcatctga

SEQ ID NO: 31364 - RNA, 1698 nt, synthetic construct
  misc_feature 1..1698: note = hemagglutinin__InfluenzaA__ABD95262
  source 1..1698: mol_type = other RNA
atgaaagtaaaactactggtcctgttatgtacatttacagctacatatgcagacacaatatgtataggctaccatgccaacaactcaaccgacactgttgacacagtacttgagaagaatgtgacagtgacacactctgtcaacctacttgaggacagtcacaatggaaaactatgtctactaaaaggaatagccccactacaattgggtaattgcagcgttgccggatggatcttaggaaacccagaatgcgaattactgatttccaaggaatcatggtcctacattgtagaaacaccaaatcctgagaatggaacatgttacccagggtatttcgccgactatgaggaactgagggagcaattgagttcagtatcttcatttgagaggttcgaaatattccccaaagaaagctcatggcccaaccacaccgtaaccggagtatcagcatcatgctcccacaatgggaaaagcagtttttacagaaatctgctatggctgacggggaagaatggtttgtacccaaacctgagcaagtcctatgcaaacaacaaagagaaagaagtccttgtactatggggtgttcatcacccgcctaacataggggaccaaagggccctctatcatacagaaaatgcttatgtctctgtagtgtcttcacattatagcagaagattcaccccagaaatagccaaaagacccaaagtaagagatcaggaaggaagaatcaactactactggactctgctggaacccggggatacaataatatttgaggcaaatggaaatctaatagcgccaaggtatgctttcgcactgagtagaggctttggatcaggaatcatcacctcaaatgcaccaatggatgaatgtgatgcgaagtgtcaaacacctcagggagctataaacagcagtcttcctttccagaatgtacacccagtcacaataggagagtgtccaaagtatgtcaggagtgcaaaattaaggatggttacaggactaaggaacatcccatccattcaatccagaggtttgtttggagccattgccggtttcattgaaggggggtggactggaatggtagatggttggtatggttatcatcatcagaatgagcaaggatctggctatgctgcagatcaaaaaagcacacaaaatgccattaacgggatcacaaacaaggtgaattctgtaattgagaaaatgaacactcaattcacagctgtgggcaaagaattcaacaaattggaaagaaggatggaaaacttaaataaaaaagttgatgatgggtttctagacatttggacatataatgcagaattgttggttctactggaaaatgaaaggactttggatttccatgactccaatgtgaagaatctgtatgagaaagtaaaaagccaattaaagaataatgccaaagaaataggaaacgggtgttttgaattctatcacaagtgtaacgatgaatgcatggagagtgtgaaaaatggaacttatgactatccaaaatattccgaagaatcaaagttaaacagggagaaaattgatggagtgaaattggaatcaatgggagtctatcagattctggcgatctactcaacagtcgccagttccctggttcttttggtctccctgggggcaatcagcttctggatgtgttccaatgggtctttgcagtgtagaatatgcatctaa

SEQ ID NO: 31365 - RNA, 1698 nt, synthetic construct; identical to SEQ ID NO: 31304
  misc_feature 1..1698: note = hemagglutinin__InfluenzaA__ABD95273
  source 1..1698: mol_type = other RNA

SEQ ID NO: 31366 - RNA, 1698 nt, synthetic construct; identical to SEQ ID NO: 31302
  misc_feature 1..1698: note = hemagglutinin__InfluenzaA__ABD95284
  source 1..1698: mol_type = other RNA

SEQ ID NO: 31367 - RNA, 1698 nt, synthetic construct
  misc_feature 1..1698: note = hemagglutinin__InfluenzaA__ABD95295
  source 1..1698: mol_type = other RNA
atgaaagcaaaactgctggtcctgttatgtacatttacagctacatacgcagacacaatatgcataggctaccatgccaacaactcaaccgacactgttgacacagtacttgagaagaatgtgacagtgacacactctgtcaacctacttgaggacagtcacaatggaaaactatgtctactaaaaggaatagccccactacaattgggtaattgcagcgttgccggatggatcttaggaaacccagaatgcgaattactgatttccaaggaatcatggtcctacattgtagaaacaccaaatcccgagaatggaacatgttacccagggtatttcgccgactatgaggaactgagggagcaattgagttcagtatcttcatttgagagattcgaaatattccccaaaggaagctcatggcccaaccacaccgtgaccggagtatcagcatcatgctcccataatgggaaaagcagtttttacagaaatttgctatggctgacggggaagaatggtttgtacccaaacctgagcatgtcctatgtaaacaacaaagagaaagaagtccttgtgctatggggtgttcatcacccacctaacataggggaccaaagggccctctaccatacagaaaatgcttatgtctctgtagtgtcttcacattatagcagaagattcaccccagaaatagccaaaagacccaaagtaagagatcaggaaggaagaatcaactactactggactctgctggaacccggggacacaataatatttgaggcaaatggaaatctaatagcgccatggtatgctttcgcactgagtagaggctttggatcaggaatcatcacctcaaatgcaccaatgggtgaatgtgatgcgaagtgtcaaacacctcagggagctataaacagtagtcttcctttccagaatgtacacccagttacaataggagagtgtccaaagtatgtcaggagtgcaaaattaaggatggttacaggactaaggaacatcccatccattcaatccagaggtttgtttggagccattgccggtttcattgaaggggggtggactggaatggtagatgggtggtatggttatcatcatcagaatgagcaaggatctggctatgctgcagatcaaaaaagcacacaaaatgccattaacgggattacaaacaaggtgaattctgtaattgagaaaatgaacactcaattcacagctgtgggcaaagaattcaacaaattagaaagaaggatggaaaacttaaataaaaaagttgatgatgggtttctagacatttggacatataatgcagaattgttggttctactggaaaatgaaaggactttggatttccatgactccaatgtgaagaatctgtatgagaaagtaaaaagccaattaaagaataatgccaaagaaataggaaacgggtgttttgaattctatcacaagtgtaacaatgaatgcatggaaagtgtgaaaaatggaacttatgactatccaaaatattccgaagaatcaaagttaaacagggagaaaattgatggagtaaaattggaatcaatgggagtctatcagattctggcgatctactcaactgtcgccagttccctggttcttttggtctccctgggggcaatcagcttctggatgtgttccaatgggtctttgcagtgtagaatatgcatctga

SEQ ID NO: 31368 - RNA, 1698 nt, synthetic construct
  misc_feature 1..1698: note = hemagglutinin__InfluenzaA__ABD95306
  source 1..1698: mol_type = other RNA
atgaaagcaaaactactggtcctgttatgtacatttacagctacatacgcagacacaatatgtataggctaccatgccaacaactcaaccgacactgttgacacagtacttgagaagaatgtgacagtgacacactctgtcaacctacttgaggacagtcacaatggaaaactatgtctactaaaaggaatagccccactacaattgggtaattgcagcgttgccggatggatcttaggaaacccagaatgcgaattactgatttccaaggaatcatggtcctacattgtagaaacaccaaatcccgagaatggaacatgttacccagggtatttcgccgactatgaggaactgagggagcaattgagttcagtatcttcatttgagagattcgaaatattccccaaaggaagctcatggcccaaccacaccgtgaccggagtatcagcatcatgctcccataatgggaaaagcagtttttacagaaatttgctatggctgacggggaagaatggtttgtacccaaacctgagcatgtcctatgtaaacaacaaagagaaagaaatccttgtgctatggggtgttcatcacccacctaacataggggaccaaagggccctctaccatacagaaaatgcttatgtctctgtagtgtcttcacattatagcagaagattcaccccagaaatagccaaaagacccaaagtaagagatcaggaaggaagaatcaactactactggactctgctggaacccggggacacaataatatttgaggcaaatggaaatctaatagcgccatggtatgctttcgcactgagtagaggctttggatcaggaatcatcacctcaaatgcaccaatgggtgaatgtgatgcgaagtgtcaaacacctcagggagctataaacagtagtcttcctttccagaatgtacacccagttacaataggagagtgtccaaagtatgtcaggagtgcaaaattaaggatggttacaggactaaggaacatcccatccattcaatccagaggtttgtttggagccattgccggtttcattgaaggggggtggactggaatggtagatgggtggtatggttatcatcatcagaatgagcaaggatctggctatgctgcagatcaaaaaagcacacaaaatgccattaacgggattacaaacaaggtgaattctgtaattgagaaaatgaacactcaattcacagctgtgggcaaagaattcaacaaattagaaagaaggatggaaaacttaaataaaaaagttgatgatgggtttctagacatttggacatataatgcagaattgttggttctactggaaaatgaaaggactttggatttccatgactccaatgtgaagaatctgtatgagaaagtaaaaagccaattaaagaataatgccaaagaaataggaaacgggtgttttgaattctatcacaagtgtaacaatgaatgcatggaaagtgtgaaaaatggaacttatgactatccaaaatattccgaagaatcaaagttaaacagggagaaaattgatggggtaaaattggaatcaatgggagtctatcagattctggcgatctactcaactgtcgccagttccctggttcttttggtctccctgggggcaatcagcttctggatgtgttccaatgggtctttgcagtgtagaatatgcatctga

SEQ ID NO: 31369 - RNA, 1698 nt, synthetic construct; identical to SEQ ID NO: 31346
  misc_feature 1..1698: note = hemagglutinin__InfluenzaA__ABD95328
  source 1..1698: mol_type = other RNA

SEQ ID NO: 31370 - RNA, 1701 nt, synthetic construct
  misc_feature 1..1701: note = hemagglutinin__InfluenzaA__ABD95339
  source 1..1701: mol_type = other RNA
atgaaagcaaaactgctggtcctgttatgtgcactttcagctacagatgcagacacaatatgtataggctaccatgcgaacaactcaaccgatactgttgacacagtactcgaaaagaacgtgacagtgacacactctgtcaacctacttgaggacagtcacaacggaaaactatgcagactaaaaggaatagccccactacaattggggaaatgcagcattgccggatggatcttaggaaacccagaatgtgaatcactgttttctaagaaatcatggtcctacattgcagaaacaccaaactctgagaatgggacatgttacccagggtatttcgccgactatgaggaactgagggagcaattgagttcagtatcatcattcgagagattcgaaatattccccaaggaaagttcatggcccaaacacagcgtaaccagaggagtaacggcatcatgctcccataaggggaaaagcagtttttacagaaatttgctatggctgacggagaaaaatggctcgtacccaaatctgagcaagtcctatgtgaacgacaaagagaaagaagtccttgtactatggggtgttcatcacccgtctaacatagaggaccaaaagaccatctatcgtaaagaaaatgcttatgtctctgtagtgtcttcacattataacagaagattcaccccagaaatagcaaaacgacccaaagtaagagatcaagaagggagaattaactactactggactctgctggaaccaggggacacaataatatttgaggcaaatggaaatctaatagcgccatggtatgctttcgcactgagtagaggctttgggtcaggaatcatcacctcaaacgtatcaatggatgaatgtgacgcgaagtgtcaaacaccccagggagctataaacagtagtcttcctttccagaatgtacacccagtcacaataggagagtgcccaaaatacgtcaggagtacaaaattaaggatggtcacaggactaaggaacattccatccattcaatccagaggtttgtttggagccattgccggtttcattgaagggggatggactggaatgatagatggatggtatggttatcatcatcagaatgaacagggatccggctatgctgcagatcaaaaaagcacacaaaatgccattaacgggattacaaacaaggtgaactctgttatcgagaaaatgaacactcaattcacagctgtaggtaaagaattcaacaaattagaaaaaaggatggaaaacttaaataaaaaagttgatgatgggtttctggacatttggacatataatgcagaattgttggttctactggaaaatgaaaggactttggattttcatgactcaaatgtgaagaacctgtatgagaaggtaaaaagccaattaaagaataatgccaaagaaataggaaacgggtgttttgaattctaccacaagtgtaacaatgaatgcatggaaagtgtaaaaaatggaacttatgactatccaaaatattcagaggaatcaaagttaaacagggaaaaaattgatggagtgaaattggaatcaatgggagtctatcagattctggcgatctactcaactgtcgccagttcactggtgcttttggtctccctgggggcaatcagcttctggatgtgttctaatgggtctttgcagtgcagaatatgcatctga

SEQ ID NO: 31371 - RNA, 1698 nt, synthetic construct; identical to SEQ ID NO: 31300
  misc_feature 1..1698: note = hemagglutinin__InfluenzaA__ABE11657
  source 1..1698: mol_type = other RNA

SEQ ID NO: 31372 - RNA, 1698 nt, synthetic construct
  misc_feature 1..1698: note = hemagglutinin__InfluenzaA__ABE11668
  source 1..1698: mol_type = other RNA
atgaaagcaaaactactggtcctgttatgtacatttacagctacatacgcagacacaatatgtataggctaccatgccaacaactcaaccgacactgttgacacagtacttgagaagaatgtgacagtgacacactctgtcaacctacttgaggacagtcacaatggaaaactatgtctactaaaagggatagccccactacaattgggtaattgcagcgttgccggatggatcttaggaaacccagaatgcgaattactgatttccaaggaatcatggtcctacattgtagaaacaccaaatcctgagaatggaacatgttacccagggtatttcgccgactatgaggaactgagggagcaattgagttcagtatcttcatttgagagattcgaaatattccccaaagaaagctcatggcccaaccacaccgtaaccggagtatcagcatcatgctcccataatgggaaaagcagtttttacagaaatttgctatggctgacggggaagaatggtttgtacccaaacctgagcatgtcctatgtaaacaacaaagagaaagaagtccttgtgctatggggtgttcatcacccacctaacataggggaccaaagggccctctatcatacagaaaatgcttatgtctctgtagtgtcttcacattatagcagaagattcaccccagaaatagccaaaagacccaaagtaagagatcaggaaggaagaatcaactactactggactctgctggaacccggggacacaataatatttgaggcaaatggaaatctaatagcgccatggtatgctttcgcactgagtagaggctttggatcaggaatcatcacctcaaatgcaccaatggatgaatgtgatgcgaagtgtcaaacacctcaaggagctataaacagtagtcttcctttccagaatgtacacccagttacaataggagagtgtccaaagtatgtcaggagtgcaaaattaaggatggttacaggactaaggaacatcccatccattcaatccagaggtttgtttggagccattgccggtttcattgaaggggggtggactggaatggtagatgggtggtatggttatcatcatcagaatgagcaaggatctggctatgctgcagatcaaaaaagcacacaaaatgccattaacgggattacaaacaaggtgaattctgtaattgagaaaatgaacactcaattcacagctgtgggcaaagaattcaacaaattagaaagaaggatggaaaacttaaataaaaaagttgatgatgggtttctagacatttggacatataatgcagaattgttggttctactggaaaatgaaaggactttggatttccatgactccaatgtgaagaatctgtatgagaaagtaaaaagccaattaaagaataatgccaaagaaataggaaacgggtgttttgaattctatcacaagtgtaacaatgaatgcatggaaagtgtgaaaaatggaacttatgactatccaaaatattctgaagaatcaaagttaaacagggagaaaattgatggagtaaaattggaatcgatgggagtctatcagattctggcgatctactcaactgtcgccagttccctggttcttttggtctccctgggggcaatcagcttctggatgtgttccaatgggtctttgcagtgtagaatatgcatctga

SEQ ID NO: 31373 - RNA, 1698 nt, synthetic construct
  misc_feature 1..1698: note = hemagglutinin__InfluenzaA__ABE11679
  source 1..1698: mol_type = other RNA
atgaaagtaaaactactggtcctgttatgtacatttacagctacatatgcagacacaatatgtataggctaccatgccaacaactcaaccgacactgttgacacagtacttgagaagaatgtgacagtgacacactctgtcaacctacttgaggacagtcacaatggaaaactatgtctactaaaaggaatagccccactacaattgggtaattgcagcgttgccggatggatcttaggaaacccagaatgcgaattactgatttccaaggaatcatggtcctacattgtagaaacaccaaatcctgagaatggaacatgttacccagggtatttcgccgactatgaggaactgagggagcaattgagttcagtatcttcatttgagaggttcgaaatattccccaaagaaagctcatggcccaaccacaccgtaaccggagtatcagcatcatgctcccataatgggaaaagcagtttttacagaaatttgctatggctgacggggaggaatggtttgtacccaaacctgagcaagtcctatgcaaacaacaaagagaaagaagtccttgtactatggggtgttcatcacccgcctaacataggggaccaaagggccctctatcatacagaaaatgcttatgtctctgtagtgtcttcacattatagcagaagattcaccccagaaatagccaaaagacccaaagtaagagatcaggaaggaagaatcaactactactggactctgctggaacccggggatacaataatatttgaggcaaatggaaatctaatagcgccaaggtatgctttcgcactgagtagaggctttggatcaggaatcatcacctcaaatgcaccaatggatgaatgtgatgcgaagtgtcaaacacctcagggagctataaacagcagtcttcctttccagaatgtacacccagtcacaataggagagtgtccaaagtatgtcaggagtgcaaaattaaggatggttacaggactaaggaacatcccatccattcaatccagaggtttgtttggagccattgccggtttcattgaaggggggtggactggaatggtagatggttggtatggttatcatcatcagaatgagcaaggatctggctatgctgcagatcaaaaaagcacacaaaatgccattaacgggattacaaacaaggtgaattctgtaattgagaaaatgaacactcaattcacagctgtgggcaaagaattcaacaaattggaaagaaggatggaaaacttaaataaaaaagttgatgatgggtttctagacatttggacatataatgcagaattgttggttctactggaaaatgaaaggactttggatttccatgactccaatgtgaagaatctgtatgagaaagtaaaaagccaattaaagaataatgccaaagaaataggaaacgggtgttttgaattctatcacaagtgtaacgatgaatgcatggagagtgtgaaaaatggaacttatgactatccaaaatattccgaagaatcaaagttaaacagggagaaaattgatggagtgaaattggaatcaatgggagtctatcagattctggcgatctactcaacagtcgccagttccctggttcttttggtctccctgggggcaatcagcttctggatgtgttccaatgggtctttgcagtgtagaatatgcatctga

SEQ ID NO: 31374 - RNA, 1698 nt, synthetic construct
  misc_feature 1..1698: note = hemagglutinin__InfluenzaA__ABE11690
  source 1..1698: mol_type = other RNA
atgaaagcaaaactactggtcctgttatgtacatttacagctacatacgcagacacaatatgtataggctaccatgccaacaactcaaccgacactgttgacacagtacttgagaagaatgtgacagtgacacactctgtcaacctacttgaggacagtcacaatggaaaactatgtctactaaaaggaatagccccactacaattgggtaattgcagcgttgccggatggatcttaggaaacccagaatgcgaattactgatttccaaggaatcatggtcctacattgtagaaacaccaaatcccgagaatggaacatgttacccagggtatttcgccgactatgaggaactgagggagcaattgagttcagtatcttcatttgagagattcgaaatattccccaaaggaagctcatggcccaaccacaccgtgaccggagtatcagcatcatgctcccataatgggaaaagcagtttttacagaaatttgctatggctgacggggaagaatggtttgtacccaaacctgagcatgtcctatgtaaacaacaaagagaaagaagtccttgtgctatggggtgttcatcacccacctaacatagggaaccaaagggccctctaccatacagaaaatgcttatgtctctgtagtgtcttcacattatagcagaagattcaccccagaaatagccaaaagacccaaagtaagagatcaggaaggaagaatcaactactactggactctgctggaacccggggacacaataatatttgaggcaaatggaaatctaatagcgccatggtatgctttcgcactgagtagaggctttggatcaggaatcatcacctcaaatgcaccaatgggtgaatgtgatgcgaagtgtcaaacacctcagggagctataaacagtagtcttcctttccagaatgtacacccagttacaataggagagtgtccaaagtatgtcaggagtgcaaaattaaggatggttacaggactaaggaacatcccatccattcaatccagaggtttgtttggagccattgccggtttcattgaaggggggtggactggaatggtagatgggtggtatggttatcatcatcagaatgagcaaggatctggctatgctgcagatcaaaaaagcacacaaaatgccattaacgggattacaaacaaggtgaattctgtaattgagaaaatgaacactcaattcacagctgtgggcaaagaattcaacaaattagaaagaaggatggaaaacttaaataaaaaagttgatgatgggtttctagacatttggacatataatgcagaattgttggttctactggaaaatgaaaggactttggatttccatgactccaatgtgaagaatctgtatgagaaagtaaaaagccaattaaagaataatgccaaagaaataggaaacgggtgttttgaattctatcacaagtgtaacaatgaatgcatggaaagtgtgaaaaatggaacttatgactatccaaaatattccgaagaatcaaagttaaacagggagaaaattgatggagtaaaattggaatcaatgggagtctatcagattctggcgatctactcaactgtcgccagttccctggttcttttggtctccctgggggcaatcagcttctggatgtgttccaatgggtctttgcagtgtagaatatgcatctga

SEQ ID NO: 31375 - RNA, 1698 nt, synthetic construct
  misc_feature 1..1698: note = hemagglutinin__InfluenzaA__ABE11701
  source 1..1698: mol_type = other RNA
atgaaagcaaaactactggtcctgttatgtacatttacagctacatacgcagacacaatatgtataggctaccatgccaacaactcaaccgacactgttgacacagtacttgagaagaatgtgacagtgacacactctgtcaacctacttgaggacagtcacaatggaaaactatgtctactaaaaggaatagccccactacaattgggtaattgcagcgttgccggatggatcttaggaaacccagaatgcgaattactgatttccaaggaatcatggtcctacattgtagaaacaccaaatcccgagaatggaacatgttacccagggtatttcgccgactatgaggaactgagggagcaattgagttcagtatcttcatttgagagattcgaaatattccccaaaggaagctcatggcccaaccacaccgtgaccggagtatcagcatcatgctcccataatgggaaaagcagtttttacagaaatttgctatggctgacggggaagaatggtttgtacccaaacctgagcatgtcctatgtaaacaacaaagagaaagaagtccttgtgctatggggtgttcatcacccacctaacataggggaccaaaaggccctctaccatacagaaaatgcttatgtctctgtagtgtcttcacattatagcagaagattcaccccagaaatagccaaaagacccaaagtaagagatcaggaaggaagaatcaactactactggactctgctggaacccggggacacaataatatttgaggcaaatggaaatctaatagcgccatggtatgctttcgcactgagtagaggctttggatcaggaatcatcacctcaaatgcaccaatgggtgaatgtgatgcgaagtgtcaaacacctcagggagctataaacagtagtcttcctttccagaatgtacacccagttacaataggagagtgtccaaagtatgtcaggagtgcaaaattaaggatggttacaggactaaggaacatcccatccatccaatccagaggtttgtttggagccattgccggtttcattgaaggggggtggactggaatggtagatgggtggtatggttatcatcatcagaatgagcaaggatctggctatgctgcagatcaaaaaagcacacaaaatgccattaacgggattacaaacaaggtgaattctataattgagaaaatgaacactcaattcacagctgtgggcaaagaattcaacaaattagaaagaaggatggaaaacttaaataaaaaagttgatgatgggtttctagacatttggacatataatgcagaattgttggttctactggaaaatgaaaggactttggatttccatgactccaatgtgaagaatctgtatgagaaagtaaaaagccaattaaagaataatgccaaagaaataggaaacgggtgttttgaattctatcacaagtgtaacaatgaatgcatggaaagtgtgaaaaatggaacttatgactatccaaaatattccgaagaatcaaagttaaacagggagaaaattgatggagtaaaattggaatcaatgggagtctatcagattctggcgatctactcaactgtcgccagttccctggttcttttggtctccctgggggcaatcagcttctggatgtgttccaatgggtctttgcagtgtagaatatgcatctga

SEQ ID NO: 31376 - RNA, 1698 nt, synthetic construct; identical to SEQ ID NO: 31304
  misc_feature 1..1698: note = hemagglutinin__InfluenzaA__ABE11712
  source 1..1698: mol_type = other RNA

SEQ ID NO: 31377 - RNA, 1698 nt, synthetic construct; identical to SEQ ID NO: 31358
  misc_feature 1..1698: note = hemagglutinin__InfluenzaA__ABE11723
  source 1..1698: mol_type = other RNA

SEQ ID NO: 31378 - RNA, 1698 nt, synthetic construct
  misc_feature 1..1698: note = hemagglutinin__InfluenzaA__ABE11734
  source 1..1698: mol_type = other RNA
atgaaagcaaaactactgatcctgttatgtacatttacagctacatacgcagacacaatatgtataggctaccatgccaacaactcaaccgacactgttgacacagtacttgagaagaatgtgacagtgacacactctgtcaacctacttgaggacagtcacaatggaaaactatgtctactaaaaggaatagccccactacaattgggtaattgcagcgttgccggatggatcttaggaaacccagaatgcgaattactgatttccaaggaatcatggtcctacattgtagaaacaccaaatcccgagaatggaacatgttacccagggtatttcgccgactatgaggaactgagggagcaattgagttcagtatcttcatttgagagattcgaaatattccccaaaggaagctcatggcccaaccacaccgtgaccggagtatcagcatcatgctcccataatgggaaaagcagtttttacagaaatttgctatggctgacggggaagaatggtttgtacccaaacctgagcatgtcctatgtaaacaacaaagagaaagaagtccttgtgctatggggtgttcatcacccacctaacataggggaccaaagggccctctaccatacagaaaatgcttatgtctctgtagtgtcttcacattatagcagaagattcaccccagaaatagccaaaagacccaaagtaagagatcaggaaggaagaatcaactactactggactctgctggaacccggggacacaataatatttgaggcaaatggaaatctaatagcgccatggtatgctttcgcactgagtagaggctttggatcaggaatcatcacctcaaatgcaccaatgggtgaatgtgatgctaagtgtcaaacacctcagggagctataaacagtagtcttcctttccagaatgtacacccagttacaataggagagtgtccaaagtatgtcaggagtgcaaaattaaggatggttacaggactaaggaacatcccatccattcaatccagaggtttgtttggagccattgccggtttcattgaaggggggtggactggaatggtagatgggtggtatggttatcatcatcagaatgagcaaggatctggctatgctgcagatcaaaaaagcacacaaaatgccattaacgggattacaaacaaggtgaattctgtaattgagaaaatgaacactcaattcacagctgtgggcaaagaattcaacaaattagaaagaaggatggaaaacttaaataaaaaagttgatgatgggtttctagacatttggacatataatgcagaattgttggttctactggaaaatgaaaggactttggatttccatgactccaatgtgaagaatctgtatgagaaagtaaaaagccaattaaagaataatgccaaagaaataggaaacgggtgttttgaattctatcacaagtgtaacaatgaatgcatggaaagtgtgaaaaatggaacttatgactatccaaaatattccgaagaatcaaagttaaacagggagaaaattgatggggtaaaattggaatcaatgggagtctatcagattctggcgatctactcaactgtcgccagttccctggttcttttggtctccctgggggcaatcagcttctggatgtgttccaatgggtctttgcagtgtagaatatgcatctga

SEQ ID NO: 31379 - RNA, 1698 nt, synthetic construct
  misc_feature 1..1698: note = hemagglutinin__InfluenzaA__ABE11812
  source 1..1698: mol_type = other RNA
atgaaagcaaaactactggtcctgttatgtacatttacagctacatacgcagacacaatatgtataggctaccatgccaacaactcaaccgacactgttgacacagtacttgagaagaatgtgacagtgacacactctgtcaacctacttgaggacagtcacaatggaaaactatgtctactaaaaggaatagccccactacaattgggtaattgcagcgttgccggatggatcttaggaaacccagaatgcgaattactgatttccaaggaatcatggtcctacattgtagaaacaccaaatcccgagaatggaacatgttacccagggtatttcgccgactatgaggaactgagggagcaattgagttcagtatcttcatttgagagattcgaaatattccccaaaggaagctcatggcccaaccacaccgtgaccggagtatcagcatcatgctcccataatgggaaaagcagtttttacagaaatttgctatggctgacggggaagaatggtttgtacccaaacctgagcatgtcctatgtaaacaacaaagagaaagaagtccttgtgctatggggtgttcatcacccacctaacataggggaccaaagggccctctaccatacagaaaatgcttatgtctctgtagtgtcttcacattatagcagaagattcaccccagaaatagccaaaagacccaaagtaagagatcaggaaggacgaatcaactactactggactctgctggaacccggggacacaataatatttgaggcaaatggaaatctaatagcgccatggtatgctttcgcactgagtagaggctttggatcaggaatcatcacctcaaatgcaccaatgggtgaatgtgatgcgaagtgtcaaacacctcagggagctataaacagtagtcttcctttccagaatgtacacccagttacaataggagagtgtccaaagtatgtcaggagtgcaaaattaaggatggttacaggactaaggaacatcccatccattcaatccagaggtttgtttggagccattgccggtttcattgaaggggggtggactggaatggtagatgggtggtatggttatcatcatcagaatgagcaaggatctggctatgctgcagatcaaaaaagcacacaaaatgccattaacgggattacaaacaaggtgaattctgtaattgagaaaatgaacactcaattcacagctgtgggcaaagaattcaacaaattagaaagaaggatggaaaacttaaataaaaaagttgatgatgggtttctagacatttggacatataatgcagaattgttggttctactggaaaatgaaaggactttggatttccatgactccaatgtgaagaatctgtatgagaaagtaaaaagccaattaaagaataatgccaaagaaataggaaacgggtgttttgaattctatcacaagtgtaacaatgaatgcatggaaagtgtgaaaaatggaacttatgactatccaaaatattccgaagaatcaaagttaaacagggagaaaattgatggagtaaaattggaatcaatgggagtctatcagattctggcgatctactcaactgtcgccagttccctggttcttttggtctccctgggggcaatcagcttctggatgtgttccaatgggtctttgcagtgtagaatatgcatctga

SEQ ID NO: 31380 - RNA, 1698 nt, synthetic construct
  misc_feature 1..1698: note = hemagglutinin__InfluenzaA__ABE11823
  source 1..1698: mol_type = other RNA
atgaaagcaaaactactggttctgttatgtacatttacagctacatacgcagacacaatatgtataggctaccatgccaacaactcaaccgacactgttgacacagtacttgagaagaatgtgacagtgacacactctgtcaacctacttgaggacagtcacaatggaaaactatgtctactaaaaggaatagccccactacaattgggtaattgcagcgttgccggatggatcttaggaaacccagaatgcgaattactgatttccaaggaatcatggtcctacattgtagaaacaccaaatcccgagaatggaacatgttacccagggtatttcgccgactatgaggaactgagggagcaattgagttcagtatcttcatttgagagattcgaaatattccccaaaggaagctcatggcccaaccacaccgtgaccggagtatcagcatcatgctcccataatgggaaaagcagtttttacagaaatttgctatggctgacggggaagaatggtttgtacccaaacctgagcatgtcctatgtaaacaacaaagggaaagaagtccttgtgctatggggtgttcatcacccacctaacataggggaccaaagggccctctaccatacagaaaatgcttatgtctctgtagtgtcttcacattatagcagaagattcaccccagaaatagccaaaagacccaaagtaagagatcaggaaggaagaatcaactactactggactctgctggaacccggggacacaataatatttgaggcaaatggaaatctaatagcgccatggtatgctttcgcactgagtagaggctttggatcaggaatcatcacctcaaatgcaccaatgggtgaatgtgatgcgaagtgtcaaacacctcagggagctataaacagtagtcttcctttccagaatgtacacccagttacaataggagagtgtccaaagtatgtcaggagtgcaaaattaaggatggttacaggactaaggaacatcccatccattcaatccagaggtttgtttggagccattgccggtttcattgaaggggggtggactggaatggtagatgggtggtatggttatcatcatcagaatgagcaaggatctggctatgctgcagatcaaaaaagcacacaaaatgccattaacgggattacaaacaaggtgaattctgtaattgagaaaatgaacactcaattcacagctgtgggcaaagaattcaacaaattagaaagaaggatggaaaacttaaataaaaaagttgatgatgggtttctagacatttggacatataatgcagaattgttggttctactggaaaatgaaaggactttggatttccatgactccaatgtgaagaatctgtatgagaaagtaaaaagccaattaaagaataatgccaaagaaataggaaacgggtgttttgaattctatcacaagtgtaacaatgaatgcatggaaagtgtgaaaaatggaacttatgactatccaaaatattccgaagaatcaaagttaaacagggagaaaattgatggagtaaaattggaatcaatgggagtctatcagattctggcgatctactcaactgtcgccagttccctggttcttttggtctccctgggggcaatcagcttctggatgtgttccaatgggtctttgcagtgtagaatatgcatctga

SEQ ID NO: 31381 - RNA, 1698 nt, synthetic construct; identical to SEQ ID NO: 31346
  misc_feature 1..1698: note = hemagglutinin__InfluenzaA__ABE11834
  source 1..1698: mol_type = other RNA

SEQ ID NO: 31382 - RNA, 1698 nt, synthetic construct; identical to SEQ ID NO: 31358
  misc_feature 1..1698: note = hemagglutinin__InfluenzaA__ABE11845
  source 1..1698: mol_type = other RNA

SEQ ID NO: 31383 - RNA, 1698 nt, synthetic construct; identical to SEQ ID NO: 31351
  misc_feature 1..1698: note = hemagglutinin__InfluenzaA__ABE11856
  source 1..1698: mol_type = other RNA

SEQ ID NO: 31384 - RNA, 1701 nt, synthetic construct
  misc_feature 1..1701: note = hemagglutinin__InfluenzaA__ABE11900
  source 1..1701: mol_type = other RNA
atgaaagcaaaactactagtcctgttgtgtgcatttacagctacatatgcagacacgatatgtataggctaccatgcgaacaactcaactgacactgttgacacagtacttgagaagaacgtgacagtgacacactctgtcaacctacttgaggacagtcacaacggaaaactatgccgactaaaaggaacagccccactacaattgggtaattgcagcgttgccggatggatcttaggaaacccagaatgcgaatcactgttttctaaggaatcatggtcctacattgcagaaacaccaaaccctgagaatgggacatgttacccagggtatttcgccgactatgaggaactgagggagcaattgagctcagtatcatcattcgagagattcgaaatattccccaaggaaagctcatggcccaaccacaccgtaaccaaaggagtaacggcatcatgctcccataatgggaaaagcagtttttacaaaaatttgctatggctgacggagaagaatggcttgtacccaaatctgagcaagtcctatgtaaacaacaaggagaaagaagtccttgtactatggggtgttcatcacccgtctaacataggggaccaaagggccatctaccatacagaaaatgcttatgtctctgtagtgtcttcacattatagcagaagattcaccccagaaatagcaaaaagacccaaagtaagagaccaagaagggagaattaactactactggactctgctggaacccggggacacaataatatttgaggcaaatggaaatctaatagcgccatggtacgctttcgcactgagtagaggctttgggtcaggaatcatcacctcaaacgcatcaatgggtgaatgtgacgctaagtgtcaaacaccccaaggagctataaacagtagtcttcctttccagaatgtacacccagtcacaataggagagtgtccaaagtatgtcaggagtacaaaattaaggatggttacaggactaaggaacatcccatccattcaatccagaggtttgtttggagccattgccggtttcattgaaggagggtggactggaatgatagatggatggtatggttatcatcatcagaatgaacaaggatctggctatgctgcggaccaaaaaagcacacaaaatgccattaatgggattacaaacaaggtgaattctgtaatcgagaaaatgaacactcaattcacagctgtaggcaaagaattcaacaaattagaaagaaggatggaaaacttaaataagaaagttgatgatggatttctggacatttggacatataatgcagaattgttggttctcctggaaaatgaaaggactttggattttcatgactcaaatgtgaagaatctgtatgagaaagtaaaaacccaattgaagaataatgccaaagaaatagggaacgggtgttttgaattctatcacaagtgtaacaatgaatgcatggaaagtgtgaaaaatgggacttatgactatccaaaatactccgaagaatcaaagttaaacagggaaaaaattgatggagtgaaattggaatcaatgggagtctatcagattctggcgatctactcaactgtcgccagttcactggtgcttttgatctccctgggggcaatcagtttctggatgtgttctaatgggtctttgcagtgtagaatatgcatctga

SEQ ID NO: 31385 - RNA, 1701 nt, synthetic construct
  misc_feature 1..1701: note = hemagglutinin__InfluenzaA__ABE11942
  source 1..1701: mol_type = other RNA
atgaaagcaaaactactagtcctgttgtgtgcatttacagctacatacgcagacacaatatgtataggctaccatgcgaacaactcaactgacactgttgacacagtacttgagaagaacgtgacagtgacacactctgtcaacctacttgaggacagtcacaacggaaaactatgccgactaaaaggaacagccccactacaattgggtaattgcagcgttgccggatggatcttaggaaacccagaatgcgaatcactgttttctaaggaatcatggtcctacattgcagaaacaccaaatcctgagaatggaacatgttacccagggtatttcgccgactatgaggaactgagggagcaattgagctcagtatcatcattcgagagattcgaaatattccccaaggaaagctcatggcccaaccacaccgtaaccaaaggagtaacggcatcatgctcccataatgggaaaagcagtttttacaaaaatttgctatggctgacggagaagaatggcttgtacccaagtctgagcaagtcctatgtaaacaacaaggagaaagaagtccttgtactatggggtgttcatcacccgtctaacataggggaccaaagggccatctatcatacagaaaatgcttatgtctctgtagtgtcttcacattatagcagaagattcaccccagaaatagcaaaaagacccaaagtaagagaccaagaagggagaattaactactactggactctgctggaacccggggacacaataatatttgaggcaaatggaaatctaatagcgccatggtacgctttcgcactgagtagaggctttgggtcaggaatcatcacctcaaacgcatcaatgggtgaatgtgacgctaagtgtcaaacaccccaaggagctataaacagtagtcttcctttccagaatgtacacccagtcacaataggagagtgtccaaagtatgtcaggagtacaaaattaaggatggttacaggactaaggaacatcccatccattcaatccagaggtttgtttggagccattgccggtttcattgaaggagggtggactggaatgatagatggatggtatggttatcatcatcagaatgaacaaggatctggctatgctgcggaccaaaaaagcacacaaaatgccattaatgggattacaaacaaggtgaattctgtaatcgagaaaatgaacactcaattcacagctgtaggcaaagaattcaacaaattagaaagaaggatggaaaacttaaataagaaagttgatgatggatttctggacatttggacatataatgcagaattgttggttctcctggaaaatgaaaggactttggattttcatgactcaaatgtgaagaatctgtatgagaaagtaaaaacccaattgaagaataatgccaaagaaatagggaacgggtgttttgaattctatcacaagtgtaacaatgaatgcatggaaagtgtgaaaaatgggacttatgactatccaaaatattccgaagaatcaaagttaaacagggaaaaaattgatggagtgaaattggaatcaatgggagtctatcagattctggcgatctactcaactgtcgccagttcactggtgcttttggtctccctgggggcaatcagtttctggatgtgttctaatgggtctttgcagtgtagaatatgcatctga

SEQ ID NO: 31386 - RNA, 1701 nt, synthetic construct
  misc_feature 1..1701: note = hemagglutinin__InfluenzaA__ABE12078
  source 1..1701: mol_type = other RNA
atgaagactatcattgctttgagctacattttatgtctggttttcgctcaaaaacttcccggaaatgacaacagcacggcaacgctgtgcctggggcaccatgcagtgccaaacggaacgctagtgaaaacaatcacgaatgaccaaattgaagtgactaatgctactgagctggttcagagttcctcaacaggtggaatatgcgacagtcctcaccaaatccttgatggagaaaactgcacactaatagatgctctattgggagaccctcattgtgatggcttccaaaataaggaatgggacctttttgttgaacgcagcaaagcctacagcaactgttacccttatgatgtgccggattatgcctcccttaggtcactagttgcctcatccggcacactggagtttaacaatgaaagcttcaattggactggagtcgctcagaatggaacaagctctgcttgcaaaaggagatctaataaaagtttctttagtagattgaattggttgcaccaattaaaatacaaatacccagcactgaacgtgactatgccaaacaatgaaaaatttgacaaattgtacatttggggggttcaccacccgagtacggacagtgaccaaatcagcctatatgctcaagcaccagggagagtcacagtctctaccaaaagaagccaacaaactgtaatcccgaatatcggatctagaccctgggtaaggggtgtctccagcagaataagcatctattggacaatagtaaaaccgggagacatacttttgattaactgcacagggaatctaattgctcctcggggttacttcaaaatacgaagtgggaaaagctcaataatgaggtcagatgcatccattggcaaatgcaattctgaatgcatcactccaaatggaagcattcccaatgacaaaccatttcaaaatgtaaacaggatcacatatggggcctgtcccagatatgttaagcaaaacactctgaaattggcaacagggatgcggaatgtaccagagaaacaaactagaggcatattcggcgcaatcgcgggtttcatagaaaatggttgggagggaatggtggacggttggtacggtttcaggcatcaaaattctgagggcacaggacaagcagcagatctcaaaagcactcaagcagcaatcaaccaaatcaacgggaaactgaataggttaatcgagaaaacgaacgagaaattccatcaaattgaaaaagaattctcagaagtggaagggagaattcaggacctcgagaaatatgttgaggacactaaaatagatctctggtcgtacaacgcggagcttcttgttgccctggagaaccagcatacaattgatctaactgactcagaaatgaacaaactgtttgaaaaaacaaagaagcaactgagggaaaatgctgaggatatgggcaatggttgtttcaaaatataccacaaatgtgacaatgcctgcatagggtcaatcagaaatgggacttatgaccatgatgtatacagagacgaagcattaaacaaccggttccagatcaaaggtgttgagctgaagtcaggatacaaagattggatcctatggatttcctttgccatatcatgttttttgctttgtgttgtcttgctggggttcatcatgtgggcctgccaaaaaggcaacattaggtgcagcatttgcatttga

SEQ ID NO: 31387 - RNA, 1701 nt, synthetic construct; identical to SEQ ID NO: 31282
  misc_feature 1..1701: note = hemagglutinin__InfluenzaA__ABE12123
  source 1..1701: mol_type = other RNA

SEQ ID NO: 31388 - RNA, 1698 nt, synthetic construct; identical to SEQ ID NO: 31304
  misc_feature 1..1698: note = hemagglutinin__InfluenzaA__ABE12248
  source 1..1698: mol_type = other RNA

SEQ ID NO: 31389 - RNA, 1701 nt, synthetic construct
  misc_feature 1..1701: note = hemagglutinin__InfluenzaA__ABE12623
  source 1..1701: mol_type = other RNA
atgaagactatcattgctttgagctacattttctgtctggttctcggccaagatcttccaggaaatgacaacagcacagcaacgctgtgcctgggacatcatgcggtgccaaacggaacactagtgaaaacaatcacaaatgatcagattgaagtgactaatgctactgagctggttcagagctcctcaacggggaaaatatgcaacaatcctcatcgaatccttgatggaatagactgcacactgatagatgctctattgggggaccctcattgtgatggctttcaaaatgagacatgggaccttttcgttgaacgcagcaaagctttcagcaactgttacccttatgatgtgccagattatgcctcccttaggtcactagttgcctcgtcaggcactctggagtttatcaatgagggtttcacttggactggggtcactcagaatgggggaagcaatgcttgcaaaaggggacctgatagcggttttttcagtagactgaactggttgtacaaatcaggaagcacatatccagtgctgaacgtgactatgccaaacaatgacaattttgacaaactatacatttggggggttcaccacccgagcacgaaccaagaacaaaccagcctatatgttcaagcatcagggagagtcacagtctctaccaagagaagccagcaaactataatcccgaatatcgggtctagaccctgggtaaggggtctgtctagtagaataagcatctattggacaatagttaaaccgggagacatactggtaattaatagtaatgggaacctaattgctcctcggggttatttcaaaatgcgcactgggaaaagctcaataatgaggtcagatgcacctattggtacctgtatttctgaatgcatcactccaaatggaagcattcccaatgacaaaccctttcaaaacgtaaacaagatcacatatggggcatgtcccaagtatgttaagcaaaacaccctgaagttggcaacagggatgcggaatgtaccagagaaacaaactagaggcctattcggcgcaatagcaggtttcatagaaaatggttgggagggaatgatagacggttggtacggtttcaggcatcaaaattctgagggcacaggacaagcagcagatcttaaaagcactcaagcagccatcgaccaaatcaatgggaaactgaatagggtaatcgagaagacgaacgagaaattccatcaaatcgaaaaggaattctcagaagtagaagggagaattcaggacctcgagaaatacgttgaagacactaaaatagatctctggtcttacaatgcggagcttcttgtcgctctggagaaccaacatacaattgatctgactgactcggaaatgaacaagctgtttgaaaaaacaaggaggcaactgagggaaaatgctgaggacatgggcaatggttgcttcagaatataccacaaatgtgacaatgcttgcatagggtcaatcagaaatgggacttatgaccatgatgtatacagagacgaagcattaaacaaccggtttcagatcaaaggtgttgaactgaaatcaggatacaaagactggatcctgtggatttcctttgccatatcatgctttttgctttgtgttgttttgctggggttcatcatgtgggcctgccaaaaaggcaacattaggtgcaacatttgcatttga

SEQ ID NO: 31390 - RNA, 1701 nt, synthetic construct; identical to SEQ ID NO: 31334
  misc_feature 1..1701: note = hemagglutinin__InfluenzaA__ABE12645
  source 1..1701: mol_type = other RNA

SEQ ID NO: 31391 - RNA, 1701 nt, synthetic construct; identical to SEQ ID NO: 31312
  misc_feature 1..1701: note = hemagglutinin__InfluenzaA__ABE13076
  source 1..1701: mol_type = other RNA

SEQ ID NO: 31392 - RNA, 1701 nt, synthetic construct
  misc_feature 1..1701: note = hemagglutinin__InfluenzaA__ABE13323
  source 1..1701: mol_type = other RNA
atgaagactattattgctttgagctacattttatgtctggttttcgctcaaaaacttcccggaaatgacaacagcacggcaacgctgtgcctgggacaccatgcagtgccaaacggaacgctagtgaaaacaatcacgaatgaccaaattgaagtgactaatgctactgagcttgttcagggttcctcaacaggtagaatatgcgacagtcctcaccgaatccttgatggaaaaaactgcacactgatagatgctctattgggagaccctcattgtgatggcttccaaaataaggaatgggacctttttgttgaacgcagcaaagcttacagcaactgttacccttatgatgtgccggattatgcctcccttaggtcactagttgcctcatccggcaccctggagtttaacaatgaaagcttcaattggactggagtcgcccagaatggaacaagctatgcttgcaaaaggagatctgttaaaagtttctttagtagattgaattggttgcacaaattagaatacaaatatccagcactgaacgtgactatgccaaacaatgacaaatttgacaaattgtacatttggggggttcaccacccgagtacggacagtgaccaaaccagcctatatgttcaagcatcagggagagtcacagtctctaccaaaagaagccaacaaactgtaatcccgaatatcggatctagaccctgggtaaggggtgtctccagcagaataagcatatattggacaatagtaaaaccgggagacatacttttgattaacagcacagggaatctaattgctcctcggggttacttcaaaatacgaagtgggaaaagctcaataatgaggtcagatgcacccattgacaactgcaattctgaatgcatcactccaaatggaagcattcccaatgacaaaccatttcaaaatgtaaacaggatcacatatggggcctgtcccagatatgttaagcaaaacactctgaaattggcaacagggatgcggaatgtaccagagaaacaaactagaggcatattcggcgcaatcgcaggtttcatagaaaatggttgggagggaatggtagacggttggtacggtttcaggcatcaaaattctgagggcacaggacaagcagcagatcttaaaagcactcaagcagcaatcaaccaaatcaacgggaaactgaataggttaatcgagaaaacgaacgagaaattccatcaaattgaaaaagaattctcagaagtagaagggagaattcaggacctcgagaaatatgttgaagacactaaaatagatctctggtcgtacaacgcggagcttcttgttgccctggagaaccaacatacaattgatctaactgactcagaaatgaacaaactgtttgaaagaacaaggaagcaactgagggaaaatgctgaggacatgggcaatggttgcttcaaaatataccacaaatgtgacaatgcctgcatagggtcaatcagaaatggaacttatgaccatgatgtatacagagacgaagcattaaacaaccggttccagatcaaaggtgttgagctgaagtcaggatacaaagattggatcctatggatttcctttgccatatcatgttttttgctttgtgttgttttgctggggttcatcatgtgggcctgccaaaaaggcaacattaggtgcaacatttgcatttga

SEQ ID NO: 31393 - RNA, 1701 nt, synthetic construct
  misc_feature 1..1701: note = hemagglutinin__InfluenzaA__ABE13471
  source 1..1701: mol_type = other RNA
atgaagactatcattgctttgagctacattttatgtctggttttcgctcaaaaacttcccggaaatgacaacagcacggcaacgctgtgcctgggacaccatgcagtgccaaacggaacgctagtgaaaacaatcacgaatgaccaaattgaagtgactaatgctactgagctggttcagaattcctcaacaggtaggatatgtgacagtcctcaccgaatccttgatgggaaaaactgcacactgatagatgctctattgggagaccctcattgtgatggcttccaaaataaggaatgggacctttttgttgaacgcagcaaagcttacagcaactgttacccttatgatgtgccggattatgcctcccttaggtcactagttgcctcatccggcaccctggagttttacaatgaaagcttcaattggactggagtcgctcagaatggaacaagctatgcttgcaaaaggagatctgttaaaagtttctttagtagattgaattggttgcacaaattagaatacaaatatccagcactgaacgtgactatgccaaacaatgacaaatttgacaaattgtacatttggggggttcaccacccgagtacggacagtgaccaaaccagcctatatgttcaagcatcagggagagtcacagtctctaccaaaagaagccaacaaactgtaatcccgaatatcggatctagaccctgggtaaggggtgtctccagcagaataagcatctattggacaatagtaaaaccgggagacatacttttgattaacagcacagggaatctaattgctcctcggggttacttcaaaatacgaagtgggaaaagctcaataatgaggtcagatgcacccattggcaactgcaattctgaatgcatcactccaaatggaagcattcccaatgacaaaccatttcaaaatgtaaacaggatcacatatggggcctgtcccagatatgttaagcaaaacactctgaaattggcaacagggatgcggaatgtaccagagaaacaaactagaggcatattcggcgcaatcgcaggtttcatagaaaatggttgggagggaatggtagacggttggtacggtttcaggcatcaaaattctgagggcacaggacaagcagcggatcttaaaagcactcaagcagcaatcaaccaaatcaacgggaaactgaataggttaatcgagaaaacgaacgagaaattccatcaaatcgaaaaagaattctcagaagtagaagggagaattcaggacctcgagaaatatgttgaagacactaaaatagatctctggtcgtacaacgcggagcttcttgttgccctggagaaccaacatacaattgatctaactgactcagaaatgaacaaactgtttgaaagaacaaggaagcaactgagggaaaatgctgaggacatgggcaatggttgcttcagaatataccacaaatgtgacaatgcctgcatagggtcaatcagaaatggaacttatgaccatgatgtatacagagacgaagcattaaacaaccggttccagatcaaaggtgttgagctgaagtcaggatacaaagattggatcctatggatttcctttgccatatcatgttttttgctttgtgttgttttgctggggttcatcatgtgggcctgccaaaaaggcaacattaggtgcaacatttgcatttga

SEQ ID NO: 31394 - RNA, 1701 nt, synthetic construct
  misc_feature 1..1701: note = hemagglutinin__InfluenzaA__ABE13555
  source 1..1701: mol_type = other RNA
atgaagactattattgctttgagctacattttatgtctggttttcgctcaaaaacttcccggaaatgacaacagcacggcaacgctgtgcctgggacaccatgcagtgccaaacggaacgctagtgaaaacaatcacgaatgaccaaattgaagtgactaatgctactgagctggttcagggttcctcaacaggtagaatatgcgacagtcctcaccgaatccttgatggaaaaaactgcacactgatagatgctctattgggagaccctcattgtgatggcttccaaaataaggaatgggacctttttgttgaacgcagcaaagcttacagcaactgttacccttatgatgtgccggattatgcctcccttaggtcactagttgcctcatcaggcaccctggagtttaacaatgaaagcttcaattggactggagtcgcccagaatggaacaagctatgcttgcaaaaggagatctgttaaaagtttctttagtagattgaattggttgcacaaattagaatacaaatatccagcactgaacgtgactatgccaaacaatgacaaatttgacaaattgtacatctggggggttcaccacccgagtacggacagtgaccaaaccagcctatatgttcaagcatcagggagagtcacagtctctaccaaaagaagccaacaaactgtaatcccgaacatcggatctagaccctgggtaaggggtgtctccagcagaataagcatatattggacaatagtaaaaccgggagacatacttttgattagcagcacagggaatctaattgctcctcggggttacttcaaaatacgaagtgggaaaagctcaataatgaggtcagatgcacccattgacaactgcaattctgaatgcatcactccaaatggaagcattcccaatgacaaaccatttcaaaatgtaaacaggatcacatatggggcctgtcccagatatgttaagcaaaacactctgaaattggcaacagggatgcggaatgtaccagagaaacaaactaaaggcatattcggcgcaatcgcaggtttcatagaaaatggttgggagggaatggtagacggttggtacggtttcaggcatcaaaattctgagggcacaggacaagcagcagatcttaaaagcactcaagcagcaatcaaccaaatcaacgggaaactgaataggttaatcgagaaaacgaacgagaaattccatcaaatcgaaaaagaattctcagaagtagaagggagaattcaggacctcgagaaatatgttgaagacactaaaatagatctctggtcgtacaacgcggagcttcttgttgccctggagaaccaacatacaattgatctaactgactcagaaatgaacaaactgtttgaaagaacaaggaagcaactgagggaaaatgctgaggacatgggcaatggttgcttcaaaatataccacaaatgtgacaatgcctgcatagggtcaatcagaaatggaacttatgaccatgatgtatacagagacgaagcattaaacaaccggttccagatcaaaggtgttgagctgaagtcaggatacaaagattggatcctatggatttcctttgccatgtcatgttttttgctttgtgttgttttgttggggttcatcatgtgggcctgccaaaaaggcaacattaggtgcaacatttgcatttga

SEQ ID NO: 31395 - RNA, 1701 nt, synthetic construct
  misc_feature 1..1701: note = hemagglutinin__InfluenzaA__ABE13606
  source 1..1701: mol_type = other RNA
atgaagactatcattgctttgagctacattttatgtctggttttcgctcaaaaacttcccggaaatgacaacagcacggcaacgctgtgcctgggacaccatgcagtgccaaacggaacgctagtgaaaacaatcacgaatgaccaaattgaagtgactaatgctactgagatggttcagagttcctcaacaggtagaatatgcgacagtcctcaccgaatccttgatggaaaaaactgcacactgatagatgctctattgggagaccctcattgtgatggcttccaaaataaggaatgggacctttttgttgaacgcagcaaagcttacagcaactgttacccttatgatgtgccggattatgcctcccttaggtcactagttgcctcatccggcaccctggagtttaccaatgaaggcttcaattggactggagtcgctcaggatggaacaagctatgcttgcaaaaggggatctgttaaaagtttctttagtagattgaattggttgcacaaattagaatacaaatatccagcactgaacgtgactatgccaaacaatgacaaatttgacaaattgtacatttggggggttcaccacccgagtacggacagtgaccaaaccagcctatatgttcaagcatcagggagagtcacagtctctaccaaaagaagccaacaaactgtaatcccgaatatcgggtctagaccctgggtaaggggtgtctccagcagaataagcatctattggacaatagtaaaaccgggagacatacttttgattaacagcacagggaatctaattgctcctcggggttacttcaaaatacgaagtgggaaaagctcaataatgaggtcagatgcacccattggcaactgcaattctgaatgcatcactccaaatggaagcattcccaatgacaaaccttttcaaaatgtaaacaggatcacatatggggcctgtcccagatatgttaagcaaaacactctgaaattggcaacagggatgcggaatgtaccagagaaacaaactagaggcatattcggcgcaatcgcaggtttcatagaaaatggttgggagggaatggtagacggttggtacggtttcaggcatcaaaattctgagggcacaggacaagcagcagatcttaaaagcactcaagcagcaatcaaccaaatcaacgggaaactgaataggttaatcgagaaaacgaacgagaaattccatcaaatcgaaaaagaattctcagaagtagaagggagaattcaggacctcgagaaatatgttgaagacactaaaatagatctctggtcttacaacgcggagcttcttattgccctggagaaccaacatacaattgatctaactgactcagaaatgaacaaactgtttgaaagaacaaggaagcaactgagggaaaatgctgaggacatgggcaatggttgcttcaaaatataccacaaatgtgacaatgcctgcatagggtcaatcagaaatggaacttatgaccatgatgtatacagagacgaagcattaaacaaccggttccagatcaaaggtgttgagctgaagtcaggatacaaagattggatcctatggatttcctttgccatatcatgctttttgctttgtgttgttttgctggggttcatcatgtgggcctgccaaaaaggcaacattaggtgcaacatttgcatttga

SEQ ID NO: 31396 - RNA, 1701 nt, synthetic construct
  misc_feature 1..1701: note = hemagglutinin__InfluenzaA__ABE13628
  source 1..1701: mol_type = other RNA
atgaagactatcattgctttgagctacattttatgtctggttttcgctcaaaaacttcccggaaatgacaacagcacagcaacgctgtgcctgggacatcatgcagtgccaaacggaacgctagtgaaaacaatcacgaatgatcaaattgaagtgactaatgctactgagctggttcagagttcctcaacaggtagaatatgcgacagtcctcaccgaatccttgatggaaaaaactgcacactgatagatgctctattgggagaccctcattgtgatggcttccaaaataaggaatgggacctttttgttgaacgcagcaaagcttacagcaactgttacccttatgatgtgccggattatgcctcccttaggtcactagttgcctcatcaggcaccctggagtttaccaatgaaggcttcaattggactggagtcgctcaggatgggaaaagctatgcttgcaaaaggggatctgttaacagtttctttagtagattgaattggttgcacaaattagaatacaaatatccagcactgaacgtgactatgccaaacaatgacaaatttgacaaactgtacatttggggggttcaccacccgagcacggacagtgaccaaaccagcctatatgttcaagcatcagggagagtcacagtctctaccaaaagaagccaacaaactgtaatcccgaatatcgggtccagaccctgggtgaggggcatctccagtagaataagcatctattggacaatagtaaaaccgggagacatacttttgattaacagcacagggaatctaattgctcctcggggttacttcaaaatacgaaatgggaaaagctcaataatgaggtcagatgcacccattgacaactgcaattctgaatgcatcactccaaatggaagcattcccaatgacaaaccttttcaaaatgtaaacaggatcacatatggggcctgtcccagatatgttaagcaaaacactctgaaattggcaacagggatgcggaatgtaccagagaaacaaactagaggcatattcggcgcaatcgcaggtttcatagaaaatggttgggagggaatggtagacggttggtacggtttcaggcatcaaaattctgagggcacaggacaagcagcagatcttaaaagcactcaagcagcaatcgatcaaatcaacgggaaactgaataggttaatcgagaaaacgaacgagaaattccatcaaatcgaaaaagaattctcagaagtggaagggagaattcaggacctcgagaaatatgttgaagacactaaaatagatctctggtcttacaacgcggagcttcttgttgccctggagaatcaacatacaattgatctaactgactcagaaatgaacaaactgtttgaaagaacaaggaagcaactgagggaaaatgctgaggacatgggcaatggttgcttcaaaatataccacaaatgtgacaatgcctgcatagggtcaatcagaaatggaacttatgaccatgatgtatacagagacgaagcattaaacaaccggttccagatcaaaggtgttgagctgaagtcaggatacaaagattggatcctatggatttcctttgccatatcatgctttttgctttgtgttgttttgctggggttcatcatgtgggcctgccaaaaaggcaacattaggtgcaacatttgcatttga

SEQ ID NO: 31397 - RNA, 1701 nt, synthetic construct
  misc_feature 1..1701: note = hemagglutinin__InfluenzaA__ABE13824
  source 1..1701: mol_type = other RNA
atgaagactatcattgctttgagctacattttatgtcaggttttcgctcaaaaacttcccggaaatgacaacagcacagcaacgctgtgcctgggacaccatgcagtgccaaacggaacgctagtgaaaacaatcacgaatgatcaaattgaagtgactaatgctactgagctggttcagagttcctcaacaggtagaatatgcgacagtcctcaccgaatccttgatggaaaaaactgcacactgatagatgctctattgggagaccctcattgtgatggcttccaaaataaggaatgggacctttttgttgaacgcagcaaagcttacagcaactgttacccttatgatgtgccggattatgcctcccttaggtcactagttgcctcatcaggcaccctggagtttaccaatgaaggcttcaattggactggagtcgctcaggatgggaaaagctatgcttgcaaaaggggatctgttaacagtttctttagtagattgaattggttgcacaaattagaatacaaatatccagcactgaacgtgactatgccaaacaatgacaaatttgataaattgtacatttggggggttcaccacccgagcacggacagtgaccaaaccagcctatatgttcaagcatcagggagagtcacagtctctaccaaaagaagccaacaaactgtaatcccgaatatcgggtccagaccctgggtgaggggcatctccagtagaataagcatctattggacaatagtaaaaccgggagacatacttttgattaacagcacagggaatctaattgctcctcggggttacttcaaaatacgaaatgggaaaagctcaataatgaggtcagatgcacccattgacaactgcaattctgaatgcatcactccaaatggaagcattcccaatgacaaaccttttcaaaatgtaaacaggatcacatatggggcctgtcccagatatgttaagcaaaacactctgaaattggcaacagggatgcggaatgtaccagagaaacaaactagaggcatattcggcgcaatcgcaggtttcatagaaaatggttgggagggaatggtagacggttggtacggtttcaggcatcaaaattctgagggcacaggacaagcagcagatcttaaaagcactcaagcagcaatcgatcaaatcaacgggaaactgaataggttaatcgagaaaacgaacgagaaattccatcaaatcgaaaaagaattctcagaagtagaagggaggattcaggacctcgagaaatatgttgaagacactaaaatagatctctggtcttacaacgcggagcttcttgttgccctggagaatcaacatacaattgatctaactgactcagaaatgaacaaactgtttgaaagaacaaggaagcaactgagggaaaatgctgaggacatgggcaatggttgcttcaaaatataccacaaatgtgacaatgcctgcatagggtcaatcagaaatggaacttatgaccatgatgtatacagagacgaagcattaaacaaccggttccagatcaaaggtgttgagctgaagtcgggatacaaagattggatcctatggatttcttttgccatatcatgctttttgctttgtgttgttttgctggggttcatcatgtgggcctgccaaaaaggcaacattaggtgcaacatttgcatttga

SEQ ID NO: 31398 - RNA, 1701 nt, synthetic construct
  misc_feature 1..1701: note = hemagglutinin__InfluenzaA__ABE14019
  source 1..1701: mol_type = other RNA
atgaagactatcattgctttgagctacattttatgtcaggttttcgctcaaaaacttcccggaaatgacaacagcacagcaacgctgtgcctgggacaccatgcagtgccaaacggaacgctagtgaaaacaatcacgaatgatcaaattgaagtgactaatgctactgagctggttcagagttcctcaacaggtagaatatgcgacagtcctcaccgaatccttgatggaaaaaactgcacactgatagatgctctattgggagaccctcattgtgatggcttccaaaataaggaatgggacctttttgttgaacgcagcaaagcttacagcaactgttacccttatgatgtgccggattatgcctcccttaggtcactagttgcctcatcaggcaccctggagtttaccaatgaaggcttcaattggactggagtcgctcaggatgggaaaagctatgcttgcaaaaggggatctgttaacagtttctttagtagattgaattggttgcacaaattagaatacaaatatccagcactgaacgtgactatgccaaacaatgacaaatttgataaattgtacatttggggggttcaccacccgagcacggacagtgaccaaaccagcctatatgttcaagcatcagggagagtcacagtctctaccaaaagaagccaacaaactgtaatcccgaatatcgggtccagaccctgggtgaggggcatctccagtagaataagcatctattggacaatagtaaaaccgggagacatacttttgattaacagcacagggaatctaattgctcctcggggttacttcaaaatacgaaatgggaaaagctcaataatgaggtcagatgcacccattgacaactgcaattctgaatgcatcactccaaatggaagcattcccaatgacaaaccttttcaaaatgtaaacaggatcacatatggggcctgtcccagatatgttaagcaaaacactctgaaattggcaacagggatgcggaatgtaccagagaaacaaactagaggcatattcggcgcaatcgcaggtttcatagaaaatggttgggagggaatggtagacggttggtacggtttcaggcatcaaaattctgagggcacaggacaagcagcagatcttaaaagcactcaagcagcaatcgatcaaatcaacgggaaactgaataggttaatcgagaaaacgaacgagaaattccatcaaatcgaaaaagaattctcagaagtagaagggagaattcaggacctcgagaaatatgttgaagacactaaaatagatctctggtcttacaacgcggagcttcttgttgccctggagaatcaacatacaattgatctaactgactcagaaatgaacaaactgtttgaaagaacaaggaagcaactgagggaaaatgctgaggacatgggcaatggttgcttcaaaatataccacaaatgtgacaatgcctgcatagggtcaatcagaaatggaacttatgaccatgatgtatacagagacgaagcattaaacaaccggttccagatcaaaggtgttgagctgaagtcgggatacaaagattggatcctatggatttcttttgccatatcatgctttttgctttgtgttgttttgctggggttcatcatgtgggcctgccaaaaaggcaacattaggtgcaacatttgcatttga

SEQ ID NO: 31399 - RNA, 1701 nt, synthetic construct
  misc_feature 1..1701: note = hemagglutinin__InfluenzaA__ABE14030
  source 1..1701: mol_type = other RNA
atgaagactatcattgctttgagctacattttatgtctggttttcgctcaaaaacttcccggaaatgacaacagcacagcaacgctgtgcctgggacaccatgcagtgccaaacggaacgctagtgaaaacaatcacgaatgatcaaattgaagtgactaatgctactgagctggttcagagttcctcaataggtagaatatgcgacagtcctcaccgaatccttgatggaaaaaactgcacactgatagatgctctgttgggagaccctcattgtgatggcttccaaaataaggaatgggacctttttgttgaacgcagcaaagcttacagcaactgttacccttatgatgtgccggattatgcctcccttaggtcactagttgcctcatcaggcaccctggagtttaccaatgaaggcttcaattggactggagtcgctcaggatgggaaaagctatgcttgcaaaaggggatctgttaacagtttctttagtagattgaattggttgcacaaattagaatacaaatatccagcactgaacgtgactatgccaaacaatgacaaatttgacaaactgtacatttggggggttcaccacccgagcacggacagtgaccaaaccagcctatatgttcaagcatcagggagagtcacagtctctaccaaaagaagccaacaaactgtaatcccgaatatcgggtccagaccctgggtgaggggcatctccagtagaataagcatctattggacaatagtaaaaccgggagacatacttttgattaacagcacagggaatctaattgctcctcggggttacttcaaaatacgaaatgggaaaagctcaataatgaggtcagatgcacccattgacaactgcaattctgaatgcatcactccaaatggaagcattcccaatgacaaaccttttcaaaatgtaaacaggatcacatatggggcctgtcccagatatgttaagcaaaacactctgaaattggcaacagggatgcggaatgtaccagagaaacaaactagaggcatattcggcgcaatcgcaggtttcatagaaaatggttgggagggaatggtagacggttggtacggtttcaggcatcaaaattctgagggcacaggacaagcagcagatcttaaaagcactcaagcagcaatcgatcaaatcaatgggaaactgaataggttaatcgagaaaacgaacgagaaattccatcaaatcgaaaaagaattctcagaagtggaagggagaattcaggacctcgagaaatatgttgaagacactaaaatagatctctggtcttacaacgcggagcttcttgttgccctggagaatcaacatacaattgatctaactgactcagaaatgaacaaactgtttgaaagaacaaggaagcaactgagggaaaatgctgaggacatgggcaatggttgcttcaaaatataccacaaatgtgacaatgcctgcatagggtcaatcagaaatggaacttatgaccatgatgtatacagagacgaagcattaaacaaccggttccagatcaaaggtgttgagctgaagtcaggatacaaagattggatcctatggatttcctttgccatatcatgctttctgctttgtgttgttttgctggggttcatcatgtgggcctgccaaaaaggcaacattaggtgcaacatttgcatttga

SEQ ID NO: 31400 - RNA, 1701 nt, synthetic construct; identical to SEQ ID NO: 31396
  misc_feature 1..1701: note = hemagglutinin__InfluenzaA__ABE14041
  source 1..1701: mol_type = other RNA

SEQ ID NO: 31401 - RNA, 1701 nt, synthetic construct; identical to SEQ ID NO: 31398
  misc_feature 1..1701: note = hemagglutinin__InfluenzaA__ABE14063
  source 1..1701: mol_type = other RNA

SEQ ID NO: 31402 - RNA, 1701 nt, synthetic construct
  misc_feature 1..1701: note = hemagglutinin__InfluenzaA__ABE14124
  source 1..1701: mol_type = other RNA
atgaagactatcattgctttgagctacattttatgtctggttttcgctcaaaaacttcccggaaatgacaacagcacggcaacgctgtgcctgggacaccatgcagtgccaaacggaacgctagtgaaaacaatcacgaatgaccaaattgaagtgactaatgctactgagctggttcagagttcctcaacaggtagaatatgcgacagtcctcaccgaatccttgatgggaaaaactgcacactgatagatgctctattgggagaccctcattgtgatggcttccaaaataaggaatgggacctttttgttgaacgcagcaaagcttacagcaactgttacccttatgatgtgccggattatgcctcccttaggtcactagttgcctcatccggcacccttgagtttaccaatgaaggcttcaattggactggagtcgctcaggatggaacaagctatgcttgcaaaaggggatctgttaaaagtttctttagtagattgaattggttgcacaaattagaatacaaatatccagcactgaacgtgactatgccaaacaatgacaaatttgacaaattgtacatttggggggttcaccacccgagtacggacagtgaccaaaccagcctatatgttcaagcatcagggagagtcacagtctctaccaaaagaagccaacaaactgtaatcccgaatatcgggtctagaccctgggtaaggggtgtctccagcagaataagcatctattggacaattgtaaaaccgggagacatacttttgattaacagcacagggaatctaattgctcctcggggttacttcaaaatacgaagtgggaaaagctcaataatgaggtcagatgcacccattggcaactgcaattctgaatgcatcactccaaatggaagcattcccaatgacaaaccttttcaaaatgtaaacaggatcacatatggggcctgtcccagatatgttaagcaaaacactctgaaattggcaacagggatgcggaatgtaccagagaaacaaactagaggcatattcggcgcaatcgcaggtttcatagaaaatggttgggagggaatggtagacggttggtacggtttcaggcatcaaaattctgagggcacaggacaagcagcagatcttaaaagcactcaagcagcaatcaaccaaatcaacgggaaactgaataggttaatcgagaaaacgaacgagaaattccatcaaatcgaaaaagaattttcagaagtagaagggagaattcaggacctcgagaaatatgttgaagacactaaaatagatctctggtcttacaacgcggagcttcttattgccctggagaaccaacatacaattgatctaactgactcagaaatgaacaaactgtttgaaagaacaaggaagcaactgagggaaaatgctgaggacatgggcaatggttgcttcaaaatataccacaaatgtgacaatgcctgcatagggtcaatcagaaatggaacttatgaccatgatgtatacagagacgaagcattaaacaaccggttccagatcaaaggtgttgagctgaagtcaggatacaaagattggatcctatggatttcctttgccatatcatgctttttgctttgtgttgttttgctggggttcatcatgtgggcctgccaaaaaggcaacattaggtgcaacatttgcatttga

SEQ ID NO: 31403 - RNA, 1701 nt, synthetic construct
  misc_feature 1..1701: note = hemagglutinin__InfluenzaA__ABE14464
  source 1..1701: mol_type = other RNA
atgaagactatcattgctttgagctacattttatgtcaggttttcgctcaaaaacttcccggaaatgacaacagcacagcaacgctgtgcctgggacaccatgcagtgccaaacggaacgctagtgaaaacaatcacgaatgatcaaattgaagtgactaatgctactgagctggttcagagttcctcaacaggtagaatatgcgacagtcctcaccgaatccttgatggaaaaaactgcacactaatagatgctctattgggagaccctcattgtgatggcttccaaaataaggaatgggacctttttgttgaacgcagcaaagcttacagcaactgttacccttatgatgtgccggattatgcctcccttaggtcactagttgcctcatcaggcaccctggagtttaccaatgaaggcttcaattggactggagtcgctcaggatgggaaaagctatgcttgcaaaaggggatctgttaacagtttctttagtagattgaattggttgcacaaattagaatacaaatatccagcactgaacgtgactatgccaaacaatgacaaatttgacaaattgtacatttggggggttcaccacccgagcacggatagtgaccaaaccagcctatatgttcaagcatcagggagagtcacagtctctaccaaaagaagccaacaaactgtaatcccgaatatcgggtccagaccctgggtgaggggcatctccagtagaataagcatctattggacaatagtaaaaccgggagacatacttttgattaacagcacagggaatctaattgctcctcggggttacttcaaaatacgaaatgggaaaagctcaataatgaggtcagatgcacccattgacaactgcaattctgaatgcatcactccaaatggaagcattcccaatgacaaaccttttcaaaatgtaaacaggatcacatatggggcctgtcccagatatgttaagcaaaacactctgaaattggcaacagggatgcggaatgtaccagagaaacaaactagaggcatattcggcgcaatcgcaggtttcatagaaaatggttgggagggaatgatagacggttggtacggtttcaggcatcaaaattctgagggcacaggacaagcagcagatcttaaaagcactcaagcagcaatcgatcaaatcaacgggaaactgaataggttaatcgagaaaacgaacgagaaattccatcaaatcgaaaaagaattctcagaagtagaagggagaattcaggacctcgagaaatatgttgaagacactaaaatagatctctggtcttacaacgcggagcttcttgttgccctggagaatcaacatacaattgatctaactgactcagaaatgaacaaactgtttgaaagaacaaggaagcaactgagggaaaatgctgaggacatgggcaatggttgcttcaaaatataccacaaatgtgacaatgcctgcatagggtcaatcagaaatggaacttatgaccatgatgtatacagagacgaagcattaaacaaccggttccagatcaaaggtgttgagctgaagtcgggatacaaagattggatcctatggatttcttttgccatatcatgctttttgctttgtgttgttttgctggggttcatcatgtgggcctgccaaaaaggcaacattaggtgcaacatttgcatttga

SEQ ID NO: 31404 - RNA, 1701 nt, synthetic construct
  misc_feature 1..1701: note = hemagglutinin__InfluenzaA__ABE14840
  source 1..1701: mol_type = other RNA
atgaagactatcattgctttgagctacattttatgtctggttttcgctcaaaaacttcccagaaatgacaacagcacagcaacgctgtgcctgggacatcatgcagtgccaaacggaacgctagtgaaaacaatcacgaatgatcaaattgaagtgactaatgctactgagctggttcagagttcctcaacaggtagaatatgcgacagtcctcaccgaatccttgatggaaaaaactgcacactgatagatgctctattgggagaccctcattgtgatggcttccaaaataaggaatgggacctttttgttgaacgcagcaaagcttacagcaactgttacccttatgatgtgccggattatgcctcccttaggtcactagttgcctcatcaggcaccctggagtttaccaatgaaggcttcaattggactggagtcgctcaggatgggaaaagctatgcttgcaaaaggggatctgttaacagtttctttagtagattgaattggttgcacaaattagaatacaaatatccagcactgaacgtgactatgccaaacaatgacaaatttgacaaactgtacatttggggggttcaccacccgagcacggacagtgaccaaaccagcctatatgttcaagcatcagggagagtcacagtctctaccaaaagaagccaacaaactgtaatcccgaatatcgggtccagaccctgggtgaggggcatctccagtagaataagcatctattggacaatagtaaaaccgggagacatacttttgattagcagcacagggaatctaattgctcctcggggttacttcaaaatacgaaatgggaaaagctcaataatgaggtcagatgcacccattgacaactgcaattctgaatgcatcactccaaatggaagcattcccaatgacaaaccttttcaaaatgtaaacaggatcacatatggggcctgtcccagatatgttaagcaaaacactctgaaattggcaacagggatgcggaatgtaccagagaaacaaactagaggcatattcggcgcaatcgcaggtttcatagaaaatggttgggagggaatggtagacggttggtacggtttcaggcatcaaaattctgagggcacaggacaagcagcagatcttaaaagcactcaagcagcaatcgatcaaatcaacgggaaactgaataggttaatcgagaaaacgaacgagaaattccatcaaatcgaaaaagaattctcagaagtggaagggagaattcaggacctcgagaaatatgttgaagacactaaaatagatctctggtcttacaacgcggagcttcttgttgccctggagaatcaacatacaattgatctaactgactcagaaatgaacaaactgtttgaaagaacaaggaagcaactgagggaaaatgctgaggatatgggcaatggttgcttcaaaatataccacaaatgtgacaatgcctgcatagggtcaatcagaaatggaacttatgaccatgatgtatacagagacgaagcattaaacaaccggttccagatcaaaggtgttgagctgaagtcaggatacaaagattggatcctatggatttcctttgccatatcatgctttttgctttgtgttgttttgctggggttcatcatgtgggcctgccaaaaaggcaacattaggtgcagcatttgcatttga

SEQ ID NO: 31405 - RNA, 1701 nt, synthetic construct
  misc_feature 1..1701: note = hemagglutinin__InfluenzaA__ABE15578
  source 1..1701: mol_type = other RNA
atgaagactatcattgctttgagctacattttatgtctggttttcgctcaaaaacttcccggaaatgacaacagcacagcaacgctgtgcctgggacatcatgcagtgccaaacggaacgctagtgaaaacaatcacgaatgatcaaattgaagtgactaatgctactgagctggttcagagttcctcaacaggtagaatatgcgacagtcctcaccgaatccttgatggaaaaaactgcacactgatagatgctctattgggagaccctcattgtgatggcttccaaaataaggaatgggacctttttgttgaacgcagcaaagcttacagcaactgttacccttatgatgtgccggattatgcctcccttaggtcactagttgcctcatcaggcaccctggagtttaccaatgaaggcttcaattggactggagtcgctcaggatgggaaaagctatgcttgcaaaaggggatctgttaacagtttctttagtagattgaattggttgcacaaattagaatacaaatatccagcactgaacgtgactatgccaaacaatgacaaatttgacaaactgtacatttggggggttcaccacccgagcacggacagtgaccaaaccagcctatatgttcaagcatcagggagagtcacagtctctaccaaaagaagccaacaaactgtaatcccgaatatcgggtccagaccctgggtgaggggcatctccagtagaataagcatctattggacaatagtaaaaccgggagacatacttttgattaacagcacagggaatctaattgctcctcggggttacttcaaaatacgaaatgggaaaagctcaataatgaggtcagatgcacccattgacaactgcaattctgaatgcatcactccaaatggaagcattcccaatgacaaaccttttcaaaatgtaaacaggatcacatatggggcctgtcccagatatgttaagcaaaacactctgaaattggcaacagggatgcggaatgtaccagagaaacaaactagaggcatattcggcgcaatcgcaggtttcatagaaaatggttgggagggaatggtagacggttggtacggtttcaggcatcaaaattctgagggcacaggacaagcagcagatcttaaaagcactcaagcagcaatcgatcaaatcaacgggaaactgaataggttaatcgagaaaacgaacgagaaattccatcaaatcgaaaaagaattctcagaagtggaagggagaattcaggacctcgagaaatatgttgaagacactaaaatagatctctggtcttacaacgcggagcttcttgttgccctggagaatcaacatacaattgatctaactgactcagaaatgaacaaactgtttgaaagaacaaggaagcaactgagggaaaatgctgaggacatgggcaatggttgcttcaaaatataccacaaatgtgacaatgcctgcatagggtcaatcagaaatggaacttatgaccatgatgtatacagagacgaagcattaaacaaccggttccagatcaaaggtgttgagctgaagtcaggatacaaagattggatcctatggatttcctttgccatatcatgctttttgctttgtgttgttttgctggggttcatcatgtgggcctgccaaaaaggcaacattaggtgcagcatttgcatttga

SEQ ID NO: 31406 - RNA, 1701 nt, synthetic construct
  misc_feature 1..1701: note = hemagglutinin__InfluenzaA__ABE26991
  source 1..1701: mol_type = other RNA
atgaaagcaaaactactagtcctgttgtgtgcatttacagctacatatgcagacacaatatgtataggctaccatgcgaacaactcaaccgacactgttgacacagtacttgagaagaacgtgacagtgacacactctgtcaacctacttgaggacagtcacaacggaaaactatgccgactaaaaggaacagccccactacaattgggtaattgcagcgttgccggatggatcttaggaaacccagaatgcgaatcactgttttctaaggaatcatggtcctacattgcagaaacaccaaaccctgagaatggaacatgttacccagggtatttcgccgactatgaggaactgagggagcaattgagctcagtatcatcattcgagagattcgaaatattccccaaggaaagctcatggcccaaccacacagtaaccaaaggagtgacggcatcatgctcccataatgggaaaagcagtttttacaaaaatttgctatggctgacggaaaagaatggcttgtacccaaatctgagcaagtcctatgtaaacaacaaggagaaagaagtccttgtactatggggtgttcatcacccgtctaacataggggaccaaagggccatctatcatacagaaaatgcttatgtctctgtggtgtcttcacattatagcagaagattcaccccagaaatagcaaaaagacccaaagtaagagatcaagaagggagaattaactactactggactctgctggaacccggggacacaataatatttgaggcaaatggaaatctaatagcgccatggtacgctttcgcattgagtagaggctttgggtcaggaatcatcacctcaaacgcatcaatgggtgactgtgacgctaagtgtcaaacaccccaaggagctataaacagtagtcttcctttccagaatgtacacccagtcacaataggagagtgtcccaagtatgtcaggagtacaaaattaaggatggttacaggactaagaaacatcccatccattcaatctagaggtttgtttggagccattgccggtttcattgaaggggggtggactggaatgatagatggatggtatggttatcatcatcagaatgaacaaggatctggctatgctgcagacaaaaaaagcacacaaaatgccattgatgggattacaaacaaggtgaattctgtaatcgagaaaatgaacactcaattcacagctgtaggcaaagaattcaacaaattagagagaaggatggaaaacttaaataagaaagttgatgatggatttctggacatttggacatataatgcagagttgttggttctcctggaaaatgaaaggactttggattttcatgactcaaatgtgaagaatctgtatgagaaagtaaaaaaccaattgaagaataatgccaaagaaatcgggaacgggtgttttgaattctatcacaagtgtaacaatgaatgcatggaaagtgtgaaaaatggaacttatgactatccaaaatattccgaagaatcaacgttaaaaagggaaaaaattgatggagtgaaattggaatcaatgggagtctatcagattctggcgatctactcaactgtcgccagttcactggtgcttttggtctccctgggggcaatcagtttctggatgtgttctaatgggtctttgcagtgtagaatatgcatctga

SEQ ID NO: 31407 - RNA, 1701 nt, synthetic construct
  misc_feature 1..1701: note = hemagglutinin__InfluenzaA__ABF47550
  source 1..1701: mol_type = other RNA
atgaagactatcattgctttgagctacattttctgtctggttttcgcccaaaaacttcccggaaatgacaacagcacagcaacgctgtgcctgggacatcatgcagtgccaaacggaacgctagtgaaaacaatcacgaatgatcagattgaagtgactaatgctactgagctggttcagagttcctcaacaggtagaatatgcgacagtcctcaccgaatccttgatggaaaaaactgcacactgatagatgctctattgggagaccctcattgtgatggcttccaaaatgagaaatgggacctttttgttgaacgcagcaaagcttacagcaactgttacccttatgatgtgccggattatgcctcccttaggtcactagttgcctcatcaggcaccctggagtttatcaatgaagacttcaattggactggagtcactcagagtgggggaagctatgcttgcaaaaggggatctgttaacagtttcttcagtagattgaattggttgcacgaatcagaatacaaatatccagcgctgaacgtgactatgccaaacaatggcaaatttgacaaattgtacatttggggggttcaccacccgagcacggacagagaacaaaccaacctatatgttcgagcatcagggagagtcacagtctctaccaagagaagccagcaaactgtaatcccgaatatcgggtctagaccctgggtaaggggtctgtccagtagaataagcatctattggacaatagtaaaaccgggagacatactgttgattaatagcaccgggaacctaattgctcctcggggttacttcaaaatacgcactgggaaaagctcaataatgaggtcagatgcacctattggcacctgcagctctgaatgcatcactccaaatggaagcattcccaatgacaaaccctttcaaaatgtaaacaagatcacatatggggcatgtcccaggtatgttaagcaaaacactctgaaattggcaacagggatgcggaatgtaccagagaaacaaactagaggcatattcggcgcaatagcaggtttcatagaaaatggttgggagggaatggtagacggttggtacggtttcaggcatcaaaattctgagggcacaggacaagcagcagatcttaaaagcactcaagcagcaatcgaccaaatcaacgggaaactgaataggttaatcgagaaaacgaacgagaaattccatcaaatcgaaaaggaattctcagaagtagaagggagaattcaggacctcgagaaatatgttgaagacactaaaatagatctctggtcttacaacgcggagcttcttgtcgccctggagaaccaacatacaattgatctgactgactcagaaatgaacaaactgtttgaaaaaacaaggaagcaactgagggaaaatgctgaggacatgggcaatggttgcttcaagatataccacaaatgtgacaatgcctgcatagggtcaatcagaaatggaacttatgaccatgatgtatacagagacgaggcattaaacaaccggttccagatcaaaggtgttgagctgaagtcaggatacaaagactggatcttatggatttcctttgccatatcatgctttttgctttgtgttgttttgctggggttcatcatgtgggcctgccaaaaaggcaacattaggtgcaacatttgcatttga

SEQ ID NO: 31408 - RNA, 1698 nt, synthetic construct
  misc_feature 1..1698: note = hemagglutinin__InfluenzaA__ABF47561
  source 1..1698: mol_type = other RNA
atgaaagcaaaactactggtcctgttatgtacatttacagctacatacgcagacacaatatgtataggctaccatgccaacaactcaaccgacactgttgacacagtacttgagaagaatgtgacagtgacacactctgtcaacctacttgaggacagtcacaatggaaaactatgtctactaaaaggaatagccccactacaattgggtaattgcagcgttgccggatggatcttaggaaacccagaatgcgaattactgatttccaaggaatcatggtcctacattgtagaaacaccaaatcccgagaatggaacatgttacccagggtatttcgccgactatgaggaactgagggagcaattgagttcagtatcttcatttgagagattcgaaatattccccaaaggaagctcatggcccaaccacaccgtgaccggagtatcagcatcatgctcccataatgggaaaagcagtttttacagaaatttgctatggctgacggggaagaatggtttgtacccaaaactgagcatgtcctatgtaaacaacaaagagaaagaagtccttgtgctatggggtgttcatcacccacctaacataggggaccaaagggccctctaccatacagaaaatgcttatgtctctgtagtgtcttcacattatagcagaagattcaccccagaaatagccaaaagacccaaagtaagagatcaggaaggaagaatcaactactactggactctgctggaacccggggacacaataatatttgaggcaaatggaaatctaatagcgccatggtatgctttcgcactgagtagaggctttggatcaggaatcatcacctcaaatgcaccaatgggtgaatgtgatgcgaagtgtcaaacacctcagggagctataaacagtagtcttcctttccagaatgtacacccagttacaataggagagtgtccaaagtatgtcaggagtgcaaaattaaggatggttacaggactaaggaacatcccatccattcaatccagaggtttgtttggagccattgccggtttcattgaaggggggtggactggaatggtagatgggtggtatggttatcatcatcagaatgagcaaggatctggctatgctgcagatcaaaaaagcacacaaaatgccattaacgggattacaaacaaggtgaattctgtaattgagaaaatgaacactcaattcacagctgtgggcaaagaattcaacaaattagaaagaaggatggaaaacttaaataaaaaagttgatgatgggtttctagacatttggacatataatgcagaattgttggttctactggaaaatgaaaggactttggatttccatgactccaatgtgaagaatctgtatgagaaagtaaaaagccaattaaagaataatgccaaagaaataggaaacgggtgttttgaattctatcacaagtgtaacaatgaatgcatggaaagtgtgaaaaatggaacttatgactatccaaaatattccgaagaatcaaagttaaacagggagaaaattgatggagtaaaattggaatcaatgggagtctatcagattctggcgatctactcaactgtcgccagttccctggttcttttggtctccctgggggcaatcagcttctggatgtgttccaatgggtctttgcagtgtagaatatgcatctga

SEQ ID NO: 31409 - RNA, 1698 nt, synthetic construct
  misc_feature 1..1698: note = hemagglutinin__InfluenzaA__ABF47572
  source 1..1698: mol_type = other RNA
atgaaagcaaaactactggtcctgttatgtacatttacagctacatacgcagacacaatatgtataggctaccatgccaacaactcaaccgacactgttgacacagtacttgagaagaatgtgacagtgacacactctgtcaacctacttgaggacagtcacaatggaaaactatgtctactaaaaggaatagccccactacaattgggtaattgcagcgttgccggatggatcttaggaaacccagaatgcgaattactgatttccaaggaatcatggtcctacattgtagaaacaccaaatcccgagaatggaacatgttacccagggtatttcgccgactatgaggaactgagggagcaattgagttcagtatcttcatttgagagattcgaaatattccccaaaggaagctcatggcccaaccacaccgtgaccggagtatcagcatcatgctcccataatgggaaaagcagtttttacagaaatttgctatggctgacggggaagaatggtttgtacccaaacctgagcatgtcctatgtaaacaacaaagataaagaagtccttgtgctatggggtgttcatcacccacctaacataggggaccaaagggccctctaccatacagaaaatgcttatgtctctgtagtgtcttcacattatagcagaagattcaccccagaaatagccaaaagacccaaagtaagagatcaggaaggaagaatcaactactactggactctgctggaacccggggacacaataatatttgaggcaaatggaaatctaatagcgccatggtatgctttcgcactgagtagaggctttggatcaggaatcatcacctcaaatgcaccaatgggtgaatgtgatgcgaagtgtcaaacacctcagggagctataaacagtagtcttcctttccagaatgtacacccagttacaataggagagtgtccaaagtatgtcaggagtgcaaaattaaggatggttacaggactaaggaacatcccatccattcaatccagaggtttgtttggagccattgccggtttcattgaaggggggtggactggaatggtagatgggtggtatggttatcatcatcagaatgagcaaggatctggctatgctgcagatcaaaaaagcacacaaaatgccattaacgggattacaaacaaggtgaattctgtaattgagaaaatgaacactcaattcacagctgtgggcaaagaattcaacaaattagaaagaaggatggaaaacttaaataaaaaagttgatgatgggtttctagacatttggacatataatgcagaattgttggttctactggaaaatgaaaggactttggatttccatgactccaatgtgaagaatctgtatgagaaagtaaaaagccaattaaagaataatgccaaagaaataggaaacgggtgttttgaattctatcacaagtgtaacaatgaatgcatggaaagtgtgaaaaatggaacttatgactatccaaaatattccgaagaatcaaagttaaacagggagaaaattgatggagtaaaattggaatcaatgggagtctatcagattctggcgatctactcaactgtcgccagttccctggttcttttggtctccctgggggcaatcagcttctggatgtgttccaatgggtctttgcagtgtagaatatgcatctga

SEQ ID NO: 31410 - RNA, 1698 nt, synthetic construct
  misc_feature 1..1698: note = hemagglutinin__InfluenzaA__ABF47583
  source 1..1698: mol_type = other RNA
atgaaagcaaaactactggtcctgttatgtacatttacagctacatacgcagacacaatatgtataggctaccatgccaacaactcaaccgacactgttgacacagtacttgagaagaatgtgacagtgacacactctgtcaacctacttgaggacagtcacaatggaaaactatgtctactaaaaggaatagccccactacaattgggtaattgcagcgttgccggatggatcttaggaaacccagaatgcgaattactgatttccaaggaatcatggtcctacattgtagaaacaccaaatcccgagaatggaacatgttacccagggtatttcgccgactatgaggaactgagggagcaattgagttcagtatcttcatttgagagattcgaaatattccccaaaggaagctcatggcccaaccacaccgtgaccggagtatcagcatcatgctcccataatgggaaaagcagtttttacagaaatttgctatggctgacggggaagaatggtttgtacccaaacctgagcatgtcctatgtaaacaacaaagagaaagaagtccttgtgctatggggtgttcatcacccacctaacataggggaccaaagggccctctaccatacagaaaatgcttatgtctctgtagtgtcttcacattatagcagaagattcaccccagaaatagccaaaagacccaaagtaagagatcaggaaggaagaatcaactactactggactctgctggaacccggggacacaataatatttgaggcaaatggaaatctaatagcgccatggtatgctttcgcactgagtagaggctttggatcaggaatcatcacctcaaatgcaccaatgggtgaatgtgatgcgaagtgtcaaacacctcagggagctataaacagtagtcttcctttccagaatgtacacccagttacaataggagagtgtccaaagtatgtcaggagtgcaaaattaaggatggttacaggactaaggaacatcccgtccattcaatccagaggtttgtttggagccattgccggtttcattgaaggggggtggactggaatggtagatgggtggtatggttatcatcatcagaatgagcaaggatctggctatgctgcagatcaaaaaagcacacaaaatgccattaacgggattacaaacaaggtgaattctgtaattgagaaaatgaacactcaattcacagctgtgggcaaagaattcaacaaattagaaagaaggatggaaaacttaaataaaaaagttgatgatgggtttctagacatttggacatataatgcagaattgttggttctactggaaaatgaaaggactttggatttccatgactccaatgtgaagaatctgtatgagaaagtaaaaagccaattaaagaataatgccaaagaaataggaaacgggtgttttgaattctatcacaagtgtaacaatgaatgcatggaaagtgtgaaaaatggaacttatgactatccaaaatattccgaagaatcaaagttaaacagggagaaaattgatggagtaaaattggaatcaatgggagtctatcagattctggcgatctactcaactgtcgccagttccctggttcttttggtctccctgggggcaatcagcttctggatgtgttccaatgggtctttgcagtgtagaatatgcatctga

SEQ ID NO: 31411 - RNA, 1701 nt, synthetic construct
  misc_feature 1..1701: note = hemagglutinin__InfluenzaA__ABF47594
  source 1..1701: mol_type = other RNA
atgaagactatcattgctttgagctacattttatgtctggttttcgctcaaaaacttcccggaaatgacaacagcacggcaacgctgtgcctgggacaccatgcagtgccaaacggaacgctagtgaaaacaatcacgaatgaccaaattgaagtgactaatgctactgagctggttcagagttcctcaacaggtagaatatgcgacagtcctcaccgaatccttgatggaaaaaactgcacattgatagatgctctattgggagaccctcattgtgatggcttccaaaataaggaatgggacctttttgttgaacgcagcaaagcttacagcaactgttacccttatgatgtgccggattatgcctcccttaggtcactagttgcctcatccggcaccctggagtttaacaatgaaagcttcaattggactggagtcgctcagaatggaacaagctatgcttgcaaaaggagatctgttaaaagtttctttagtagattgaattggttgcacaaattagaatacaaatatccagcacagaacgtgactatgccaaacaatgacaaatttgacaaattgtacatttggggggttcaccacccgagtacggacagtgaccaaaccagcctatatgttcaagcatcagggagagtcacagtctctaccaaaagaagccaacaaactgtaatcccgaatatcggatctagaccctgggtaaggggtgtctccagcagaataagcatctattggacaatagtaaaaccgggagacatacttttgattaacagcacagggaatctaattgctcctcggggttacttcaaaatacgaagtgggaaaagctcaataatgaggtcagatgcacccattggcaactgcaattctgaatgcatcactccaaatggaagcattcccaatgacaaaccatttcaaaatgtaaacaggatcacatatggggcctgtcccagatatgttaagcaaaacactctgaaattggcaacagggatgcggaatgtaccagagaaacaaactagaggcatattcggcgcaatcgcaggtttcatagaaaatggttgggagggaatggtagacggttggtacggtttcaggcatcaaaattctgagggcacaggacaagcagcagatcttaaaagcactcaagcagcaatcaaccaaatcaacgggaaactgaataggttaatcgagaaaacgaacgagaaattccatcaaatcgaaaaagaattctcagaagtagaagggagaattcaggacctcgagaaatatgttgaagacactaaaatagatctctggtcgtacaacgcggagcttcttgttgccctggagaaccaacatacaattgatctaactgactcagaaatgaacaaactgtttgaaagaacaaggaagcaactgagggaaaatgctgaggacatgggcaatggttgcttcaaaatataccacaaatgtgacaatgcctgcatagggtcaatcagaaatggaacttatgaccatgatgtatacagagacgaagcattaaacaaccggttccagatcaaaggtgttgagctgaagtcaggatacaaagattggatcctatggatttcctttgccatatcatgttttttgctttgtgttgttttgctggggttcatcatgtgggcctgccaaaaaggcaacattaggtgcaacatttgcatttga

SEQ ID NO: 31412 - RNA, 1701 nt, synthetic construct
  misc_feature 1..1701: note = hemagglutinin__InfluenzaA__ABF47605
  source 1..1701: mol_type = other RNA
atgaaagcaaaactactagtcctgttgtgtgcatttacagctacatatgcagacacaatatgtataggctaccatgcgaacaactcaaccgacactgttgacacagtacttgagaagaacgtgacagtgacacactctgtcaacctacttgaggacagtcacaacggaaaactatgccgactaaaaggaacagccccactacaattgggtaattgcagcgttgccggatggatcttaggaaacccagaatgcgaatcactgttttctaaggaatcatggtcctacattgcagaaacaccaaaccctgagaatggaacatgttacccagggtatttcgccgactatgaggaactgagggagcaattgagctcagtatcatcattcgagagattcgaaatattccccaaggaaagctcatggcccaaccacacagtaaccaaaggagtgacggcatcatgctcccataatgggaaaagcagtttttacaaaaatttgctatggctgacggaaaagaatggcttgtacccaaatctgagcaagtcctatgtaaacaacaaggagaaagaagtccttgtactatggggtgttcatcacccgtctaacataggggaccaaagggccatctatcatacagaaaatgcttatgtctctgtggtgtcttcacattatagcagaagattcaccccagaaatagcaaaaagacccaaagtaagagatcaagaagggagaattaactactactggactctgctggaacccggggacacaataatatttgaggcaagtggaaatttaatagcgccatggtacgctttcgcattgagtagaggctttgggtcaggaatcatcacctcaaacgcatcaatgggtgaatgtgacgctaagtgtcaaacaccccaaggagctataaacagtagtcttcctttccagaatgtacacccagtcacaataggagagtgtcccaagtatgtcaggagtacaaaattaaggatggttacaggactaagaaacatcccatccattcaatctagaggtttgtttggagccattgccggtttcattgaaggggggtggactggaatgatagatggatggtatggttatcatcatcagaatgaacaaggatctggctatgctgcagacaaaaaaagcacacaaaatgccattgatgggattacaaacaaggtgaattctgtaatcgagaaaatgaacactcaattcacagctgtaggcaaagaattcaacaaattagagagaaggatagaaaacttaaataagaaagttgatgatggatttctggacatttggacatataatgcagagttgttggttctcctggaaaatgaaaggactttggattttcatgactcaaatgtgaagaatctgtatgagaaagtaaaaaaccaattgaagaataatgccaaagaaatcgggaacgggtgttttgaattctatcacaagtgtaacaatgaatgcatggaaagtgtgaaaaatggaacttatgactatccaaaatattccgaagaatcaaagttaaaaagggaaaaaattgatggagtgaaattggaatcaatgggagtctatcagattctggcgatctactcaactgtcgccagttcactggtgcttttggtctccctgggggcaatcagtttctggatgtgttctaatgggtctttgcagtgtagaatatgcatctga

SEQ ID NO: 31413 - RNA, 1701 nt, synthetic construct; identical to SEQ ID NO: 31398
  misc_feature 1..1701: note = hemagglutinin__InfluenzaA__ABF47616
  source 1..1701: mol_type = other RNA

SEQ ID NO: 31414 - RNA, 1701 nt, synthetic construct
  misc_feature 1..1701: note = hemagglutinin__InfluenzaA__ABF47627
  source 1..1701: mol_type = other RNA
atgaaagcaaaactactagtcctgttgtgtgcatttacagctacatatgcagacacaatatgtataggctaccatgcgaacaactcaaccgacactgttgacacagtacttgagaagaacgtgacagtgacacactctgtcaacctacttgaggacagtcacaacggaaaactatgccgactaaaaggaacagccccactacaattgggtaattgcagcgttgccggatggatcttaggaaacccagaatgcgaatcactgttttctaaggaatcatggtcctacattgcagaaacaccaaaccctgagaatggaacatgttacccagggtatttcgccgactatgaggaactgagggagcaattgagctcagtatcatcattcgagagattcgaaatattccccaaggaaagctcatggcccaaccacacagtaaccaaaggagtgacggcatcatgctcccataatgggaaaagcagtttttacaaaaatttgctatggctgacggaaaagaatggcttgtacccaaatctgagcaagtcctatgtaaacaacaaggagaaagaagtccttgtactatggggtgttcatcacccgtctaacataggggaccaaagggccatctatcatacagaaaatgcttatgtctctgtggtgtcttcacattatagcagaagattcaccccagaaatagcaaaaagacccaaagtaagagatcaagaagggagaattaactactactggactctgctggaacccggggacacaataatatttgaggcaaatggaaatctaatagcgccatggtacgctttcgcattgagtagaggctttgggtcaggaatcatcacctcaaacgcatcaatgggtgactgtgacgctaagtgtcaaacaccccaaggagctataaacagtagtcttcctttccagaatgtacacccagtcacaataggagagtgtcccaagtatgtcaggagtacaaaattaaggatggttacaggactaagaaacatcccatccattcaatctagaggtttgtttggagccattgccggtttcattgaaggggggtggactggaatgatagatggatggtatggttatcatcatcagaatgaacaaggatctggctatgctgcagacaaaaaaagcacacaaaatgccattgatgggattacaaacaaggtgaattctgtaatcgagaaaatgaacactcaattcacagctgtaggcaaagaattcaacaaattagagagaaggatggaaaacttaaataagaaagttgatgatggatttctggacatttggacatataatgcagagttgttggttctcctggaaaatgaaaggactttggattttcatgactcaaatgtgaagaatctgtatgagaaagtaaaaaaccaattgaagaataatgccaaagaaatcgggaacgggtgttttgaattctatcacaagtgtaacaatgaatgcatggaaagtgtgaaaaatggaacttatgactatccaaaatattccgaagaatcaaagttaaaaagggaaaaaattgatggagtgaaattggaatcaatgggagtctatcagattctggcgatctactcaactgtcgccagttcactggtgcttttggtctccctgggggcaatcagtttctggatgtgttctaatgggtctttgcagtgtagaatatgcatctga

SEQ ID NO: 31415 - RNA, 1701 nt, synthetic construct
  misc_feature 1..1701: note = hemagglutinin__InfluenzaA__ABF47638
  source 1..1701: mol_type = other RNA
atgaaagcaaaactactagtcctgttgtgtgcatttacagctacatatgcagacacaatatgtataggctaccatgcgaacaactcaaccgacactgttgacacagtacttgagaagaacgtgacagtgacacactctgtcaacctacttgaggacagtcacaacggaaaactatgccgactaaaaggaacagccccactacaattgggtaattgcagcgttgccggatggatcttaggaaacccagaatgcgaatcactgttttctaaggaatcatggtcctacattgcagaaacaccaaaccctgagaatggaacatgttacccagggtatttcgccgactatgaggaactgagggagcaattgagctcagtatcatcattcgagagattcgaaatattccccaaggaaagctcatggcccaaccacaccgtaaccaaaggagtgacggcatcatgctcacataatgggaaaagcagtttttacaaaaatttgctatggctgacggaaaagaatggcttgtacccaaatctgagcaagtcctatgtaaacaacaaggagaaagaagtccttgtactatggggtgttcatcacccgtctaacataggggaccaaagggccatctatcatacagaaaatgcttatgtctctgtagtgtcttcacattatagcagaagattcaccccagaaataacaaaaagacccaaagtaagagatcaagaagggagaattaactactactggactctgctggaacccggggacacaataatatttgaggcaaatggaaatctaatagcgccatggtacgctttcgcactgagtagaggctttgggtcaggaatcatcacctcaaacgcatcaatgggtgaatgtgacgctaagtgtcaaacaccccaaggagctataaacagtagtcttcctttccagaatgtacacccagtcacaataggagagtgtcccaagtatgtcaggagtacaaaattaaggatggttacaggactaagaaacatcccatccattcaatctagaggtttgtttggagccattgccggtttcattgaaggggggtggactggaatgatagatggatggtatggttaccatcatcagaatgaacaaggatctggctatgctgcagaccaaaaaagcacacaaaatgccattgatgggattacaaacaaggtgaattctgtaatcgagaaaatgaacactcaattcacagctgtaggcaaagaattcaacaaattagagagaaggatggaaaacttaaataagaaagttgatgatgggtttctggacatttggacatataatgcagagttgttggttctcctggaaaatgaaaggactttggattttcatgactcaaatgtgaagaatctgtatgagaaagtaaaaacccaattgaagaataatgccaaagaaatcgggaacgggtgttttgaattctatcacaagtgtaacaatgaatgcatggaaagtgtgaaaaatggaacttatgactatccaaaatattccgaagaatcaaagttaaacagggaaaaaattgatggagtgaaattggaatcaatgggagtctatcagattctggcgatctactcaactgtcgccagttcactggtgcttttggtctccctgggggcaatcagtttctggatgtgttctaatgggtctttgcagtgtagaatatgcatctga

SEQ ID NO: 31416 - RNA, 1701 nt, synthetic construct
  misc_feature 1..1701: note = hemagglutinin__InfluenzaA__ABF47649
  source 1..1701: mol_type = other RNA
atgaaagcaaaactactagtcctgttgtgtgcatttacagctacatatgcagacacaatatgtataggctaccatgcgaacaactcaaccgacactgttgacacagtacttgagaagaacgtgacagtgacacactctgtcaacctacttgaggacagtcacaacggaaaactatgccgactaaaaggaacagccccactacaattgggtaattgcagcgttgccggatggatcttaggaaacccagaatgcgaatcactgttttctaaggaatcatggtcctacattgcagaaacaccaaaccctgagaatggaacatgttacccagggtatttcgccgactatgaggaactgagggagcaattgagctcagtatcatcattcgagagattcgaaatattccccaaggaaagctcatggcccaaccacaccgtaaccaaaggagtgacggcatcatgctcacataatgggaaaagtagtttttacaaaaatttgctatggctgacggaaaagaatggcttgtacccaaatctgagcaagtcctatgtaaacaacaaggagaaagaagtccttgtactatggggtgttcatcacccgtctaacataggggaccaaagggccatctatcatacagaaaatgcttatgtctctgtagtgtcttcacattatagcagaagattcaccccagaaataacaaaaagacccaaagtaagagatcaagaagggagaattaactactactggactctgctggaacccggggacacaataatatttgaggcaaatggaaatctaatagcgccatggtacgctttcgcactgagtagaggctttgggtcaggaatcatcacctcaaacgcatcaatgggtgaatgtgacgctaagtgtcaaacaccccaaggagctataaacagtagtcttcctttccagaatgtacacccagtcacaataggagagtgtcccaagtatgtcaggagtacaaaattaaggatggttacaggactaagaaacatcccatccattcaatctagaggtttgtttggagccattgccggtttcattgaaggggggtggactggaatgatagatggatggtatggttaccatcatcagaatgaacaaggatctggctatgctgcagaccaaaaaagcacacaaaatgccattgatgggattacaaacaaggtgaattctgtaatcgagaaaatgaacactcaattcacagctgtaggcaaagaattcaacaaattagagagaaggatggaaaacttaaataagaaagttgatgatgggtttctggacatttggacatataatgcagagttgttggttctcctggaaaatgaaaggactttggattttcatgactcaaatgtgaagaatctgtatgagaaagtaaaaacccaattgaagaataatgccaaagaaatcgggaacgggtgttttgaattctatcacaagtgtaacaatgaatgcatggaaagtgtgaaaaatggaacttatgactatccaaaatattccgaagaatcaaagttaaacagggaaaaaattgatggagtgaaattggaatcaatgggagtctatcagattctggcgatctactcaactgtcgccagttcactggtgcttttggtctccctgggggcaatcagtttctggatgtgttctaatgggtctttgcagtgtagaatatgcatctga

SEQ ID NO: 31417 - RNA, 1701 nt, synthetic construct
  misc_feature 1..1701: note = hemagglutinin__InfluenzaA__ABF47660
  source 1..1701: mol_type = other RNA
atgaaagcaaaactactagtcctgttgtgtgcatttacagctacatatgcagacacaatatgtataggctaccatgcgaacaactcaaccgacactgttgacacagtacttgagaagaacgtgacagtgacacactctgtcaacctacttgaggacagtcacaacggaaaactatgccgactaaaaggaacagccccactacaattgggtaattgcagcgttgccggatggatcttaggaaacccagaatgcgaatcactgttttctaaggaatcatggtcctacattgcagaaacaccaaaccctgagaatggaacatgttacccagggtatttcgccgactatgaggaactgagggagcaattgagctcagtatcatcattcgagagattcgaaatattccccaaggaaagctcatggcccaaccacacagtaaccaaaggagtgacggcatcatgctcccataatgggaaaagcagtttttacaaaaatttgctatggctgacggaaaagaatggcttgtacccaaatctgagcaagtcctatgtaaacaacaaggagaaagaagtccttgtactatggggtattcatcacccgtctaacataggggaccaaagggccatctatcatacagaaaatgcttatgtctctgtggtgtcttcacattatagcagaagattcaccccagaaatagcaaaaagacccaaagtaagagatcaagaagggagaattaactactactggactctgctggaacccggggacacaataatatttgaggcaaatggaaatctaatagcgccatggtacgctttcgcattgagtagaggctttgggtcaggaatcatcacctcaaacgcatcaatgggtgactgtgacgctaagtgtcaaacaccccaaggagctataaacagtagtcttcctttccagaatgtacacccagtcacaataggagagtgtcccaagtatgtcaggagtacaaaattaaggatggttacaggactaagaaacatcccatccattcaatctagaggtttgtttggagccattgccggtttcattgaaggggggtggactggaatgatagatggatggtatggttatcatcatcagaatgaacaaggatctggctatgctgcagacaaaaaaagcacacaaaatgccattgatgggattacaaacaaggtgaattctgtaatcgagaaaatgaacactcaattcacagctgtaggcaaagaattcaacaaattagagagaaggatggaaaacttaaataagaaagttgatgatggatttctggacatttggacatataatgcagagttgttggttctcctggaaaatgaaaggactttggattttcatgactcaaatgtgaagaatctgtatgagaaagtaaaaacccaattgaagaataatgccaaagaaatcgggaacgggtgttttgaattctatcacaagtgtaacaatgaatgcatggaaagtgtgaaaaatggaacttatgactatccaaaatattccgaagaatcaaagttaaaaagggaaaaaattgatggagtgaaattggaatcaatgggagtctatcagattctggcgatctactcaactgtcgccagttcactggtgcttttggtctccctgggggcaatcagtttctggatgtgttctaatgggtctttgcagtgtagaatatgcatctga

SEQ ID NO: 31418 - RNA, 1698 nt, synthetic construct
  misc_feature 1..1698: note = hemagglutinin__InfluenzaA__ABF47671
  source 1..1698: mol_type = other RNA
atgaaagcaaaactactggtcctgttatgtacatttacagctacatacgcagacacaatatgtataggctaccatgccaacaactcaaccgacactgttgacacagtacttgagaagaatgtgacagtgacacactctgtcaacctacttgaggacagtcacaatggaaaactatgtctactaaaaggaatagccccactacaattgggtaattgcagcgttgccggatggatcttaggaaacccagaatgcgaattactgatttccaaggaatcatggtcctacattgtagaaacaccaaatcccgagaatggaacatgttacccagggtatttcgccgactatgaggaactgagggagcaattgagttcagtatcttcatttgagagattcgaaatattccccaaaggaagctcatggcccaaccacaccgtaaccggagtatcagcatcatgctcccataatgggaaaagcagtttttacagaaatttgctatggctgacggggaagaatggtttgtacccaaacctgagcatgtcctatgtaaacaacaaagagaaagaagtccttgtgctatggggtgttcatcacccacctaacataggggaccaaagggccctctaccatacagaaaatgcttttgtctctgtagtgtcttcacattatagcagaagattcaccccagaaatagccaaaagacccaaagtaagagatcaggaaggaagaatcaactactactggactctgctggaacccggggacacaataatatttgaggcaaatggaaatctaatagcgccatggtatgctttcgcactgagtagaggctttggatcaggaatcatcacctcaaatgcaccaatggatgaatgtgatgcgaagtgtcaaacacctcagggagctataaacagtagtcttcctttccagaatgtacacccagttacaataggagagtgtccaaagtatgtcaggagtgcaaaattaaggatggttacaggactaaggaacatcccatccattcaatccagaggtttgtttggagccattgccggtttcattgaaggggggtggactggaatggtagatgggtggtatggttatcatcatcagaatgagcaaggatctggctatgctgcagatcaaaaaagcacacaaaatgccattaacgggattacaaacaaggtgaattctgtaattgagaaaatgaacactcaattcacagctgtgggcaaagaattcaacaaattagaaagaaggatggaaaacttaaataaaaaagttgatgatgggtttctagacatttggacatataatgcagaattgttggttctactggaaaatgaaaggactttggatttccatgactccaatgtgaagaatctgtatgagaaagtaaaaagccaattaaagaataatgccaaagaaataggaaacgggtgttttgaattctatcacaagtgtaacaatgaatgcatggaaagtgtgaaaaatggaacttatgactatccaaaatattccgaagaatcaaagttaaacagggagaaaattgatggagtaaaattggaatcaatgggagtctatcagattctggcgatctactcaactgtcgccagttccctggttcttttggtctccctgggggcaatcagcttctggatgtgttccaatgggtctttgcagtgtagaatatgcatctga

SEQ ID NO: 31419 - RNA, 1701 nt, synthetic construct
  misc_feature 1..1701: note = hemagglutinin__InfluenzaA__ABF47693
  source 1..1701: mol_type = other RNA
atgaaagcaaaactactggtcctgttatgtgcactttcagctacagatgcagacacaatatgtataggctaccatgcgaacaactcaaccgacactgttgacacagtactcgaaaagaacgtgacagtgacacactctgtcaacctacttgaggacagtcacaacggaaaactatgcagactaaaaggaatagccccactacaattggggaaatgcaacattgccggatggatcttaggaaacccagaatgcgaatcactgttttctaagaaatcatggtcctacattgcagaaacaccaaactccgagaatggaacatgttacccaggatatttcgccgactatgaggaattgagggagcaattgagctcagtatcatcattcgagagattcgaaatattccccaaggaaagatcatggcccaaacacaacgtaaccagaggcgtaacggcatcatgctcccataaggggaaaagcagtttttacagaaatttgctatggctgacggagaaaaatggctcgtacccaaatctgagcaagtcctatgtgaacaacaaagagaaagaagtccttgtactatggggtgttcatcacccgtctaacatagaggaccaaaagaccatctatcggaaagaaaatgcttatgtctctgtagtgtcttcaaattataacaggagattcaccccagaaatagcagaaagacccaaagtaagaggtcaagcagggagaattaactactactggactctgctggaacccggggacacaataatatttgaggcaaatggaaatctaatagcgccatggcatgctttcgcactgaatagaggctttgggtcaggaatcatcacctcaaacgcatcgatggatgaatgtgacacgaagtgtcaaacaccccagggagctataaacagtagtcttcctttccagaatatacacccagtcacaataggggagtgcccaaaatacgtcaggagtacaaaattgaggatggttacaggactaaggaacatcccatccattcaatccagaggtctgtttggagccattgccggtttcattgaagggggatggactggaatgatagatggatggtatggttatcatcatcagaatgaacagggatctggctatgctgcggatcaaaaaagcacacaaaatgccattaacgggattacaaacaaggtgaactctgttatcgagaaaatgaacactcaattcacagctgtgggtaaagaattcaacaaattagaaaaaaggatggaaaacttaaataaaaaagttgatgatggatttctggacatttggacatataatgcagaattgttggttctactggaaaatgaaaggactttggattttcatgactcaaatgtgaagaatctgtatgagaaagtaaaaagccaattaaagaataatgccaaagaaataggaaacgggtgttttgaattctaccacaagtgtaacaatgaatgcatggaaagtgtaaaaaatggaacttatgactatccaaaatattcagaggaatcaaagttaaacagggaaaaaattgatggagtgaaattggaatcaatgggagtctatcagattctggcgatctactcaactgtcgccagttcactagtgcttttggtctccctgggggcaatcagcttctggatgtgttctaatgggtctttgcagtgcagaatatgcatctga

SEQ ID NO: 31420 - RNA, 1701 nt, synthetic construct
  misc_feature 1..1701: note = hemagglutinin__InfluenzaA__ABF47704
  source 1..1701: mol_type = other RNA
atgaaagcaaaactactggtcctgttatgtgcactttcagctacagatgcagacacaatatgtataggctaccatgcgaacaactcaaccgacactgttgacacagtactcgaaaagaacgtgacagtgacacactctgtcaacctacttgaggacagtcacaacggaaaactatgcagactaaaaggaatagccccactacaattggggaaatgcaacattgccggatggatcttaggaaacccagaatgcgaatcactgttttctaagaaatcatggtcctacattgcagaaacaccaaactccgagaatggaacatgttacccaggatatttcgccgactatgaggaattgagggagcaattgagctcagtatcatcattcgagagattcgaaatattccccaaggaaagatcatggcccaaacacaacgtaaccagaggcgtaacggcatcatgctcccataaggggaaaagcagtttttacagaaatttgctatggctgacggagaaaaatggctcgtacccaaatctgagcaagtcctatgtgaacaacaaagagaaagaagtccttgtactatggggtgttcatcacccgtctaacatagaggaccaaaagaccatctatcggaaagaaaatgcttatgtctctgtagtgtcttcaaattataacaggagattcaccccagaaatagcagaaagacccaaagtaagaggtcaagcagggagaattaactactactggactctgctggaacccggggacacaataatatttgaggcaaatggaaatctaatagcgccatggcatgctttcgcactgaatagaggctttgggtcaggaatcatcacctcaaacgcatcgatggatgaatgtgacacgaagtgtcaaacaccccagggagctataaacagtagtcttcctttccagaatatacacccagtcacaataggggagtgcccaaaatacgtcaggagtacaaaattgaggatggttacaggactaaggaacatcccatccattcaatccagaggtctgtttggagccattgccggtttcattgaagggggatggactggaatgatagatggatggtatggttatcatcatcagaatgaacagggatctggctatgctgcggatcaaaaaagcacacaaaatgccattaacgggattacaaacaaggtgaactctgttatcgagaaaatgaacactcaattcacagctgtgggtaaagaattcaacaaattagaaaaaaggatggaaaacttaaataaaaaagttgatgatggatttctggacatttggacatataatgcagaattgttggttctactggaaaatgaaaggactttggattttcatgactcaaatgtgaagaatctgtatgagaaagtaaaaagccaattaaagaataatgccaaagaaataggaaacgggtgttttgaattctaccacaagtgtaacaatgaatgcatggaaagtgtaaaaaatggaacttatgactatccaaaatattcagaggaatcaaagttaaacagggaaaaaattgatggagtgaaattggaatcaatgggagtctatcagattctggcgatctactcaactgtcgccagttcactggtgcttttggtctccctgggggcaatcagcttctggatgtgttctaatgggtctttgcagtgcagaatatgcatctga

SEQ ID NO: 31421 - RNA, 1701 nt, synthetic construct
  misc_feature 1..1701: note = hemagglutinin__InfluenzaA__ABF47715
  source 1..1701: mol_type = other RNA
atgaaagcaaaactactggtcctgttatgtgcactttcagctacagatgcagacacaatatgtataggctaccatgcgaacaactcaactgacactgttgacacagtactcgaaaagaacgtgacagtgacacactctgtcaacctacttgaggacagtcacaacggaaaactatgcagactaaaaggaatagccccactacaattggggaaatgcagcattgccggatggatcttaggaaacccagaatgcgaatcactgttttccaagaaatcatggtcctacattgcagaaacaccaaactccgagaatggaacatgttacccaggatatttcgccgactatgaggaattgagggagcaattgagctcagtatcatcattcgagagattcgaaatattccccaaggaaagatcatggcccaaacacaacgtaaccagaggcgtaacggcatcatgctcccataaggggaaaagcagtttttacagaaatttgctatggctgacggagaaaaatggctcgtacccaaatctgagcaagtcctatgtgaacaacaaagagaaagaagtccttgtactatggggtgttcatcacccgtctaacatagaggaccaaaagaccatctatcggaaagaaaatgcttatgtctctgtagtgtcttcaaattataacagaagattcaccccagaaatagcagaaagacccaaagtaagaggtcaagcagggagaattaactactactggactctgctggaacctggggacacaataatatttgaggcaaatggaaatctaatagcgccatggcatgctttcgcactgaatagaggctttgggtcaggaatcatcacctcaaacgcatcgatggatgaatgtgacacgaagtgtcaaacaccccagggagctataaacagtagtcttcctttccagaatatacacccagtcacaataggagagtgcccaaaatacgtcaggagtacaaaattgaggatggttacaggactaaggaacatcccatccattcaatccagaggtctgtttggagccattgccggtttcattgaagggggatggactggaatgatagatggatggtatggttatcatcatcagaatgaacagggatctggctatgctgcggatcaaaaaagcacacaaaatgccattaacgggattacaaacaaggtgaactctgttatcgagaaaatgaacactcaattcacagctgtgggtaaagaattcaacaaattagaaaaaaggatggaaaacttaaataaaaaagttgatgatggatttctggacatttggacatataatgcagaattgttggttctactggaaaatgaaaggactttggattttcatgactcaaatgtgaagaatctgtatgagaaagtaaaaagccaattaaagaataatgccaaagaaataggaaacgggtgttttgaattctaccacaagtgtaacaatgaatgcatggaaagtgtaaaaaatggaacttatgactatccaaaatattcagaggaatcaaagttaaacagggaaaaaattgatggagtgaaattggaatcaatgggagtctatcagattctggcgatctactcaactgtcgccagttcactggtgcttttggtctccctgggggcaatcagcttctggatgtgttctaatgggtctttgcagtgcagaatatgcatctga

SEQ ID NO: 31422 - RNA, 1701 nt, synthetic construct; identical to SEQ ID NO: 31420
  misc_feature 1..1701: note = hemagglutinin__InfluenzaA__ABF47726
  source 1..1701: mol_type = other RNA

SEQ ID NO: 31423 - RNA, 1701 nt, synthetic construct
  misc_feature 1..1701: note = hemagglutinin__InfluenzaA__ABF47737
  source 1..1701: mol_type = other RNA
atgaaagcaaaactactggtcctgttatgtgcactttcagctacagatgcagacacaatatgtataggctaccatgcgaacaactcaaccgacactgttgacacagtactcgaaaagaacgtgacagtgacacactctgtcaacctacttgaggacagtcacaacggaaaactatgcagactaaaaggaatagccccactacaattggggaaatgcaacattgccggatggatcttaggaaacccagaatgcgaatcactgttttctaagaaatcatggtcctacattgcagaaacaccaaactccgagaatggaacatgttacccaggatatttcgccgactatgaggaattgagggagcaattgagctcagtatcatcattcgagagattcgaaatattccccaaggaaagatcatggcccaaacacaacgtaaccagaggcgtaacggcatcatgctcccataaggggaaaagcagtttttacagaaatttgctatggctgacggagaaaaatggctcgtacccaaatctgagcaagtcctatgtgaacaacaaagagaaagaagtccttgtactatggggtgttcatcacccgtctaacatagaggaccaaaagaccatctatcggaaagaaaatgcttatgtctctgtagtgtcttcaaattataacaggagattcaccccagaaatagcagaaagacccaaagtaagaggtcaagcagggagaattaactactactggactctgctggaacccggggacacaataatatttgaggcaaatggaaatctaatagcgccatggcatgctttcgcactgaatagaggctttgggtcaggaatcatcacctcaaacgcatcgatggatgaatgtgacacgaagtgtcaaacaccccagggagctataaacagtagtcttcctttccagaatatacacccagtcacaataggggagtgcccaaaatacgtcaggagtacaaaattgaggatggttacaggactaaggaacatcccatccattcaatccagaggtctgtttggagccattgccggtttcattgaagggggatggactggaatgatagatggatggtatggttatcatcatcagaatgaacagggatctggctatgctgcggatcaaaaaagcacacaaaatgccattaacgggattacaaacaaggtgaactctgttatcgagaaaatgaacactcaattcacagctgtgggtaaagaattcaacaaattagaaaaaaggatggaaaacttaaataaaaaagttgatgatggatttctggacatttggacatataatgcagaattgttggttctactggaaaatgaaaggactttggattttcatgactcaaatgtgaagaatttgtatgagaaagtaaaaagccaattaaagaataatgccaaagaaataggaaacgggtgttttgaattctaccacaagtgtaacaatgaatgcatggaaagtgtaaaaaatggaacttatgactatccaaaatattcagaggaatcaaagttaaacagggaaaaaattgatggagtgaaattggaatcaatgggagtctatcagattctggcgatctactcaactgtcgccagttcactggtgcttttggtctccctgggggcaatcagcttctggatgtgttctaatgggtctttgcagtgcagaatatgcatctga

SEQ ID NO: 31424 - RNA, 1701 nt, synthetic construct
  misc_feature 1..1701: note = hemagglutinin__InfluenzaA__ABF47748
  source 1..1701: mol_type = other RNA
atgaaagcaaaactgctggtcctgttatgtgcactttcagctacagatgcagacacaatatgtataggctaccatgcgaacaactcaaccgacactgttgacacagtactcgaaaagaacgtgacagtgacacactctgtcaacctacttgaggacagtcacaacggaaaactatgcagactaaaaggaatagccccactacaattggggaaatgcagcattgccggatggatcttaggaaacccagaatgcgaatcactgttttctaagaaatcatggtcctacattgcagaaacaccaaactccgagaatggaacatgttacccagggtatttcgccgactatgaggaactgagggagcaattgagttcagtatcatcattcgagagattcgaaatattccccaaggaaagttcatggcccaaacacaacgtaaccagaggagtaacggcatcatgctcccataaggggaaaagcagtttttacagaaatttgctatggctgacggagaaaaatggctcgtacccaaatctgagcaagtcctatgtgaacaacaaagagaaagaagtccttgtactatggggtgttcatcacccgtctaacatagaggaccaaaagaccatctatcgtaaagaaaatgcttatgtctctgtagtgtcttcacattataacaggagattcaccccagaaatagcaaaaagacccaaagtaagagatcaagaagggagaattaactactactggactctgctggaacccggggacacaataatatttgaggcaaatggaaatctaatagcgccatggtatgctttcgcactgagtagaggctttgggtcaggaatcatcacctcaaacgcatcgatggatgaatgtgacgcgaagtgtcaaacaccccagggagctataaacagtagtcttcctttccagaatgtacacccagtcacaataggagagtgcccaaagtacgtcaggagtacaaaattaaggatggttacaggactaaggaacatcccatccattcaatccagaggtttgtttggagccattgccggtttcattgaagggggatggactggaatgatagatggatggtatggttatcatcatcagaatgaacagggatctggctatgctgcggatcaaaaaagcacacaaaatgccattaacgggattacaaacaaggtgaactctgtaatcgagaaaatgaacactcaattcacagctgtgggtaaagaattcaacaaattagaaaaaaggatggaaaacttaaataaaaaagttgatgatggatttctggacatttggacatataatgcagaattgttggttctactggaaaatgaaaggactttggattttcatgactcaaatgtgaagaacctgtatgagaaagtaaaaagccaattaaagaataatgccaaagaaataggaaacgggtgttttgaattctaccacaagtgtaacaatgaatgcatggaaagtgtaaaaaatggaacttatgactatccaaaatattcagaggaatcaaagttaaacagggaaaaaattgatggagtgaaattggaatcaatgggagtctatcagattctggcgatctactcaactgtcgccagttcactggtgcttttggtctccctgggggcaatcagcttctggatgtgttctaatgggtctttgcagtgcagaatatgcatctga

SEQ ID NO: 31425 - RNA, 1701 nt, synthetic construct
  misc_feature 1..1701: note = hemagglutinin__InfluenzaA__ABF47770
  source 1..1701: mol_type = other RNA
atgaaagcaaaactactggtcctgttatgtgcactttcagctacagatgcagacacaatatgtataggctaccatgcgaacaactcaaccgacactgttgacacagtactcgaaaagaacgtgacagtgacacactctgtcaacctacttgaggacaatcacaacggaaaactatgcaaactaaaaggaatagccccactacaattggggaaatgcagcattgccggatggatcttaggaaacccagaatgcgaatcactgttttctaagaaatcatggtcctacattgcagaaacaccaaactccgagaatggaacatgttacccagggtatttcgccgactatgaggaactgagggaacaattgagttcagtatcatcattcgagagattcgaaatattccccaaggaaagttcatggcccaaacacaacgtaaccaaaggagtaacggcatcatgctcccataaggggaaaagcagtttttacagaaatttgctatggctgacggagaaaaatggctcgtacccaaatctgagcaagtcctatgtgaacaacaaagagaaagaagtccttgtactatggggtgttcatcacccgtctaacatagaggaccaaaagaccatctatcgtaaagaaaatgcttatgtctctgtagtgtcttcacattataacaggagattcaccccagaaatagcaaaaagacccaaagtaagaaatcaagaagggagaattaactactactggactctgctggaacccggggacacaataatatttgaggcaaatggaaatctaatagcgccatggtatgctttcgcattgagtagaggctttgggtcaggaatcatcacctcaaacgcatcgatggatgaatgtgacgcgaagtgtcaaacaccccagggagctataaacagtagtcttccttttcagaatgtacacccagtcacaataggagagtgcccaaagtacgtcaggagtacaaaattaaggatggttacaggactaaggaacatcccatccattcaatccagaggtttgtttggagccattgccggtttcattgaagggggatggactggaatgattgatggatggtatggttatcatcatcagaatgaacagggatctggctatgctgcggatcaaaaaagcacacaaaatgccattaacgggattacaaacaaggtgaactctataatcgagaaaatgaacactcaattcacagctgtgggtaaagaattcaacaaactagaaaaaaggatggaaaacttaaataaaaaagttgatgatggatttctggacatttggacatataatgcagaattgttggttctactggaaaatgaaaggactttggatttccatgactcaaatgtgaagaacctgtatgagaaagtaaaaagccaattaaagaataatgccaaagaaataggaaacgggtgttttgaattctaccacaagtgtaacaatgaatgcatggaaagtgtaaaaaatgggacttatgactatccaaaatattcagaagaatcaaagttaaacagggaaaaaattgatggagtgaaattggaatcaatgggagtctatcagattctggcgatctactcaactgtcgccagttcactggtgcttttggtctccctgggggcaatcagcttctggatgtgttctaatgggtctttgcagtgcagaatatgcatctga

SEQ ID NO: 31426 - RNA, 1701 nt, synthetic construct; identical to SEQ ID NO: 31425
  misc_feature 1..1701: note = hemagglutinin__InfluenzaA__ABF47781
  source 1..1701: mol_type = other RNA

SEQ ID NO: 31427 - RNA, 1701 nt, synthetic construct; identical to SEQ ID NO: 31425
  misc_feature 1..1701: note = hemagglutinin__InfluenzaA__ABF47792
  source 1..1701: mol_type = other RNA

SEQ ID NO: 31428 - RNA, 1701 nt, synthetic construct; identical to SEQ ID NO: 31425
  misc_feature 1..1701: note = hemagglutinin__InfluenzaA__ABF47803
  source 1..1701: mol_type = other RNA

SEQ ID NO: 31429 - RNA, 1701 nt, synthetic construct; identical to SEQ ID NO: 31425
  misc_feature 1..1701: note = hemagglutinin__InfluenzaA__ABF47814
  source 1..1701: mol_type = other RNA

SEQ ID NO: 31430 - RNA, 1701 nt, synthetic construct; identical to SEQ ID NO: 31425
  misc_feature 1..1701: note = hemagglutinin__InfluenzaA__ABF47825
  source 1..1701: mol_type = other RNA

SEQ ID NO: 31431 - RNA, 1701 nt, synthetic construct; identical to SEQ ID NO: 31425
  misc_feature 1..1701: note = hemagglutinin__InfluenzaA__ABF47836
  source 1..1701: mol_type = other RNA

SEQ ID NO: 31432 - RNA, 1701 nt, synthetic construct; identical to SEQ ID NO: 31425
  misc_feature 1..1701: note = hemagglutinin__InfluenzaA__ABF47847
  source 1..1701: mol_type = other RNA

SEQ ID NO: 31433 - RNA, 1701 nt, synthetic construct
  misc_feature 1..1701: note = hemagglutinin__InfluenzaA__ABF47858
  source 1..1701: mol_type = other RNA
atgaagactatcattgctttgagctacattttatgtctggttttcgctcaaaaacttcccggaaatgacaacggcacagcaacgctgtgcctgggacaccatgcagtgccaaacggaacgctagtgaaaacaatcacgaatgatcaaattgaagtgactaatgctactgagctggttcagagttcctcaacaggtagaatatgcgacagtcctcaccgaatccttgatggaaaaaactgcacactgatagatgctctattgggagaccctcattgtgatggcttccaaaataaggaatgggacctttttgttgaacgcagcaaagcttacagcaactgttacccttatgatgtgccggattatgcctcccttaggtcactagttgcctcatcaggcaccctggagtttatcaatgaagacttcaattggactggagtcgctcaggatgggaaaagctatgcttgcaaaaggggatctgttaacagtttctttagtagattgaattggctgcataaattagaatacaaatatccagcgctgaacgtgaccatgccaaacaatggaaaatttgacaaattgtacatttggggggttcaccacccgagcacggacagtgaccaaaccagcctatatgttcgagcatcagggagagtcacagtctctaccaaaagaagccaacaaactgtaatcccgaatatcgggtttagaccctgggtaaggggtctgtccagtagaataagcatctattggacaatagtaaaaccgggagacatacttttgattaatagcacagggaatctaattgctcctcggggttacttcaaaatacgaaatgggaaaagctcaataatgaggtcagatgcacccattggcaactgcagttctgaatgcatcactccaaatggaagcattcccaatgacaaaccttttcaaaatgtaaacaggatcacatatggggcctgccccagatatgttaagcaaaacactctgaagttggcaacagggatgcggaatgtaccagagaaacaaactagaggcatattcggcgcaatcgcaggtttcatagaaaatggttgggagggaatggtagacggttggtacggtttcaggcatcaaaattctgagggcacaggacaagcagcagatcttaaaagcactcaagcagcaatcgaccaaatcaacgggaaactgaataggttaatcgagaaaacgaacgagaaattccatcaaatcgaaaaagaattctcagaagtagaagggagaattcaggacctcgagaaatatgttgaagacactaaaatagatctctggtcttacaacgcggggcttcttgttgccctggagaaccaacatacaattgatctaactgactcagaaatgaacaaactgtttgaaagaacaaggaagcaactgagggaaaatgctgaggacatgggcaatggttgcttcaaaatataccacaaatgtgacaatgcctgcatagggtcaatcagaaatggaacttatgaccatgatgtatacagagacgaagcattaaacaaccggttccagatcaaaggtgtcgagctgaagtcaggatacaaagattggatcctatggatttcctttgccatatcatgctttttgctttgtgttgttttgctggggttcatcatgtgggcctgccaaaaaggcaacattaggtgcaacatttgcatttga

SEQ ID NO: 31434 - RNA, 1698 nt, synthetic construct; identical to SEQ ID NO: 31246
  misc_feature 1..1698: note = hemagglutinin__InfluenzaA__ABF47869
  source 1..1698: mol_type = other RNA

SEQ ID NO: 31435 - RNA, 1698 nt, synthetic construct
  misc_feature 1..1698: note = hemagglutinin__InfluenzaA__ABF47880
  source 1..1698: mol_type = other RNA
atgaaagtaaaactactggtcctgttatgtacatttacagctacatatgcagacacaatatgtatagggtaccatgccaacaactcaaccgacactgttgacacagtacttgagaagaatgtgacagtgacacactctgtcaacctacttgaggacagtcacaatggaaaactatgtctactaaaaggaatagccccactacaattgggtaattgcagcgttgccggatggatcttaggaaacccagaatgcgaattactgatttccaaggaatcatggtcctacattgtagaaacaccaaatcctgagaatggaacatgttacccagggtatttcgccgactatgaggaactgagggagcaattgagttcagtatcttcatttgagagattcgaaatattccccaaagaaagctcatggcccaaccacaccgtaaccggagtatcagcatcatgctcccataatgggaaaagcagtttttacagaaatttgctatggctgacggggaagaatggtttgtacccaaacctgagcaagtcctatgcaaacaacaaagagaaagaagtccttgtactatggggtgttcatcacccgcctaacataggggaccaaagggccctctatcatacagaaaatgcttatgtctctgtagtgtcttcacattatagcagaaggttcaccccagaaatagccaaaagacccaaagtaagagatcaggaaggaagaatcaactactactggactctgctggaacccggggatacaataatatttgaggcaaatggaaatctaatagcgccacggtatgctttcgcactgagtagaggctttggatcaggaatcatcacctcaaatgcaccaatggatgaatgtgatgcgaagtgtcaaacacctcagggagctataaacagcagtcttcctttccagaacgtacacccagtcacaataggagagtgtccaaagtatgtcaggagtgcaaaattaaggatggttacaggactaaggaacatcccatccattcaatccagaggtttgtttggagccattgccggtttcattgaaggggggtggactggaatggtagatgggtggtatggttatcatcatcagaatgagcaaggatctggctatgccgcagatcaaaaaagcacacaaaatgccattaacgggattacaaacaaggtgaattctgtaattgagaaaatgaacactcaattcacagctgtgggcaaagaattcaacaaattggaaagaaggatggaaaacttaaataaaaaagttgatgatgggtttctagacatttggacatataatgcagaattgttggttctactggaaaatgaaaggactttggatttccatgactccaatgtgaagaatctgtatgagaaagtaaaaagccaattaaagaataatgccaaagaaataggaaacgggtgttttgaattctatcacaagtgtaacaatgaatgcatggagagtgtgaaaaatggaacttatgactatccaaaatattccgaagaatcaaagttaaacagggagaaaattgatggagtgaaattggaatcaatgggagtctatcagattctggcgatctactcaactgtcgccagttccctggttcttttggtctccctgggggcaatcagcttctggatgtgttccaatgggtctttgcagtgtagaatatgcatctga

SEQ ID NO: 31436 - RNA, 1698 nt, synthetic construct
  misc_feature 1..1698: note = hemagglutinin__InfluenzaA__ABF47891
  source 1..1698: mol_type = other RNA
atgaaagtaaaactactggtcctgttatgtacatttacagctacatatgcagacacaatatgtatagggtaccatgccaacaactcaaccgacactgttgacacagtacttgagaagaatgtgacagtgacacactctgtcaacctacttgaggacagtcacaatggaaaactatgtctactaaaaggaatagccccactacaattgggtaattgcagcgttgccggatggatcttaggaaacccagaatgcgaattactgatttccaaggaatcatggtcctacattgtagaaacaccaaatcctgagaatggaacatgttacccagggtatttcgccgactatgaggaactgagggagcaattgagttcagtatcttcatttgagagattcgaaatattccccaaagaaagctcatggcccaaccacaccgtaaccggagtatcagcatcatgctcccataatgggaaaagcagtttttacagaaatttgctatggctgacgaggaagaatggtttgtacccaaacctgagcaagtcctatgcaaacaacaaagagaaagaagtccttgtactatggggtgttcatcacccgcctaacataggggaccaaagggccctctatcatacagaaaatgcttatgtctctgtagtgtcttcacattatagcagaagattcaccccagaaatagccaaaagacccaaagtaagagatcaggaaggaagaatcaactactactggactctgctggaacccggggatacaataatatttgaggcaaatggaaatctaatagcgccacggtatgctttcgcactgagtagaggctttggatcaggaatcatcacctcaaatgcaccaatggatgaatgtgatgcaaagtgtcaaacacctcagggagctataaacagcagtcttcctttccagaacgtacacccagtcacaataggagagtgtccaaagtatgtcaggagtgcaaaattaaggatggttacaggactaaggaacatcccatccattcaatccagaggtttgtttggagccattgccggtttcattgaaggggggtggactggaatggtagatgggtggtatggttatcatcatcagaatgagcaaggatctggctatgccgcagatcaaaaaagcacacaaaatgccattaacgggattacaaacaaggtgaattctgtaattgagaaaatgaacactcaattcacagctgtgggcaaagaattcaacaaattggaaagaaggatggaaaacttaaataaaaaagttgatgatgggtttctagacatttggacatataatgcagaattgttggttctactggaaaatgaaaggactttggatttccatgactccaatgtgaagaatctgtatgagaaagtaaaaagccaattaaagaataatgccaaagaaataggaaacgggtgttttgaattctatcacaagtgtaacaatgaatgcatggagagtgtgaaaaatggaacttatgactatccaaaatattccgaagaatcaaagttaaacagggagaaaattgatggagtgaaattggaatcaatgggagtctatcagattctggcgatctactcaactgtcgccagttccctggttcttttggtctccctgggggcaatcagcttctggatgtgttccaatgggtctttgcagtgtagaatatgcatctga

SEQ ID NO: 31437 - RNA, 1701 nt, synthetic construct
  misc_feature 1..1701: note = hemagglutinin__InfluenzaA__ABF47902
  source 1..1701: mol_type = other RNA
atgaagactatcattgctttgagctacattttatgtctggttttcgctcaaaaacttcccggaaatgacaacagcacggcaacgctgtgcctggggcaccatgcagtgccaaacggaacgctagtgaaaacaatcacgaatgaccaaattgaagtgactaatgctactgagctggttcagagttcctcaacaggtggaatatgcgacagtcctcaccaaatccttgatggagaaaactgcacactaatagatgctctattgggagaccctcattgtgatggcttccaaaataaggaatgggacctttttgttgaacgcagcaaagcctacagcaactgttacccttatgatgtgccggattatgcctcccttaggtcactagttgcctcatccggcacactggagtttaacaatgaaagcttcaattggactggagtcgctcagaatggaacaagctctgcttgcaaaaggagatctaataaaagtttctttagtagattgaattggttgcaccaattaaaatacaaatacccagcactgaacgtgactatgccaaacaatgaaaaatttgacaaattgtacatttggggggttcaccacccgagtacggacagtgaccaaatcagcctatatgctcaagcaccagggagagtcacagtctctaccaaaagaagccaacaaactgtaatcccgaatatcggatctagaccctgggtaaggggtgtctccagcagaataagcatctattggacaatagtaaaatcgggagacatacttttgattaactgcacagggaatctaattgctcctcggggttacttcaaaatacgaagtgggaaaagctcaataatgaggtcagatgcatccattggcaaatgcaattctgaatgcatcactccaaatggaagcattcccaatgacaaaccatttcaaaatgtaaacaggatcacatatggggcctgtcccagatatgttaagcaaaacactctgaaattggcaacagggatgcggaatgtaccagagaaacaaactagaggcatattcggcgcaatcgcgggtttcatagaaaatggttgggagggaatggtggacggttggtacggtttcaggcatcaaaattctgagggcacaggacaagcagcagatctcaaaagcactcaagcagcaatcaaccaaatcaacgggaaactgaataggttaatcgagaaaacgaacgagaaattccatcaaattgaaaaagaattctcagaagtggaagggagaattcaggacctcgagaaatatgttgaggacactaaaatagatctctggtcgtacaacgcggagcttcttgttgccctggagaaccagcatacaattgatctaactgactcagaaatgaacaaactgtttgaaagaacaaagaagcaactgagggaaaatgctgaggatatgggcaatggttgtttcaaaatataccacaaatgtgacaatgcctgcatagggtcaatcagaaatgggacttatgaccatgatgtatacagagacgaagcattaaacaaccggttccagatcaaaggtgttgagctgaagtcaggatacaaagattggatcctatggatttcctttgccatatcatgttttttgctttgtgttgtcttgctggggttcatcatgtgggcctgccaaaaaggcaacattaggtgcaacatttgcatttga

SEQ ID NO: 31438 - RNA, 1698 nt, synthetic construct
  misc_feature 1..1698: note = hemagglutinin__InfluenzaA__ABF47955
  source 1..1698: mol_type = other RNA
atgaaggcaaaactactggtcctgttatatgcatttgtagctacagatgcagacacaatatgtataggctaccatgcgaacaactcaaccgacactgttgacacaatattcgagaagaatgtggcagtgacacattctgttaacctgctcgaagacagacacaacgggaaactatgtaaattaaaaggaatagccccactacaattggggaaatgtaacatcaccggatggctcttgggaaatccagaatgcgactcactgcttccagcgagatcatggtcctacattgtagaaacaccaaactctgagaatggagcatgttatccaggagatttcatcgactatgaggaactgagggagcaattgagctcagtatcatcattagaaagattcgaaatatttcccaaggaaagttcatggcccaaccacacattcaacggagtaacagtatcatgctcccataggggaaaaagcagtttttacagaaatttgctatggctgacgaagaagggggattcatacccaaagctgaccaattcctatgtgaacaataaagggaaagaagtccttgtactatggggtgttcatcacccgtctagcagtgatgagcaacagagtctctatagtaatggaaatgcttatgtctctgtagcgtcttcaaattataacaggagattcaccccggaaatagctgcaaggcccaaagtaaaagatcaacatgggaggatgaactattactggaccttgctagaacccggagacacaataatatttgaggcaactggtaatctaatagcaccatggtatgctttcgcactgagtagagggtttgagtccggcatcatcacctcaaacgcgtcaatgcatgagtgtaacacgaagtgtcaaacaccccagggatctataaacagcaatctccctttccagaatatacacccagtcacaataggagagtgcccaaaatatgtcaggagtaccaaattgaggatggttacaggactaagaaacatcccatccattcaatacagaggtctatttggagccattgctggttttattgaggggggatggactggaatgatagatggatggtatggttatcatcatcagaatgaacagggatcaggctatgcagcggatcaaaaaagcacacagaatgccattaacaggattacaaacaaggtgaactctgttatcgagaaaatgaacactcaattcacagctgtgggtaaagaattcaacaacttagaaaaaaggatggaaaatttaaataaaaaagttgatgatgggtttctggacatttggacatataatgcagaattgttagttctactggaaaatgaaagaactttggatttccatgacttaaatgtgaagaatctgtacgagaaagtaaaaagccaattaaagaataatgccaaagaaatcggaaatgggtgttttgagttctaccacaagtgtgacaatgaatgcatggaaagtgtaagaaatgggacttatgattatccaaaatattcagaagaatcaaagttgaacagggaaaagatagatggagtgaaattggaatcaatgggggtgtatcagattctggcgatctactcaactgtcgccagttcactggtgcttttggtctccctgggggcaatcagtttctggatgtgttctaatgggtctttgcagtgcagaatatgcatctga

SEQ ID NO: 31439 - RNA, 1698 nt, synthetic construct
  misc_feature 1..1698: note = hemagglutinin__InfluenzaA__ABF60576
  source 1..1698: mol_type = other RNA
atgaagacaaccattattttgatactactgacccatgctgtggacagtcaaaacccaatcagtggcaacaacacagccacactatgtctgggacaccatgcagtagcaaatggaacattggtaaaaacaataactgatgaccaaattgaggtgacaaatgctactgaattagttcagagcacttcaatagggaaaatatgcaacaacccatatagggttctagatggaagaaactgcacattaatagatgcaatgctaggagatccccactgtgatgtttttcagtatgagaattgggacctcttcatagaaagaagcagcgctttcagcaattgctacccatatgacatccctgactatgcatcgctccggtctattgtggcatcttcaggaacattagaattcacagcagagggattcacatggacaggtgtcactcaaaacggaggaagtggcgcctgcagaaggggatcagccgatagtttctttagccgactgaattggctaacaaaatctggaaattcttaccccacattgaatgtgacaatgcctaacaatgacaatttcgataaactatacatctgggggatccatcacccgagcacaaacaatgagcagacaaaattgtatgtccaagaattagggcgagtaacagtctcaacaaaaagaagtcaacaaacaataatccccaacatcggatctagaccgggggtcaggggtcaagcaggcaggataagcatatattggaccattgtgaaacctggagatatcctaatgataaacagtaatggcaacttagttgcaccgcggggatatttcaaaatgcgaacaggaaaaagctctataatgagatcagatgcacccatagacacttgttggtccgagtgtattacaccaaatggaagcatccccaacgacaaaccatttcaaaatgtgaacaaagttacatatggaaaatgccccaagtatatcaagcagaatactttgaagctggccactgggatgaggaatgtaccagaaaagcaaatcagaggaatctttggagcaatagcgggattcatagaaaatggctgggagggaatggttgatgggtggtatggattccgatatcagaattcggaaggaacaggacaagctgcagatctaaagagcactcaagcagccatcgaccagatcaatggaaaattgaacagagtgattgagaggaccaatgagaaattccatcaaatagagaaggaattctcagaagtagaagggagaatccaggacttggagaagtatgtagaagacaccaaaatagacctatggtcctacaatgcagagttactggtggctctagaaaatcaacatacgattgacttaacagatgcagagatgaataaattattcgagaagactaggcgccagttaagagaaaacgcggaagacatggggggtggatgtttcaagatttatcacaaatgtgataatgcatgcattggatcaataagaaatgggacatatgaccattacatatacagagatgaagcattaaacaaccgatttcaaattaaaggtgttgagttgaaatcaggctacaaagattggatactgtggatttcattcgccatatcatgcttcttaatttgcgttgttctattgggtttcatcatgtgggcttgcgaaaaaggcaacatcagatgcaacatttgcatttga

SEQ ID NO: 31440 - RNA, 1701 nt, synthetic construct
  misc_feature 1..1701: note = hemagglutinin__InfluenzaA__ABF60577
  source 1..1701: mol_type = other RNA
atgaagaccatcattgttctaagctactttttctgtctggctctcagccaagactactcagaaagcaacaacagcactgcaacactgtgcttggggcatcatgcggtgccaaatgggacaatagtgaagacaattacggatgaccaaattgaggtgaccaatgccactgagctggtccagagctcctcaacagggaaaatatgcaacaaccctcatcgaatccttgatggaagggactgtacactgatagatgccctactgggagaccctcactgtgatgtattccaagatgaaacctgggacctttatgtggaacgtagcagcgccttcagcaactgctacccatatgatgtaccagactatgcatcactgaggtctctagttgcttcctcaggaaccctagagttcatcacagaaggattcacatggacaggagtcactcaaaatggaggaagcaatgcctgcaaaagagggcctgctagtggtttcttcagcagactgaattggctgactaaatctggaagtacttacccagtgttgaatgtgaccatgccaaatgatgacaactttgacaaattgtatgtctggggagttcaccacccgagcacaaaccaagagcaaaccgacctatacgttcaggcatcaggaagggtcacagtttcaactagaaggagtcaacaaaccataatcccgaatattggatccaggccttgggtcaggggccaatcaggaaggataagcatctactggacaatagtgaagccgggggatgtactagtaattaacagtaatggtaacctgatcgctcctagagggtacttcaaaatacgcactgggaaaagctcaataatgagatcagatgcacctattgacacatgcatctctgaatgtatcactcctaatggaagcatccccaatgacaagccatttcagaatgtaaacaagatcacttacggagcatgtcctaagtatgtcaaacagagcactttgaaactggcaacagggatgaggaacgtgcctgagaaaaagaccaggggtctgttcgtggcaatagcaggatttatagaaaatggatgggaaggaatgatagactgctggtacggtttcagacaccagaactctgagggtacaggacaagctgcagatctaaaaagcacacaggcagccattgaccagattaatgggaagttgaaccgagtaatcgagaagacaaatgagaagtttcaccagattgaaaaggaattctctgaagtagaaggaagaatccaggaccttgagaactatgttgaggacactaagatagatctatggtcttacaatgcagagcttctggtggccttggaaaatcagcatacaattgatctgactgattctgaaatgaacaaactgttcgaaagaacaaggcggcaactgagggagaatgctgaagacatgggcagtggctgcttcaaaatataccacaaatgtgacaacgcatgtatagagtcaatcaggaacgggacctatgatcatgacatatacagagatgaagcattaaacaaccgatttcaaatcaagggtgtagagctaaaatctgggtacaaagattggatcttatggatttcctttgccacatcatgctttttgctttgtgttgttctgggggggttcattatgtgggcctgccaaagaggcaacattaggtgcaacatttgcatttga

SEQ ID NO: 31441 - RNA, 1701 nt, synthetic construct
  misc_feature 1..1701: note = hemagglutinin__InfluenzaA__ABF60578
  source 1..1701: mol_type = other RNA
atgaagaccattattgttctaagctgttttttctgtctggctttcagccaagatctttcagagaacaacaacaacactgcaacactgtgcctggggcatcatgcagtaccaaatgggacaatagtgaaaacaataacggatgatcaaattgaagtgactaatgctactgaactggttcagagttcctcaacagggaaaatatgcaacaatcctcacagaattctcgatggaagagactgcacactaatagatgccctactaggggaccctcattgtgatgtattccaagatgaaacatgggacctttatgtagagcgcagcaaatccttcagcaactgctacccatatgatgtgccagactatgcatctctcagatctctagtggcctcatcaggaaccctagagttcatcaccgaagccttcacgtggacaggagtcacacaaaatggagggagtggtgcttgcaaaagaggacccggtaatggtttcttcagtagactgaattggctgactaaatctggtagcgcttatccagtgctgaacgtgactatgccaaacaacgataactttgacaagttgtacgtgtggggagttcatcacccaagcacaaaccaagagcaaaccaatctgtacgttcaggcatcgggaagggtcacagtttcaactagaagaagccagcaaaccataattcctaacatcggatccaggccttgggtcagaggccaatctaggagaataagtatctactggacaatagttaagccgggagatatactggtgatcaacagcaatggaaatctaattgctcctcgaggttactttaagatgcgcactgggaaaagctcaataatgagatcagatgcacctattgacacatgtatctctgagtgcatcactccaaacgggagcatccctaatgacaagccctttcagaatgtaaacaaaattacttatggagcatgtcccaaatatatcaaacaaagcaccctaaagttggcaacagggatgcggaatgtacctgagaaacaaaccaggggtctgtttggtgcaatagcagggttcatagaaaatggatgggaaggaatgatagatggttggtatggtttcaggcatcagaactcggaaggcacaggacaagcagcagaccttaaaagcactcaagccgccattgatcagatcaatgggaaattgaaccgagtaatcgagaaaacaaatgaaaagtttcatcagattgaaaaggaattttctgaagtggaagggagaattcaggaccttgagaaatatgtcgaagacactaaaatagatctatggtcttacaatgcggacgttcttgtggccctggaaaaccagcatacaattgatctgactgattcagaaatgaacaaactatttgaaaagacaaggagacagctgagggagaatgctgaagacatgggcaatggctgcttcaagatataccacaaatgtgacaacgcttgtatagagtcaatcaggaatgggacttatgatcatgacatatacagagatgaagcactaaacaatcgatttcagatcaaagggtgtggagtgaaatctggatacaaagattggatcttatggatttcctttgccatatcatgctttttgctgtgtgttgttctactgggattcatcatgtgggcctgccagagaggcaacattaggtgcaacatttgcatttga

SEQ ID NO: 31442 - RNA, 1701 nt, synthetic construct
  misc_feature 1..1701: note = hemagglutinin__InfluenzaA__ABF60579
  source 1..1701: mol_type = other RNA
atgaagactctcattgctttgagctacattttctgtctggttcttggccaagaccttccaggaaatggcaacagcacagcaacactgtgcctgggacatcatgcggtgccaaacggaacgctagtgaaaacaatcacggatgatcagatcgaagtgactaatgctactgagctggtccagaatttctcaatggataaaatatgcaacaatcctcatcgaattcttgatggagcaaactgcacactgatagatgctctattgggggaccctcattgtgatgactttcaaaatgagaaatgggaccttttcgttgaacgcagcaaggctttcagcaactgttacccttatgatgtgccagattatacctcccttaggtcactaattgcctcgtcaggcactttggagtttatcaatgaagatttcaattggactggggtcactcagaatggaggaagcaatgcttgcaagagggggcctgatagcagttttttcagtaggctgaactggttgtacaaatcaggtaacacatatccgatgctaaacgtgactatgccaaacagtgataattttgacaaattatacatttggggggttcatcacccgagcacagccagggaacaaaccaacctatatgttcaagcatcagggaaagtaacagtttccaccaagagaagccagcagaccataatcccgaatatcgggtctagaccctgggtaaggggtctgtctagtagaataagcatctattggacaatagttaaaccgggggacatcctggtaattaatagtaatgggaacctaattgctcctcggggttacttcaaaatgcacactgggagaagctcaataatgaggtcagatgcacctattgacacctgcagttctgaatgcataactccaaatggaagcattcccaatgacaagccctttcaaaacgtaaacaagatcacatatggggcatgtcctaagtatgttaagcaaaacactctgaagttggcaacagggatgcggaatataccagaaaaacaaactagaggcatattcggtgcaatagcaggtttcatagagaatggttgggaagggatggtagacggctggtacggtttcagacatcaaaattctgagggcacaggacaagcagcagatcttaaaagcacccaagcagctatcgaccaaatcaatgggaaactgaatagggtaatcgagaaaacgaacgagaaattccatcaaatcgaaaaggaattctcaggagtagaagggagaattcaggacctcgagaaatacgttgaagacactaaaatagatctctggtcttacaatgcggaacttcttgtcgctctggagaaccaacatacaatcgatttgactgactcggaaatgaacaaactgtttgaaaaaacaaggaggcaactgagggaaaatgctgaagacatgggaaatggttgcttcaaaatataccacaaatgtgacaatgcttgcatagagtcaatcagaaatggaacttatgaccataacgaatacagagacgaagcattaaacaaccggtttcagatcaaaggtgttgagctgaagtcaggatacaaagactggatcctgtggatttcctttgccatatcatgctttttgctttgtgttgttctgctgggattcatcatgtgggcctgccagaaaggcaacattaggtgcaacatttgcatctga

SEQ ID NO: 31443 - RNA, 1701 nt, synthetic construct
  misc_feature 1..1701: note = hemagglutinin__InfluenzaA__ABF60580
  source 1..1701: mol_type = other RNA
atgaagactatcattgctttgagctacattttctgtctggctttcgcccaagaccttccaggaaatgacaacagcacagcaactctttgcctgggacatcatgcggtgccaaacggaacgctagtgaaaacaatcacgaatgatcagattgaagtgactaatgctactgaactggttcagagttcctcaacgggtaaaatatgcgacaatcctcatcgaatccttgatggaataaactgcacactgatagatgctctattgggggaccctcattgtgatggctttcaaaatgagaaatgggaccttttcgttgaacgcagcaaagctttcagcaactgttacccttatgatgtgccagattatgcctcccttaggtcactagttgcctcgtcaggcactctggagtttatcaatgaaggcttcaattggactggggtcactcagaatgggggaagcagtgcttgcaaaaggggacctgataacggttttttcagtagactgaactggttgtacaaatcaggaagcacatatccagtgcagaacgtgaccatgccaaacaatgacaactctgacaaactatacatttggggggttcaccacccgagcacggacaaagaacaaaccgacctatatgttcaagcatcagggaaagtcacagtctccaccaagagaatccagcaaactgtaatcccgaatgtcgggtctagaccctgggtaaggggtctatctagtagagtaagcatctattggacaatagttaaaccgggagacgtactggtaattaatagtaatggaaacctaattgctcctcggggttactacaaaatgcgcactgggaaaagctcaataatgaggtcagatgcacctattggcacttgcagctctgaatgcatcactccaaatggaagcattcccaatgacaagccctttcaaaacgtaaacaagatcacatatggggcatgtcccaagtatgttaagcaaaacactctgaagttggcaacagggatgcggaatgtaccagagaaacaaactagaggcatattcggcgcaatagcaggtttcatagaaaatggttgggagggaatgatagacggttggtacggtttcaggcatcaaaattctgagggcacaggacaagcagcagatcttaaaagcactcaagcagccatcgaccaaatcaatgggaaactgaacagggtaatcgagaagacgaacgagaaattccatcaaatcgaaaaggaattctcagaagtagaagggagaattcaggacctcgagaaatacgttgaagacactaaaatagatctctggtcttacaatgcggaggttcttgtcgctctggagaaccaacatacaattgatctgactgactcggaaatgaacaaactgtttgaaaaaacaaggaggcaactgagggaaaatgctgaggacatgggcaatggttgcttcaaaatataccacaaatgtgacaatgcttgcatagggtcaatcagaaatgggacttatgaccatgatgtatacagagacgaagcattaaacaaccggtttcagatcaaaggtgttgaactgaagtcaggatacaaagactggatcctgtggatttcctttgccatatcatgctttttgctttgtgttgttttgctggggttcatcatgtgggcctgccagaaaggcaacattaggtgcaacatttgcatttga

SEQ ID NO: 31444 - RNA, 1701 nt, synthetic construct
  misc_feature 1..1701: note = hemagglutinin__InfluenzaA__ABF60581
  source 1..1701: mol_type = other RNA
atgaagaccatcattgttctaagctactttttctgtctggctctcagccaagactactcagaaagcaacaacagcactgcaacactgtgcttggggcatcatgcggtaccaaatgggacaatagtgaagacaattactgatgaccaaattgaagtgaccaatgccactgagctggtccagagctcctcaacagggaaaatatgcaacaaccctcatagaatccttgatggaagggactgtacactgatagatgccctactgggggacccccactgtgatgtattccaagatgaaacctgggacctttatgtggaacgtagcagcgccttcagcaactgctacccatatgatgtaccagactatgactcactcaggtctctagttgcttcctcaggaaccctagagttcatcacagaaggattcacatggacaggagtcactcaaaatggaggaagcaatgcttgcaaaagagggcctgctagtggtttcttcagcagactgaattggctgactaaatctggaagtacttacccagtgttgaatgtgactatgccaaataatgacaactttgacaaactgtatgtctggggagttcaccacccgagcacaaaccaagagcaaaccaacctatacgttcaggcatcagggagggtcacagtttcaactagaaggagtcaacaaaccataatcccgaatattggatccaggccttgggtcaggggccaatcaggacggataagcatctattggacaatagtgaagccgggagatgtactagtaattaacagtaatggtaacctgatcgctcctcgaggatacttcaagatgcgcactggaaaaagctcaataatgagatcagatgcgcctattgacacatgcatctctgaatgtattactcctaatggaagcatccccaatgacatgccctttcagaatgtaaacaagatcacttacggagcatgtcctaagtatgtcaaacagggcactttgaaattggcaacaggaatgaggaacgtgcctgagaaacagactaggggtctgttcggtgcaatagcaggatttatagaaaatggatgggaaggaatgatagacggttggtatggtttcagacaccagaactctgagggtacaggacaagcagcagacctaaaaagcactcaggcagccatcgaccagattaatgggaagttgaaccgagtaatcgagaagacaaatgagaagtttcaccagattgaaaaggaattctctgaagtagaaggaagaatccaggaccttgagaaatatgttgaggacactaagatagatctatggtctgacaatgcagagcttcttgtcgccttggaaaaccagcatacaattgatctgactgattctgaaatgaacaaactattcgaaaaaacaaggaggcaactgagggaaaatgctgaagtgatgggcaacggttgcttcaaaatataccacaaatgtgacaacgcatgtatagagtcaatcaggaacgggacttatgatcatgacatatacagagatgaagcattaaacaaccgatttcaaatcaagggtgtagagctaaaatctgggtacaaagactggatcttatggatttcctttgccatatcatgctttttgctttgtgttgttctactggggttcattatgtgggcctgccaaagaggcaacattaggtgcaacatttgcatttga

SEQ ID NO: 31445 - RNA, 1701 nt, synthetic construct; identical to SEQ ID NO: 31244
  misc_feature 1..1701: note = hemagglutinin__InfluenzaA__ABF82651
  source 1..1701: mol_type = other RNA

SEQ ID NO: 31446 - RNA, 1698 nt, synthetic construct; identical to SEQ ID NO: 31304
  misc_feature 1..1698: note = hemagglutinin__InfluenzaA__ABF82662
  source 1..1698: mol_type = other RNA

SEQ ID NO: 31447 - RNA, 1698 nt, synthetic construct
  misc_feature 1..1698: note = hemagglutinin__InfluenzaA__ABF82673
  source 1..1698: mol_type = other RNA
atgaaagcaaaactactggtcctgttatgtacatttacagctacatacgcagacacaatatgtataggctaccatgccaacaactcaaccgacactgttgacacagtacttgagaagaatgtgacagtgacacactctgtcaacctacttgaggacagtcacaatggaaaactatgtctactaaaaggaatagccccactacaattgggtaattgcagcgttgccggatggatcttaggaaacccagaatgcgaattactgatttccaagggatcatggtcctacattgtagaaacaccaaatcccgagaatggaacatgttacccagggtatttcgcagactatgaggaactgagggagcaattgagttcagtatcttcatttgagagattcgaaatattccccaaaggaagctcatggcccaaccacaccgtgaccggagtatcagcatcatgctcccataatgggaaaagcagtttttacagaaatttgctatggctgacggggaagaatggtttgtacccaaacctgagcatgtcctatgtaaacaacaaagagaaagaagtccttgtgctatggggtgttcatcacccacctaacataggggaccaaagggccctctaccatacagaaaatgcttatgtctctgtagtgtcttcacattatagcagaagattcaccccagaaatagccaaaagacccaaagtaagagatcaggaaggaagaatcaactactactggactctgctggaacccggggacacaataatatttgaggcaaatggaaatctaatagcgccatggtatgctttcgcactgagtagaggctttggatcaggaatcatcacctcaaatgcaccaatgggtgaatgtgatgcgaagtgtcaaacacctcagggagctataaacagtagtcttcctttccagaatgtacacccagttacaataggagagtgtccaaagtatgtcaggagtgcaaaattaaggatggttacaggactaaggaacatcccatccattcaatccagaggtttgtttggagccattgccggtttcattgaaggggggtggactggaatggtagatgggtggtatggttatcatcatcagaatgagcaaggatctggctatgctgcagatcaaaaaagcacacaaaatgccattaacgggattacaaacaaggtgaattctgtaattgagaaaatgaacactcaattcacagctgtgggcaaagaattcaacaaattagaaagaaggatggaaaacttaaataaaaaagttgatgatgggtttctagacatttggacatataatgcagaattgttggttctactggaaaatgaaaggactttggatttccatgactccaatgtgaagaatctgtatgagaaagtaaaaagccaattaaagaataatgccaaagaaataggaaacgggtgttttgaattctatcacaagtgtaacaatgaatgcatggaaagtgtgaaaaatggaacttatgactatccaaaatattccgaagaatcaaagttaaacagggagaaaattgatggagtaaaattggaatcaatgggagtctatcagattctggcgatctactcaactgtcgccagttccctggttcttttggtctccctgggggcaatcagcttctggatgtgttccaatgggtctttgcagtgtagaatatgcatctga

SEQ ID NO: 31448 - RNA, 1698 nt, synthetic construct
  misc_feature 1..1698: note = hemagglutinin__InfluenzaA__ABF82684
  source 1..1698: mol_type = other RNA
atgaaagcaaaactactggtcctgttatgtacatttacagctacatacgcagacacaatatgtataggctaccatgccaacaactcaaccgacactgttgacacagtacttgagaagaatgtgacagtgacacactctgtcaacctacttgaggacagtcacaatggaaaactatgtctactaaaaggaatagccccactacaattgggtaattgcagcgttgccggatggatcttaggaaacccagaatgcgaattactgatttccaaggaatcatggtcctacattgtagaaacaccaaatcccgagaatggaacatgttacccagggtatttcgccgactatgaggaactgagggagcaattgagttcagtatcttcatttgagagattcgaaatattccctaaaggaagctcatggcccaaccacaccgtgaccggagtatcagcatcatgctcccataatgggaaaagcagtttttacagaaatttgctatggctgacggggaagaatggtttgtacccaaacctgagcatgtcctatgtaaacaacaaagggaaagaagtccttgtgctatggggtgttcatcacccacctaacataggggaccaaagggccctctaccatacagaaaatgcttatgtctctgtagtgtcttcacattatagtagaagattcaccccagaaatagccaaaagacccaaagtaagagatcaggaaggaagaatcaactactactggactctgctggaacccggggacacaataatatttgaggcaaatggaaatctaatagcgccatggtatgctttcgcactgagtagaggctttggatcaggaatcatcacctcaaatgcaccaatgggtgaatgtgatgcgaagtgtcaaacacctcagggagctataaacagtagtcttcctttccagaatgtacacccagttacaataggagagtgtccaaagtatgtcaggagtgcaaaattaaggatggttacaggactaaggaacatcccatccattcaatccagaggtttgtttggagccattgccggtttcattgaaggggggtggactggaatggtagatgggtggtatggttatcatcatcagaatgagcaaggatctggctatgctgcagatcaaaaaagcacacaaaatgccattaacgggattacaaacaaggtgaattctgtaattgagaaaatgaacactcaattcacagctgtgggcaaagaattcaacaaattagaaagaaggatggaaaacttaaataaaaaagttgatgatgggtttctagacatttggacatataatgcagaattgttggttctactggaaaatgaaaggactttggatttccatgactccaatgtgaagaatctgtatgagaaagtaaaaagccaattaaagaataatgccaaagaaataggaaacgggtgttttgaattctatcacaagtgtaacaatgaatgcatggaaagtgtgaaaaatggaacttatgactatccaaaatattccgaagaatcaaagttaaacagggagaaaattgatggagtaaaattggaatcaatgggagtctatcagattctggcgatctactcaactgtcgccagttccctggttcttttggtctccctgggggcaatcagcttctggatgtgttccaatgggtctttgcagtgtagaatatgcatctga

SEQ ID NO: 31449 - RNA, 1701 nt, synthetic construct; identical to SEQ ID NO: 31312
  misc_feature 1..1701: note = hemagglutinin__InfluenzaA__ABF82695
  source 1..1701: mol_type = other RNA

SEQ ID NO: 31450 - RNA, 1701 nt, synthetic construct; identical to SEQ ID NO: 31287
  misc_feature 1..1701: note = hemagglutinin__InfluenzaA__ABF82706
  source 1..1701: mol_type = other RNA

SEQ ID NO: 31451 - RNA, 1698 nt, synthetic construct; identical to SEQ ID NO: 31359
  misc_feature 1..1698: note = hemagglutinin__InfluenzaA__ABF82819
  source 1..1698: mol_type = other RNA

SEQ ID NO: 31452 - RNA, 1698 nt, synthetic construct; identical to SEQ ID NO: 31304
  misc_feature 1..1698: note = hemagglutinin__InfluenzaA__ABF82830
  source 1..1698: mol_type = other RNA

SEQ ID NO: 31453 - RNA, 1698 nt, synthetic construct; identical to SEQ ID NO: 31304
  misc_feature 1..1698: note = hemagglutinin__InfluenzaA__ABF82841
  source 1..1698: mol_type = other RNA

SEQ ID NO: 31454 - RNA, 1698 nt, synthetic construct; identical to SEQ ID NO: 31304
  misc_feature 1..1698: note = hemagglutinin__InfluenzaA__ABF82852
  source 1..1698: mol_type = other RNA

SEQ ID NO: 31455 - RNA, 1698 nt, synthetic construct
  misc_feature 1..1698: note = hemagglutinin__InfluenzaA__ABF82863
  source 1..1698: mol_type = other RNA
atgaaagcaaaactactggtcctgttatgtacatttacagctacatacgcagacacaatatgtataggctaccatgccaacaactcaaccgacactgttgacacagtacttgagaagaatgtgacagtgacacactctgtcaacctacttgaggacagtcacaatggaaaactatgtctactaaaaggaatagccccactacaattgggtaattgcagcgttgccggatggatcttaggaaacccagaatgcgaattactgatttccaaggaatcatggtcctacattgtagaaacaccaaatcccgagaatggaacatgttacccagggtatttcgccgactatgaggaactgagggagcaattgagttcagtatcttcatttgagagattcgaaatattccccaaaggaagctcatggcccaaccacaccgtgaccggagtatcagcatcatgctcccataatgggaaaagcagtttttacagaaatttgctatggctgacggggaagaatggtttgtacccaaacctgagcatgttctatgtaaacaacaaagagaaagaagtccttgtgctatggggtgttcatcacccacctaacataggggaccaaagggccctctaccatacagaaaatgcttatgtctctgtagtgtcttcacattatagcagaagattcaccccagaaatagccaaaagacccaaagtaagagatcaggaaggaagaatcaactactactggactctgctggaacccggggacacaataatatttgaggcaaatggaaatctaatagcgccatggtatgctttcgcactgagtagaggctttggatcaggaatcatcacctcaaatgcaccaatgggtgaatgtgatgcgaagtgtcaaacacctcagggagctataaacagtagtcttcctttccagaatgtacacccagttacaataggagagtgtccaaagtatgtcaggagtgcaaaattaaggatggttacaggactaaggaacatcccatccattcaatccagaggtttgtttggagccattgccggtttcattgaaggggggtggactggaatggtagatgggtggtatggttatcatcatcagaatgagcaaggatctggctatgctgcagatcaaaaaagcacacaaaatgccattaacgggattacaaacaaggtgaattctgtaattgagaaaatgaacactcaattcacagctgtgggcaaagaattcaacaaattagaaagaaggatggaaaacttaaataaaaaagttgatgatgggtttctagacatttggacatataatgcagaattgttggttctactggaaaatgaaaggactttggatttccatgactccaatgtgaagaatctgtatgagaaagtaaaaagccaattaaagaataatgccaaagaaataggaaacgggtgttttgaattctatcacaagtgtaacaatgaatgcatggaaagtgtgaaaaatggaacttatgactatccaaaatattccgaagaatcaaagttaaacagggagaaaattgatggagtaaaattggaatcaatgggagtctatcagattctggcgatctactcaactgtcgccagttccctggttcttttggtctccctgggggcaatcagcttctggatgtgttccaatgggtctttgcagtgtagaatatgcatctga

SEQ ID NO: 31456 - RNA, 1698 nt, synthetic construct
  misc_feature 1..1698: note = hemagglutinin__InfluenzaA__ABF82874
  source 1..1698: mol_type = other RNA
atgaaagcaaaactactggtcctgttatgtacatttacagctacatacgcagacacaatatgtataggctaccatgccaacaactcaaccgacactgttgacacagtacttgagaagaatgtgacagtgacacactctgtcaacctacttgaggacagtcacaatggaaaactatgtctactaaaaggaatagccccactacaattgggtaattgcagcgttgccggatggatcttaggaaacccagaatgcgaattactgatttccaaggaatcatggtcctacattgtagaaacaccaaatcccgagaatggaacatgttacccagggtatttcgccgactatgaggaactgagggagcaattgagttcagtatcttcatttgagagattcgaaatattccccaaaggaagctcatggcccaaccacaccgtgaccggagtatcagcatcatgctcccataatgggaaaagcagtttttacagaaatttgctatggctgacggggaagaatggtttgtacccaaacctgagcatgtcctatgtaaacaacaaagagaaagaagtccttgtgctatggggtgttcatcacccacctaacataggggaccaaagggccctctaccatacagaaaatgcttatgtctctgtagtgtcttcacattatagcagaagattcaccccagaaatagccaaaagacccaaagtaagagatcaggaaggaagaatcaactactactggactctgctggaacccggggacacaataatatttgaggcaaatggaaatctaatagcgccatggtatgctttcgcactgagtagaggctttggatcaggaatcatcacctcaaatgcaccaatgggtgaatgtgatgcgaagtgtcaaacacctcagggagctataaacagtagtcttcctttccagaatgtacacccagttacaataggagagtgtccaaagtatgtcaggagtgcaaaattaaggatggttacaggactaaggaacatcccatccattcaatccagaggtttgtttggagccattgccggtttcattgaaggggggtggactggaatggtagatgggtggtatggttatcatcatcagaatgagcaaggatctggctatgctgcagatcaaaaaagcacacaaaatgccattaacgggattacaaacaaggtgaattctgtaattgagaaaatgaacactcaattcacagctgtgggcaaagaattcaacaaattagaaagaaggatggaaaacttaattaaaaaagttgatgatgggtttctagacatttggacatataatgcagaattgttggttctactggaaaatgaaaggactttggatttccatgactccaatgtgaagaatctgtatgagaaagtaaaaagccaattaaagaataatgccaaagaaataggaaacgggtgttttgaattctatcacaagtgtaacaatgaatgcatggaaagtgtgaaaaatggaacttatgactatccaaaatattccgaagaatcaaagttaaacagggagaaaattgatggagtaaaattggaatcaatgggagtctatcagattctggcgatctactcaactgtcgccagttccctggttcttttggtctccctgggggcaatcagcttctggatgtgttccaatgggtctttgcagtgtagaatatgcatctga

SEQ ID NO: 31457 - RNA, 1698 nt, synthetic construct
  misc_feature 1..1698: note = hemagglutinin__InfluenzaA__ABF82885
  source 1..1698: mol_type = other RNA
atgaaagcaaaactactggtcctgttatgtacatttacagctacatacgcagacacaatatgtataggctaccatgccaacaactcaaccgacactgttgacacagtacttgagaagaatgtgacagtgacacactctgtcaacctacttgaggacagtcacaatggaaaactatgtctactaaaaggaatagccccactacaattgggtaattgcagcgttgccggatggatcttaggaaacccagaatgcgaattactgatttccaaggaatcatggtcctacattgtagaaacaccaaatcccgagaatggaacatgttacccagggtatttcgccgactatgaggaactgagggagcaattgagttcagtatcttcatttgagagattcgaaatattccccaaaggaagctcatggcccaaccacaccgtgaccggagtatcagcatcatgctcccataatgggaaaagcagtttttacaggaatttgctatggctgacggggaagaatggtttgtacccaaacctgagcatgtcctatgtaaacaacaaagagaaagaagtccttgtgctatggggtgttcatcacccacctaacataggggaccaaagggccctctaccatacagaaaatgcttatgtctctgtagtgtcttcacattatagcagaagattcaccccagaaatagccaaaagacccaaagtaagagatcaggaaggaagaatcaactactactggactctgctggaacccggggacacaataatatttgaggcaaatggaaatctaatagcgccatggtatgctttcgcactgagtagaggctttggatcaggaatcatcacctcaaatgcaccaatgggtgaatgtgatgcgaagtgtcaaacacctcagggagctataaacagtagtcttcctttccagaatgtacacccagttacaataggagagtgtccaaagtatgtcaggagtgcaaaattaaggatggttacaggactaaggaacatcccatccattcaatccagaggtttgtttggagccattgccggtttcattgaaggggggtggactggaatggtagatgggtggtatggttatcatcatcagaatgagcaaggatctggctatgctgcagatcaaaaaagcacacaaaatgccattaacgggattacaaacaaggtgaattctgtaattgagaaaatgaacactcaattcacagctgtgggcaaagaattcaacaaattagaaagaaggatggaaaacttaaataaaaaagttgatgatgggtttctagacatttggacatataatgcagaattgttggttctactggaaaatgaaaggactttggatttccatgactccaatgtgaagaatctgtatgagaaagtaaaaagccaattaaagaataatgccaaagaaataggaaacgggtgttttgaattctatcacaagtgtaacaatgaatgcatggaaagtgtgaaaaatggaacttatgactatccaaaatattccgaagaatcaaagttaaacagggagaaaattgatggagtaaaattggaatcaatgggagtctatcagattctggcgatctactcaactgtcgccagttccctggttcttttggtctccctgggggcaatcagcttctggatgtgttccaatgggtctttgcagtgtagaatatgcatctga

SEQ ID NO: 31458 - RNA, 1698 nt, synthetic construct
  misc_feature 1..1698: note = hemagglutinin__InfluenzaA__ABF82896
  source 1..1698: mol_type = other RNA
atgaaagcaaaactactggtcctgttatgtacatttacagctacatacgcagacacaatatgtataggctaccatgccaacaactcaaccgacactgttgacacagtacttgagaagaatgtgacagtgacacactctgtcaacctacttgaggacagtcacaatggaaaactatgtctactaaaaggaatagccccactacaattgggtaattgcagcgttgccggatggatcttaggaaacccagaatgcgaattactgatttccaaggaatcatggtcctacattgtagaaacaccaaatcccgagaatggaacatgttacccagggtatttcgccgactatgaggaactgagggagcaattgagttcagtatcttcatttgagagattcgaaatattccccaaaggaagctcatggcccaaccacaccgtgaccggagtatcagcatcatgctcccataatgggaaaagcagtttttacagaaatttgctatggctgacggggaagaatggtttgtacccaaacctgagcatgtcctatgtaaacaacaaagagaaagaagtccttgtgctatggggtgttcatcacccacctaacataggggaccaaagggccctctaccatacagaaaatgcttatgtctctgtagtgtcttcacattatagcagaagattcaccccagaaatagccaaaagacccaaagtaagagatcaggaaggaagaatcaactactactggactctgctggaacccggggacacaataatatttgaggcaaatggaaatctaatagcgccatggtatgctttcgcactgagtagaggctttggatcagggatcatcacctcaaatgcaccaatgggtgaatgtgatgcgaagtgtcaaacacctcagggagctataaacagtagtcttcctttccagaatgtacacccagttacaataggagagtgtccaaagtatgtcaggagtgcaaaattaaggatggttacaggactaaggaacatcccatccattcaatccagaggtttgtttggagccattgccggtttcattgaaggggggtggactggaatggtagatgggtggtatggttatcatcatcagaatgagcaaggatctggctatgctgcagatcaaaaaagcacacaaaatgccattaacgggattacaaacaaggtgaattctgtaattgagaaaatgaacactcaattcacagctgtgggcaaagaattcaacaaattagaaagaaggatggaaaacttaaataaaaaagttgatgatgggtttctagacatttggacatataatgcagaattgttggttctactggaaaatgaaaggactttggatttccatgactccaatgtgaagaatctgtatgagaaagtaaaaagccaattaaagaataatgccaaagaaataggaaacgggtgttttgaattctatcacaagtgtaacaatgaatgcatggaaagtgtgaaaaatggaacttatgactatccaaaatattccgaagaatcaaagttaaacagggagaaaattgatggagtaaaattggaatcaatgggagtctatcagattctggcgatctactcaactgtcgccagttccctggttcttttggtctccctgggggcaatcagcttctggatgtgttccaatgggtctttgcagtgtagaatatgcatctga

SEQ ID NO: 31459 - RNA, 1698 nt, synthetic construct
  misc_feature 1..1698: note = hemagglutinin__InfluenzaA__ABF82907
  source 1..1698: mol_type = other RNA
atgaaagcaaaactactggtcctgttatgtacatttacagctacatacgcagacacaatatgtataggctaccatgccaacaactcaaccgacactgttgacacagtacttgagaagaatgtgacagtgacacactctgtcaacctacttgaggacagtcacaatggaaaactatgtctactaaaaggaatagccccactacaattgggtaattgcagcgttgccggatggatcttaggaaacccagaatgcgaattactgatttccaaggaatcatggtcctacattgtagaaacaccaaatcccgagaatggaacatgttacccagggtatttcgccgactatgaggaactgagggagcaattgagttcagtatcttcatttgagagattcgaaatattccccaaaggaagctcatggcccaaccacaccgtgaccggagtatcagcatcatgctcccataatgggaaaagcagtttttacagaaatttgctatggctgacggggaagaatggtttgtacccaaacctgagcatgtcctatgtaaacaacaaagagaaagaagtccttgtgctatggggtgttcatcacccacctaacataggggaccaaagggccctctaccatacagaaaatgcttatgtctccgtagtgtcttcacattatagcagaagattcaccccagaaatagccaaaagacccaaagtaagagatcaggaaggaagaatcaactactactggactctgctggaacccggggacacaataatatttgaggcaaatggaaatctaatagcgccatggtatgctttcgcactgagtagaggctttggatcaggaatcatcacctcaaatgcaccaatgggtgaatgtgatgcgaagtgtcaaacacctcagggagctataaacagtagtcttcctttccagaatgtacacccagttacaataggagagtgtccaaagtatgtcaggagtgcaaaattaaggatggttacaggactaaggaacatcccatccattcaatccagaggtttgtttggagccattgccggtttcattgaaggggggtggactggaatggtagatgggtggtatggttatcatcatcagaatgagcaaggatctggctatgctgcagatcaaaaaagcacacaaaatgccattaacgggattacaaacaaggtgaattctgtaattgagaaaatgaacactcaattcacagctgtgggcaaagaattcaacaaattagaaagaaggatggaaaacttaaataaaaaagttgatgatgggtttctagacatttggacatataatgcagaattgttggttctactggaaaatgaaaggactttggatttccatgactccaatgtgaagaatctgtatgagaaagtaaaaagccaattaaagaataatgccaaagaaataggaaacgggtgttttgaattctatcacaagtgtaacaatgaatgcatggaaagtgtgaaaaatggaacttatgactatccaaaatattccgaagaatcaaagttaaacagggagaaaattgatggagtaaaattggaatcaatgggagtctatcagattctggcgatctactcaactgtcgccagttccctggttcttttggtctccctgggggcaatcagcttctggatgtgttccaatgggtctttgcagtgtagaatatgcatctga

SEQ ID NO: 31460 - RNA, 1698 nt, synthetic construct; identical to SEQ ID NO: 31348
  misc_feature 1..1698: note = hemagglutinin__InfluenzaA__ABF82929
  source 1..1698: mol_type = other RNA

SEQ ID NO: 31461 - RNA, 1698 nt, synthetic construct
  misc_feature 1..1698: note = hemagglutinin__InfluenzaA__ABF82940
  source 1..1698: mol_type = other RNA
atgaaagcaaaactactggtcctgttatgtacatttacagctacatacgcagacacaatatgtataggctaccatgccaacaactcaaccgacactgttgacacagtacttgagaagaatgtgacagtgacacactctgtcaacctacttgaggacagtcacaatggaaaactatgtctactaaaaggaatagccccactacaattgggtaattgcagcgttgccggatggatcttaggaaacccagaatgcgaattactgatttccaaggaatcatggtcctacattgtagaaacaccaaatcccgagaatggaacatgttacccagggtatttcgccgactatgaggaactgagggagcaattgagttcagtatcttcatttgagagattcgaaatattccccaaaggaagctcatggcccaaccacaccgtgaccggagtatcagcatcatgctcccataatgggaaaagcagtttttacagaaatttgctatggctgacggggaagaatggtttgtacccaaacctgagcatgtcctatgtaaacaacaaagagaaagaagtccttgtgctatggggtgttcatcacccacctaacataggggaccaaagggccctctaccatacagaaaatgcttatgtctctgtagtgtcttcacattatagcagaagattcaccccagaaatagccaaaagacccaaagtaagagatcaggaaggaagaatcaactactactggactctgctggaacccggggacacaataatatttgaggcaaatggaaatctaatagcgccatggtatgctttcgcactgagtagaggctttggatcaggaatcatcacctcaaatgcaccaatgggtgaatgtgatgcgaagtgtcaaacacctcagggagctataaacagtagtcttcctttccagaatgtacacccagttacaataggagagtgtccaaagtatgtcaggagtgcaaaattaaggatggttacaggactaaggaacatcccatccattcaatccagaggtttgtttggagccattgccggtttcattgaaggggggtggactggaatggtagatgggtggtatggttatcatcatcagaatgagcaaggatctggctatgctgcagatcaaaaaagcacacaaaatgccattaacgggattacaaacaaggtgaattctgtaattgagaaaatgaacactcaattcacagctgtgggcaaagaattcaacaaattagaaagaaggatggaaaacttaaataaaaaagttgatgatgggtttctagacatttggacatataatgcagaattgttggttctactggaaaatgaaaggactttggatttccatgactccaatgtgaagaacctgtatgagaaagtaaaaagccaattaaagaataatgccaaagaaataggaaacgggtgttttgaattctatcacaagtgtaacaatgaatgcatggaaagtgtgaaaaatggaacttatgactatccaaaatattccgaagaatcaaagttaaacagggagaaaattgatggagtaaaattggaatcaatgggagtctatcagattctggcgatctactcaactgtcgccagttccctggttcttttggtctccctgggggcaatcagcttctggatgtgttccaatgggtctttgcagtgtagaatatgcatctga

SEQ ID NO: 31462 - RNA, 1701 nt, synthetic construct
  misc_feature 1..1701: note = hemagglutinin__InfluenzaA__ABF83447
  source 1..1701: mol_type = other RNA
atgaagaccatcattgctttgagctacattttctgtctggctctcggccaagaccttccaggaaatgacaacaacacagcaacgctgtgcctgggacatcatgcggtgccaaacggaacactagtgaaaacaatcacagatgatcagattgaagtgactaatgctactgagctagttcagagctcctcaacggggaaaatatgcaacaatcctcatcgaatccttgatggaatagactgcacactgatagatgctctattgggggaccctcattgtgatgtttttcaaaatgagacatgggaccttttcgttgaacgcagcaaagctttcagcaactgttacccttatgatgtgccagattatgcctcccttaggtcactagttgcctcgtcaggcactctggagtttatcactgagggtttcacttggactggggtcactcagaatgggggaagcaatgcttgcaaaaggggacctggtagcggttttttcagtagactgaactggttgaccaaatcaggaagcacatatccagtgctgaacgtgactatgccaaacaatgacaattttgacaaactatacatttggggggttcaccacccgagcacgaaccaagaacaaaccagcctgtatgttcaagcatcagggggagtcacagtctctaccaggagaagccagcaaactataatcccgaatatcgggtccagaccctgggtaaggggtctgtctagtagaataagcatctattggacaatagttaagccgggagacgtactggtaattaatagtaatgggaacctaatcgctcctcggggttatttcaaaatgcgcactgggaaaagctcaataatgaggtcagatgcacctattgatacctgtatttctgaatgcatcactccaaatggaagcattcccaatgacaagccctttcaaaacgtaaacaagatcacatatggagcatgccccaagtatgttaagcaaaacaccctgaagttggcaacagggatgcggaatgtaccagagaaacaaactagaggcctattcggcgcaatagcaggtttcatagaaaatggttgggagggaatgatagacggttggtacggtttcaggcatcaaaattctgagggcacaggacaagcagcagatcttaaaagcactcaagcagccatcgaccaaatcaatgggaaattgaacagggtaatcgagaagacgaacgagaaattccatcaaatcgaaaaggaattctcagaagtagaagggagaattcaggacctcgagaaatacgttgaagacactaaaatagatctctggtcttacaatgcggagcttcttgtcgctctggagaatcaacatacaattgacctgactgactcggaaatgaacaagctgtttgaaaaaacaaggaggcaactgagggaaaatgctgaagacatgggcaatggttgcttcaaaatataccacaaatgtgacaacgcttgcatagagtcaatcagaaatgggacttatgaccatgatgtatacagagacgaagcattaaacaaccggtttcagatcaaaggtgttgaactgaagtctggatacaaagactggatcctgtggatttcctttgccatatcatgctttttgctttgtgttgttttgctggggttcatcatgtgggcctgccagagaggcaacattaggtgcaacatttgcatttga

SEQ ID NO: 31463 - RNA, 1644 nt, synthetic construct
  misc_feature 1..1644: note = hemagglutinin__InfluenzaA__ABG20468
  source 1..1644: mol_type = other RNA
atggagaaaatagtgcttcttcttgcaatagtcagtcttgttaaaagtgatcagatttgcattggttaccatgcaaacaactcgacagagcaggttgacacaataatggaaaagaacgtcactgttacacacgcccaagacatactggaaaagacacacaacgggaaactctgcgatctagatggagtgaagcctctaattttaagagattgtagtgtagctggggagaagatcaatccagccaatgacctctgttacccagggaatttcaacgactatgaagaactgaaacacctattgagcagaataaaccattttgagaaaattcagatcatccccaaaagttcttggtcagatcatgaagcctcatcaggggtgagctcagcatgtccataccagggaaggtcctccttttttagaaatgtggtatggcttatcaaaaagaacaatgcatacccaacaataaagagaagttacaataataccaaccaagaagatcttttggtactgtgggggattcaccatccaaatgatgcggcagagcagacaaggctctatcaaaacccaaccacctatatttccgttgggacatcaacactaaaccagagattggtaccaaaaatagctactagatccaaggtaaacgggcaaagtggaaggatggagttcttttggacaattttaaaaccgaatgatgcaataaactttgagagtaatggaaatttcattgctccagaaaatgcatacaaaattgtcaagaaaggggactcaacaattatgaaaagtgaattggaatatggtaactgcaacaccaagtgtgaaactccaataggggcgataaactctagtatgccattccacaacatccaccctctcaccatcggggaatgccccaaatatgtgaaatcaaacagattagtccttgcgactgggctcagaaatagccctcaaggagagagaagaagaaaaaagagaggactatttggagctatagcaggttttatagagggaggatggcagggaatggtagatggttggtatgggtaccaccatagcaacgagcaggggagtgggtacgctgcagacaaagaatccactcaaaaggcaatagatggagtcaccaataaggtcaactcgatcattgacaaaatgaacactcagtttgaggccgttggaagggaatttaataacttagaaaggagaatagaaaatttaaacaagaagatggaagacggattcctagatgtctggacttataatgctgaacttctggttctcatggaaaatgagagaactctagactttcatgactcaaatgtcaagaacctttacgacaaggtccgactacagcttagggataatgcaaaggagcttggtaacggttgtttcgagttctatcacagatgtgataatgaatgtatggaaagtgtaagaaacggaacgtatgactacccgcagtattcagaagaagcaagattaaaaagagaggaaataagtggagtaaaattggaatcaataggaacttaccaaatactgtcaatttattcaacagtggcgagctccctagcactggcaatcatggtggctggtctatctttatggatgtgctccaatggatcgttacaatgcagaatttgcatttaa

SEQ ID NO: 31464 - RNA, 1707 nt, synthetic construct
  misc_feature 1..1707: note = hemagglutinin__InfluenzaA__ABG20472
  source 1..1707: mol_type = other RNA
atggagaaaatagtgcttcttcttgcaatagtcagtcttgttaaaagtgatcagatttgcattggttaccatgcaaacaactcgacagagcaggttgacacaataatggaaaagaacgtcactgttacacacgcccaagatatactggaaaaggcacacaacgggaagctctgcgatctagacggagtgaagcctctaattttaagagattgtagtgtagctggatggctcctcgggaacccaatgtgtgacgaattcctcaatgtgccggaatggtcttacatagtggagaagatcaatccagccaatgacctctgttacccagggaatttcaacgactatgaagaactgaaacacctattgagcagaataaaccattttgagaaaattcagatcatccccaagagttcttggtcagatcatgaagcctcatcaggggtgagctcagcatgtccataccagggaaggtcctccttttttagaaatgtggtatggcttatcaaaaaggacaatgcatacccaacaataaagagaagttacaataataccaaccaagaagatcttttggtactgtgggggattcaccatccaaatgatgcggcagagcagacaaggctctatcaaaacccaaccacctatatttccgttgggacatcaacactaaaccagagattggtaccaaaaatagctactagatccaaggtaaacgggcaaagtggaaggatggagttcttttggacaattttaaaaccgaatgatgcaataaactttgagagtaatggaaatttcattgctccagaaaatgcatacaaaattgtcaagaaaggggactcaacaattatgaaaagtgaattggaatatggtaactgcaacaccaagtgtcaaactccaataggggcgataaactctagtatgccattccacaacatccaccctctcaccatcggggaatgccccaaatatgtgaaatcaaacagattagtccttgcgactgggctcagaaatagccctcaaggagagagaagaagaaaaaagagaggactatttggagctatagcaggttttatagagggaggatggcagggaatggtagatggttggtatgggtaccaccatagcaacgagcaggggagtgggtacgctgcagacaaagaatccactcaaaaggcaatagatggagtcaccaataaggtcaactcgatcattgacaaaatgaacactcagtttgaggccgttggaagggaatttaataacttagaaaggagaatagaaaatttaaacaagaagatggaagacggattcctagatgtctggacttataatgctgaacttctggttctcatggaaaatgagagaactctagactttcatgactcaaatgtcaagaacctttacgacaaggtccgactacagcttagggataatgcaaaggagcttggtaacggttgtttcgagttctatcacagatgtgataatgaatgtatggaaagtgtaagaaacggaacgtatgactacccgcagtattcagaagaagcaagattaaaaagagaggaaataagtggagtaaaattggaatcaataggaacttaccaaatactgtcaatttattcaacagtggcgagctccctagcactggcaatcatggtggctggtctatctttatggatgtgctccaatggatcgttgcaatgcagaatttgcatttaa

SEQ ID NO: 31465 - RNA, 1707 nt, synthetic construct
  misc_feature 1..1707: note = hemagglutinin__InfluenzaA__ABG20478
  source 1..1707: mol_type = other RNA
atggagaaaatagtgcttctttttgcaatagtcagtcttgttaaaagtgatcagatttgcattggttaccatgcaaacaactcgacagagcaggttgacacaataatggaaaagaacgtcactgttacacacgcccaagacatactggaaaagacacacaacgggaagctctgcgatctagatggagtgaagcctctaattttaagagattgtagtgtagctggatggctcctcgggaacccaatgtgtgacgaattcctcaatgtgccggaatggtcttacatagtggagaagatcaatccagccaatgacctctgttacccagggaatttcaacgactatgaagaactgaaacacctattgagcagaataaaccattttgagaaaattcagatcatccccaaaagttcttggtcagatcatgaagcctcatcaggggtgagctcagcatgtccataccagggaaggtcctccttttttagaaatgtggtatggcttatcaaaaaggacaatgcatacccaacaataaagagaagttacaataataccaaccaagaagatcttttggtactgtgggggattcaccatccaaatgatgcagcagagcagacaaggctctatcaaaacccaaccacctatatttccgttgggacatcaacactaaaccagagattggtaccaaaaatagctactagatccaaggtaaacgggcaaagtggaaggatggagttcttttggacaattttaaaaccgaatgatgcaataaactttgagagtaatggaaatttcattgctccagaaaatgcatacaaaattgtcaagaaaggggactcaacaattatgaaaagtgaattggaatatggtaactgcaacaccaagtgtcaaactccaataggggcgataaactctagtatgccattccacaacatccaccctctcaccatcggggaatgccccaaatatgtgaaatcaaacagattagtccttgcgactgggctcagaaatagccctcaaggagagagaagaagaaaaaagagaggactatttggagctatagcaggttttatagaaggaggatggcagggaatggtagatggttggtatgggtaccatcatagcaacgagcaggggagtgggtacgctgcagacaaagaatccactcaaaaggcaatagatggagtcaccaataaggtcaactcgatcattgacaaaatgaacactcagtttgaggccgttggaagggaatttaataacttagaaaggagaatagaaaatttaaacaagaagatggaagacggattcctagatgtctggacttataatgctgaacttctggttctcatggaaaatgagagaactctagactttcatgactcaaatgtcaagaacctttacgacaaggtccgactacagcttagggataatgcaaaggaacttggtaacggttgtttcgagttctatcacagatgtgataatgaatgtatggaaagtgtaagaaacggtacgtatgactacccgcagtattcagaagaagcaagattaaaaagagaggaaataagtggagtaaaattggaatcaataggaacctaccaaatactgtcaatttattcaacagtggcgagctccctagcactggcaatcatggtggctggtctatctttatggatgtgctccaatggatcgttgcaatgcagaatttgcatttaa

SEQ ID NO: 31466 - RNA, 1701 nt, synthetic construct
  misc_feature 1..1701: note = hemagglutinin__InfluenzaA__ABG26758
  source 1..1701: mol_type = other RNA
atgaagactattattgctttgagctacattttatgtctggttttcgctcaaaaacttcccggaaatgacaacagcacggcaacgctgtgcctgggacaccatgcagtgccaaacggaacgctagtgaaaacaatcacgaatgaccaaattgaagtgactaatgctactgagctggttcagggttcctcaacaggtagaatatgcgacagtcctcaccgaatccttgatggaaaaaactgcacactgatagatgctctattgggagaccctcattgtgatggcttccaaaataaggaatgggacctttttgttgaacgcagcaaagcttacagcaactgttacccttatgatgtgccggattatgcctcccttaggtcactagttgcctcatcaggcaccctggagtttaacaatgaaagcttcaattggactggagtcgcccagaatggaacaagctatgcttgcaaaaggagatctgttaaaagtttctttagtagattgaattggttgcacaaattagaatacaaatatccagcactgaacgtgactatgccaaacaatgacaaatttgacaaattgtacatctggggggttcaccacccgagtacggacagtgaccaaaccagcctatatgttcaagcatcagggagagtcacagtctctaccaaaagaagccaacaaactgtaatcccgaatatcggatctagaccctgggtaaggggtgtctccagcagaataagcatatattggacaatagtaaaaccgggagacatacttttgattaacagcacagggaatctaattgctcctcggggttacttcaaaatacgaagtgggaaaagctcaataatgaggtcagatgcacccattgacaactgcaattctgaatgcatcactccaaatggaagcattcccaatgacaaaccatttcaaaatgtaaacaggatcacatatggggcctgtcccagatatgttaagcaaaacactctgaaattggcaacagggatgcggaatgtaccagagaaacaaactagaggcatattcggcgcaatcgcaggtttcatagaaaatggttgggagggaatggtagacggttggtacggtttcaggcatcaaaattctgagggcacaggacaagcagcagatcttaaaagcactcaagcagcaatcaaccaaatcaacgggaaactgaataggttaatcgagaaaacgaacgagaaattccatcaaatcgaaaaagaattctcagaagtagaagggagaattcaggacctcgagaaatatgttgaagacactaaaatagatctctggtcgtacaacgcggagcttcttgttgccctggagaaccaacatacaattgatctaactgactcagaaatgaacaaactgtttgaaagaacaaggaagcaactgagggaaaatgctgaggacatgggcaatggttgcttcaaaatataccacaaatgtgacaatgcctgcatagggtcaatcagaaatggaacttatgaccatgatgtatacagagacgaagcattaaacaaccggttccagatcaaaggtgttgagctgaagtcaggatacaaagattggatcctatggatttcctttgccatatcatgttttttgctttgtgttgttttgttggggttcatcatgtgggcctgccaaaaaggcaacattaggtgcaacatttgcatttga

SEQ ID NO: 31467 - RNA, 1701 nt, synthetic construct
  misc_feature 1..1701: note = hemagglutinin__InfluenzaA__ABG26769
  source 1..1701: mol_type = other RNA
atgaagactatcattgctttgagctacattttatgtctggttttcgctcaaaaacttcccggaaatgacaacagcacggcaacgctgtgcctgggacaccatgcagtgccaaacggaacgctagtgaaaacaatcacgaatgaccaaattgaagtgactaatgctactgagctggttcagaattcctcaacaggtaggatatgtgacagtcctcaccgaatccttgatgggaaaaactgcacactgatagatgctctattgggagaccctcattgtgatggcttccaaaataaggaatgggacctttttgttgaacgcagcaaagcttacagcaactgttacccttatgatgtgccggattatgcctcccttaggtcactagttgcctcatccggcaccctggagtttaacaatgaaagcttcaattggactggagtcgctcagaatggaacaagctatgcttgcaaaaggagatctgttaaaagtttctttagtagattgaattggttgcacaaattagaatacaaatatccagcactgaacgtgactatgccaaacaatgacaaatttgacaaattgtacatttggggggttcaccacccgagtacggacagtgaccaaaccagcctatatgttcaagcatcagggagagtcacagtctctaccaaaagaagccaacaaactgtaatcccgaatatcggatctggaccctgggtaaggggtgtctccagcagaataagcatctattggacaatagtaaaaccgggagacatacttttgattaacagcacagggaatctaattgctcctcggggttacttcaaaatacgaagtgggaaaagctcaataatgaggtcagatgcacccattggcaactgcaattctgaatgcatcactccaaatggaagcattcccaatgacaaaccatttcaaaatgtaaacaggatcacatatggggcctgtcccagatatgttaagcaaaacactctgaaattggcaacagggatgcggaatgtaccagagaaacaaactagaggcatattcggcgcaatcgcaggtttcatagaaaatggttgggagggaatggtagacggttggtacggtttcaggcatcaaaattctgagggcacaggacaagcagcggatcttaaaagcactcaagcagcaatcaaccaaatcaacgggaaactgaataggttaatcgagaaaacgaacgagaaattccatcaaatcgaaaaagaattctcagaagtagaagggagaattcaggacctcgagaaatatgttgaagacactaaaatagatctctggtcgtacaacgcggagcttcttgttgccctggagaaccaacatacaattgatctaactgactcagaaatgaacaaactgtttgaaagaacaaggaagcaactgagggaaaatgctgaggacatgggcaatggttgcttcagaatataccacaaatgtgacaatgcctgcatagggtcaatcagaaatggaacttatgaccatgatgtatacagagacgaagcattaaacaaccggttccagatcaaaggtgttgagctgaagtcaggatacaaagattggatcctatggatttcctttgccatatcatgttttttgctttgtgttgttttgctggggttcatcatgtgggcctgccaaaaaggcaacattaggtgcaacatttgcatttga

SEQ ID NO: 31468 - RNA, 1701 nt, synthetic construct
  misc_feature 1..1701: note = hemagglutinin__InfluenzaA__ABG26780
  source 1..1701: mol_type = other RNA
atgaaagcaaaactactagtcctgttgtgtgcatttacagctacatatgcagacacaatatgtataggctaccatgcgaacaactcaaccgacactgttgacacagtacttgagaagaacgtgacagtgacacactctgtcaacctacttgaggacagtcacaacggaaaactatgccgactaaaaggaacagccccactacaattgggtaattgcagcgttgccggatggatcttaggaaacccagaatgcgaatcactgttttctaaggaatcatggtcctacattgcagaaacaccaaaccctgagaatggaacatgttacccagggtatttcgccgactatgaggaactgagggagcaattgagctcagtatcatcattcgagagattcgaaatattccccaaggaaagctcatggcccaaccacaccgtaaccaaaggagtgacggcatcatgctcacataatgggaaaagcagtttttacaaaaatttgctatggctgacggaaaagaatggcttgtacccaaatctgagcaagtcctatgtaaacaacaaggagaaagaagtccttgtgctatggggtgttcatcacccgtctaacataggggaccaaagggccatctatcatacagaaaatgcttatgtctctgtagtgtcttcacattatagcagaagattcaccccagaaataacaaaaagacccaaagtaagagatcaagaagggagaattaactactactggactctgctggaacccggggacacaataatatttgaggcaaatggaaatctaatagcgccatggtacgctttcgcactgagtagaggctttgggtcaggaatcatcacctcaaacgcatcaatgggtgaatgtgacgctaagtgtcaaacaccccaaggagctataaacagtagtcttcctttccagaatgtacacccagtcacaataggagagtgtcccaagtatgtcaggagtacaaaattaaggatggttacaggactaagaaacatcccatccattcaatctagaggtttgtttggagccattgccggtttcattgaaggggggtggactggaatgatagatggatggtatggttaccatcatcagaatgaacaaggatctggctatgctgcagaccagaaaagcacacaaaatgccattgatgggattacaaacaaggtgaattctgtaatcgagaaaatgaacactcaattcacagctgtaggcaaagaattcaacaaattagagagaaggatggaaaacttaaataagaaagttgatgatgggtttctggacatttggacatataatgcagagttgttggttctcctggaaaatgaaaggactttggattttcatgactcaaatgtgaagaatctgtatgagaaagtaaaaacccaattgaagaataatgccaaagaaatcgggaacgggtgttttgaattctatcacaagtgtaacaatgaatgcatggaaagtgtgaaaaatggaacttatgactatccaaaatattccgaagaatcaaagttaaacagggaaaaaattgatggagtgaaattggaatcaatgggagtctatcagattctggcgatctactcaactgtcgccagttcactggtgcttttggtctccctgggggcaatcagtttctggatgtgttctaatgggtctttgcagtgtagaatatgcatctga

SEQ ID NO: 31469 - RNA, 1701 nt, synthetic construct
  misc_feature 1..1701: note = hemagglutinin__InfluenzaA__ABG26791
  source 1..1701: mol_type = other RNA
atgaaagcaaaactactagtcctgttgtgtgcatttacagctacatatgcagacacaatatgtataggctaccatgcgaacaactcaaccgacactgttgacacagtacttgagaagaacgtgacagtgacacactctgtcaacctacttgaggacagtcacaacggaaaactatgccgactaaaaggaacagccccactacaattgggtaattgcagcgttgccggatggatcttaggaaacccagaatgcgaatcactgttttctaaggaatcatggtcctacattgcagaaacaccaaaccctgagaatggaacatgttacccagggtatttcgccgactatgaggaactgaaggagcaattgagctcagtatcatcattcgagagattcgaaatattccccaaggaaagctcatggcccaaccacacagtaaccaaaggagtgacggcatcatgctcccataatgggaaaagcagtttttacaaaaatttgctatggctgacggaaaagaatggcttgtacccaaatctgagcaagtcctatgtaaacaacaaggagaaagaagtccttgtactatggggtgttcatcacccgtctaacataggggaccaaagggccatctatcatacagaaaatgcttatgtttctgtggtgtcttcacattatagcagaagattcaccccagaaatagcaaaaagacccaaagtaagagatcaagaagggagaattaactactactggactctgctggaacccggggacacaataatatttgaggcaaatggaaatctaatagcgccatggtacgctttcgcattgagtagaggctttgggtcaggaatcatcacctcaaacgcatcaatgggtgaatgtgacgctaagtgtcaaacaccccaaggagctataaacagtagtcttcctttccagaatgtacacccagtcacaataggagagtgtcccaagtatgtcaggagtacaaaattaaggatggttacaggactaagaaacatcccatccattcagtctagaggtttgtttggagccattgccggtttcattgaaggggggtggactggaatgatagatggatggtatggttatcatcatcagaatgaacaaggatctggctatgctgcagacaaaaaaagcacacaaaatgccattgatgggattacaaacaaggtgaattctgtaatcgagaaaatgaacactcaattcacagctgtaggcaaagaattcaacaaattagagagaaggatggaaaacttaaataagaaagttgatgatggatttctggacatttggacatataatgcagagttgttggttctcctggaaaatgaaaggactttggattttcatgactcaaatgtgaagaatctgtatgagaaagtaaaaaaccaattgaagaataatgccaaagaaatcgggaacgggtgttttgaattctatcacaagtgtaacaatgaatgcatggaaagtgtgaaaaatggaacttatgactatccaaaatattccgaagaatcaaagttaaaaagggaaaaaattgatggagtgaaattggaatcaatgggagtctatcagattctggcgatctactcaactgtcgccagttcactggtgcttttggtctccctgggggcaatcagtttctggatgtgttctaatgggtctttgcagtgtagaatatgcatctga

SEQ ID NO: 31470 - RNA, 1701 nt, synthetic construct
  misc_feature 1..1701: note = hemagglutinin__InfluenzaA__ABG26802
  source 1..1701: mol_type = other RNA
atgaagactatcattgctttgagctacatttcctgtctggttttcgcccaaaaacttcccggaaatgacaacagcacagcaacgctgtgcctgggacatcatgcagtaccaaacggaacgctagtgaaaacaatcacgaatgatcagattgaagtgactaatgctactgagctggtccaaagttcctcaacaggtagaatatgcgacagtcctcaccgaatccttgatggaaaaaactgcacactgatagatgctctattgggagaccctcattgtgatggcttccaaaatgagaaatgggatctttttgttgaacgcagcaaagctttcagcaactgctacccttatgatgtgccggattatgcctcccttaggtcactagttgcctcatcaggcaccctggagtttatcaatgaaggcttcaattggactggagtcactcagagtgggggaagctatgcttgcaaaaggggatctgttaacagtttcttcagtagattgaattggttgtatgagtcagaaagcaaatatccagcgctgaacgtgactatgccaaacaatggcaaatttgacaaattgtacatttggggggttcaccaccctagcacggacaaagaacaaaccaacctatatgttcgagcatcagggagagtcacagtctctaccaagaggagccagcaaactgtaatcccgaatatcgggcctagaccctgggtaaggggtctgtctagtagaataagtatctattggacaatagtaaaaccgggagacatactgttaattaatagcactgggaacctaattgctccccggggttacttcaaaatacgcactgggaaaagctcaataatgaggtcagatgcacctattggcacctgcagttctggatgcatcactccaaatggaagcattcccaatgacaaaccctttcaaaatgtgaacaagatcacatatggggcatgtcccaggtatgttaagcagaacactctgaagttggcaacagggatgcggaatgtacctgaaaaacaaactagaggcatattcggcgcaatagcaggtttcatagaaaatggttgggagggaatggtagacggttggtacggtttcaggcatcaaaattctgagggcacaggacaagcagcagatcttaaaagcactcaagcagcaatcgaccaaatcaacgggaaactgaataggttaatcgagaaaacgaacgagaaattccatcaaatcgaaaaggaattctcagaagtagaagggagaattcaggacctcgagaagtatgttgaagacactaaaatagatctctggtcttacaacgcggagcttcttgttgccctggagaaccaacatacaattgatatgactgactcagaaatgaacaaactgtttgaaaaaacaaggaagcaactgagggaaaatgctgaggacatgggcaatggttgcttcaaaatataccacaaatgtgacaatgcttgcatagggtcaatcagaaatggaacttatgaccatgatgtatacagagacgaagcattaaacaaccggtttcagatcaaaggtgttgagctgaagtcaggatacaaagactggatcctatggatttcctttgccatatcatgctttttgctctgtgttgttttgctggggttcataatgtgggcctgccaaaaaggcaacattaggtgcaacatttgcatttga

SEQ ID NO: 31471 - RNA, 1701 nt, synthetic construct; identical to SEQ ID NO: 31420
  misc_feature 1..1701: note = hemagglutinin__InfluenzaA__ABG26813
  source 1..1701: mol_type = other RNA

SEQ ID NO: 31472 - RNA, 1701 nt, synthetic construct
  misc_feature 1..1701: note = hemagglutinin__InfluenzaA__ABG26824
  source 1..1701: mol_type = other RNA
atgaaagcaaaactactggtcctgttatgtgcactttcagctacagatgcagacacaatatgtataggctaccatgcgaacaactcaaccgacactgttgacacagtactcgaaaagaacgtgacagtgacacactctgtcaacctacttgaggacaatcacaacggaaaactatgcaaactaaaaggaatagccccactacaattggggaaatgcagcattgccggatggatcttaggaaacccagaatgcgaatcactgttttctaagaaatcatggtcctacattgcagaaacaccaaactccgagaatggaacatgttacccagggtatttcgccgactatgaggaactgagggaacaattgagttcagtatcatcattcgagagattcgaaatattccccaaggaaagttcatggcccaaacacaacgtaaccaaaggagtaacggcatcatgctcccataaggggaaaagcagtttttacagaaatttgctatggctgacggagaaaaatggctcgtacccaaatctgagcaagtcctatgtgaacaacaaagagaaagaagtccttgtactatggggtgttcatcacccgtctaacatagaggaccaaaagaccatctatcgtaaagaaaatgcttatgtctctgtagtgtcttcacattataacaggagattcaccccagaaatagcaaaaagacccaaagtaagaaatcaagaagggagaattaactactactggactctgctggaacccggggacacaataatatttgaggcaaatggaaatctaatagcgccatggtatgctttcgcattgagtagaggctttgggtcaggaatcatcacctcaaacgcatcgatggatgaatgtgacgcgaagtgtcaaacaccccagggagctataaacagtagtcttccttttcagaatgtacacccagtcacaataggagagtgcccaaagtacgtcaggagtacaaaattaaggatggttacaggactaaggaacatcccatccattcaatccagaggtttgtttggagccattgccggtttcattgaagggggatggactggaatgattgatggatggtatggttatcatcatcagaatgaacagggatctggctatgctgcggatcaaaaaagcacacaaaatgccattaacgggattacaaacaaggtgaactctataatcgagaaaatgaacactcaattcacagctgtgggtaaagaattcaacaaactagaaaaaaggatggaaaacttaaataaaaaagttgatgatggatttttggacatttggacatataatgcagaattgttggttctactggaaaatgaaaggactttggatttccatgactcaaatgtgaagaacctgtatgagaaagtaaaaagccaattaaagaataatgccaaagaaataggaaacgggtgttttgaattctaccacaagtgtaacaatgaatgcatggaaagtgtaaaaaatgggacttatgactatccaaaatattcagaagaatcaaagttaaacagggaaaaaattgatggagtgaaattggaatcaatgggagtctatcagattctggcgatctactcaactgtcgccagttcactggtgcttttggtctccctgggggcaatcagcttctggatgtgttctaatgggtctttgcagtgcaaaatatgcatctga

SEQ ID NO: 31473 - RNA, 1701 nt, synthetic construct
  misc_feature 1..1701: note = hemagglutinin__InfluenzaA__ABG26835
  source 1..1701: mol_type = other RNA
atgaaagcaaaactactggtcctgttatgtgcactttcagctacagatgcagacacaatatgtataggctaccatgcgaacaactcaaccgacactgttgacacagtgctcgaaaagaacgtgacagtgacacactctgtcaacctacttgaggacaatcacaacggaaaactatgcaaactaaaaggaatagccccactacaattggggaaatgcagcattgccggatggatcttaggaaacccagaatgcgaatcactgttttctaagaaatcatggtcctacattgcagaaacaccaaactccgagaatggaacatgttacccagggtatttcgccgactatgaggaactgagggaacaattgagttcagtatcatcattcgagagattcgaaatattccccaaggaaagttcatggcccaaacacaacgtaaccaaaggagtaacggcatcatgctcccataaggggaaaagcagtttttacagaaatttgctatggctgacggagaaaaatggctcgtacccaaatctgagcaagtcctatgtgaacaacaaagagaaagaagtccttgtactatggggtgttcatcacccgtctaacatagaggaccaaaagaccatctatcgtaaagaaaatgcttatgtctctgtagtgtcttcacattataacaggagattcaccccagaaatagcaaaaagacccaaagtaagaaatcaagaagggagaattaactactactggactctgctggaacccggggacacaataatatttgaggcaaatggaaatctaatagcgccatggtatgctttcgcattgagtagaggctttgggtcaggaatcatcacctcaaacgcatcgatggatgaatgtgacgcgaagtgtcaaacaccccagggagctataaacagtagtcttccttttcagaatgtacacccagtcacaataggagagtgcccaaagtacgtcaggagtacaaaattaaggatggttacaggactaaggaacatcccatccattcaatccagaggtttgtttggagccattgccggtttcattgaagggggatggactggaatgattgatggatggtatggttatcatcatcagaatgaacagggatctggctatgctgcggatcaaaaaagcacacaaaatgccattaacgggattacaaacaaggtgaactctataatcgagaaaatgaacactcaattcacagctgtgggtaaagaattcaacaaactagaaaaaaggatggaaaacttaaataaaaaagttgatgatggatttctggacatttggacatataatgcagaattgttggttctactggaaaatgaaaggactttggatttccatgactcaaatgtgaagaacctgtatgagaaagtaaaaagccaattaaagaataatgccaaagaaataggaaacgggtgttttgaattctaccacaagtgtaacaatgaatgcatggaaagtgtaaaaaatgggacttatgactatccaaaatattcagaagaatcaaagttaaacagggaaaaaattgatggagtgaaattggaatcaatgggagtctatcagattctggcgatctactcaactgtcgccagttcactggtgcttttggtctccctgggggcaatcagcttctggatgtgttctaatgggtctttgcagtgcagaatatgcatctga

SEQ ID NO: 31474 - RNA, 1701 nt, synthetic construct
  misc_feature 1..1701: note = hemagglutinin__InfluenzaA__ABG26890
  source 1..1701: mol_type = other RNA
atgaagactatcattgctttgagctacattttatgtctggttttcgctcaaaaacttcccggaaatgacaacagcacagcaacgctgtgcctgggacaccatgcagtgccaaacggaacgctagtgaaaacaatcacgaatgatcaaattgaagtgactaatgctactgagctggttcagaattccccaacaggtagaatatgcgacagtcctcaccgaatccttgatggaaagaactgcacactgatagatgctctattgggagaccctcattgtgatggcttccaaaataaggaatgggacctttttgttgaacgcagcaaagcttacagcaactgttacccttatgatgtgccggattatgcctcccttaggtcactagttgcctcatcaggcaccctggagtttaccaacgaaaacttcaattggactggagtcgctcaggatgggaaaagctatgcttgcaaaaggggatctgttaacagtttctttagtagattgaattggttgcacaaattagaatacaaatatccagcgctgaacgtgactatgccaaacaatggcaaatttgacaaattgtacatttggggggttcaccacccgagcacggacagtgaccaaaccagcctatatgtccgagcatcagggaaagtcacagtctctaccaaaagaagccaacaaactgtaatcccggatatcgggtatagaccatgggtaaggggtctgtccagtagaataagcatctattggacaatagtaaaaccgggagacatacttttgattaatagcacagggaatctaattgctcctcggggttacttcaaaatacgaaatgggaaaagctcaataatgaggtcagatgcacccattggcaactgcagttctgaatgcatcactccaaatggaagcattcccaatgacaaaccttttcaaaatgtaaacaggatcacatatggggcctgccccagatatgttaagcaaaacactctgaaattggcaacagggatgcggaatgtaccagagaaacaaactagaggcatattcggcgcaatcgcaggtttcatagaaaatggttgggagggaatggtagacggttggtacggtttcaggcatcagaattctgagggcacaggacaagctgcagatcttaaaagcactcaagcagcaatcgaccaaatcaacgggaaactgaataggttagtcgagaaaacgaacgagaaattccatcaaatcgaaaaagaattctcagaagtagaagggagaattcaggacctcgagaaatatgttgaagacactaaaatagatctctggtcttacaatgcggagcttcttgttgctctggagaaccaacatacaattgatctaactgactcagaaatgaacaaactatttgaaagaacaaggaagcaactgagggaaaatgctgaggacatgggcaatggttgtttcaaaatataccacaaatgtgacaatgcctgcatagggtcaatcagaaatggaacttatgaccatgatgtatacagagacgaagcattaaacaaccggttccagatcaaaggtgttgagctgaagtcaggatacaaagattggatcctatggatttcctttgccatatcatgctttttgctttgtgttgttttgcttgggttcatcatgtgggcctgccaaaaaggcaacattaggtgcaacatttgcatttga

SEQ ID NO: 31475 - RNA, 1701 nt, synthetic construct
  misc_feature 1..1701: note = hemagglutinin__InfluenzaA__ABG26901
  source 1..1701: mol_type = other RNA
atgaagactatcattgctttgagctacattttatgtctggttttcgctcaaaaacttcccggaaatgacaacagcacagcaacgctgtgcctgggacaccatgcagtgccaaacggaacgctagtgaaaacaatcacgaatgatcaaattgaagtgactaatgctactgagctggttcagaattccccaacaggtagaatatgcgacagtcctcaccgaatccttgatggaaagaactgcacactgatagatgctctattgggagaccctcattgtgatggcttccaaaataaggaatgggacctttttgttgaacgcagcaaagcttacagcaactgttacccttatgatgtgccggattatgcctcccttaggtcactagttgcctcatcaggcaccctggagtttaccaacgaaaacttcaattggactggagtcgctcaggatgggaaaagctattcttgcaaaaggggatctgttaacagtttctttagtagattgaattggttgcacaaatcagaatacaaatatccagcgctgaacgtgactatgccaaacaatggcaaatttgacaaattgtacatttggggggttcaccacccgagcacggacagtgaccaaaccagcctatatgtccgagcatcagggaaagtcacagtctctaccaaaagaagccaacaaactgtaatcccggatatcgggtatagaccatgggtaaggggtctgtccagtagaataagcatctattggacaatagtaaaaccgggagacatacttttgattaatagcacagggaatctaattgctcctcggggttacttcaaaatacgaaatgggaaaagctcaataatgaggtcagatgcacccattggcaactgcagttctgaatgcatcactccaaatggaagcattcccaatgacaaaccttttcaaaatgtaaacaggatcacatatggggcctgccccagatatgttaagcaaaacactctgaaattggcaacagggatgcggaatgtaccagagaaacaaactagaggcatattcggcgcaatcgcaggtttcatagaaaatggttgggagggaatggtagacggttggtacggtttcaggcatcagaattctgagggcacaggacaagctgcagatcttaaaagcactcaagcagcaatcgaccaaatcaacgggaaactgaataggttagtcgagaaaacgaacgagaaattccatcaaatcgaaaaagaattctcagaagtagaagggagaattcaggacctcgagaaatatgttgaagacactaaaatagatctctggtcttacaatgcggagcttcttgttgctctggagaaccaacatacaattgatctaactgactcagaaatgaacaaactatttgaaagaacaaggaagcaactgagagaaaatgctgaggacatgggcaatggttgtttcaaaatataccacaaatgtgacaatgcctgcatagggtcaatcagaaatggaacttatgaccatgatgtatacagagacgaagcattaaacaaccggttccagatcaaaggtgttgagctgaagtcaggatacaaagattggatcctatggatttcctttgccatatcatgctttttgctttgtgttgttttgcttgggttcatcatgtgggcctgccaaaaaggcaacattaggtgcaacatttgcatttga

SEQ ID NO: 31476 - RNA, 1701 nt, synthetic construct
  misc_feature 1..1701: note = hemagglutinin__InfluenzaA__ABG26912
  source 1..1701: mol_type = other RNA
atgaagactatcattgctttgagctacattttatgtctggttttcgctcaaaaacttcccggaaatgacaacagcacagcaacgctgtgcctgggacaccatgcagtgccaaacggaacgctagtgaaaacaatcacgaatgatcaaattgaagtgactaatgctactgagctggttcagagttcctcaacaggtagaatatgcgacagtcctcaccgaatccttgatggaaaaaactgcacactgatagatgctctattgggagaccctcattgtgatggcttccaaaataaggaatgggacctttttgttgaacgcagcaaagcttacagcaactgttacccttatgatgtgccggattatgcctcccttaggtcactagttgcctcatcaggcaccctggagtttaccaaggaaggcttcaattggactggagtcgctcaggatgggaaaagctatgcttgcaaaaggggatctgttaacagtttctttagtagattgaattggttgcacaaattagaatacaaatatccagcactgaacgtgactatgccaaacaatgacaaatttgacaaattgtacatttggggggttcaccacccgagcacggacagtgaccaaaccagcctatatgttcaagcatcagggagagtcacagtctctaccaaaagaagccaacaaactgtaatcccgaatatcgggtctagaccctgggtaaggggtatctccagtagaataagcatctattggacaatagtaaaaccgggagacatacttttgattaacagcacagggaatctaattgctcctcggggttacttcaaaatacgaaatgggaaaagctcaataatgaggtcagatgcacccattagcaactgcaattctgaatgcatcactccaaatggaagcattcccaatgacaaaccttttcaaaatgtaaacaggatcacatatggggcctgtcccagatatgttaagcaaaacactctgaagttggcaacagggatgcggaatgtaccagagaaacaaactagaggcatattcggcgcaatcgcaggtttcatagaaaatggttgggagggaatggtagacggttggtacggtttcaggcatcaaaattctgagggcacaggacaagcagcagatcttaaaagcactcaagcagcaatcgaccaaatcaacgggaagctgaataggttaatcgagaaaacgaacgaaaaattccatcaaatcgaaaaagaattctcagaagtagaagggagaattcaggacctcgagaaatatgttgaagacactaaaatagatctctggtcttacaacgcggagcttcttgttgccctggagaaccaacatacaattgatctaactgactcagaaatgaacaaactgtttgaaagaacaaggaagcaactgagggaaaatgctgaggacatgggcaatggttgcttcaaaatataccacaaatgtgacaatgcctgcatagggtcaatcagaaatggaacttatgaccatgatgtatacagagacgaagcattaaacaaccggttccagatcaaaggtgttgagctgaagtcaggatacaaagattggatcctatggatttcctttgccatatcatgctttttgctttgtgttgttttgctggggttcatcatgtgggcctgccaaaaaggcaacattaggtgcaacatttgcatttga

SEQ ID NO: 31477 - RNA, 1698 nt, synthetic construct
  misc_feature 1..1698: note = hemagglutinin__InfluenzaA__ABG26945
  source 1..1698: mol_type = other RNA
atgaaagcaaaactactggtcctgttatgtacatttacagctacatacgcagacacaatatgtataggctaccatgccaacaactcaaccgacactgttgacacagtacttgagaagaatgtgacagtgacacactctgtcaacctacttgaggacagtcacaatggaaaactatgtctactaaaaggaatagccccactacaattgggtaattgcagcgttgccggatggatcttaggaaacccagaatgcgaattactgatttccaaggaatcatggtcctacattgtagaaacaccaaatcccgagaatggaacatgttacccagggtatttcgccgactatgaggaactgagggagcaattgagttcagtatcttcatttgagagattcgaaatattccccaaaggaagctcatggcccaaccacaccgtgaccggagtatcagcatcatgctcccataatgggaaaagcagtttttacagaaatttgctatggctgacggggaagaatggtttgtacccaaacctgagcatgtcctatgtaaacaacaaagagaaagaagtccttgtgctatggggtgttcatcacccacctaacatagggaaccaaagggccctctaccatacagaaaatgcttatgtctctgtagtgtcttcacattatagcagaagattcaccccagaaatagccaaaagacccaaagtaagagatcaggaaggaagaatcaactactactggactctgctggaacccggggacacaataatatttgaggcaagtggaaatctaatagcgccatggtatgctttcgcactgagtagaggctttggatcaggaatcatcacctcaaatgcaccaatgggtgaatgtgatgcgaagtgtcaaacacctcagggagctataaacagtagtcttcctttccagaatgtacacccagttacaataggagagtgtccaaagtatgtcaggagtgcaaaattaaggatggttacaggactaaggaacatcccatccattcaatccagaggtttgtttggagccattgccggtttcattgaaggggggtggactggaatggtagatgggtggtatggttatcatcatcagaatgagcaaggatctggctatgctgcagatcaaaaaagcacacaaaatgccattaacgggattacaaacaaggtgaattctgtaattgagaaaatgaacactcaattcacagctgtgggcaaagaattcaacaaattagaaagaaggatggaaaacttaaataaaaaagttgatgatgggtttctagacatttggacatataatgcagaattgttggttctactggaaaatgaaaggactttggatttccatgactccaatgtgaagaatctgtatgagaaagtaaaaagccaattaaagaataatgccaaagaaataggaaacgggtgttttgaattctatcacaagtgtaacaatgaatgcatggaaagtgtgaaaaatggaacttatgactatccaaaatattccgaagaatcaaagttaaacagggagaaaattgatggagtaaaattggaatcaatgggagtctatcagattctggcgatctactcaactgtcgccagttccctggttcttttggtctccctgggggcaatcagcttctggatgtgttccaatgggtctttgcagtgtagaatatgcatctga

SEQ ID NO: 31478 - RNA, 1701 nt, synthetic construct
  misc_feature 1..1701: note = hemagglutinin__InfluenzaA__ABG26956
  source 1..1701: mol_type = other RNA
atgaagactatcattgctttgagctacattttatgcctggttttcgctcaaaaacttcccggaaatgacaaccgcacggcaacgctgtgtctggggcatcatgcagtgccaaacggaacgctagtgaaaacaatcacgaatgaccaaattgaagtaactaatgctactgagctggttcagagttcctcaacaggtagaatatgcgacagtcctcaccaaatccttgatggagaaaactgcacactaatagatgctctattgggagacccccattgtgatggcttccaaaataaggaatgggacctttttgttgaacgcagcaaagcctacagcaactgttacccttatgatgtgccggattatgtctcccttaggtcactagttgcctcatcaggcacgctggagtttaacaatgaaagcttcaattggactggagtcgctcagaatggaacaagctctgcttgcaaaaggagatctgataaaagtttctttagtaaattgaattggttgcaccaattaaaatataaatatccagcactgaacgtgactatgccaaacaatgaaaaatttgacaaattgtacatttggggggttcaccacccgggtacagacagtgaccaaatcagcctatatgctcaagcatcagggagagtcacagtctctaccaaaagaagccaacaaactgtaatcccgaatatcggatctagaccctgggtaaggggtgtctccagcagaataagcatctattggacaatagtaaaaccgggagacatacttttgattaacagcacagggaatctaattgctcctcggggttacttcaaaatacgaagtgggaaaagctcaataatgaggtcagatgcacccattggcaaatgcaattctgaatgcatcactccaaatggaagcattcccaatgacaaaccatttcaaaatgtaaacaggatcacatatggggcctgtcccagatatgttaagcaaaacactctgaaattggcaacagggatgcggaatgtgccagagaaacaaactagaggcatattcggtgcaatcgcgggcttcatagaaaatggttgggagggaatgatggacggttggtacggtttcaggcatcaaaattctgagggcacagggcaagcagcagatcttaaaagcactcaagcagcaatcaaccaaatcaacgggaagctgaataggttaatcgagaaaacgaacgagaaattccatcaaattgaaaaagaattctcagaagtagaagggagaattcaggacctcgagaaatatgttgaggacactaaaatagatctctggtcgtacaatgcggagcttcttgttgccctggagaaccaacatacaattgatctaactgactcagaaatgaacaaactgtttgaaagaacaaagaagcaactgagggaaaatgctgaggatatgggcaatggttgtttcaaaatataccacaaatgtgacaatgcctgcatagggtcaatcagaaatggaacttatgaccatgatgtatacagagacgaagcattgaacaaccggttccagatcaaaggtgttgagctgaagtcaggatacaaagattgggtcctatggatttcctttgccatatcatgttttttgctttgtattgttttgctggggttcatcatgtgggcctgccaaaaaggcaacattaggtgcaacatttgcatttga

SEQ ID NO: 31479 - RNA, 1698 nt, synthetic construct
  misc_feature 1..1698: note = hemagglutinin__InfluenzaA__ABG37120
  source 1..1698: mol_type = other RNA
atgaaagcaaaactactggtcctgttatgtacatttacagctacatacgcagacacaatatgtataggctaccatgccaacaactcaaccgacactgttgacacagtacttgagaagaatgtgacagtgacacactctgtcaacctacttgaggacagtcacaatggaaaactatgtctactaaaaggaatagccccactacaattgggtaattgcagcgttgccggatggatcttaggaaacccagaatgcgaattactgatttccaaggaatcatggtcctacattgtagaaacaccaaatcccgagaatggaacatgttacccagggtatttcgccgactatgaggaactgagggagcaattgagttcagtatcttcatttgagagattcgaaatattccccaaaggaagctcatggcccaaccacaccgtgaccggagtatcagcatcatgctcccataatggggaaagcagtttttacagaaatttgctatggctgacggggaagaatggtttgtacccaaacctgagcatgtcctatgtaaacaacaaagagaaagaagtccttgtgctatggggtgttcatcacccacctaacatagggaaccaaagggccctctaccatacagaaaatgcttatgtctctgtagtgtcttcacattatagcagaagattcaccccagaaatagccaaaagacccaaagtaagagatcaggaaggaagaatcaactactactggactctgctggaacccggggacacaataatatttgaggcaaatggaaatctaatagcgccatggtatgctttcgcactgagtagaggctttggatcaggaatcatcacctcaaatgcaccaatgggtgaatgtgatgcgaagtgtcaaacacctcagggagctataaacagtagtcttcctttccagaatgtacacccagttacaataggagagtgtccaaagtatgtcaggagtgcaaaattaaggatggttacaggactaaggaacatcccatccattcaatccagaggtttgtttggagccattgccggtttcattgaaggggggtggactggaatggtagatgggtggtatggttatcatcatcagaatgagcaaggatctggctatgctgcagatcaaaaaagcacacaaaatgccattaacgggattacaaacaaggtgaattctgtaattgagaaaatgaacacccaattcacagctgtgggcaaagaattcaacaaattagaaagaaggatggaaaacttaaataaaaaagttgatgatgggtttctagacatttggacatataatgcagaattgttggttctactggaaaatgaaaggactttggatttccatgactccaatgtgaagaatctgtatgagaaagtaaaaagccaattaaagaataatgccaaagaaataggaaacgggtgttttgaattctatcacaagtgtaacaatgaatgcatggaaagtgtgaaaaatggaacttatgactatccaaaatattccgaagaatcaaagttaaacagggagaaaattgatggagtaaaattggaatcaatgggagtctatcagattctggcgatctactcaactgtcgccagttccctggttcttttggtctccctgggggcaatcagcttctggatgtgttccaatgggtctttgcagtgtagaatatgcatctga

SEQ ID NO: 31480 - RNA, 1701 nt, synthetic construct
  misc_feature 1..1701: note = hemagglutinin__InfluenzaA__ABG37131
  source 1..1701: mol_type = other RNA
atgaagactatcattgctttgagctacatttcatgtctggttttcgctcaaaaacttcccggaaatgacaacagcacggcaacgctgtgcctgggacaccatgcagtgccaaacgggacgctagtgaaaacaatcacgaatgaccaaattgaagtgactaatgctactgagctggttcagagttcctcaacaggtagaatatgcgacggtcctcaccaaatccttgatggaaaaaactgcacactgatagatgctctattgggagaccctcattgtgatggcttccaaaataaggaatgggacctttttgttgaacgcagcaaagcttacagcaactgttacccttatgatgtgccggattatgcctcccttaggtcactagttgcctcttccggcaccctggagtttaccaatgaaagcttcaattggactggagtcgctcagaatggaacaagctatgcttgcaaaaggggatctgttaaaagtttctttagtagattgaattggttgcacaaattagaatacaaatatccagcactaaacgtgactatgccaaacaatgacaaatttgacaaattgtacatttggggggttcaccacccgagtacggacagtgaccaaaccagcctatatgttcaatcatcagggagagtcacagtctctaccaaaagaagccaacaaactgtaaccccgaatatcgggtctagaccctgggtaaggggtatctccagcagaataagcatctattggacaatagtaaaaccgggagacatacttttgattaacagcacagggaatctaattgctcctcggggttacttcaaaatacgaagggggaaaagctcaataatgaggtcagatgcacccattgacaactgcaattctgaatgcatcactccaaatggaagcattcccaatgacaaaccttttcaaaatgtaaacaggatcacatatggggcctgtcccagatatgttaagcaaaacactctgaaattggcaacagggatgcggaatgtaccagagaaacaaactagaggcatattcggcgcaatcgcaggtttcatagaaaatggttgggagggaatggtagacggttggtacggtttcaggcatcaaaattctgagggcacaggacaagcagcagatcttaaaagcactcaagcagcaatcaaccaaatcaacgggaaactgaataggttaatcgagaaaacgaacgagaaatttcatcaaatcgaaaaagaattctcagaagtagaagggagaattcaggacctcgagaaatatgttgaagacactaaaatagatctctggtcttacaacgcggagcttcttgttgccctggagaatcaacatacaattgatctaactgactcagaaatgaacaaactgtttgaaagaacaaggaagcaactgagggaaaatgctgaggacatgggcaatggttgcttcaaaatataccacaaatgtgacaatgcatgcatagggtcaatcagaaatggaacttatgaccatgatgtatacagagacgaagcattaaacaaccggttccagatcaaaggtgttgagctgaagtcaggatacaaagattggatcctatggatttcctttgccatatcatgctttttgctttgtgttgttttgctggggttcatcatgtgggcctgccaaaaaggcaacattaggtgcaacatttgcatttga

SEQ ID NO: 31481 - RNA, 1701 nt, synthetic construct
  misc_feature 1..1701: note = hemagglutinin__InfluenzaA__ABG37142
  source 1..1701: mol_type = other RNA
atgaagactattattgctttgagctacattttatgtctggttttcgctcaaaaacttcccggaaatgacaacagcacggcaacgctgtgcctgggacaccatgcagtgccaaacggaacgctagtgaaaacaatcacgaatgaccaaattgaagtgactaatgctactgagctggttcagggttcctcaacaggtagaatatgcgacagtcctcaccgaatccttgatggaaaaaactgcacactgatagatgctctattgggagaccctcattgtgatggcttccaaaataaggaatgggacctttttgttgaacgcagcaaagcttacagcaactgttacccttatgatgtgccggattatgcctcccttaggtcactagttgcctcatcaggcaccctggagtttaacaatgaaagcttcaattggactggagtcgcccagaatggaacaagctatgcttgcaaaaggagatctgttaaaagtttctttagtagattgaattggttgcacaaattagaatacaaatatccagcactgaacgtgactatgccaaacaatgacaaatttgacaaattgtacatttggggggttcaccacccgagtacggacagtgaccaaaccagcctatatgttcaagcatcagggagagtcacagtctctaccaaaagaagccaacaaactgtaatcccgaatatcggatctagaccctgggtaaggggtgtctccagcagaataagcatatattggacaatagtaaaaccgggagacatacttttgattaacagcacagggaatctaattgctcctcggggttacttcaaaatacgaagtgggaaaagctcaataatgaggtcagatgcacccattgacaactgcaattctgaatgcatcactccaaatggaagcattcccaatgacaaaccatttcaaaatgtaaacaggatcacatatggggcctgtcccagatatgttaagcaaaacactctgaaattggcaacagggatgcggaatgtaccagagaaacaaactagaggcatattcggcgcaatcgcaggtttcatagaaaatggttgggagggaatggtagacggttggtacggtttcaggcatcaaaattctgagggcacaggacaagcagcagatcttaaaagcactcaagcagcaatcaaccaaatcaacggaaaactgaataggttaatcgagaaaacgaacgagaaattccatcaaatcgaaaaagaattctcagaagtagaagggagaattcaggacctcgagaaatatgttgaagacactaaaatagatctctggtcgtacaacgcggagcttcttgttgccctggagaaccaacatacaattgatctaactgactcagaaatgaacaaactgtttgaaagaacaaggaagcaactgagggaaaatgctgaggacatgggcaatggttgcttcaaaatataccacaaatgtgacaatgcctgcatagggtcaatcagaaatggaacttatgaccatgatgtatacagagacgaagcattaaacaaccggttccagatcaaaggtgttgagctgaagtcaggatacaaagattggatcctatggatttcctttgccatatcatgttttttgctttgtgttgttttgttggggttcatcatgtgggcctgccaaaaaggcaacattaggtgcaacatttgcatttga

SEQ ID NO: 31482 - RNA, 1701 nt, synthetic construct
  misc_feature 1..1701: note = hemagglutinin__InfluenzaA__ABG37164
  source 1..1701: mol_type = other RNA
atgaagactatcattgctttgagctacattttatgtctggttttcgctcaaaaacttcccggaaatgacaacagcacagcaacgctgtgcctgggacaccatgcagtgccaaacggaacgctagtgaaaacaatcacgaatgatcaaattgaagtgactaatgctactgagctggttcagagttcctcaacaggtagaatatgcgacagtcctcaccgaatccttgatggaaaaaattgcacactgatagatgctctattgggagaccctcattgtgatgacttccaaaataaggaatgggacctttttgttgaacgcagcaaagcttacagcaactgttacccttatgatgtgccggattatgcctcccttaggtcactagttgcctcatcaggcaccctggagtttaccaaggaaggcttcaattggactggagtcgctcaggatgggaaaagctatgcttgcaaaaggggatctgttaacagtttctttagtagattgaattggttgcacaaattagaatacaaatatccagcactgaacgtgactatgccaaacaatgacaaatttgacaaattgtacatttggggggttcaccacccgagcacggacagtgaccaaaccagcctatatgttcaagcatcagggagagtcacagtctctaccaaaagaagccaacaaactgtaatcccgaatatcgggtctagaccctgggtaaggggtatctccagtagaataagcatctattggacaatagtaaaaccgggagacatacttttgattaacagcacagggaatctaattgctcctcggggttacttcaaaatacgaaatgggaaaagctcaataatgaggtcagatgcacccattggcaactgcaattctgaatgcatcactccaaatggaagcattcccaatgacaaaccttttcaaaatgtaaacaggatcacatatggggcctgtcccagatatgttaagcaaaacactctgaagttggcaacagggatgcggaatgtaccagagaaacaaactagaggcatattcggcgcaatcgcaggtttcatagaaaatggttgggagggaatggtagacggttggtacggtttcaggcatcaaaattctgagggcacaggacaagcagcagatcttaaaagcactcaagcagcaatcgaccaaatcaacgggaagctgaataggctaatcgagaaaacgaacgaaaaattccatcaaatcgaaaaagaattctcagaagtagaagggagaattcaggacctcgagaaatatgttgaagacactaaaatagatctctggtcttacaacgcggagcttcttgttgccctggagaaccaacatacaattgatctaactgactcagaaatgaacaaactgtttgaaagaacaaggaagcaactgagggaaaatgctgaggacatgggcaatggttgcttcaaaatataccacaaatgtgacaatgcctgcatagggtcaatcagaaatggaacttatgaccatgatgtatacagagacgaagcattaaacaaccggttccagatcaaaggtgttgagctgaagtcaggatacaaagattggatcctatggatttcctttgccatatcatgctttctgctttgtgttgttttgctggggttcatcatgtgggcctgccaaaaaggcaacattaggtgcaacatttgcatttga

SEQ ID NO: 31483 - RNA, 1701 nt, synthetic construct
  misc_feature 1..1701: note = hemagglutinin__InfluenzaA__ABG37175
  source 1..1701: mol_type = other RNA
atgaagactatcattgctttgagctacattttatgtcaggttttcgctaaaaaacttcccggaaatgacaacagcacagcaacgctgtgcctgggacaccatgcagtgccaaacggaacgctagtgaaaacaatcacgaatgatcaaattgaagtgactaatgctactgagctggttcagagttcctcaacaggtagaatatgcgacagtcctcaccgaatccttgatggaaaaaactgcacactgatagatgctctattgggagaccctcattgtgatggcttccaaaataaggaatgggacctttttgttgaacgcagcaaagcttacagcaactgttacccttatgatgtgccggattatgcctcccttaggtcactagttgcctcatcaggcaccctggagtttaccaatgaaggcttcaattggactggagtcgctcaggatgggaaaagctattcttgcaaaaggggatctgttaacagtttctttagtagattgaattggttgcacaaattagaatacaaatatccagcactgaacgtgactatgccaaacaatgacaaatttgataaattgtacatttggggggttcaccacccgagcacggacagtgaccaaaccagcctatatgttcaagcatcagggagagtcacagtctctaccaaaagaagccaacaaactgtaatcccgaatatcgggtccagaccctgggtgaggggcatctccagtagaataagcatctattggacaatagtaaaaccgggagacatacttttgattaacagcacagggaatctaattgctcctcggggttacttcaaaatacgaaatgggaaaagctcaataatgaggtcagatgcacccattgacaactgcaattctgaatgcatcactccaaatggaagcattcccaatgacaaaccttttcaaaatgtaaacaggatcacatatggggcctgtcccagatatgttaagcaaaacactctgaaattggcaacagggatgcggaatgtaccagagaaacaaactagaggcatattcggcgcaatcgcaggtttcatagaaaatggttgggagggaatggtagacggttggtacggtttcaggcatcaaaattctgagggcacaggacaagcagcagatcttaaaagcactcaagcagcaatcgatcaaatcaacgggaaactgaataggttaatcgagaaaacgaacgagaaattccatcaaatcgaaaaagaattctcagaagtagaagggagaattcaggacctcgagaaatatgttgaagacactaaaatagatctctggtcttacaacgcggagcttcttgttgccctggagaatcaacatacaattgatctaactgactcagaaatgaacaaactgtttgaaagaacaaggaagcaactgagggaaaatgctgaggacatgggcaatggttgcttcaaaatataccacaaatgtgacaatgcctgcatagggtcaatcagaaatggaacttatgaccatgatgtatacagagacgaagcattaaacaaccggttccagatcaaaggtgttgagctgaagtcgggatacaaagattggatcctatggatttcttttgccatatcatgctttttgctttgtgttgttttgctggggttcatcatgtgggcctgccaaaaaggcaacattaggtgcaacatttgcatttga

SEQ ID NO: 31484 - RNA, 1701 nt, synthetic construct
  misc_feature 1..1701: note = hemagglutinin__InfluenzaA__ABG37186
  source 1..1701: mol_type = other RNA
atgaagactatcattgctttgagctacattttatgtcaggttttcgctcaaaaacttcccggaaatgacaacagcacagcaacgctgtgcctgggacaccatgcagtgccaaacggaacgctagtgaaaacaatcacgaatgatcaaattgaagtgactaatgctactgagctggttcagagttcctcaacaggtagaatatgcgacagtcctcaccgaatccttgatggaaaaaactgcacactgatagatgctctattgggagaccctcattgtgatggcttccaaaataaggaatgggacctttttgttgaacgcagcaaagcttacagcaactgttacccttatgatgtgccggattatgcctcccttaggtcactagttgcctcatcaggcaccctggagtttaccaatgaaggcttcaattggactggagtcgctcaggatgggaaaagctatgcttgcaaaaggggatctgttaacagtttctttagtagattgaattggttgcacaaattagaatacaaatatccagcactgaacgtgactatgccaaacaatgacaaatttgacaaattgtacatttggggggttcaccacccgagcacggacagtgaccaaaccagcctatatgttcaagcatcagggagagtcacagtctctaccaaaagaagccaacaaactgtaatcccgaatatcgggtccagaccctgggtgaggggcatctccagtagaataagcatctattggacaatagtaaaaccgggagacatacttttgattagcagcacagggaatctaattgctcctcggggttacttcaaaatacgaaatgggaaaagctcaataatgaggtcagatgcacccattgacaactgcaattctgaatgcatcactccaaatggaagcattcccaatgacaaaccttttcaaaatgtaaacagggtcacatatggggcctgtcccagatatgttaagcaaaacactctgaaattggcaacagggatgcggaatgtaccagagaaacaaactagaggcatattcggcgcaatcgcaggtttcatagaaaatggttgggagggaatggtagacggttggtacggtttcaggcatcaaaattctgagggcacaggacaagcagcagatcttaaaagcactcaagcagcaatcgatcaaatcaacgggaaactgaataggttaatcgagaaaacaaacgagaaattccatcaaatcgaaaaagaattctcagaagtagaagggagaattcaggacctcgagaaatatgttgaagacactaaaatagatctctggtcttacaacgcggagcttcttgttgccctggagaatcaacatacaattgatctaactgactcagaaatgaacaaactgtttgaaagaacaaggaagcaactgagggaaaatgctgaggacatgggcaatggttgcttcaaaatataccacaaatgtgacaatgcctgcatagggtcaatcagaaatggaacttatgaccatgatgtgtacaaagacgaagcattaaacaaccggttccagatcaaaggtgttgtgctgaagtcgggatacaaagattggatcctatggatttcttttgccatatcatgctttttgctttgtgttgttttgctggggttcatcatgtgggcctgccaaaaaggcaacattaggtgcaacatttgcatttga

SEQ ID NO: 31485 - RNA, 1701 nt, synthetic construct
  misc_feature 1..1701: note = hemagglutinin__InfluenzaA__ABG37197
  source 1..1701: mol_type = other RNA
atgaagactatcattgctttgagctacattttatgtcaggttttcgctcaaaaacttcccggaaatgacaacagcacagcaacgctgtgcctgggacaccatgcagtgccaaacggaacgctagtgaaaacaatcacgaatgatcaaattgaagtgactaatgctactgagctggttcagagttcctcaacaggtagaatatgcgacagtcctcaccgaatccttgatggaaaaaactgcacactgatagatgctctattgggagaccctcattgtgatggcttccaaaataaggaatgggacctttttgttgaacgcagcaaagcttacagcaactgttacccttatgatgtgccggattatgcctcccttaggtcactagttgcctcatcaggcaccctggagtttaccaatgaaggcttcaattggaatggagtcgctcaggatgggaaaagctatgcttgcaaaaggggatctgttaaaagtttctttagtagattgaattggttgcacaaattagaatacaaatatccagcactgaacgtgactatgccaaacaatgacaaatttgataaattgtacatttggggggttcaccacccgagcacggacagtgaccaaaccagcctatatgttcaagcatcagggagagtcacagtctctaccaaaagaagccaacaaactgtaatcccgaatatcgggtccagaccctgggtgaggggcatctccagtagaataagcatctattggacaatagtaaaaccgggagacatacttttgattaacagcacagggaatctaattgctcctcggggttacttcaaaatacgaaatgggaaaagctcaataatgaggtcagatgcacccattgacaactgcaattctgaatgcatcactccaaatggaagcattcccaatgacaaaccttttcaaaatgtaaacaggatcacatatggggcctgtcccagatatgttaagcaaaacactctgaaattggcaacagggatgcggaatgtaccagagaaacaaactagaggcatattcggcgcaatcgcaggtttcatagaaaatggttgggagggaatggtagacggttggtacggtttcaggcatcaaaattctgagggcacaggacaagcagcagatcttaaaagcactcaagcagcaatcgatcaaatcaacgggaaactgaataggttaatcgagaaaacgaacgagaaattccatcaaatcgaaaaagaattctcagaagtagaagggagaattcaggacctcgagaaatatgttgaagacactaaaatagatctctggtcttacaacgcggagcttcttgttgccctggagaatcaacatacaattgatctaactgactcagaaatgaacaaactgtttgaaagaacaaggaagcaactgagggaaaatgctgaggacatgggcaatggttgcttcaaaatataccacaaatgtgacaatgcctgcatagggtcaatcagaaatggaacttatgaccatgatgtatacagagacgaagcattaaacaaccggttccagatcaaaggtgttgagctgaagtcgggatacaaagattggatcctatggatttcttttgccatatcatgctttttgctttgtgttgttttgctggggttcatcatgtgggcctgccaaaaaggcaacattaggtgcaacatttgcatttga

SEQ ID NO: 31486 - RNA, 1701 nt, synthetic construct
  misc_feature 1..1701: note = hemagglutinin__InfluenzaA__ABG37208
  source 1..1701: mol_type = other RNA
atgaagactatcattgctttgagctacatttcctgtctggttttcgcccaaaaacttcccggaaatgacaacagcacagcaacgctgtgcctgggacatcatgcagtaccaaacggaacgctagtgaaaacaatcacgaatgatcagattgaagtgactaatgctactgagctggtccaaagttcctcaacaggtagaatatgcgacagtcctcaccgaatccttgatggaaaaaactgcacactgatagatgctctattgggagaccctcattgtgatggcttccaaaatgagaaatgggatctttttgttgaacgcagcaaagctttcagcaactgctacccttatgatgtgccggattatgcctcccttaggtcactagttgcctcatcaggcaccctggagtttatcaatgaaggcttcaattggactggagtcactcagagtgggggaagctatgcttgcaaaaggggatctgttaacagtttcttcagtagattgaattggttgtataagtcagaaagcaaatatccagcgctgaacgtgactatgccaaacaatggcaaatttgacaaattgtacatttggggggttcaccaccctagcacggacaaagaacaaaccaacctatatgttcgagcatcagggagagtcacagtctctaccaagagaagccagcaaactgtaatcccgaatatcgggcctagaccctgggtaaggggtctgtctagtagaataagtatctattggacaatagtaaaaccgggagacatactgttaattaatagcactgggaacctaattgctccccggggttacttcaaaatacgcactgggaaaagctcaataatgaggtcagatgcacctattggcacctgcagttctggatgcatcactccaaatggaagcattcccaatgacaaaccctttcaaaatgtgaacaagatcacatatggggcatgtcccaggtatgttaagcagaacactctgaagttggcaacagggatgcggaatgtacctgaaaaacaaactagaggcatattcggcgcaatagcaggtttcatagaaaatggttgggagggaatggtagacggttggtacggtttcaggcatcaaaattctgagggcacaggacaagcagcagatcttaaaagcactcaagcagcaatcgaccaaatcaacgggaaactgaataggttaatcgagaaaacgaacgagaaattccatcaaatcgaaaaggaattctcagaagtagaagggagaattcaggacctcgagaagtatgttgaagacactaaaatagatctctggtcttacaacgcggagcttcttgttgccctggagaaccaacatacaattgatatgactgactcagaaatgaacaaactgtttgaaaaaacaaggaagcaactgagggaaaatgctgaggacatgggcaatggttgcttcaaaatataccacaaatgtgacaatgcttgcatagggtcaatcagaaatggaacttatgaccatgatgtatacagagacgaagcattaaacaaccggtttcagatcaaaggtgttgagctgaagtcaggatacaaagactggatcctatggatttcctttgccatatcatgctttttgctctgtgttgttttgctggggttcataatgtgggcctgccaaaaaggcaacattaggtgcaacatttgcatttga

SEQ ID NO: 31487 - RNA, 1701 nt, synthetic construct
  misc_feature 1..1701: note = hemagglutinin__InfluenzaA__ABG37230
  source 1..1701: mol_type = other RNA
atgaagactatcattgctttgagctacattttatgtctggttttcgctcaaaaacttcccggaaatgacaacagcacagcaacgctgtgcctgggacaccatgcagtgccaaacggaacgctagtgaaaacaatcacgaatgatcaaattgaagtgactaatgctactgagctggttcagagttcctcaacaggtagaatatgcgacagtcctcaccgaatccttgatggaaaaaactgcacactgatagatgctctattgggagaccctcattgtgatggcttccaaaataaggaatgggacctttttgttgaacgcagcaaagcttacagcaattgttacccttatgatgtgccggattatgcctcccttaggtcactagttgcctcatcaggcaccctggagtttatcaatgaagacttcaattggactggagtcgctcaggatgggaaaagctatgcttgcaaaaggggatctgttaacagtttctttagtagattgaattggttgcaccaatcaaaatacaaatatccagagctgaacgtgactatgccaaacaatggcaaatttgacaaattgtacatttggggggttcaccacccgagcacggacagtgaccaaaccagcctatatgctcgagcatcagggagagtcacagtctctaccaaaagaagccaacaaactgtaatcccgaatatcgggtttagaccctgggtaaggggtctgtccagtagaataagcatctattggacaatagtaaaaccgggagacatacttttgattaatagcacagggaatctaattgctcctcggggttacttcaaaatacgaaatgggaaaagctcaataatgaggtcagatgcaccaattggcaactgcagttctgaatgcatcactccaaatggaagcattcccaatgacaaaccttttcaaaatgtaaacaggatcacatatggggcctgccccagatatgttaagcaaaacactctgaagttggcaacagggatgcggaatgtaccagagaaacaaactagaggcatattcggcgcaatcgcaggtttcatagaaaatggttgggagggaatggtagacggttggtacggtttcaggcatcaaaattctgagggcacaggacaagcagcagatcttaaaagcactcaagcagcaatcgaccaaatcaacgggaaactgaataggttaatcgagaaaacgaacgagaaattccatcaaatcgaaaaagaattctcagaagtagaagggagaattcaggaccttgagaaatatgttgaagacactaaaatagatctctggtcttacaacgcggggcttcttgttgccctggagaaccaacatacaattgatctaactgactcagaaatgaacaaactgtttgaaagaacaaggaagcaactgagggaaaatgctgaggacatgggcaatggttgcttcaaaatataccacaaatgtgacaatgcctgcatagggtcaatcagaaatggaacttatgaccatgatgtatacagagacgaagcattaaacaaccggttccagatcaaaggtgttgagctgaagtcaggatacaaagattggatcctatggatttcctttgccatatcatgctttttgctttgtgttgttttgctggggttcatcatgtgggcctgccaaaaaggcaacattaggtgcaacatttgcatttga

SEQ ID NO: 31488 - RNA, 1701 nt, synthetic construct
  misc_feature 1..1701: note = hemagglutinin__InfluenzaA__ABG37241
  source 1..1701: mol_type = other RNA
atgaagactatcattgctttgagctacattttatgtctggttttcgctcaaaaacttcccggaaatgacaacagcacagcaacgctgtgcctgggacaccatgcagtgccaaacggaacgctagtgaaaacaatcacgaatgatcaaattgaagtgactaatgctactgagctggttcagagttccccaacaggtagaatatgcgacagtcctcaccgaatccttgatggaaagaactgcacactgatagatgctctattgggagaccctcattgtgatggctttcaaaataaggaatgggacctttttgttgaacgcagcaaagcttacagcaactgttacccttatgatgtgccggattatgcctcccttaggtcactagttgcctcatcaggcaccctggaatttaccaacgaaaacttcaattggactggagtcgctcaggatgggaaaagctatgcttgcaaaaggggatctgttaacagtttctttagtagattgaattggttgcacaaattagaatacaaatatccagcgctgaacgtgactatgccaaacaatggcaaatttgacaaattgtacatttggggggttcaccacccgagcacggacagtgaccaaaccagcctatatgtccgagcatcagggaaagtcacagtctctaccaaaagaagccaacaaactgtaatcccggatatcgggtatagaccatgggtaaggggtctgtccagtagaataagcatctattggacaatagtaaaaccgggagacatacttttgattaatagcacagggaatctaattgctcctcggggttacttcaaaatacgaaatgggaaaagctcaataatgaggtcagatgcacccattggcaactgcagttctgaatgcatcactccaaatggaagcattcccaatgacaaaccttttcaaaatgtaaacaggatcacatatggggcctgccccagatatgttaagcaaaacactctgaaattggcaacagggatgcggaatgtaccagagaaacaaactagaggcatattcggcgcaatcgcaggtttcatagaaaatggttgggagggaatggtagacggttggtacggtttcaggcatcagaattctgagggcacaggacaagctgcagatcttaaaagcactcaagcagcaatcgaccaaatcaacgggaaactgaataggttagtcgagaaaacgaacgagaaattccatcaaatcgaaaaagaattctcagaagtagaagggagaattcaggacctcgagaaatatgttgaagacactaaaatagatctctggtcttacaatgcggagcttcttgttgctctggagaaccaacatacaattgatctaactgactcagaaatgaacaaactatttgaaagaacaaggaagcaactgagggaaaatgctgaggacatgggcaatggttgtttcaaaatataccacaaatgtgacaatgcctgcatagggtcaatcagaaatggaacttatgaccatgatgtatacagagacgaagcattaaacaaccggttccagatcaaaggtgttgagctgaagtcaggatacaaagattggatcctatggatttcctttgccatatcatgctttttgctttgtgttgttttgcttgggttcatcatgtgggcctgccaaaaaggcaacattaggtgcaacatttgcatttga

SEQ ID NO: 31489 - RNA, 1701 nt, synthetic construct
  misc_feature 1..1701: note = hemagglutinin__InfluenzaA__ABG37252
  source 1..1701: mol_type = other RNA
atgaagactatcattgctttgagctacattttatgtctggttttcgctcaaaaacttaccggaaatgacaacagcacagcaacgctgtgcctgggacaccatgcagtgccaaacggaacgctagtgaaaacaatcacgaatgatcaaattgaagtgactaatgctactgagctggttcagagttccccaacaggtagaatatgcgacagtcctcaccgaatccttgatggaaagaactgcacactgatagatgctctattgggagaccctcattgtgatggcttccaaaataaggaatgggacctttttgttgaacgcagcaaagcttacagcaactgttacccttatgatgtgccggattatgcctcccttaggtcactagttgcctcatcaggcaccctggagtttaccaacgaaaacttcaattggactggagtcgctcaggatgggaaaagctatgcttgcaaaaggggatctgttaacagtttctttagtagattgaattggttgcacaaattagaatacaaatatccagcgctgaacgtgactatgccaaacaatggcaaatttgacaaattgtacatttggggggttcaccacccgagcacggacagtgaccaaaccagcctatatgtccgagcatcagggaaagtcacagtctctaccaaaagaagccaacaaactgtaatcccggatatcgggtatagaccatgggtaaggggtctgtccagtagaataagcatctattggacaatagtaaaaccgggagacatacttttgattaatagcacagggaatctaattgctcctcggggttacttcaaaatacgaaatgggaaaagctcaataatgaggtcagatgcacccattggcaactgcagttctgaatgcatcactccaaatggaagcattcccaatgacaaaccttttcaaaatgtaaacaggatcacatatggggcctgccccagatatgttaagcaaaacactctgaaattggcaacagggatgcggaatgtaccagagaaacaaactagaggcatattcggcgcaatcgcaggtttcatagaaaatggttgggagggaatggtagacggttggtacggtttcaggcatcagaattctgagggcacaggacaagctgcagatcttaaaagcactcaagcagcaatcgaccaaatcaacgggaaactgaataggttagtcgagaaaacgaacgagaaattccatcaaatcgaaaaagaattctcagaagtagaagggagaattcaggacctcgagaaatatgttgaagacactaaaatagatctctggtcttacaatgcggagcttcttgttgctctggagaaccaacatacaattgatctaactgactcagaaatgaacaaactatttgaaagaacaaggaagcaactgagggaaaatgctgaggacatgggcaatggttgtttcaaaatataccacaaatgtgacaatgcctgcatagggtcaatcagaaatggaacttatgaccatgatgtatacagagacgaagcattaaacaaccggttccagatcaaaggtgttgagctgaagtcaggatacaaagattggatcctatggatttcctttgccatatcatgctttttgctttgtgttgttttgcttgggttcatcatgtgggcctgccaaaaaggcaacattaggtgcaacatttgcatttga

SEQ ID NO: 31490 - RNA, 1701 nt, synthetic construct
  misc_feature 1..1701: note = hemagglutinin__InfluenzaA__ABG37263
  source 1..1701: mol_type = other RNA
atgaagactatcattgctttgagctacattttatgtctggttttcgctcaaaaacttcccggaaatgacaacagcacagcaacgctgtgcctgggacaccatgcagtgccaaacggaacgctagtgaaaacaatcacgaatgatcaaattgaagtgactaatgctactgagctggttcagagttcctcaacaggtagaatatgcgacagtcctcaccgaatccttgatggaaaaaactgcacactgatagatgctctattgggagaccctcattgtgatggcttccaaaataaggaatgggacctttttgttgaacgcagcaaagcttacagcaactgttacccttatgatgtgccggattatgcctcccttaggtcactagttgcctcatcaggcaccctggagtttaccaaggaaggcttcaattggactggagtcgctcaggatgggaaaagctatgcttgcaaaaggggatctgttaacagtttctttagtagattgaattggttgcacaaattagaatacaaatatccagcactgaacgtgactatgccaaacaatgacaaatttgacaaattgtacatttggggggttcaccacccgagcacggacagtgaccaaaccagcctatatgttcaagcatcagggagagtcacagtctctaccaaaagaagccaacaaactgtaatcccgaatatcgggtctagaccctgggtaaggggtatctccagtagaataagcatctattggacaatagtaaaaccgggagacatacttttgattaacagcacagggaatctaattgctcctcggggttacttcaaaatacgaaatgggaaaagctcaataatgaggtcagatgcacccattggcaactgcaattctgaatgcatcactccaaatggaagcattcccaatgacaaaccttttcaaaatgtaaacaggatcacatatggggcctgtcccagatatgttaagcaaaacactctgaagttggcaacagggatgcggaatgtaccagagaaacaaactagaggcatattcggcgcaatcgcaggtttcatagaaaatggttgggagggaatggtagacggttggtacggtttcaggcatcaaaattctgagggcacaggacaagcagcagatcttaaaagcactcaagcagcaatcgaccaaatcaacgggaagctgaataggttaatcgagaaaacgaacgaaaaattccatcaaatcgaaaaagaattctcagaagtagaagggagaattcaggacctcgagaaatatgttgaagacactaaaatagatctctggtcttacaacgcggagcttcttgttgccctggagaaccaacatacaattgatctaactgactcagaaatgaacaaactgtttgaaagaacaaggaagcaactgagggaaaatgctgaggacatgggcaatggttgcttcaaaatataccacaaatgtgacaatacctgcatagggtcaatcagaaatggaacttatgaccatgatgtatacagagacgaagcattaaacaaccggttccagatcaaaggtgttgagctgaagtcaggatacaaagattggatcctatggatttcctttgccatatcatgctttttgctttgtgttgttttgctggggttcatcatgtgggcctgccaaaaaggcaacattaggtgcaacatttgcatttga

SEQ ID NO: 31491 - RNA, 1701 nt, synthetic construct
  misc_feature 1..1701: note = hemagglutinin__InfluenzaA__ABG37274
  source 1..1701: mol_type = other RNA
atgaagactatcattgctttgagctacattttatgtctggttttcgctcaaaaacttcccggaaatgacaacagcacagcaacgctgtgcctgggacaccatgcagtgccaaacggaacgctagtgaaaacaatcacgaatgatcaaattgaagtgactaatgctactgagctggttcagagttccccaacaggtagaatatgcgacagtcctcaccgaatccttgatggaaagaactgcacactgatagatgctctattgggagaccctcattgtgatggcttccaaaataaggaatgggacctttttgttgaacgcagcaaagcttacagcaactgttacccttatgatgtgccggattatgcctcccttaggtcactagttgcctcatcaggcaccctggagtttaccaacgaaaacttcaattggactggagtcgctcaggatgggaaaagctatgcttgcaaaaggggatctgttaacagtttctttagtagattgaattggttgcacaaattagaatacaaatatccagcgctgaacgtgactatgccaaacaatggcaaatttgacaaattgtacatttggggggttcaccacccgagcacggacagtgaccaaatcagcctatatgtccgagcatcagggaaagtcacagtctctaccaaaagaagccaacaaactgtaatcccggatatcgggtatagaccatgggtaaggggtctgtccagtagaataagcatctattggacaatagtaaaaccgggagacatacttttgattagtagcacagggaatctaattgctcctcggggttacttcaaaatacgaaatgggaaaagctcaataatgaggtcagatgcacccattggcaactgcagttctgaatgcatcactccaaatggaagcattcccaatgacaaaccttttcaaaatgtaaacaggatcacatatggggcctgccccagatatgttaagcaaaacactctgaaattggcaacagggatgcggaatgtaccagagaaacaaactagaggcatattcggcgcaatcgcaggtttcatagaaaatggttgggagggaatggtagacggttggtacggtttcaggcatcagaattctgagggcacaggacaagctgcagatcttaaaagcactcaagcagcaatcgaccaaatcaacgggaaactgaataggttagtcgagaaaacgaacgagaaattccatcaaatcgaaaaagaattctcagaagtagaagggagaattcaggacctcgagaaatatgttgaagacactaaaatagatctctggtcttacaatgcggagcttcttgttgctctggagaaccaacatacaattgatctaactgactcagaaatgaacaaactatttgaaagaacaaggaagcaactgagggaaaatgctgaggacatgggcaatggttgtttcaaaatataccacaaatgtgacaatgcctgcatagggtcaatcagaaatggaacttatgaccatgatgtatacagagacgaagcattaaacaaccggttccagatcaaaggtgttgagctgaagtcaggatacaaagattggatcctatggatttcctttgccatatcatgctttttgctttgtgttgttttgcttgggttcatcatgtgggcctgccaaaaaggcaacattaggtgcaacatttgcatttga

SEQ ID NO: 31492 - RNA, 1701 nt, synthetic construct
  misc_feature 1..1701: note = hemagglutinin__InfluenzaA__ABG37285
  source 1..1701: mol_type = other RNA
atgaagactatcattgctttgagctacattttatgtctggttttcgctcaaaaacttcccggaaatgacaacagcacagcaacgctgtgcctgggacaccatgcagtgccaaacggaacgctagtgaaaacaatcacgaatgatcaaattgaagtgactaatgctactgagctggttcagagttccccaacaggtagaatatgcgacagtcctcaccgaatccttgatggaaagaactgcacactgatagatgctctattgggagaccctcattgtgatggcttccaaaataaggaatgggacctttttgttgaacgcagcaaagcttacagcaactgttacccttatgatgtgccggattatgcctcccttaggtcactagttgcctcatcaggcaccctggagtttaccaacgaaaacttcaattggactggagtcgctcaggatgggaaaagctatgcttgcaaaaggggatctgttaacagtttctttagtagattgaattggttgcacaaattagactacaaatatccagcgctgaacgtgactatgccaaacaatggcaaatttgacaaattgtacatttggggggttcaccacccgagcacggacagtgaccaaaccagcctatatgtccgagcatcagggaaagtcacagtctctaccaaaagaagccaacaaactgtaatcccggatatcgggtatagaccatgggtaaggggtctgtccagtagaataagcatctattggacaatagtaaaaccgggagacatacttttgattaatagcacagggaatctaattgctcctcggggttacttcaaaatacgaaatgggaaaagctcaataatgaggtcagatgcacccattggcaactgcagttctgaatgcatcactccaaatggaagcattcccaatgacaaaccttttcaaaatgtaaacaggatcacatatggggcctgccccagatatgttaagcaaaacactctgaaattggcaacagggatgcggaatgtaccagagaaacaaactagaggcatattcggcgcaatcgcaggtttcatagaaaatggttgggagggaatggtagacggttggtacggtttcaggcatcagaattctgagggcacaggacaagctgcagatcttaaaagcactcaagcagcaatcgaccaaatcaacgggaaactgaataggttagtcgagaaaacgaacgagaaattccatcaaatcgaaaaagaattctcagaagtagaagggagaattcaggacctcgagaaatatgttgaagacactaaaatagatctctggtcttacaatgcggagcttcttgttgctctggagaaccaacatacaattgatctaactgactcagaaatgaacaaactatttgaaagaacaaggaagcaactgagggaaaatgctgaggacatgggcaatggttgtttcaaaatataccacaaatgtgacaatgcctgcatagggtcaatcagaaatggaacttatgaccatgatgtatacagagacgaagcattaaacaaccggttccagatcaaaggtgttgagctgaagtcaggatacaaagattggatcctatggatttcctttgccatatcatgctttttgctttgttttgttttgcttgggttcatcatgtgggcctgccaaaaaggcaacattaggtgcaacatttgcatttga

SEQ ID NO: 31493 - RNA, 1701 nt, synthetic construct
  misc_feature 1..1701: note = hemagglutinin__InfluenzaA__ABG37296
  source 1..1701: mol_type = other RNA
atgaagactatcattgctttgagctacattttatgtctggttttcgctcaaaaacttcccggaaatgacaacagcacagcaacgctgtgcctgggacaccatgcagtgccaaacggaacgctagtgaaaacaatcacgaatgatcaaattgaagtgactaatgctactgagctggttcagagttcctcaacaggtagaatatgcgacagtcctcaccgaatccttgatggaaaaaactgcacactgatagatgctctattgggagaccctcattgtgatggcttccaaaataaggaatgggacctttttgttgaacgcagcaaagcttacagcaactgttacccttatgatgtgccggattatgcctcccttaggtcactagttgcctcatcaggcaccctggagtttaccaaggaaggcttcaattggactggagtcgctcaggatgggaaaagctatgcttgcaaaaggggatctgttaacagtttctttagtagattgaattggttgcacaaattagaatacaaatatccagcactgaacgtgactatgccaaacaatgacaaatttgacaaattgtacatttggggggttcaccacccgagcacggacagtgaccaaaccagcctatatgttcaagcatcagggagagtcacagtctctaccaaaagaagccaacaaactgtaatcccgaatatcgggtctagaccctgggtaaggggtatctccagtagaataagcatctattggacaatagtaaaaccgggagacatacttttgattaacagcacagggaatctaattgctcctcggggttacttcaaaatacgaaatgggaaaagctccataatgaggtcagatgcacccattggcaactgcaattctgaatgcatcactccaaatggaagcattcccaatgacaaaccttttcaaaatgtaaacaggatcacatatggggcctgtcccagatatgttaagcaaaacactctgaagttggcaacagggatgcggaatgtaccagagaaacaaactagaggcatattcggcgcaatcgcaggtttcatagaaaatggttgggagggaatggtagacggttggtacggtttcaggcatcaaaattctgagggcacaggacaagcagcagatcttaaaagcactcaagcagcaatcgaccaaatcaacgggaaactgaataggttaattgagaaaacgaacgagaaattccatcaaatcgaaaaagaattctcagaagtagaagggagaattcaggacctcgagaaatatgttgaagacactaaaatagatctctggtcttacaacgcggagcttcttgttgccctggagaaccaacatacaattgatctaactgactcagaaatgaacaaactgtttgaaagaacaaggaagcaactgagggaaaatgctgaggacatgggcaatggttgcttcaaaatataccacaaatgtgacaatgcctgcatagggtcaatcagaaatggaacttatgaccatgatgtatacagagacgaagcattaaacaaccggttccagatcaaaggtgttgagctgaagtcagggtacaaagattggatcctatggatttcctttgccatatcatgctttttgctttgtgttgttttgctggggttcatcatgtgggcctgccaaaaaggcaacattaggtgcaacatttgcatttga

SEQ ID NO: 31494 - RNA, 1701 nt, synthetic construct
  misc_feature 1..1701: note = hemagglutinin__InfluenzaA__ABG37307
  source 1..1701: mol_type = other RNA
atgaagactatcattgctttgagctacattttatgtctggttttcgctcaaaaacttcccggaaatgacaacagcacagcaacgctgtgcctgggacaccatgcagtgccaaacggaacgctagtgaaaacaatcacgaatgatcaaattgaagtgactaatgctactgagctggttcagagttccccaacaggtagaatatgcgacagtcctcaccgaatccttgatggaaagaactgcacactgatagatgctctattgggagaccctcattgtgatggcttccaaaataaggaatgggacctttttgttgaacgcagcaaagcttacagcaactgttacccttatgatgtgccggattatgcctcccttaggtcactagttgcctcatcaggcacccttgagtttaccaacgaaaacttcaattggactggagtcgctcaggatgggaaaagctatgcttgcaaaaggggatctgttaacagtttctttagtagattgaattggttgcacaaattagaatacaaatatccagcgctgaacgtgactatgccaaacaatggcaaatttgacaaattgtacatttggggggttcaccacccgagcacggacagtgaccaaaccagcctatatgtccgagcatcagggaaagtcacagtctctaccaaaagaagccaacaaactgtaatcccggatatcgggtatagaccatgggtaaggggtctgtccagtagaataagcatctattggacaatagtaaaaccgggagacatacttttgattaatagcacagggaatctaattgctcctcggggttacttcaaaatacgaaatgggaaaagctcaataatgaggtcagatgcacccattggcaactgcagttctgaatgcatcactccaaatggaagcattcccaatgacaaaccttttcaaaatgtaaacaggatcacatatggggcctgccccagatatgttaagcaaaacactctgaaattggcaacagggatgcggaatgtaccagagaaacaaactagaggcatattcggcgcaatcgcaggtttcatagaaaatggttgggagggaatggtagacggttggtacggtttcaggcatcagaattctgagggcacaggacaagctgcagatcttaaaagcactcaagcagcaatcgaccaaatcaacgggaaactgaataggttagtcgagaaaacgaacgagaaattccatcaaatcgaaaaagaattctcagaagtagaagggagaattcaggacctcgagaaatatgttgaagacactaaaatagatctctggtcttacaatgcggagcttcttgttgctctggagaaccaacatacaattgatctaactgactcagaaatgaacaaactatttgaaagaacaaggaagcaactgagggaaaatgctgaggacatgggcaatggttgtttcaaaatataccacaaatgtgacaatgcctgcatagggtcaatcagaaatggaacttatgaccatgatgtatacagagacgaagcattaaacaaccggttccagatcaaaggtgttgagctgaagtcaggatacaaagattggatcctgtggatttcctttgccatatcatgctttttgctttgtgttgttttgcttgggttcatcatgtgggcctgccaaaaaggcaacattaggtgcaacatttgcatttga

SEQ ID NO: 31495 - RNA, 1701 nt, synthetic construct
  misc_feature 1..1701: note = hemagglutinin__InfluenzaA__ABG37318
  source 1..1701: mol_type = other RNA
atgaagactatcattgctttgagctacattttatgtctggttttcgctcaaaaacttcccggaaatgacaacagcacagcaacgctgtgcctgggacaccatgcagtgccaaacggaacgctagtgaaaacaatcacgaatgatcaaattgaagtgactaatgctactgagctggttcagagttcctcaacaggtagaatatgcgacagtcctcaccgaatccttgatggaaaaaactgcacactgatagatgctctattgggagaccctcattgtgatggcttccaaaataaggaatgggacctttttgttgaacgcagcaaagcttacagcaactgttacccttatgatgtgccggattatgcctcccttaggtcactagttgcctcatcaggcaccctggagtttaccaaggaaggcttcaattggactggagtcgctcaggatgggaaaagctatgcttgcaaaaggggatctgttaacagtttctttagtagattgaattggttgcacaaattagaatacaaatatccagcactgaacgtgactatgccaaacaatgacaaatttgacaaattgtacatttggggggttcaccacccgagcacggacagtgaccaaaccagcctatatgttcaagcatcagggagagtcacagtctctaccaaaagaagccaacaaactgtaatcccgaatatcgggtctagaccctgggtaaggggtatctccagtagaataagcatctattggacaatagtaaaaccgggagacatacttttgattaacagcacagggaatctaattgctcctcggggttacttcaaaatacgaaatgggaaaagctcaataatgaggtcagatgcacccattggcaactgcaattctgaatgcatcactccaaatggaagcattcccaatgacaaaccttttcaaaatgtaaacaggatcacatatggggcctgtcccagatatgttaagcaaaacactctgaagttggcaacagggatgcggaatgtaccagagaaacaaactagaggcatattcggcgcaatcgcaggtttcatagaaaatggttgggagggaatggtagacggttggtacggtttcaggcatcaaaattctgagggcacaggacaagcagcagatcttaaaagcactcaagcagcaatcgaccaaatcaacgggaagctgaataggttaatcgagaaaacgaacgaaaaattccatcaaatcgaaaaagaattctcagaagtagaagggagaattcaggacctcgagaaatatgttgaagacactaaaatagatctctggtcttacaacgcggagcttcttgttgccctggagaaccaacatacaattgatctaactgactcagaaatgaacaaactgtttgaaagaacaaggaagcaactgagggaaaatgctgaggacatgggcaatggttgcttcaaaatataccacaaatgtgacaatgcctgcatagggtcaatcagaaatggaacttatgaccatgatgtatacagagacgaagcattaaacaaccggttccagatcaaaggtgttgagctgaagtcaggatacaaagattggatcctatggatttcctttgccatatcatgctttttgctttgtgttgttttgctggggttcatcatgtgggcctgccaaaaaggcaacattaggtgcaacatttgcatttga

SEQ ID NO: 31496 - RNA, 1701 nt, synthetic construct
  misc_feature 1..1701: note = hemagglutinin__InfluenzaA__ABG37329
  source 1..1701: mol_type = other RNA
atgaagactatcattgctttgagctacattttatgtctggttttcgctcaaaaacttcccgaaaatgacaacagcacagcaacgctgtgcctgggacaccatgcagtgccaaacggaacgctagttaaaacaatcacgaatgatcaaattgaagtgactaatgctactgagctggttcagagttccccaacaggtagaatatgcgacagtcctcaccgaatccttgatggaaagaactgcacactgatagatgctctattgggagaccctcattgtgatggcttccaaaataaggaatgggacctttttgttgaacgcagcaaagcttacagcaactgttacccttatgatgtgccggattatgcctcccttaggtcactagttgcctcatcaggcaccctggagtttaccaacgaaaacttcaattggactggagtcgctcaggatgggaaaagctatgcttgcaaaaggggatctgttaacagtttctttagtagattgaattggttgcacaaattagaatacaaatatccagcgctgaacgtgactatgccaaacaatggcaaatttgacaaattgtacatttggggggttcaccacccgagcacggacagtgaccaaaccagcctatatgtccgagcatcagggaaagtcacagtctctaccaaaagaagccaacaaactgtaatcccggatatcgggtatagaccatgggtaaggggtctgtccagtagaataagcatctattggacaatagtaaaaccgggagacatacttttgattaatagcacagggaatctaattgctcctcggggttacttcaaaatacgaaatgggaaaagctcaataatgaggtcagatgcacccattggcaactgcagttctgaatgcatcactccaaatggaagcattcccaatgacaaaccttttcaaaatgtaaacaggatcacatatggggcctgccccagatatgttaagcaaaacactctgaaattggcaacagggatgcggaatgtaccagagaaacaaactagaggcatattcggcgcaatcgcaggtttcatagaaaatggttgggagggaatggtagacggttggtacggtttcaggcatcagaattctgagggcacaggacaagctgcagatcttaaaagcactcaagcagcaatcgaccaaatcaacgggaaactgaataggttagtcgagaaaacgaacgagaaattccatcaaatcgaaaaagaattctcagaagtagaagggagaattcaggacctcgagaaatatgttgaagacactaaaatagatctctggtcttacaatgcggagcttcttgttgctctggagaaccaacatacaattgatctaactgactcagaaatgaacaaactatttgaaagaacaaggaagcaactgagggaaaatgctgaggacatgggcaatggttgtttcaaaatataccacaaatgtgacaatgcctgcatagggtcaatcagaaatggaacttatgaccatgatgtatacagagacgaagcattaaacaaccggttccagatcaaaggtgttgagctgaagtcaggatacaaagattggatcctatggatttcctttgccatatcatgctttttgctttgtgttgttttgcttgggttcatcatgtgggcctgccaaaaaggcaacattaggtgcaacatttgcatttga

SEQ ID NO: 31497 - RNA, 1701 nt, synthetic construct
  misc_feature 1..1701: note = hemagglutinin__InfluenzaA__ABG37340
  source 1..1701: mol_type = other RNA
atgaagactatcattgctttgagctacattttatgtctggttttcgctcaaaaacttcccggaaatgacaacagcacagcaacgctgtgcctgggacaccatgcagtgccaaacggaacgctagtgaaaacaatcacgaatgatcaaattgaagtgactaatgctactgagctggttcagagtttcccaacaggtagaatatgcgacagtcctcaccgaatccttgatggaaagaactgcacactgatagatgctctattgggagaccctcattgtgatggcttccaaaataaggaatgggacctttttgttgaacgcagcaaagcttacagcaactgttacccttatgatgtgccggattatgcctcccttaggtcactagttgcctcatcaggcaccctggagtttaccaacgaaaacttcaattggactggagtcgctcaggatgggaaaagctattcttgcaaaaggggatctgttaacagtttctttagtagattgaattggttgcacaaattagaatacaaatatccagcgctgaacgtgactatgccaaacaatggcaaatttgacaaattgtacatttggggggttcaccacccgagcacggacagtgaccaaaccagcctatatgtccgagcatcagggaaagtcacagtctctaccaaaagaagccaacaaactgtaatcccggatatcgggtatagaccatgggtaaggggtctgtccagtagaataagcatctattggacaatagtaaaaccgggagacatacttttgattaatagcacagggaatctaattgctcctcggggttacttcaaaatacgaaatgggaaaagctcaataatgaggtcagatgcacccattggcaactgcagttctgaatgcatcactccaaatggaagcattcccaatgacaaaccttttcaaaatgtaaacaggatcacatatggggcctgccccagatatgttaagcaaaacactctgaaattggcaacagggatgcggaatgtaccagagaaacaaactagaggcatattcggcgcaatcgcaggtttcatagaaaatggttgggagggaatggtagacggttggtacggtttcaggcatcagaattctgagggcacaggacaagctgcagatcttaaaagcactcaagcagcaatcgaccaaatcaacgggaaactgaataggttagtcgagaaaacgaacgagaaattccatcaaatcgaaaaagaattctcagaagtagaagggagaattcaggacctcgagaaatatgttgaagacactaaaatagatctctggtcttacaatgcggagcttcttgttgctctggagaaccaacatacaattgatctaactgactcagaaatgaacaaactatttgaaagaacaaggaagcaactgagggaaaatgctgaggacatgggcaatggttgtttcaaaatataccacaaatgtgacaatgcctgcatagggtcaatcagaaatggaacttatgaccatgatgtatacagagacgaagcattaaacaaccggttccagatcaaaggtgttgagctgaagtcaggatacaaagattggatcctatggatttcctttgccatatcatgctttttgctttgtgttgttttgcttgggttcatcatgtgggcctgccaaaaaggcaacattaggtgcaacatttgcatttga

SEQ ID NO: 31498 - RNA, 1701 nt, synthetic construct
  misc_feature 1..1701: note = hemagglutinin__InfluenzaA__ABG37351
  source 1..1701: mol_type = other RNA
atgaagactatcattgctttgagctacattttatgtctggttttcgctcaaaaacttcccggaaatgacaacagcacagcaacgctgtgcctgggacaccatgcggtgccaaacggaacgctagtgaaaacaatcacgaatgatcaaattgaagtgactaatgctactgagctggttcagagttcctcaacaggtagaatatgcgacagtcctcaccgaatccttgatggaaaaaactgcacactgatagatgctctattgggagaccctcattgtgatggcttccaaaataaggaatgggacctttttgttgaacgcagcaaagcttacagcaactgttacccttatgatgtgccggattatgcctcccttaggtcactagttgcctcatcaggcaccctggagtttatcaatgaagacttcaattggactggagtcgctcaggatgggaaaagctatgcttgcaaaaggggatctgttaacagtttctttagtagattgaattggttgcacaaattagaatacaaatatccagcgctgaacgtgactatgccaaacaatggcaaatttgacaaattgtacatttggggggttcaccacccgagcacggacagtgaccaaaccagcctatatgttcgagcatcagggagagtcacagtctctaccaaaagaagccaacaaactgtaatcccgaatatcgggtttagaccctgggtaaggggtctgtccagtagaataagcatctattggacaatagtaaaaccgggagacatacttttgattgatagcacagggaatctaattgctcctcggggttacttcaaaatacggaatgggaaaagctcaataatgaggtcagatgcacccattggcaactgcagttctgaatgcatcactccaaatggaagcattcccaatgacaaaccttttcaaaatgtaaacaggatcacatatggggcctgccccagatatgtaaagcaaaacactctgaagttggcaacagggatgcggaatgtaccagagaaacaaactagaggcatattcggcgcaatcgcaggtttcatagaaaatggttgggagggaatggtagacggttggtacggtttcaggcatcaaaattctgagggcacaggacaagcagcagatcttaaaagcactcaagcagcaatcgaccaaatcaacgggaaactgaataggttaatcgagaaaacgaacgagaaattccatcaaatcgaaaaagaattctcagaagtagaagggagaattcaggacctcgagaaatatgttgaagacactaaaatagatctctggtcttacaacgcggggcttcttgttgccctggagaaccaacatacaattgatctaactgactcagaaatgaacaaactgtttgaaagaacaaggaagcaactgagggaaaatgctgaggacatgggcaatggttgcttcaaaatataccacaaatgtgacaatgcctgcatagggtcaatcagaaatggaacttatgaccatgatgtatacagagacgaagcattaaacaaccggttccagatcaaaggtgttgagctgaagtcaggatacaaagattggatcctatggatttcctttgccatatcatgctttttgctttgtgttgttttgctggggttcatcatgtgggcctgccaaaaaggcaacattaggtgcaacatttgcatttga

SEQ ID NO: 31499 - RNA, 1698 nt, synthetic construct
  misc_feature 1..1698: note = hemagglutinin__InfluenzaA__ABG37362
  source 1..1698: mol_type = other RNA
atgaaagtaaaactactggtcctgttatgtacatttacagctacatatgcagacacaatatgtatagggtaccatgccaacaactcaaccgacactgttgacacagtacttgagaagaatgtgacagtgacacactctgtcaacctacttgaggacagtcacaatggaaaactatgtctactaaaaggaatagccccactacaattgggtaattgcagcgttgccggatggatcttaggaaacccagaatgcgaattactgatttccaaggaatcatggtcctacattgtagaaacaccaaatcctgagaatggaacatgttacccagggtatttcgccgactatgaggaactgagggagcaattgagttcagtatcttcatttgagagattcgaaatattccccaaagaaagctcatggcccaaccacaccgtaaccggagtatcggcatcatgctcccataatgggaaaagcagtttttaccgaaatttgctatggctgacggggaagaatggtttgtacccaaacctgagcaagtcctatgcaaacaacaaagagaaagaagtccttgtactatggggtgttcatcacccgcctaacatagggaaccaaagggccctctatcatacagaaaatgcttatgtctctgtagtgtcttcacattatagcagaagattcaccccagaaatagccaaaagacccaaagtaagagatcaggaaggaagaatcaactactactggactctgctggaacccggggatacaataatatttgaggcaaatggaaatttaatagcgccatggtatgctttcgcactgagtagaggctttggatcaggaatcatcacctcaaatgcaccaatggatgaatgtgatgcgaagtgtcaaacacctcagggagctataaacagcagtcttcctttccagaatgtacacccagtcacaataggagagtgtccaaagtatgtcaggagtgcaaaattaaggatggttacaggactaaggaacatcccatccattcaatccagaggtttgtttggagccattgccggtttcattgaaggggggtggactggaatggtagatgggtggtatggttatcatcatcagaatgagcaaggatctggctatgctgcagatcaaaaaagcacacaaaatgccattaacgggattacaaacaaggtgaattctgtaattgagaaaatgaacactcaattcacagctgtgggcaaagaattcaacaaattggaaagaaggatggaaaacttaaataaaaaagttgatgatgggtttctagacatttggacatataatgcagaattgttggttctactggaaaatgaaaggactttggatttccatgactccaatgtgaagaatctgtatgagaaagtaaaaagccaattaaagaataatgccaaagaaataggaaacgggtgttttgaattctatcacaagtgtaacaatgaatgcatggagagtgtgaaaaatggaacttatgactatccaaaatattccgaagaatcaaagttaaacagggagaaaattgatggagtgaaattggaatcaatgggagtctatcagattctggcgatctactcaactgtcgccagttccctggttcttttggtctccctgggggcaatcagcttctggatgtgttccaatgggtctttgcagtgtagaatatgcatctga

SEQ ID NO: 31500 - RNA, 1698 nt, synthetic construct; identical to SEQ ID NO: 31304
  misc_feature 1..1698: note = hemagglutinin__InfluenzaA__ABG37384
  source 1..1698: mol_type = other RNA

SEQ ID NO: 31501 - RNA, 1698 nt, synthetic construct
  misc_feature 1..1698: note = hemagglutinin__InfluenzaA__ABG37395
  source 1..1698: mol_type = other RNA
atgaaagcaaaactactggtcctgttatgtacatttacagctacatacgcagacacaatatgtataggctaccatgccaacaactcaaccgacactgttgacacagtacttgagaagaatgtgacagtgacacactctgtcaacctacttgaggacagtcacaatggaaaactatgtctactaaaaggaatagccccactacaattgggtaattgcagcgttgccggatggatcttaggaaacccagaatgcgaattactgatttccaaggaatcatggtcctacattgtagaaacaccaaatcccgagaatggaacatgttacccagggtatttcgccgactatgaggaactgagggagcaattgagttcagtatcttcatttgagagattcgaaatattccccaaaggaagctcatggcccaaccacaccgtgaccggagtatcagcatcatgctcccataatgggaaaagcagtttttacagaaatttgctatggctgacggggaagaatggtttgtacccaaacctgagcatgtcctatgtaaacaacaaagagaaagaagtccttgtgctatggggtgttcatcacccacctaacatagggaaccaaagggccctctaccatacagaaaatgcttatgtctctgtagtgtcttcacattatagcagaagattcaccccagaaatagccaaaagacccaaagtaagagatcaggaaggaagaatcaactactactggactctgctggaacccggggacacaataatatttgaggcaaatggaaatctaatagcgccatggtatgctttcgcactgagtagaggctttggatcaggaatcatcacctcaaatgcaccaatgggtgaatgtgatgcgaagtgtcaaacacctcagggagctataaacagtagtcttcctttccagaatgtacacccagttacaataggagagtgtccaaagtatgtcaggagtgcaaaattaaggatggttacaggactaaggaacatcccatccattcaatccagaggtttgtttggagccattgccggtttcattgaaggggggtggactggaatggtagatgggtggtatggttatcatcatcagaatgagcaaggatctggctatgctgcagatcaaaaaagcacacaaaatgccattaacgggattacaaacaaggtgaattctgtaattgagaaaatgaacactcaattcacagctgtgggcaaagaattcaacaaattagaaagaaggatggaaaacttaaataagaaagttgatgatgggtttctagacatttggacatataatgcagaattgttggttctactggaaaatgaaaggactttggatttccatgactccaatgtgaagaatctgtatgagaaagtaaaaagccaattaaagaataatgccaaagaaataggaaacgggtgttttgaattctatcacaagtgtaacaatgaatgcatggaaagtgtgaaaaatggaacttatgactatccaaaatattccgaagaatcaaagttaaacagggagaaaattgatggagtaaaattggaatcaatgggagtctatcagattctggcgatctactcaactgtcgccagttccctggttcttttggtctccctgggggcaatcagcttctggatgtgttccaatgggtctttgcagtgtagaatatgcatctga

SEQ ID NO: 31502 - RNA, 1701 nt, synthetic construct; identical to SEQ ID NO: 31282
  misc_feature 1..1701: note = hemagglutinin__InfluenzaA__ABG37406
  source 1..1701: mol_type = other RNA

SEQ ID NO: 31503 - RNA, 1701 nt, synthetic construct
  misc_feature 1..1701: note = hemagglutinin__InfluenzaA__ABG37428
  source 1..1701: mol_type = other RNA
atgaagactatcattgctttgagctacattttatgcctggttttcgctcaaaaacttcccggaaatgacaacagcacggcaacgctgtgtctggggcatcatgcagtgccaaacggaacgctagtgaaaacaatcacgaatgaccaaattgaagtaactaatgctactgagctggttcagagttcctcaacaggtagaatatgcgacagtcctcaccaaatccttgatggagaaaactgcacactaatagatgctctattgggagaccctcattgtgatggcttccaaaataaggaatgggacctttttgttgaacgcagcaaagcctacagcaactgttacccttatgatgtgccggattatgtctcccttaggtcactagttgcctcatcaggcacgctggagtttaacaatgaaagcttcaattggactggagtcgctcagaatggaacaagctctgcttgcaaaaggagatctgataaaagtttctttagtagattgaattggttgcaccaattaaaatacaaatatccagcactgaacgtgactatgccaaacaatgaaaaatttgacaaattgtacatttggggggttcaccacccgggtacagacagtgaccaaatcagcctatatgctcaagcatcggggagagtcacagtctctaccaaaagaagccaacaaactgtaatcccgaatatcggatctagaccctgggtgaggggtgtctccagcagaataagcatctattggacaatagtaaaaccgggagacatacttttgattaacagcacagggaatctaattgctcctcggggttacttcaaaatacgaagtgggaaaagctcaataatgaggtcagatgcacccattggcaaatgcaattctgaatgcatcactccaaatggaagcattcccaatgacaaaccatttcaaaatgtaaacaggatcacatatggggcctgtcccagatatgttaagcaaaacactctgaaattggcaacagggatgcggaatgtgccagagaaacaaactagaggcatattcggtgcaatcgcgggcttcatagaaaatggttgggagggaatgatggacggttggtacggtttcaggcatcaaaattctgagggcacagggcaagcagcagatcttaaaagcactcaagcagcaatcaaccaaatcaacgggaaactgaataggttaatcgagaaaacgaacgagaaatcccatcaaattgaaaaagaattctcagaagtagaagggagaattcaggacctcgagaaatatgttgaggacactaaaatagatctctggtcgtacaatgcggagcttcttgttgccctggagaaccaacatacaattgatctaactgactcagaaatgaacaaactgtttgaaagaacaaagaagcaactgagggaaaatgctgaggatatgggcaatggttgtttcaaaatataccacaaatgtgacaatgcctgcatagggtcaatcagaaatggaacttatgaccatgatgtatacagagacgaagcattgaacaaccggttccagatcaaaggtgttgagctgaagtcaggatacaaagattgggtcctatggatttcctttgccatatcatgttttttgctttgtattgttttgctggggttcatcatgtgggcctgccaaaaaggcaacattaggtgcaacatttgcatttga

SEQ ID NO: 31504 - RNA, 1701 nt, synthetic construct; identical to SEQ ID NO: 31066
  misc_feature 1..1701: note = hemagglutinin__InfluenzaA__ABG37439
  source 1..1701: mol_type = other RNA

SEQ ID NO: 31505 - RNA, 1701 nt, synthetic construct
  misc_feature 1..1701: note = hemagglutinin__InfluenzaA__ABG37461
  source 1..1701: mol_type = other RNA
atgaagactatcattgctttgagctacattttatgcctggttttcgctcaaaaacttcccggaaatgacaacagcacggcaacgctgtgtctggggcatcatgcagtgccaaacggaacgctagtgaaaacaatcacgaatgaccaaattgaagtaactaatgctactgagctggttcagagttcctcaacaggtagaatatgcgacagtcctcaccaaatccttgatggagaaaactgcacactaatagatgctctattgggagaccctcattgtgatggcttccaaaataaggaatgggacctttttgttgaacgcagcaaagcctacagcaactgttacccttatgatgtgccggattatgtctcccttaggtcactagttgcctcatcaggcacgctggagtttaacaatgaaagcttcaattggactggagtcgctcagaatggaacaagctctgcttgcaaaaggagatctgataaaagtttctttagtaaattgaattggttgcaccaattaaaatataaatatccagcactgaacgtgactatgccaaacaatgaaaaatttgacaaattgtacatttggggggttcaccacccgggtacagacagtgaccaaatcagcctatatgctcaagcatcagggagagtcacagtctctaccaaaagaagccaacaaactgtaatcccgaatatcggatctagaccctgggtaaggggtgtctccagcagaataagcatctattggacaatagtaaaaccgggagacatacttttgattaacagcacagggaatctaattgctcctcggggttacttcaaaatacgaagtgggaaaagctcaataatgaggtcagatgcacccattggcaaatgcaattctgaatgcatcactccaaatggaagcattcccaatgacaaaccatttcaaaatgtaaacaggatcacatatggggcctgtcccagatatgttaagcaaaacactctgaaattggcaacagggatgcggaatgtgccagagaaacaaactagaggcatattcggtgcaatcgcgggcttcatagaaaatggttgggagggaatgatggacggttggtacggtttcaggcatcaaaattctgagggcacagggcaagcagcagatcttaaaagcactcaagcagcaatcaaccaaatcaacgggaagctgaataggttaatcgagaaaacgaatgagaaattccatcaaattgaaaaagaattctcagaagtagaagggagaattcaggacctcgagaaatatgttgaggacactaaaatagatctctggtcgtacaatgcggagcttcttgttgccctggagaaccaacatacaattgatctaactgactcagaaatgaacaaactgtttgaaagaacaaagaagcaactgagggaaaatgctgaggatatgggcaatggttgtttcaaaatataccacaaatgtgacaatgcctgcatagggtcaatcagaaatggaacttatgaccatgatgtatacagagacgaagcattgaacaaccggttccagatcaaaggtgttgagctgaagtcaggatacaaagattgggtcctatggatttcctttgccatatcatgttttttgctttgtattgttttgctggggttcatcatgtgggcctgccaaaaaggcaacattaggtgcaacatttgcatttga

SEQ ID NO: 31506 - RNA, 1701 nt, synthetic construct
  misc_feature 1..1701: note = hemagglutinin__InfluenzaA__ABG37472
  source 1..1701: mol_type = other RNA
atgaagactatcattgctttgagctacattttatgtctggttttcgctcaaaaacttcccggaaatgacaacagcacggcaacgctgtgcctggggcaccatgcagtgccaaacggaacgctagtgaaaacaatcacgaatgaccaaattgaagtgactaatgctactgagctggttcagagttcctcaacaggtagaatatgcgacagtcctcaccaagtccttgatggagaaaactgcacactaatagatgctctattgggagaccctcattgtgatggcttccaaaataaggaatgggacctttttgttgaacgcagcaaagcctacagcaactgttacccttatgatgtgccggattatgtctcccttaggtcactagttgcctcatcaggcacgctggagtttaacaatgaaagcttcaattggactggagtcgctcagaatggaacaagctctgcttgcaaaaggagatctgataaaagtttctttagtagattgaattggttgcatcaattaaaatacaaatatccagcactgaatgtgactatgccaaacaatgaaaaatttgacaaattgtacatttggggggttcaccacccgggtacagacagtgaccaaatcagcctatatgctcaagcatcagggagagtcacagtctctaccaaaagaagccaacaaactgtaatcccgaatatcggatctagaccctgggtaaggggtgtctccagcagaataagcatctattggacaatagtaaaaccgggagacatacttttgattaacagcacagggaatctaattgctcctcggggttacttcaaaatacgaagtgggaaaagctcaataatgaggtcagatgcacccattggcaaatgcaattctgaatgcatcactccaaatggaagcattcccaatgacaaaccatttcaaaatgtaaacaggatcacatatgggccctgtcccagatatgttaagcaaaacactctgaaattggcaacagggatgcggaatgtgccagagaaacaaactagaggcatattcggtgcaatcgcgggcttcatagaaaatggttgggagggaatgatggacggttggtacggtttcaggcatcaaaattctgagggcacagggcaagcagcagatcttaaaagcactcaagcagcaatcaaccaaatcaacgggaaactgaataggttaatcgagaaaacgaacgagaaattccatcaaattgaaaaagaattctcagaagtagaagggagaattcaggacctcgagaaatatgttgaggacactaaaatagatctctggtcgtacaatgcggagcttcttgttgccctggagaaccaacatacaattgatctaactgactcagaaatgaacaaactgtttgaaagaacaaagaagcaactgagggaaaatgctgaggatatgggcaatggttgtttcaaaatataccacaaatgtgacaatgcctgcatagggtcaatcagaaatggaacttatgaccatgatgtatacagagacgaagcattgaacaaccggttccagatcaaaggtgttgagctgaagtcaggatacaaagattggatcctatggatttcctttgccatatcatgttttttgctttgtattgttttgctggggttcatcatgtgggcctgccaaaaaggcaacattaggtgcaacatttgcatttga

SEQ ID NO: 31507 - RNA, 1701 nt, synthetic construct
  misc_feature 1..1701: note = hemagglutinin__InfluenzaA__ABG37483
  source 1..1701: mol_type = other RNA
atgaagactatcattgctttgagctatattttatgcctggttttcgctcaaaaacttcccggaaatgacaacagcacggcaacgctgtgtctggggcatcatgcagtgccaaacggaacgctagtgaaaacaatcacgaatgaccaaattgaagtaactaatgctactgagctggttcagagttcctcaacaggtagaatatgcgacagtcctcaccaaatccttgatggagaaaactgcacactaatagatgctctattgggagaccctcattgtgatggcttccaaaataaggaatgggacctttttgttgaacgcagcaaagcctacagcaactgttacccttatgatgtgccggattatgtctcccttaggtcactagttgcctcatcaggcacgctggagtttaacaatgaaagcttcaattggactggagtcgctcagaatggaacaagctctgcttgcaaaaggagatctgataaaagtttctttagtagattgaattggttgcaccaattaaaatacaaatatccagcactgaacgtgactatgccaaacaatgaaaaatttgacaaattgtacatttggggggttcaccacccgggtacagacagtgaccaaattagcctatatgctcaagcatcggggagagtcacagtctctaccaaaagaagccaacaaactgtaatcccgaatatcggatctagaccctgggtaaggggtgtctccagcagaataagcatctattggacaatagtaaaaccgggagacatacttttgattaacagcacagggaatctaattgctcctcggggttacttcaaaatacgaagtgggaaaagctcaataatgaggtcagatgcacccattggcaaatgcaattctgaatgcatcactccaaatggaagcattcccaatgacaaaccatttcaaaatgtaaacaggatcacatatggggcctgtcccagatatgttaagcaaaacactctgaaattggcaacagggatgcggaatgtgccagagaaacaaactagaggcatattcggtgcaatcgcgggcttcatagaaaatggttgggagggaatgatggacggttggtacggtttcaggcatcaaaattctgagggcacagggcaagcagcagatcttaaaagcactcaagcagcaatcaaccaaatcaacgggaaactgaataggttaatcgagaaaacgaacgagaaattccatcaaattgaaaaagaattctcagaagtagaagggagaattcaggacctcgagaaatatgttgaggacactaaaatagatctctggtcgtacaatgcggagcttcttgttgccctggagaaccaacatacaattgatctaactgactcagaaatgaacaaactgtttgaaagaacaaagaagcaactgagggaaaatgctgaggatatgggcaatggttgtttcaaaatataccacaaatgtgacaatgcctgcatagggtcaatcagaaatggaacttatgaccatgatgtatacagagacgaagcattgaacaaccggttccagatcaaaggtgttgagctgaagtcaggatacaaagattgggtcctatggatttcctttgccatatcatgttttttgctttgtattgttttgctggggttcatcatgtgggcctgccaaaaaggcaacattaggtgcaacatttgcatttga

SEQ ID NO: 31508 - RNA, 1701 nt, synthetic construct
  misc_feature 1..1701: note = hemagglutinin__InfluenzaA__ABG37494
  source 1..1701: mol_type = other RNA
atgaagactatcattgctttgagctacattttatgcctggttttcgctcaaaaacttcccggaaatgacaacagcacggcaacgctgtgtctggggcatcatgcagtgccaaacggaacgctagtgaaaacaatcacgaatgaccaaattgaagtaactaatgctactgagctggttcagagttcctcaacaggtagaatatgcgacagtcctcaccaaatccttgatggagaaaactgcacactaatagatgctctattgggagaccctcattgtgatggcttccaaaataaggaatgggacctttttgttgaacgcagcaaagcctacagcaactgttacccttatgatgtgccggattatgtctcccttaggtcactagttgcctcatcaggcacgctggagtttaacaatgaaagcttcaattggactggagtcgctcagaatggaacaagctctgcttgcaaaaggagatctgataaaagtttctttagtaaattgaattggttgcaccaattaaaatataaatatccagcactgaacgtgactatgccaaacaatgaaaaatttgacaaattgtacatttggggggttcaccacccgggtacagacagtgaccaaatcagcctatatgctcaagcatcagggagagtcacagtctctaccaaaagaagccaacaaactgtaatcccgaatatcggatctagaccctgggtaaggggtgtctccagcagaataagcatctattggacaatagtaaaaccgggagacatacttttgattaacagcacagggaatctaattgctcctcggggttacttcaaaatacgaagtgggaaaagctcaataatgaggtcagatgcacccattggcaaatgcaattctgaatgcatcactccaaatggaagcattcccaatgacaaaccatttcaaaatgtaaacaggatcacatatggggcctgtcccagatatgttaagcaaaacactctgaaattggcaacagggatgcggaatgtgccagagaaacaaactagaggcatattcggtgcaatcgcgggcttcatagaaaatggttgggagggaatgatggacggttggtacggtttcaggcatcaaaattctgagggcacagggcaagcagcagatcttaaaagcactcaagcagcaatcaaccaaatcaacgggaagctgaataggttaatcgagaaaacgaacgagaaattccatcaaattgaaaaagaattctcagaagtagaagggagaattcaggacctcgagaaatatgttgaggacactaaaatagatctctggtcgtacaatgcggagcttcttgttgccctggagaaccaacatacaattgatctaactgactcagaaatgaacaaactgtttgaaagaacaaagaagcaactgagggaaaatgctgaggatatgggcaatggttgtttcaaaatataccacaaatgtgacaatgcctgcatagggtcaatcagaaatggaacttatgaccatgatgtatacagagacgaagcattgaacaaccggttccagatcaaaggtgttgagctgaagtcaggatacaaagattgggtcctatggatttcctttgccatatcatgttttttgctttgtattgttttgctggggttcatcatgtgggcctgccaaaaaggcaacattaggtgcaacatttgcatttga

SEQ ID NO: 31509 - RNA, 1701 nt, synthetic construct
  misc_feature 1..1701: note = hemagglutinin__InfluenzaA__ABG37505
  source 1..1701: mol_type = other RNA
atgaagactatcattgctttgagctacattttatgtctggttttcgctcaaaaacttcccggaaatgacaacagcatggcaacgctgtgcctggggcaccatgcagtgccaaacggaacgctagtgaaaacaatcacgaatgaccaaattgaagtgactaatgctactgagctggttcagagttcctcaacaggtagaatatgcgacagtcctcaccaaatccttgatggagaaaactgcacactaatagatgctctattgggagaccctcattgtgatggcttccaaaataaggaatgggacctttttgttgaacgcagcaaagcctacagcaactgttacccttatgatgtgccggattatgtctcccttaggtcactagttgcctcatcaggcacgctggagtttaacaatgaaagcttcaattggactggagtcgctcagaatggaacaagctctgcttgcaaaaggagatctgataaaagtttctttagtagattgaattggttgcaccaattaaaatacaaatatccagcactgaacgtgactatgccaaacaatgaaaaatttgacaaattgtacatttggggggttcaccacccgggtacagacagtgaccaaatcagcctatatgctcaagcatcagggagagtcacagtctctaccaaaagaagccaacaaactgtaatcccgaatatcggatctagaccctgggtaaggggtgtctccagcagaataagcatctattggacaatagtaaaaccgggagacatacttttgattaacagcacagggaatctaattgctcctcggggttacttcaaaatacgaagtgggaaaagctcaataatgaggtcagatgcacccattgacaaatgcaattctgaatgcatcactccaaatggaagcattcccaatgacaaaccatttcaaaatgtaaacaggatcacatatgggctctgtcccagatatgttaagcaaaacactctgaaattggcaacagggatgcggaatgtgccagagaaacaaactagaggcatattcggtgcaatcgcgggcttcatagaaaatggttgggagggaatgatggacggttggtacggtttcaggcatcaaaattctgagggcacagggcaagcagcagatcttaaaagcactcaagcagcaatcaaccaaatcaacgggaaactgaataggttaatcgaaaaaacgaacgagaaattccatcaaattgaaaaagaattctcagaagtagaagggagaattcaggacctcgagaaatatgttgaggacactaaaatagatctctggtcgtacaatgcggagcttcttgttgccctggagaaccaacatacaattgatctaactgactcagaaatgaacaaactgtttgaaagaacaaagaagcaactgagggaaaatgctgaggatatgggcaatggttgtttcaaaatataccacaaatgtgacaatgcctgcatagggtcaatcagaaatggaacttatgaccatgatgtatacagagacgaagcattgaacaaccggttccagatcaaaggtgttgagctgaagtcaggatacaaagattggatcctatggatttcctttgccatatcatgttttttgctttgtattgttttgctggggttcatcatgtgggcctgccaaaaaggcaacattaggtgcaacatttgcatttga

SEQ ID NO: 31510 - RNA, 1701 nt, synthetic construct; identical to SEQ ID NO: 31024
  misc_feature 1..1701: note = hemagglutinin__InfluenzaA__ABG37516
  source 1..1701: mol_type = other RNA

SEQ ID NO: 31511 - RNA, 1701 nt, synthetic construct; identical to SEQ ID NO: 31024
  misc_feature 1..1701: note = hemagglutinin__InfluenzaA__ABG37527
  source 1..1701: mol_type = other RNA

SEQ ID NO: 31512 - RNA, 1701 nt, synthetic construct; identical to SEQ ID NO: 31024
  misc_feature 1..1701: note = hemagglutinin__InfluenzaA__ABG37538
  source 1..1701: mol_type = other RNA

SEQ ID NO: 31513 - RNA, 1701 nt, synthetic construct; identical to SEQ ID NO: 31024
  misc_feature 1..1701: note = hemagglutinin__InfluenzaA__ABG37549
  source 1..1701: mol_type = other RNA

SEQ ID NO: 31514 - RNA, 1701 nt, synthetic construct
  misc_feature 1..1701: note = hemagglutinin__InfluenzaA__ABG37560
  source 1..1701: mol_type = other RNA
atgaagactatcattgctttgagctacattctatgtctggttttcgctcaaaaacttcccggaaatgacaacagcacggcaacgctgtgccttgggcaccatgcagtaccaaacggaacgatagtgaaaacaatcacaaatgaccaaattgaagttactaatgctactgagctggttcagagttcctcaacaggtggaatatgcgacagtcctcatcagatccttgatggagaaaactgcacactaatagatgctctattgggagaccctcagtgtgatggcttccaaaataagaaatgggacctttttgttgaacgcagcaaagcctacagcaactgttacccttatgatgtgccggatcatgcctcccttaggtcactagttgcctcatccggcacactggagtttaacaatgaaagcttcgattggactggagtcactcagaatggaacaagctctgcttgcaaaaggagatctaataaaagtttctttagtagattgaattggttgacccacttaaaatacaaatacccagcattgaacgtgactatgccaaacaatgaaaaatttgacaaattgtacatttggggggttcaccacccgggtacggacagtgaccaaatcagcctatatgctcaagcatcaggaagaatcacagtctctaccaaaagaagccaacaaactgtaatcccgaatatcggatctagacccagggtaagggatgtctccagccgaataagcatctattggacaatagtaaaaccgggagacatacttttgattaacagcacagggaatctaattgctcctcggggttacttcaaaatacgaagtgggaaaagctcaataatgagatcagatgcacccattggcaaatgcaattctgaatgcatcactccaaatggaagcattcccaatgacaaaccatttcaaaatgtaaacaggatcacatatggggcctgccccagatatgttaagcaaaacactctgaagttggcaacagggatgcgaaatgtaccagagaaacaaactagaggcatatttggcgcaatcgcgggtttcatagaaaatggttgggagggaatggtggacggttggtacggtttcaggcatcaaaattctgagggcacaggacaagcagcagatctcaaaagcactcaagcagcaatcaaccaaatcaatgggaaactgaataggttaatcgggaaaacaaacgagaaattccatcagattgaaaaagaattctcagaagtagaagggagaattcaggacctcgagaaatatgttgaggacactaaaatagatctctggtcatacaacgcggagcttcttgttgccctggagaaccaacatacaattgatctaactgactcagaaatgaacaaactgtttgaaagaacaaagaagcaactgagggaaaatgctgaggatatgggcaatggttgtttcaaaatataccacaaatgtgacaatgcctgcatagggtcaatcagaaatggaacttatgaccatgatgtgtacagagatgaagcattaaacaaccggttccagatcaaaggtgttgagctgaagtcaggatataaagattggatcctatggatttcctttgccatatcatgttttttgctttgtgttgctttgttggggttcatcatgtgggcctgccaaaaaggcaacattaggtgcaacatttgcatttga

SEQ ID NO: 31515 - RNA, 1701 nt, synthetic construct; identical to SEQ ID NO: 31024
  misc_feature 1..1701: note = hemagglutinin__InfluenzaA__ABG37571
  source 1..1701: mol_type = other RNA

SEQ ID NO: 31516 - RNA, 1701 nt, synthetic construct
  misc_feature 1..1701: note = hemagglutinin__InfluenzaA__ABG37582
  source 1..1701: mol_type = other RNA
atgaagactatcattgctttgagctacattctatgtctggttttcgctcaaaaacttcccggaaatgacaacagcacggcaacgctgtgccttgggcaccatgcagtaccaaacggaacgatagtgaaaacaatcacaaatgaccaaattgaagttactaatgctactgagctggttcagatttcctcaacaggtggaatatgcgacagtcctcatcagatccttgatggagaaaactgcacactaatagatgctctattgggagaccctcagtgtgatggcttccaaaataagaaatgggacctttttgttgaacgcagcaaagcctacagcaactgttacccttatgatgtgccggatcatgcctcccttaggtcactagttgcctcatccggcacactggagtttaacaatgaaagcttcgattggactggagtcactcagaatggaacaagctctgcttgcaaaaggagatctaataaaagtttctttagtagattgaattggttgacccacttaaaatacaaatacccagcattgaacgtgactatgccaaacaatgaaaaatttgacaaattgtacatttggggggttcaccacccgggtacggacagtgaccaaatcagcctatatgctcaagcatcaggaagaatcacagtctctaccaaaagaagccaacaaactgtaatcccgaatatcggatctagacccagggtaagggatgtctccagccgaataagcatctattggacaatagtaaaaccgggagacatacttttgattaacagcacagggaatctaattgctcctcggggttacttcaaaatacgaagtgggaaaagctcaataatgagatcagatgcacccattggcaaatgcaattctgaatgcatcactccaaatggaagcattcccaatgacaaaccatttcaaaatgtaaacaggatcacatatggggcctgtcccagatatgttaagcaaaacactctgaaattggcaacagggatgcgaaatgtaccagagaaacaaactagaggcatatttggcgcaatcgcgggtttcatagaaaatggttgggagggaatggtggacggttggtacggtttcaggcatcaaaattctgagggcacaggacaagcagcagatctcaaaagcactcaagcagcaatcaaccaaatcaatgggaaactgaataggttaatcgggaaaacaaacgagaaattccatcagattgaaaaagaattctcagaagtagaagggagaattcaggacctcgagaaatatgttgaggacactaaaatagatctctggtcatacaacgcggagcttcttgttgccctggagaaccaacatacaattgatctaactgactcagaaatgaacaaactgtttgaaagaacaaagaagcaactgagggaaaatgctgaggatatgggcaatggttgtttcaaaatataccacaaatgtgacaatgcctgcatagggtcaatcagaaatggaacttatgaccatgatgtgtacagagatgaagcattaaacaaccggttccagatcaaaggtgttgagctgaagtcaggatataaagattggatcctatggatttcctttgccatatcatgttttttgctttgtgttgctttgttggggttcatcatgtgggcctgccaaaaaggcaacattaggtgcaacatttgcatttga

SEQ ID NO: 31517 - RNA, 1701 nt, synthetic construct
  misc_feature 1..1701: note = hemagglutinin__InfluenzaA__ABG37604
  source 1..1701: mol_type = other RNA
atgaagactatcattgctttgagctacattctatgtctggttttcgctcaaaaacttcccggaaatgacaacagcacggcaacgctgtgccttgggcaccatgcagtaccaaacggaacgatagtgaaaacaatcacaaatgaccaaattgaagttactaatgctactgagctggttcagagttcctcaacaggtggaatatgcgacagtcctcatcagatccttgatggagaaaactgcacactaatagatgctctattgggagaccctcagtgtgatggcttccaaaataagaaatgggacctttttgttgaacgcagcaaagcctacagcaactgttacccttatgatgtgccggatcatgcctcccttaggtcactagttgcctcatccggcacactggagtttaacaatgaaagcttcgattggactggagtcactcagaatggaacaagctctgcttgcaaaaggagatctaataaaagtttctttagtagattgaattggttgacccacttaaaatacaaatacccagcattgaacgtgactatgccaaacaatgaaaaatttgacaaattgtacatttggggggttcaccacccgggtacggacagtgaccaaatcagcctatatgctcaagcatcaggaagaatcacagtctctaccaaaagaagccaacaaactgtaatcccgaatatcggatctagacccagggtaagggatgtctccagccgaataagcatctattggacaatagtaaaaccgggagacatacttttgattaacagcacagggaatctaattgctcctcggggttacttcaaaatacgaagtgggaaaagctcaataatgagatcagatgcacccattggcaaatgcaattctgaatgcatcactccaaatggaagcattcccaatgacaaaccatttcaaaatgtaaacaggatcacatatggggcctgccccagatatgttaagcaaaacactctgaaattggcaacagggatgcgaaatgtaccagagaaacaaactagaggcatatttggcgcaatcgcgggtttcatagaaaatggttgggagggaatggtggacggttggtacggtttcaggcatcaaaattctgagggcacaggacaagcagcagatctcaaaagcactcaagcagcaatcaaccaaatcaatgggaaactgaataggttaatcgggaaaacaaacgagaaattccatcagattgaaaaagaattctcagaagtagaagggagaattcaggacctcgagaaatatgttgaggacactaaaatagatctctggtcatacaacgcggagcttcttgttgccctggagaaccaacatacaattgatctaactgactcagaaatgaacaaactgtttgaaagaacaaagaagcaactgagggaaaatgctgaggatatgggcaatggttgtttcaaaatataccacaaatgtgacaatgcctgcatagggtcaatcagaaatggaacttatgaccatgatgtgtacagagatgaagcattaaacaaccggttccagatcaaaggtgttgagctgaagtcaggatataaagattggatcctatggatttcctttgccatatcatgttttttgctttgtgttgctttgttggggttcatcatgtgggcctgccaaaaaggcaacattaggtgcaacatttgcatttga

SEQ ID NO: 31518 - RNA, 1701 nt, synthetic construct; identical to SEQ ID NO: 31024
  misc_feature 1..1701: note = hemagglutinin__InfluenzaA__ABG37615
  source 1..1701: mol_type = other RNA

SEQ ID NO: 31519 - RNA, 1698 nt, synthetic construct; identical to SEQ ID NO: 31246
  misc_feature 1..1698: note = hemagglutinin__InfluenzaA__ABG47807
  source 1..1698: mol_type = other RNA

SEQ ID NO: 31520 - RNA, 1698 nt, synthetic construct; identical to SEQ ID NO: 31245
  misc_feature 1..1698: note = hemagglutinin__InfluenzaA__ABG47818
  source 1..1698: mol_type = other RNA

SEQ ID NO: 31521 - RNA, 1701 nt, synthetic construct
  misc_feature 1..1701: note = hemagglutinin__InfluenzaA__ABG47829
  source 1..1701: mol_type = other RNA
atgaaagcaaaactactagtcctgttgtgtgcatttacagctacatatgcagacacaatatgtataggctaccatgcgaacaactcaaccgacactgttgacacagtacttgagaagaacgtgacagtgacacactctgtcaacctacttgaggacagtcacaacggaaaactatgccgactaaaaggaacagccccactacaattgggtaattgcagcgttgccggatggatcttaggaaacccagaatgcgaatcactgttttctaaggaatcatggtcctacattgcagaaacaccaaaccctgagaatggaacatgttacccagggtatttcgccgactatgaggaactgagggagcaattgagctcagtatcatcattcgagagattcgaaatattccccaaggaaagctcatggcccaaccacaccgtaaccaaaggagtgacggcatcatgctcacataatgggaaaagcagtttttacaaaaatttgctatggctgacggaaaagaatggcttgtacccaaatctgagcaagtcctatgtaaacaacaaggagaaagaagtccttgtactatggggtgttcatcacccgtctaacataggggaccaaagggccatctatcatacagaaaatgcttatgtctctgtagtgtcttcacattatagcagaagattcaccccagaaataacaaaaagacccaaagtaagaaatcaagaagggagaattaactactactggactctgctggaacccggggacacaataatatttgaggcaaatggaaatctaatagcgccatggtacgctttcgcactgagtagaggctttgggtcaggaatcatcacctcaaacgcatcaatgggtgaatgtgacgctaagtgtcaaacaccccaaggagctataaacagtagtcttcctttccagaatgtacacccagtcacaataggagagtgtcccaagtatgtcaggagtacaaaattaaggatggttacaggactaagaaacatcccatccattcaatctagaggtttgtttggagccattgccggtttcattgaaggggggtggactggaatgatagatggatggtatggttaccatcatcagaatgaacaaggatctggctatgctgcagaccaaaaaagcacacaaaatgccattgatgggattacaaacaaggtgaattctgtaatcgagaaaatgaacactcaattcacagctgtaggcaaagaattcaacaaattagagagaaggatggaaaacttaaataagaaagttgatgatgggtttctggacatttggacatataatgcagagttgttggttctcctggaaaatgaaaggactttggattttcatgactcaaatgtgaagaatctgtatgagaaagtaaaaacccaattgaagaataatgccaaagaaatcgggaacgggtgttttgaattctatcacaagtgtaacaatgaatgcatggaaagtgtgaaaaatggaacttatgactatccaaaatattccgaagaatcaaagttaaacagggaaaaaattgatggagtgaaattggaatcaatgggagtctatcagattctggcgatctactcaactgtcgccagttcactggtgcttttggtctccctgggggcaatcagtttctggatgtgttctaatgggtctttgcagtgtagaatatgcatctga

SEQ ID NO: 31522 - RNA, 1701 nt, synthetic construct
  misc_feature 1..1701: note = hemagglutinin__InfluenzaA__ABG47840
  source 1..1701: mol_type = other RNA
atgaaagtaaaactactagtcctgttgtgtgcatttacagctacatatgcagacacaatatgtataggctaccatgcgaacaactcaaccgacactgttgacacagtacttgagaagaacgtgacagtgacacactctgtcaacctacttgaggacagtcacaacggaaaactatgccgactaaaaggaacagccccactacaattgggtaattgcagcgttgccggatggatcttaggaaacccagaatgcgaatcactgttttctaaggaatcatggtcctacattgcagaaacaccaaaccctgagaatggaacatgttacccagggtatttcgccgactatgaggaactgagggagcaattgagctcagtatcatcattcgagagattcgaaatattccccaaggaaagctcatggcccaaccacaccgtaaccaaaggagtgacggcatcatgctcccataatgggaaaagcagtttttacaaaaatttgctatggctgacggaaaagaatggcttgtacccaaatctgagcaagtcctatgtaaacaacaaggagaaagaagtccttgtactatggggtgttcatcacccgtctaacataggggaccaaagggccatctatcatacagaaaatgcttatgtctctgtagtgtcttcacattatagcagaagattcaccccagaaatagcaaaaagacccaaagtaagagatcaagaagggagaattaactactactggactctgctggaacccggggacacaataatatttgaggcaaatggaaatctaatagcgccatggtacgctttcgcactgagtagaggctttgggtcaggaatcatcacctcaaacgcatcaatgagtgaatgtgacgctaagtgtcaaacaccccaaggagctataaacagtagtcttcctttccagaatgtacacccagtcacaataggagagtgtcccaagtatgtcaggagtacaaaattaaggatggttacaggactaagaaacatcccatccattcaatctagaggtttgtttggagccattgccggtttcattgaaggggggtggactggaatgatagatggatggtatggttatcatcatcagaatgaacaaggatctggctatgctgcagaccaaaaaagcacacaaaatgccattgatgggattacaaacaaggtgaattctgtaattgagaaaatgaacactcaattcacggctgtaggcaaagaattcaacaaattagagagaaggatggaaaacttaaataagaaagttgatgatggatttctggacatttggacatataatgcagagttgttggttctcctggaaaatgaaaggactttggattttcatgactcaaatgtgaagaatctgtatgagaaagtaaaaaaccaattgaagaataatgccaaagaaatcgggaacgggtgttttgaattctatcacaagtgtaacaatgaatgcatggaaagtgtgaaaaatggaacttatgactatccaaaatattccgaagaatcaaagttaaacagggaaaaaattgatggagtgaaattggaatcaatgggcgtctatcagattctggcgatctactcaactgtcgccagttcactggtgcttttggtctccctgggggcaatcagtttctggatgtgttctaatgggtctttgcagtgtagaatatgcatctga

SEQ ID NO: 31523 - RNA, 1701 nt, synthetic construct
  misc_feature 1..1701: note = hemagglutinin__InfluenzaA__ABG47851
  source 1..1701: mol_type = other RNA
atgaagactatcattgctttgagctacattttatgtctggttttcgctcaaaaacttcccggaaatgacaacagcacagcaacgctgtgcctgggacatcatgcagtgccaaacggaacgctagtgaaaacaatcacgaatgatcaaattgaagtgactaatgctactgagctggttcagagttcctcaacaggtagaatatgcgacagtcctcaccgaatccttgatggaaaaaactgcacactgatagatgctctattgggagaccctcattgtgatggcttccaaaataaggaatgggacctttttgttgaacgcagcaaagcttacagcaactgttacccttatgatgtgccggattatgcctcccttaggtcactagttgcctcatcaggcaccctggagtttaccaatgaaggcttcaattggactggagtcgctcaggatgggaaaagctatgcttgcaaaaggggatctgttaacagtttctttagtagattgaattggttgcacaaattagaatacaaatatccagcactgaacgtgactatgccaaacaatgacaaatttgacaaactgtacatttggggggttcaccacccgagcacggacagtgaccaaaccagcctatatgttcaagcatcagggagagtcacagtctctaccaaaagaagccaacaaactgtaatcccgaatatcgggtccagaccctgggtgaggggcatctccagtagaataagcatctattggacaatagtaaaaccgggagacatacttttgattaacagcacagggaatctaattgctcctcggggttacttcaaaatacgaaatgggaaaagctcaataatgaggtcagatgcacccattgacaactgcaattctgaatgcatcactccaaatggaagcattcccaatgacaaaccttttcaaaatgtaaacaggatcacatatggggcctgtcccagatatgttaagcaaaacactctgaaattggcaacagggatgcggaatgtaccagagaaacaaactagaggcatattcggcgcaatcgcaggtttcatagaaaatggttgggagggaatggtagacggttggtacggtttcaggcatcaaaattctgagggcacaggacaagcagcagatcttaaaagcactcaagcagcaatcgatcaaatcaacgggaaactgaataggttaatcgagaaaacgaacgagaaattccatcaaatcgaaaaagaattctcagaagtggaagggagaattcaggacctcgagaaatatgttgaagacactaaaatagatctctggtcttacaacgcggagcttcttgttgccctggagaatcaacatacaattgatctaactgactcagaaatgaacaaactgtttgaaagaacaaggaagcaactgagggaaaatgctgaggacatgggcaatggttgcttcaaaatataccacaaatgtgacaatgcctgcatagggtcaatcagaaatggaacttataaccatgatgtatacagagacgaagcattaaacaaccggttccagatcaaaggtgttgagctgaagtcaggatacaaagattggatcctatggatttcctttgccatatcatgctttttgctttgtgttgttttgctggggttcatcatgtgggcctgccaaaaaggcaacattaggtgcagcatttgcatttga

SEQ ID NO: 31524 - RNA, 1701 nt, synthetic construct
  misc_feature 1..1701: note = hemagglutinin__InfluenzaA__ABG47862
  source 1..1701: mol_type = other RNA
atgaggactatcattgctttgagctacattttatgtctggttttcgctcaaaaacttcccggaaatgacaacagcacggcaacgctgtgcctgggacaccatgcagtgccaaacggaacgctagtgaaaacaatcacgaatgaccaaattgaagtgactaatgctactgagctggttcagagttcctcaacaggtagaatatgcaacagtcctcatcgaatccttgatggaaaaaactgcacactgatagatgctctattgggagaccctcattgtgatggcttccaaaataaggaatgggacctttttgttgaacgcagcaaagcttacagcaactgttacccttatgatgtgccggattatgcttcccttaggtcactaattgcctcatccggcaccctggagtttaccaatgaaggcttcaattggactggagtcgctcaggatggaacaagctatgcttgcaaaaggggatctgttaaaagtttctttagtagattgaattggttgcacaaattagaatacaaatatccagcactgaacgtgactatgccaaacaatgacaaatttgacaaattgtacatttggggggttcaccacccgagtacggacagtgaccaaaccagcctatatgttcaagcatcagggagagtcacagtctctaccaaaagaagccaacaaactgtaatcccgaatatcgggtctagaccctgggtaaggggtgtttccagcaggataagcatctattggacaatagtaaaaccgggagacatacttttgattaacagcacagggaatctaattgctcctcggggttacttcaaaatacgaagtgggaaaagctcaataatgaggtcagatgcacccattggcaactgcaattctgaatgcatcactccaaatggaagcattcccaatgacaaaccttttcaaaatgtaaacaggatcacatatggggcctgtcccagatatgttaagcaaaacactctgaaattggcaacagggatgcggaatgtaccagagaaacaaactagaggcatattcggcgcaatcgcaggtttcatagaaaatggttgggagggaatggtagacggttggtacggtttcaggcatcaaaattctgagggcacaggacaagcagcagatcttaaaagcactcaagcagcaatcaaccaaatcaacgggaaactgaataggttaatcgagaaaacaaacgagaaattccatcaaatcgaaaaagaattctcagaagtagaagggagaattcaggacctcgagaaatatgttgaagacactaaaatagacctctggtcttacaacgcggagcttcttgttgccctggagaaccaacatacaattgatctaactgactcagaaatgaacaaactgtttgaaagaacaaggaagcaactgagggaaaatgctgaggacatgggcaatggttgcttcaaaatataccacaaatgtgacaatgcctgcatagggtcaatcagaaatggaacttatgaccatgatgtatacagagacgaagcattaaacaaccggttccagatcaaaggtgttgagctgaagtcaggatacaaagattggatcctatggatttcctttgccatatcatgctttttgctttgtgttgttttgctggggttcatcatgtgggcctgccaaaaaggcaacattaggtgcaacatttgcatttga

SEQ ID NO: 31525 - RNA, 1701 nt, synthetic construct
  misc_feature 1..1701: note = hemagglutinin__InfluenzaA__ABG47873
  source 1..1701: mol_type = other RNA
atgaagactatcattgctttgagctacattttatgtctggttttcgctcaaaaacttcccggaaatgacaacagcacagcaacgctgtgcctgggacaccatgcagtgccaaacggaacgctagtgaaaacaatcacgaatgatcaaattgaagtgactaatgctactgagctggttcagagttccccaacaggtagaatatgcgacagtcctcaccgaatccttgatggaaagaactgcacactgatagatgctctattgggagaccctcattgtgatggcttccaaaataaggaatgggacctttttgttgaacgcagcaaagcttacagcaactgttacccttatgatgtgccggattatgcctcccttaggtcactagttgcctcatcaggcaccctggagtttaccaacgaaaacttcaattggactggagtcgctcaggatgggaaaagctatgcttgcaaaaggggatctgttaacagtttctttagtagattgaattggttgcacaaattagaatacaaatatccagcgctgaacgtgactatgccaaacaatggcaaatttgacaaattgtacatttggggggttcaccacccgagcacggacagtgaccaaaccagcctatatgtccgagcatcagggaaagtcacagtctctaccaaaagaagccaacaaactgtaatcccggatatcgggtatagaccatgggtaaggggtctgtccagtagaataagcatctattggacaatagtaaaaccgggagacatacttttgattaatagcacagggaatctaattgctcctcggggttacttcaaaatacgaaatgggaaaagctcaataatgaggtcagatgcacccattggcaactgcagttctgaatgcatcactccaaatggaagcattcccaatgacaaaccttttcaaaatgtaaacaggataacatatggggcctgccccagatatgttaagcaaaacactctgaaattggcaacagggatgcggaatgtaccagagaaacaaactagaggcatattcggcgcaatcgcaggtttcatagaaaatggttgggagggaatggtagacggttggtacggtttcaggcatcagaattctgagggcacaggacaagctgcagatcttaaaagcactcaagcagcaatcgaccaaatcaacgggaaactgaataggttagtcgagaaaacgaacgagaaattccatcaaatcgaaaaagaattctcagaagtagaagggagaattcaggacctcgagaaatatgttgaagacactaaaatagatctctggtcttacaatgcggagcttcttgttgctctggagaaccaacatacaattgatctaactgactcagaaatgaacaaactatttgaaagaacaaggaagcaactgagggaaaatgctgaggacatgggcaatggttgtttcaaaatataccacaaatgtgacaatgcctgcatagggtcaatcagaaatggaacttatgaccatgatgtatacagagacgaagcattaaacaaccggttccagatcaaaggtgttgagctgaagtcaggatacaaagattggatcctatggatttcctttgccatatcatgctttttgctttgtgtggttttgcttgggttcatcatgtgggcctgccaaaaaggcaacattaggtgcaacatttgcatttga

SEQ ID NO: 31526 - RNA, 1701 nt, synthetic construct; identical to SEQ ID NO: 31495
  misc_feature 1..1701: note = hemagglutinin__InfluenzaA__ABG47895
  source 1..1701: mol_type = other RNA

SEQ ID NO: 31527 - RNA, 1701 nt, synthetic construct
  misc_feature 1..1701: note = hemagglutinin__InfluenzaA__ABG47906
  source 1..1701: mol_type = other RNA
atgaagactatcattgctttgagctacattttatgtctggttttcgctcaaaaacttcccggaaatgacaacagcacagcaacgctgtgcctgggacaccatgcagtgccaaacggaacgctagtgaaaacaatcacgaatgatcaaattgaagtgactaatgctactgagctggttcagagttccccaacaggtagaatatgcgacagtcctcaccgaatccttgatggaaagaactgcacactgatagatgctctattgggagaccctcattgtgatggcttccaaaataaggaatgggacctttttgttgaacgcagcaaagcttacagcaactgttacccttatgatgtgccggattatgcctcccttaggtcactagttgcctcatcaggcaccctggagtttaccaacgaaaacttcaattggactggagtcgctcaggatgggaaaagctatgcttgcaaaaggggatctgttaacagtttctttagtagattgaattggttgcacaaattagaatacaaatatccagcgctgaacgtgactatgccaaacaatggcaaatttgacaaattgtacatttggggggttcaccacccgagcacggacagtgaccaaaccagcctatatgtccgagcatcagggaaagtcacagtctctaccaaaagaagccaacaaactgtaatcccggatatcgggtatagaccatgggtaaggggtctgtccagtagaataagcatctattggacaatagtaaaaccgggagacatacttttgattaatagcacagggaatctaattgctcctcggggttacttcaaaatacgaaatgggaaaagctcaataatgaggtcagatgcacccattggcaactgcagttctgaatgcatcactccaaatggaagcattcccaatgacaaaccttttcaaaatgtaaacaggatcacatatggggcctgccccagatatgttaagcaaaacactctgaaattggcaacagggatgcggaatgtaccagagaaacaaactagaggcatattcggcgcaatcgcaggtttcatagaaaatggttgggagggaatggtagacggttggtacggtttcaggcatcagaattctgagggcacaggacaagctgcagatcttaaaagcactcaagcagcaatcgaccaaatcaacgggaaactgaataggttagtcgagaaaacgaacgagaaattccatcaaatcgaaaaagaattctcagaagtagaagggagaattcaggacctcgagaaatatgttgaagacactaaaatagatctctggtcttacaatgcggagcttcttgttgctctggagaaccaacatacaattgatctaactgactcagaaatgaacaaactatttgaaagaacaaggaagcaactgagggaaaatgctgaggacatgggcaatggttgtttcaaaatataccacaaatgtgacaatgcctgcatagggtcaatcagaaatggaacttatgaccatgatgtatacagagacgaagcattaaacaaccggttccagatcaaaggtgttgagctgaagtcaggatacaaagattggatcctatggatttcctttgccatatcatgctttttgctttgtgttgttttgcttgggttcatcatgtgggcctgccaaaaaggcaacattaggtgcaacatttgcatttga

SEQ ID NO: 31528 - RNA, 1701 nt, synthetic construct
  misc_feature 1..1701: note = hemagglutinin__InfluenzaA__ABG47917
  source 1..1701: mol_type = other RNA
atgaagactatcattgctttgagctacattttatgtctggttttcgctcaaaaacttcccggaaatgacaacagcacagcaacgctgtgcctgggacaccatgcggtgccaaacggaacgctagtgaaaacaatcacgaatgatcaaattgaagtgactaatgctactgagctggttcagagttcctcaacaggtagaatatgcgacagtcctcaccgaatccttgatggaaaaaactgcacactgatagatgctctattgggagaccctcattgtgatggcttccaaaataaggaatgggacctttttgttgaacgcagcaaagcttacagcaactgttacccttatgatgtgccggattatgcctcccttaggtcactagttgcctcatcaggcaccctggagtttatcaatgaagacttcaattggactggagtcgctcaggatgggaaaagctatgcttgcaaaaggggatctgttaacagtttctttagtagattgaattggttgcacaaattagaatacaaatacccagcgctgaacgtgactatgccaaacaatggcaaatttgacaaattgtacatttggggggttcaccacccgagcacggacagtgaccaaaccagcctatatgttcgagcatcagggagagtcacagtctctaccaaaagaagccaacaaactgtaatcccgaatatcgggtttagaccctgggtaaggggtctgtccagtagaataagcatctattggacaatagtaaaaccgggagacatacttttgattaatagcacagggaatctaattgctcctcggggttacttcaaaatacggaatgggaaaagctcaataatgaggtcagatgcacccattggcaactgcagttctgaatgcatcactccaaatggaagcattcccaatgacaaaccttttcaaaatgtaaacaggatcacatatggggcctgccccagatatgttaagcaaaacactctgaagttggcaacagggatgcggaatgtaccagagaaacaaactagaggcatattcggcgcaatcgcaggtttcatagaaaatggttgggagggaatggtagacggttggtacggtttcaggcatcaaaattctgagggcacaggacaagcagcagaccttaaaagcactcaagcagcaatcgaccaaatcaacgggaaactgaataggttaatcgagaaaacgaacgagaaattccatcaaatcgaaaaagaattctcagaagtagaagggagaattcaggacctcgagaaatatgttgaagacactaaaatagatctctggtcttacaacgcggggcttcttgttgccctggagaaccaacatacaattgatctaactgactcagaaatgaacaaactgtttgaaagaacaaggaagcaactgagggaaaatgctgaggacatgggcaatggttgcttcaaaatataccacaaatgtgacaatgcctgcatagggtcaatcagaaatggaacttatgaccatgatgtatacagagacgaagcattaaacaaccggttccagatcaaaggtgttgagctgaagtcaggatacaaagattggatcctatggatttcctttgccatatcatgctttttgctttgtgttgttttgctggggttcatcatgtgggcctgccaaaaaggcaacattaggtgcaacatttgcatttga

SEQ ID NO: 31529 - RNA, 1701 nt, synthetic construct
  misc_feature 1..1701: note = hemagglutinin__InfluenzaA__ABG47928
  source 1..1701: mol_type = other RNA
atgaagactatcattgctttgagctacattttatgtctggttttcgctcaaaaacttcccggaaatgacaacagcacagcaacgctgtgcctgggacaccatgcagtgccaaacggaacgctagtgaaaacaatcacgaatgatcaaattgaagtgactaatgctactgagctggttcagagttcctcaacaggtagaatatgcgacagtcctcaccgaatccttgatggaaaaaactgcacactgatagatgctctattgggagaccctcattgtgatggcttccaaaataaggaatgggacctttttgttgaacgcagcaaagcttacagcaactgttacccttatgatgtgccggattatgcctcccttaggtcactagttgcctcatcaggcaccctggagtttatcaatgaagacttcaattggactggagtcgctcaggatgggaaaagctatgcttgcaaaaggggatctgttaacagtttctttagtagattgaattggttgcacaaattagaatacaaatatccagcgctgaacgtgactatgccaaacaatggcaaatttgacaaattgtacatttggggggttcaccacccgagcacggacagtgaccaaaccagcctatatgttcgagcatcagggagagtcacagtctctaccaaaagaagccaacaaactgtaatcccgaatatcgggtttagaccctgggtaaggggtctgtccagtagaataagcatctattggacaatagtaaaaccgggagacatacttttgattaatagcacagggaatctaattgctcctcggggttacttcaaaatacgaaatgggaaaagctcaataatgaggtcagatgcacccattggcaactgcagttctgaatgcatcactccaaatggaagcattcccaatgacaaaccttttcaaaatgtaaacaggatcacatatggggcctgccccagatatgttaagcaaaacactctgaagttggcaacagggatgcggaatgtaccagagaaacaaactagaggcatattcggcgcaatcgcaggtttcatagaaaatggttgggagggaatggtagacggttggtacggtttcaggcatcaaaattctgagggcacaggacaagcagcagatcttaaaagcactcaagcagcaatcgaccaaatcaacgggaaactgaataggttaatcgagaaaacgaacgagaaattccatcaaatcgaaaaagaattctcagaagtagaagggagaattcaggacctcgagaaatatgttgaagacactaaaatagatctctggtcttacaacgcggggcttcttgttgccctggagaaccaacatacaattgatctaactgactcagaaatgaacaaactgtttgaaagaacaaggaagcaactgagggaaaatgctgaggacatgggcaatggttgcttcaaaatataccacaaatgtgacaatgcctgcatagggtcaatcagaaatggaacttatgaccatgatgtatacagagacgaagcattaaacaaccggttccagatcaaaggtgttgagctgaagtcaggatacaaagattggatcctatggatttcctttgccatatcatgctttttgctttgtgttgttttgctggggttcatcatgtgggcctgccaaaaaggcaacattaggtgcaacatttgcatttga

SEQ ID NO: 31530 - RNA, 1701 nt, synthetic construct
  misc_feature 1..1701: note = hemagglutinin__InfluenzaA__ABG47939
  source 1..1701: mol_type = other RNA
atgaagactatcattgctttgagctacattttatgtctggttttcgctcaaaaacttcccggaaatgacaacagcacagcaacgctgtgcctgggacaccatgcagtgccaaacggaacgctagtgaaaacaatcacgaatgatcaaattgaagtgactaatgctactgagctggttcagagttcctcaacaggtagaatatgcgacagtccttaccgaatccttgatgggaaaaactgcacactgatagatgctctattgggagaccctcattgtgatggcttccaaaataaggaatgggacctttttgttgaacgcagcaaagcttacagcaactgttacccttatgatgtgccggattatgcctcccttaggtcactagttgcctcatcaggcaccctggagtttatcaatgaagacttcaattggactggagtcgctcaggatgggaaaagctatgcttgcaaaaggggatctgttaacagtttctttagtagattgaattggttgcacaaattagaatacaaatatccagcgctgaacgtgactatgccaaacaatggcaaatttgacaaattgtacatttggggggttcaccacccgagcacggacagtgaccaaaccagcctatatgttcgagcatcagggagagtcacagtctctaccaaaagaagccaacaaactgtaatcccgaatatcgggtttagaccctgggtaaggggtctgtccagtagaataagcatctattggacaatagtaaaaccgggagacatacttttgattaatagcacagggaatctaattgctcctcggggttacttcaaaatacgaaatgggaaaagctcaataatgaggtcagatgcacccattggcaactgcagttctgaatgcatcactccaaatggaagcattcccaatgacaaaccttttcaaaatgtaaacaggatcacatatggggcctgccccagatatgttaagcaaaacactctgaagttggcaacagggatgcggaatgtaccagagaaacaaactagaggcatattcggcgcaatcgcaggtttcatagaaaatggttgggagggaatggtagacggttggtacggtttcaggcatcaaaattctgagggcacaggacaagcagcagatcttaaaagcactcaagcagcaatcgaccaaatcaacgggaaactgaataggttaatcgagaaaacgaacgagaaattccatcaaatcgaaaaagaattctcagaagtagaagggagaattcaggacctcgagaaatatgttgaagacactaaaatagatctctggtcttacaacgcggggcttcttgttgccctggagaaccaacatacaattgatctaactgactcagaaatgaacaaactgtttgaaagaacaaggaagcaactgagggaaaatgctgaggacatgggcaatggttgcttcaaaatataccacaaatgtgacaatgcctgcatagggtcaatcagaaatggaacttatgaccatgatgtatacagagacgaagcattaaacaaccggttccagatcaaaggtgttgagctgaagtcaggatacaaagattggatcctatggatttcctttgccatatcatgctttttgctttgtgttgttttgctggggttcatcatgtgggcctgccaaaaaggcaacattaggtgcaacatttgcatttga

SEQ ID NO: 31531 - RNA, 1701 nt, synthetic construct
  misc_feature 1..1701: note = hemagglutinin__InfluenzaA__ABG47950
  source 1..1701: mol_type = other RNA
atgaagactatcattgctttgagctacattctatgtctggttttcgctcaaaaacttcccggaaatgacaacagcacagcaacgctgtgcctgggacaccatgcggtgccaaacggaacgctagtgaaaacaatcacgaatgatcaaattgaagtgactaatgctactgagctggttcagagttcctcaacaggtagaatatgcgacagtcctcaccgaatccttgatggaaaaaactgcacactgatagatgctctattgggagaccctcattgtgatggcttccaaaataaggaatgggacctttttgttgaacgcagcaaagcttacagcaactgttacccttatgatgtgccggattatgcctcccttaggtcactagttgcctcattaggcaccctggagtttatcaatgaagacttcaattggactggagtcgctcaggatggaaaaagctattcttgcaaaaggggatctgttaacagtttctttagtagattgaattggttgcacaaattagaatacaaatatccagcgctgaacgtgactatgccaaacaatggcaaatttgacaaattgtacatttggggggttcaccacccgagcacggacagtgaccaaaccagcctatatgctcgagcatcagggagagtcacagtctctaccaaaagaagccaacaaactgtaatcccgaatatcgggtttagaccctgggtaaggggtctgtccagtagaataagcatctattggacaatagtaaagccgggagacatacttttgattaatagcacagggaatctaattgctcctcggggttacttcaaaatacggactgggaaaagctcaataatgaggtcagatgcacccattggcaactgcagttctgaatgcatcactccaaatggaaacattcccaatgacaaaccttttcaaaatgtaaacaggatcacatatggggcctgccccagatatgttaagcaaaacactctgaagttggcaacagggatgcggaatgtaccagagaaacaaactagaggcatattcggcgcaatcgcaggtttcatagaaaatggttgggagggaatggtagacggttggtacggtttcaggcatcaaaattctgagggcacaggacaagcagcagatcttaaaagcactcaagcagcaatcgaccaaatcaacgggaaactgaataggttaatcgagaaaacgaacgagaaattccatcagatcgaaaaagaattctcagaagtagaagggagaattcaggacctcgagaaatatgttgaagacactaaaatagatctctggtcttacaacgcggggtttcttgttgccctggagaaccaacatacaattgatctaactgactcagaaatgaacaaactgtttgaaagaacaaggaagcaactgagggaaaatgctgaggacatgggcaatggttgcttcaaaatataccacaaatgtgacaatgcctgcatagggtcaatcagaaatggaacttatgaccatgatgtatacagagacgaagcattaaacaaccggttccagatcaaaggtgttgagctgaagtcaggatacaaagattggatcctatggatttcctttgccatatcatgctttttgctttgtgttgttttgttggggttcatcatgtgggcctgccaaaaaggcaacattaggtgcaacatttgcatttga

SEQ ID NO: 31532 - RNA, 1701 nt, synthetic construct
  misc_feature 1..1701: note = hemagglutinin__InfluenzaA__ABG47961
  source 1..1701: mol_type = other RNA
atgaagactatcattgctttgagctacattttatgtctggttttcgctcaaaaactccccggaaatgacaacagcacagcaacgctgtgcctgggacaccatgcagtgccaaacggaacgctagtgaagacaatcacgaatgatcaaattgaagtgactaatgctactgagctggttcagagttcctcaacaggtagaatatgcgacagtcctcaccgaatccttgatggaaaaaactgcacactgatagatgctctattgggagaccctcattgtgatggcttccaaaataaggaatgggacctttttgttgaacgcagcaaagcttacagcaactgttacccttatgatgtgccggattatgcctcccttaggtcactagttgcctcatcaggcaccctggagtttatcaatgaagacttcaattggactggagtcgctcaggatgggaaaagctattcttgcaaaaggggatctgttaacagtttctttagtagattgaattggttgcacaaattagaatacaaatatccagcgctgaacgtgactatgccaaacaatggcaaatttgacaaattgtacatttggggggttcaccacccgagcacggacagtgaccaaaccagcctatatgttcgagcatcagggggagtcacagtctctaccaaaagaagccaacaaactgtaatcccgaatatcgggtccagaccctgggtaaggggtctgtccagtagaataagcatctattggacaatagtaaaaccgggagacatacttttgattaatagcacagggaatctaattgctcctcggggttacttcaaaatgcgaaatgggaaaagctcaataatgaggtcagatgcacccattggcaactgcagttctgaatgcatcactccaaatggaagcattcccaatgacaaaccttttcaaaatgtaaacaggatcacatatggggcctgccccagatatgttaagcaaaacactctgaaattggcaacagggatgcggaatgtaccagagaaacaaactagaggcatattcggcgcaatcgcaggtttcatagaaaatggttgggagggaatggtagacggttggtacggtttcaggcatcaaaattctgagggcacaggacaagcagcagatcttaaaagcactcaagcagcaatcgaccaaatcaacgggaaactgaataggttaatcggtaaaacgaacgagaaattccatcaaatcgaaaaagaattctcagaagtagaagggagaattcaggacctcgagaaatatgttgaagacactaaaatagatctctggtcttacaacgcggagcttcttgttgccctggagaaccaacatacaattgatctaactgactcagaaatgaacaaactgtttgaaagaacaaggaagcaactgagagaaaatgctgaggacatgggcaatggttgcttcaaaatataccacaaatgtgacaatgcctgcatagggtcaatcagaaatggaacttatgaccatgatgtatacagagacgaagcattaaacaaccggttccagatcaaaggtgttgagctgaagtcaggatacaaagattggatcctatggatttcctttgccatatcatgctttttgctttgtgttgttttgctggggttcatcatgtgggcctgccaaaaaggcaacattaggtgcaacatttgcatttga

SEQ ID NO: 31533 - RNA, 1701 nt, synthetic construct
  misc_feature 1..1701: note = hemagglutinin__InfluenzaA__ABG47972
  source 1..1701: mol_type = other RNA
atgaagactatcattgctttgagctacattttatgtctggttttcgctcaaaaacttcccggaaatgacaacagcacagcaacgctgtgcctgggacatcatgcagtgccaaacggaacgctagtgaaaacaatcacgaatgatcaaattgaagtgactaatgctactgagctggttcagagttcctcaacaggtagaatatgcgacagtcctcaccgaatccttgatggaaaaaactgcacactgatagatgctctattgggagaccctcattgtgatggcttccaaaataaggaatgggacctttttgttgaacgcagcaaagcttacagcaactgttacccttatgatgtgccggattatgcctcccttaggtcactagttgcctcatcaggcaccctggagtttatcaatgaagacttcaattggactggagtcgctcaggatgggaaaagctatgcttgcaaaaggggatctgttaacagtttctttagtagattgaattggttgcacaaattagaatacaaatatccagcgctgaacgtgactatgccaaacaatggcaaatttgacaaattgtacatttggggggttcaccacccgagcacggacagtgaccaaaccagcctatatgttcgagcatcagggagagtcacagtctctaccaaaagaagccaacaaactgtaatcccgaatatcgggtttagaccctgggtaaggggtctgtccagtagaataagcatctattggacaatagtaaaaccgggagacatacttttgattaatagcacagggaatctaattgctcctcggggttacttcaaaatacgaaatgggaaaagctcaataatgaggtcagatgcacccattggcaactgcagttctgaatgcatcactccaaatggaagcattcccaatgacaaaccttttcaaaatgtaaacaggatcacatatggggcctgccccagatatgttaagcaaaacactctgaagttggcaacagggatgcggaatgtaccagagaaacaaactagaggcatattcggcgcaatcgcaggtttcatagaaaatggttgggagggaatggtagacggttggtacggtttcaggcatcaaaattctgagggcacaggacaagcagcagatcttaaaagcactcaagcagcaatcgaccaaatcaacgggaaactgaataggttaatcgagaaaacgaacgagaaattccatcaaatcgaaaaagaattctcagaagtagaagggagaattcaggacctcgagaaatatgttgaagacactaaaatagatctctggtcttacaacgcggggcttcttgttgccctggagaaccaacatacaattgatctaactgactcagaaatgaacaaactgtttgaaagaacaaggaagcaactgagggaaaatgctgaggacatgggcaatggttgcttcaaaatataccacaaatgtgacaatgcctgcatagggtcaatcagaaatggaacttatgaccatgatgtatacagagacgaagcattaaacaaccggttccagatcaaaggtgttgagctgaagtcaggatacaaagattggatcctatggatttcctttgccatatcatgctttttgctttgtgttgttttgctggggttcatcatgtgggcctgccaaaaaggcaacattaggtgcaacatttgcatttga

SEQ ID NO: 31534 - RNA, 1701 nt, synthetic construct
  misc_feature 1..1701: note = hemagglutinin__InfluenzaA__ABG47983
  source 1..1701: mol_type = other RNA
atgaagactatcattgctttgagctacattttatgtctggttttcgctcaaaaacttcccggaaatgacaacagcacagcaacgctgtgcctgggacaccatgcagtgccaaacggaacgctagtgaaaacaatcacgaatgatcaaattgaagtgactaatgctactgagctggttcagagttcctcaacaggtagaatatgcgacagtcctcaccgaatccttgatggaaaaaactgcacactgatagatgctctattgggagaccctcattgtgatggcttccaaaataaggaatgggacctttttgttgaacgcagcaaagcttacagcaactgttacccttatgatgtgccggattatgcctcccttaggtcactagttgcctcatcaggcaccctggagtttatcaatgaagacttcaattggactggagtcgctcaggatgggaaaagctatgcttgcaaaaggggatctgttaacagtttctttagtagattgaattggctgcacaaattagaatacaaatatccagcgctgaacgtgactatgccaaacaatggcaaatttgacaaattgtacatttggggggttcaccacccgagcacggacagtgaccaaaccagcctatatgttcgagcatcagggagagtcacagtctctaccaaaagaagccaacaaactgtaatcccgaatatcgggtttagaccctgggtaaggggtctgtccagtagaataagcatctattggacaatagtaaaaccgggagacatacttttgattaatagcacagggaatctaattgctcctcggggttacttcaaaatacgaaatgggaaaagctcaataatgaggtcagatgcacccattggcaactgcagttctgaatgcatcactccaaatggaagcattcccaatgacaaaccttttcaaaatgtaaacaggatcacatatggggcctgccccagatatgttaagcaaaacactctgaagttggcaacagggatgcggaatgtaccagagaaacaaactagaggcatattcggcgcaatcgcaggtttcatagaaaatggttgggagggaatggtagacggttggtacggtttcaggcatcaaaattctgagggcacaggacaagcagcagatcttaaaagcactcaagcagcaatcgaccaaatcaacgggaaactgaataggttaatcgagaaaacgaacgagaaattccatcaaatcgaaaaagaattctcagaagtagaagggagaattcaggacctcgagaaatatgttgaagacactaaaatagatctctggtcttacaacgcggggcttcttgttgccctggagaaccaacatacaattgatctaactgactcagaaatgaacaaactgtttgaaagaacaaggaagcaactgagggaaaatgctgaggacatgggcaatggttgcttcaaaatataccacaaatgtgacaatgcctgcatagggtcaatcagaaatggaacttatgaccatgatgtatacagagacgaagcattaaacaaccggttccagatcaaaggtgtcgagctgaagtcaggatacaaagattggatcctatggatttcctttgccatatcatgctttttgctttgtgttgttttgctggggttcatcatgtgggcctgccaaaaaggcaacattaggtgcaacatttgcatttga

SEQ ID NO: 31535 - RNA, 1701 nt, synthetic construct
  misc_feature 1..1701: note = hemagglutinin__InfluenzaA__ABG47994
  source 1..1701: mol_type = other RNA
atgaagactatcattgctttgagctacattttatgtctggttttcgctcaaaaacttcccggaaatgacaacagcacagcaacgctgtgcctgggacaccatgcagtgccaaacggaacgctagtgaaaacaatcacgaatgatcaaattgaagtgactaatgctactgagctggttcagagttcctcaacaggtagaatatgcgacagtcctcaccgaatccttgatggaaaaaactgcacactgatagatgctctattgggagaccctcattgtgatggcttccaaaataaggaatgggacctttttgttgaacgcagcaaagcttacagcaactgttacccttatgatgtgccggattatgcctcccttaggtcactagttgcctcatcaggcaccctggagtttatcaatgaagacttcaattggactggagtcgctcaggatgggaaaagctatgcttgcaaaaggggatctgttaacagtttctttagtagattgaattggttgcacaaattagaatacaaatatccagcgctgaacgtgactatgccaaacaatggcaaatttgacaaattgtacatttggggggttcaccacccgagcacggacagtgaccaaaccagcctatatgttcgagcatcagggagagtcacagtctctaccaaaagaagccaacaaactgtaatcccgaatatcgggtttagaccctgggtaaggggtctgtccagtagaataagcatctattggacaatagtaaaaccgggagacatacttttgattaatagcacagggaatctaattgctcctcggggttacttcaaaatacgaaatgggaaaagctcaataatgaggtcagatgcacccattggcaactgcagttctgaatgcatcactccaaatggaagcattcccaatgacaaaccttttcaaaatgtaaacaggatcacatatggggcctgccccagatatgttaagcaaaacactctgaagttggcaacagggatgcggaatgtaccagagaaacaaactagaggcatattcggcgcaattgcaggtttcatagaaaatggttgggagggaatggtagacggttggtacggtttcaggcatcaaaattctgagggcacaggacaagcagcagatcttaaaagcactcaagcagcaatcgaccaaatcaacgggaaactgaataggttaatcgagaaaacgaacgagaaattccatcaaatcgaaaaagaattctcagaagtagaagggagaattcaggacctcgagaaatatgttgaagacactaaaatagatctctggtcttacaacgcggggcttcttgttgccctggagaaccaacatacaattgatctaactgactcagaaatgaacaaactgtttgaaagaacaaggaagcaactgagggaaaatgctgaggacatgggcaatggttgcttcaaaatataccacaaatgtgacaatgcctgcatagggtcaatcagaaatggaacttatgaccatgatgtatacagagacgaagcattaaacaaccggttccagatcaaaggtgttgagctgaagtcaggatacaaagattggatcctatggatttcctttgccatatcatgctttttgctttgtgttgttttgctggggttcatcatgtgggcctgccaaaaaggcaacattaggtgcaacatttgcatttga

SEQ ID NO: 31536 - RNA, 1701 nt, synthetic construct
  misc_feature 1..1701: note = hemagglutinin__InfluenzaA__ABG48005
  source 1..1701: mol_type = other RNA
atgaagactatcattgctttgagctacattttatgtctggttttcgctcaaaaacttcccggaaatgacaacagcacagcaacgctgtgcctgggacaccatgcagtgccaaacggaacgctagtgaaaacaatcacgaatgatcaaattgaagtgactaatgctactgagctggttcagagttcctcaacaggtagaatatgcgacagtcctcaccgaatccttgatggaaaaaactgcacactgatagatgctctattgggagaccctcattgtgatggcttccaaaataaggaatgggacctttttgttgaacgcagcaaagcttacagcaactgttacccttatgatgtgccggattatgcctcccttaggtcactagttgcctcatcaggcaccctggagtttatcaatgaagacttcaattggactggagtcgctcaggatgggaaaagctatgcttgcaaaaggggatctgttaacagtttctttagtagattgaattggctgcacaaattagaatacaaatatccagcgctgaacgtgactatgccaaacaatggcaaatttgacaaattgtacatttggggggttcaccacccgagcacggacagtgaccaaaccagcctatatgttcgagcatcagggagagtcacagtctctaccaaaagaagccaacaaactgtaatcccgaatatcgggtttagaccctgggtaaggggtctgtccagtagaataagcatctattggacaatagtaaaaccgggagacatacttttgattaatagcacagggaatctaattgctcctcggggttacttcaaaatacgaaatgggaaaagctcaataatgaggtcagatgcacccattggcaactgcagttctgaatgcatcactccaaatggaagcattcccaatgacaaaccttttcaaaatgtaaacaggatcacatatggggcctgccccagatacgttaagcaaaacactctgaagttggcaacagggatgcggaatgtaccagagaaacaaactagaggcatattcggcgcaatcgcaggtttcatagaaaatggttgggagggaatggtagacggttggtacggtttcaggcatcaaaattctgagggcacaggacaagcagcagatcttaaaagcactcaagcagcaatcaaccaaatcaacgggaaactgaataggttaatcgagaaaacgaacgagaaattccatcaaatcgaaaaagaattctcagaagtagaagggagaattcaggacctcgagaaatatgttgaagacactaaaatagatctctggtcttacaacgcggggcttcttgttgccctggagaaccaacatacaattgatctaactgactcagaaatgaacaaactgtttgaaagaacaaggaagcaactgagggaaaatgctgaggacatgggcaatggttgcttcaaaatataccacaaatgtgacaatgcctgcatagggtcaatcagaaatggaacctatgaccatgatgtatacagagatgaagcattaaacaaccggttccagatcaaaggtgtcgagctgaagtcaggatacaaagattggatcctatggatttcctttgccatatcatgctttttgctttgtgttgttttgctggggttcatcatgtgggcctgccaaaaaggcaacattaggtgcaacatttgcatttga

SEQ ID NO: 31537 - RNA, 1701 nt, synthetic construct; identical to SEQ ID NO: 31529
  misc_feature 1..1701: note = hemagglutinin__InfluenzaA__ABG48016
  source 1..1701: mol_type = other RNA

SEQ ID NO: 31538 - RNA, 1701 nt, synthetic construct; identical to SEQ ID NO: 31529
  misc_feature 1..1701: note = hemagglutinin__InfluenzaA__ABG48027
  source 1..1701: mol_type = other RNA

SEQ ID NO: 31539 - RNA, 1698 nt, synthetic construct
  misc_feature 1..1698: note = hemagglutinin__InfluenzaA__ABG48049
  source 1..1698: mol_type = other RNA
atgaaagtaaaactactggtcctgttatgtacatttacagctacatatgcagacacaatatgtatagggtaccatgccaacaactcaaccgacactgttgacacagtacttgagaagaatgtgacagtgacacactctgtcaacttacttgaggacagtcacaatggaaaactatgtctactaaaaggaatagccccactacaattgggtaattgcagcgttgccggatggatcttaggaaacccagaatgcgaattactgatttccaaggaatcatggtcctacattgtagaaacaccaaatcctgagaatggaacatgttacccagggtatttcgccgactatgaggaactgagggagcaattgagttcagtatcttcatttgagagattcgaaatattccccaaagaaagctcatggcccaaccacaccgtaaccggagtatcagcatcatgctcccataatgggaaaagcagtttttacagaaatttgctatggctgacggggaagaatggtttgtacccaaacctgagcaagtcctatgcaaacaacaaagagaaagaagtccttgtactatggggtgttcatcacccgcctaacataggggaccaaagggccctctatcatacagaaaatgcttatgtctctgtagtgtctacacattatagcagaagattcaccccagaaatagccaaaagacccaaagtaagagatcaggaaggaagaatcaactactactggactctgctggaacccggggatacaataatatttgaggcaaatggaaatctaatagcgccacggtatgctttcgcactgagtagaggctttggatcaggaatcatcacctcaaatgcaccaatggatgaatgtgatgcgaagtgtcaaacacctcagggagctataaacagcagtcttccttttcagaacgtacacccagtcacaataggagagtgtccaaagtatgtcaggagtgcaaaattaaggatggttacaggactaaggaacatcccatccattcaatccagaggtttgtttggagccattgccggtttcattgaaggggggtggactggaatggtagatgggtggtatggttatcatcatcagaatgagcaaggatctggctatgccgcagatcaaaaaagcacacaaaatgccattaacgggattacaaacaaggtgaattctgtaattgagaaaatgaacactcaattcacagctgtgggcaaagaattcaacaaattggaaagaaggatggaaaacttaaataaaaaagttgatgatgggtttctagacatttggacatataatgcagaattgttggttctactggaaaatgaaaggactttggatttccatgactccaatgtgaagaatctgtatgagaaagtaaaaagccaattaaagaataatgccaaagaaataggaaacgggtgttttgaattctatcacaagtgtaacaatgaatgcatggagagtgtgaaaaatggaacttatgactatccaaaatattccgaagaatcaaagttaaacagggagaaaattgatggagtgaaattggaatcaatgggagtctatcagattctggcgatctactcaactgtcgccagttccctggttcttttggtctccctgggggcaatcagcttctggatgtgttccaatgggtctttgcagtgtagaatatgcatctga

SEQ ID NO: 31540 - RNA, 1701 nt, synthetic construct
  misc_feature 1..1701: note = hemagglutinin__InfluenzaA__ABG48060
  source 1..1701: mol_type = other RNA
atgaagactatcattgctttgagctacattttatgtctggttttcgctcaaaaacttcccggaaatgacaacagcacggcaacgctgtgcctggggcaccatgcagtgccaaacggaacgctagtgaaaacaatcacgaatgaccaaattgaagtgaccaatgctactgagctggttcagagttcctcaacaggtggaatatgcgacagtcctcaccaaatccttgatggagaaaactgcacactaatagatgctctattgggagaccctcattgtgatggcttccaaaataaggaatgggacctttttgttgaacgcagcaaagcctacagcaactgttacccttatgatgtgccggattatgcctcccttaggtcactagttgcctcatccggcacactggagtttaacaatgaaagcttcaattggactggagtcgctcagaatggaacaagctctgcttgcaaaaggagatctaataaaagtttctttagtagattgaattggttgcaccaattaaaatacaaatacccagcactgaacgtgactatgccaaacaatgaaaaatttgacaaattgtacatttggggggttcaccacccgagtacggacagtgaccaaatcagcctatatgctcaagcaccagggagagtcacagtctctaccaaaagaagccaacaaactgtaatcccgaatatcggatctagaccctgggtaaggggtgtctccagcagaataagcatctattggacaatagtaaagccgggagacatacttttgattaactgcacagggaatctaattgctcctcggggttacttcaaaatacgaagtgggaaaagctcaataatgaggtcagatgcatccattggcaaatgcaattctgaatgcatcactccaaatggaagcattcccaatgacaaaccatttcaaaatgtaaacaggatcacatatggggcctgtcccagatatgttaagcaaaacactctgaaattggcaacagggatgcggaatgtaccagagaaacaaactagaggcatattcggcgcaatcgcgggtttcatagaaaatggttgggagggaatggtggacggttggtacggtttcaggcatcaaaattctgagggcacaggacaagcagcagatctcaaaagcactcaagcagcaatcaaccaaatcaacgggaaactgaataggttaatcgagaaaacgaacgagaaattccatcaaattgaaaaagaattctcagaagtggaagggagaattcaggacctcgagaaatatgttgaggacactaaaatagatctctggtcgtacaacgcggagcttcttgttgccctggagaaccagcatacaattgatctaactgactcagaaatgaacaaactatttgaaagaacaaagaagcaactgagggaaaatgctgaggatatgggcaatggttgtttcaaaatataccacaaatgtgacaatgcctgcatagggtcaatcagaaatgggacttatgaccatgatgtatacagagacgaagcattaaacaaccggttccagatcaaaggtgttgagctgaagtcaggatacaaagattggatcctatggatttcctttgccatatcatgttttttgctttgtgttgtcttgctggggttcatcatgtgggcctgccaaaaaggcaacattaggtgcaacatttgcatttga

SEQ ID NO: 31541 - RNA, 1701 nt, synthetic construct; identical to SEQ ID NO: 31271
  misc_feature 1..1701: note = hemagglutinin__InfluenzaA__ABG48071
  source 1..1701: mol_type = other RNA

SEQ ID NO: 31542 - RNA, 1701 nt, synthetic construct
  misc_feature 1..1701: note = hemagglutinin__InfluenzaA__ABG48082
  source 1..1701: mol_type = other RNA
atgaagactatcattgctttgagctacattttatgcctggttttcgctcaaaaacttcccggaaatgacaacagcacggcaacgctgtgcctggggcatcatgcagtgccaaacggaacgctagtgaaaacaatcacgaatgaccaaattgaagtaactaatgctactgagctggttcagagttcctcaacaggtagaatatgcgacagtcctcaccaaatccttgatggagaaaactgcacactaatagatgctctattgggagaccctcattgtgatggcttccaaaataaggaatgggacctttttgttgaacgcagcaaagcctacagcaactgttacccttatgatgtgccggattatgtctcccttaggtcactagttgcctcatcaggcacgctggagtttaacaatgaaagcttcaattggactggagtcgctcagaatggaacaagctctgcttgcaaaaggagatctgataaaagtttctttagtagattgaattggttgcaccaattaaaatacaaatatccagcactgaacgtgactatgccaaacaatgaaaaatttgacaaattgtacatttggggggttctccacccgggtacagacagtgaccaaatcagcctatatgctcaagcatcagggagagtcacagtctctaccaaaagaagccaacaaactgtaatcccgaatatcgggtctagaccctgggtaaggggtgtctccagcagaataagcatctattggacaatagtaaaaccgggagacatacttttgattaacagcacagggaatctaattgctcctcggggttacttcaaaatacgaagtgggaaaagctcaataatgaggtcagatgcacccattggcaaatgcaattctgaatgcatcactccaaatggaagcattcccaatggcaaaccatttcaaaatgtaaacaggatcacatatggggcctgtcccagatatgttaagcaaaacactctgaaattggcaacagggatgcggaatgtgccagagaaacaaactagaggcatattcggtgcaatcgcgggcttcatagaaaatggttgggagggaatgatggacggttggtacggtttcaggcatcagaattctgagggcacagggcaagcagcagatcttaaaagcactcaagcagcaatcaaccaaatcaacgggaaactgaataggttaatcgagaaaacgaacgagaaattccatcaaattgaaaaagaattctcagaagtagaagggagaattcaggacctcgagaaatatgtcgaggacactaaaatagatctctggtcgtacaatgcggagcttcttgttgccctggagaaccaacatacaattgatctaactgactcagaaatgaacaaactgtttgaaagaacaaagaagcaactgagggaaaatgctgaggatatgggcaatggttgtttcaaaatataccacaaatgtgacaatgcctgcatagggtcaatcagaaatggaacttatgaccatgatgtatacagagacgaagcattgaacaaccggttccagatcaaaggtgttgagctgaagtcaggatacaaagattggatcctatggatttcctttgccatatcatgttttttgctttgtattgttttactggggttcatcatgtgggcctgccaaaaaggcaacattaggtgcaacatttgcatttga

SEQ ID NO: 31543 - RNA, 1701 nt, synthetic construct
  misc_feature 1..1701: note = hemagglutinin__InfluenzaA__ABG48104
  source 1..1701: mol_type = other RNA
atgaagactatcattgctttgagctacattttatgtctggttttcgctcaaaaacttcccggaaatgacaacagcacggcaacgctgtgcctggggcaccatgcagtgccaaacggaacgctagtgaaaacaatcacgaatgaccaaattgaagtgactaatgctactgagctggttcagagttcctcaacaggtagaatatgcgacagtcctcaccaaatccttgatggagaaaactgcacactaatagatgctctattgggagaccctcattgtgatggcttccaaaataaggaatgggacctttttgttgaacgcagcagagcctacagcaactgttacccttatgatgtgccggattatgtctcccttaggtcactagttgcctcatcaggcacgctggagtttaacaatgaaagcttcaattggactggagtcgctcagaatggaacaagctctgcttgcaaaaggagatctgataaaagtttctttagtagattgaattggttgcaccaattaaaatacaaatatccagcactgaacgtgactatgccaaacaatgaaaaatttgacaaattgtacatttggggggttcaccacccgggtacagacagtgaccaaatcagcctatatgctcaagcatcagggagagtcacagtctctaccaaaagaagccaacaaactgtaattccgaatatcggatctagaccctgggtaaggggtgtctccagcagaataagcatctattggacaatagtaaaaccgggagacatacttttgattaacagcacagggaatctaattgctcctaggggttacttcaaaatacgaagtgggaaaagttcaataatgaggtcagatgcacccattggcaaatgcaattctgaatgcatcactccaaatggaagcattcccaatgacaaaccatttcaaaatgtaaacaggatcacatatgggccctgtcccagatatgttaagcaaaacactctgaaattggcaacagggatgcggaatgtgccagagaaacaaactagaggcatattcggtgcaattgcgggtttcatagaaaatggttgggagggaatgatggacggttggtacggtttcaggcatcaaaattctgagggcacagggcaagcagcagatcttaaaagcactcaagcagcaatcaaccaaatcaacgggaaactgaataggttaatcgagaaaacgaacgagaaattccatcaaattgaaaaagaattctcagaagtagaagggagaattcaggacctcgagaaatatgttgaggacactaaaatagatctctggtcgtacaatgcggagcttcttgttgccctggagaaccaacatacaattgatctaactgactcagaaatgaacaaactgtttgaaagaacaaagaagcaactgagggaaaatgctgaggatatgggcaatggttgtttcaaaatataccacaaatgtgacaatgcctgcatagggtcaattagaaatggaacttatgaccatgatgtatacagagacgaagcattaaacaaccggttccagatcaaaggtgttgagctgaagtcaggatacaaagattggatcctatggatttcctttgccatatcatgttttttgctttgtattgttttgctggggttcatcatgtgggcctgccaaaaaggcaacattaggtgcaacatttgcatttga

SEQ ID NO: 31544 - RNA, 1701 nt, synthetic construct; identical to SEQ ID NO: 31508
  misc_feature 1..1701: note = hemagglutinin__InfluenzaA__ABG48115
  source 1..1701: mol_type = other RNA

SEQ ID NO: 31545 - RNA, 1701 nt, synthetic construct
  misc_feature 1..1701: note = hemagglutinin__InfluenzaA__ABG48126
  source 1..1701: mol_type = other RNA
atgaagactatcattgctttgagctacattttatgcctggttttcgctcaaaaacttcccggaaatgacaacagcacggcaacgctgtgtctggggcatcatgcagtgccaaacggaacgctagtgaaaacaatcacgaatgaccaaattgaagtaactaatgctactgagctggttcagagttcctcaacaggtagaatatgcgacagtcctcaccaaatccttgatggagaaaactgcacactaatagatgctctattgggagaccctcattgtgatggcttccaaaataaggaatgggacctttttgttgaacgcagcaaagcctacagcaactgttacccttatgatgtgccggattatgtctcccttaggtcactagttgcctcatcaggcacgctggagtttaacaatgaaagcttcaattggactggagtcgctcagaatggaacaagctctgcttgcaaaaggagatctgataaaagtttctttagtagattgaattggttgcaccaattaaaatacaaatatccagcactgaacgtgactatgccaaacaatgaaaaatttgacaaattgtacatttggggggttcaccacccgggtacagacagtgaccaaatcagcctatatgctcaagcatcggggagagtcacagtctctaccaaaagaagccaacaaactgtaatcccgaatatcggatctagaccctgggtaaggggtgtctccagcagaataagcatctattggacaatagtaaaaccgggagacatacttttgattaacagcacagggaatctaattgctcctcggggttacttcaaaatacgaagtgggaaaagctcaataatgaggtcagatgcacccattggcaaatgcaattctgaatgcatcactccaaatggaagcattcccaatgacaaaccatttcaaaatgtaaacaggatcacatatggggcctgtcccagatatgttaagcaaaacactctgaaattggcaacagggatgcggaatgtgccagagaaacaaactagaggcatattcggtgcaatcgcgggcttcatagaaaatggttgggagggaatgatggacggttggtacggtttcaggcatcaaaattctgagggcacagggcaagcagcagatcttaaaagcactcaagcagcaatcaaccaaatcaacgggaaactgaataggttaatcgagaaaacgaacgagaaattccatcaaattgaaaaagaattctcagaagtagaagggagaattcaggacctcgagaaatatgttgaggacactaaaatagatctctggtcgtacaatgcggagcttcttgttgccctggagaaccaacatacaattgatctaactgactcagaaatgaacaaactgtttgaaagaacaaagaagcaactgagggaaaatgctgaggatatgggcaatggttgtttcaaaatataccacaaatgtgacaatgcctgcatagggtcaatcagaaatggaacttatgaccataatgtatacagagacgaagcattgaacaaccggttccagatcaaaggtgttgagctgaagtcaggatacaaagattgggtcctatggatttcctttgccatatcatgttttttgctttgtattgttttgctggggttcatcatgtgggcctgccaaaaaggcaacattaggtgcaacatttgcatttga

SEQ ID NO: 31546 - RNA, 1701 nt, synthetic construct
  misc_feature 1..1701: note = hemagglutinin__InfluenzaA__ABG48148
  source 1..1701: mol_type = other RNA
atgaagactatcattgctttgagctatattttatgcctggttttcgctcaaaaacttcccggaaatgacaacagcacggcaacgctgtgtctggggcatcatgcagtgccaaacggaacgctagtgaaaacaatcacgaatgaccaaattgaagtaactaatgctactgagctggttcagagttcctcaacaggtagaatatgcgacagtcctcaccaaatccttgatggagaaaactgcacactaatagatgctctattgggagaccctcattgtgatggcttccaaaataaggaatgggacctttttgttgaacgcagcaaagcctacagcaactgttacccttatgatgtgccggattatgtctcccttaggtcactagttgcctcatcaggcacgctggagtttaacaatgaaagcttcaattggactggagtcgctcagaatggaacaagctctgcttgcaaaaggagatctgataaaagtttctttagtagattgaattggttgcaccaattaaaatacaaatatccagcactgaacgtgactatgccaaacaatgaaaaatttgacaaattgtacatttggggggttcaccacccgggtacagacagtgaccaaatcagcctatatgctcaagcatcggggagagtcacagtctctaccaaaagaagccaacaaactgtaatcccgaatatcggatctagaccctgggtaaggggtgtctccagcagaataagcatctattggacaatagtaaaaccgggagacatacttttgattaacagcacagggaatctaattgctcctcggggttacttcaaaatacgaagtgggaaaagctcaataatgaggtcagatgcacccattggcaaatgcaattctgaatgcatcactccaaatggaagcattcccaatgacaaaccatttcaaaatgtaaacaggatcacatatggggcctgtcccagatatgttaagcaaaacactctgaaattggcaacagggatgcggaatgtgccagagaaacaaactagaggcatattcggtgcaatcgcgggcttcatagaaaatggttgggagggaatgatggacggttggtacggtttcaggcatcaaaattctgagggcacagggcaagcagcagatcttaaaagcactcaagcagcaatcaaccaaatcaacgggaaactgaataggttaatcgagaaaacgaacgagaaattccatcaaattgaaaaagaattctcagaagtagaagggagaattcaggacctcgagaaatatgttgaggacactaaaatagatctctggtcgtacaatgcggagcttcttgttgccctggagaaccaacatacaattgatctaactgactcagaaatgaacaaactgtttgaaagaacaaagaagcaactgagggaaaatgctgaggatatgggcaatggttgtttcaaaatataccacaaatgtgacaatgcctgcatagggtcaatcagaaatggaacttatgaccatgatgtatacagagacgaagcattgaacaaccggttccagatcaaaggtgttgagctgaagtcaggatacaaagattgggtcctatggatttcctttgccatatcatgttttttgctttgtattgttttgctggggttcatcatgtgggcctgccaaaaaggcaacattaggtgcaacatttgcatttga

SEQ ID NO: 31547 - RNA, 1701 nt, synthetic construct
  misc_feature 1..1701: note = hemagglutinin__InfluenzaA__ABG48159
  source 1..1701: mol_type = other RNA
atgaagactatcattgctttgagctacattttatgcctggttttcgctcaaaaacttcccggaaatgacaacagcacggcaacgctgtgtctggggcatcatgcagtgccaaacggaacgctagtgaaaacaatcacgaatgaccaaattgaagtaactaatgctactgagctggttcagagttcctcaacaggtagaatatgcgacagtcctcaccaaatccttgatggagaaaactgcacactaatagatgctctattgggagaccctcattgtgatggcttccaaaataaggaatgggacctttttgttgagcgcagcaaagcctacagcaactgttacccttatgatgtgccggattatgtctcccttaggtcactagttgcctcatcaggcacgctggagtttaacaatgaaagcttcaattggactggagtcgctcagaatggaacaagctctgcttgcaaaaggagatctgataaaagtttctttagtagattgaattggttgcaccaattaaaatacaaatatccagcactgaacgtgactatgccaaacaatgaaaaatttgacaaattgtacatttggggggttcaccacccgggtacagacagtgaccaaatcagcctatatgctcaagcatcagggagagtcacagtctctaccaaaagaagccaacaaactgtaatcccgaatatcggatctagaccctgggtaaggggtgtctccagcagaataagcatctattggacaatagtaaaaccgggagacatacttttgattaacagcacagggaatctaattgctcctcggggttacttcaaaatacgaagtgggaaaagctcaataatgaggtcagatgcacccattggcaaatgcaattctgaatgcatcactccaaatggaagcattcccaatgacaaaccatttcaaaatgtaaacaggatcacatatggggcctgtcccagatatgttaagcaaaacactctgaaattggcaacagggatgcggaatgtgccagagaaacaaactagaggcatattcggtgcaatcgcgggcttcatagaaaatggttgggagggaatgatggacggttggtacggtttcaggcatcaaaattctgagggcacagggcaagcagcagatcttaaaagcactcaagcagcaatcaaccaaatcaacgggaaactgaataggttaatcgagaaaacgaacgagaaattccatcaaattgaaaaagaattctcagaagtagaagggagaattcaggacctcgagaaatatgttgaggacactaaaatagatctctggtcgtacaatgcggagcttcttgttgccctggagaaccaacatacaattgatctaactgactcagaaatgaacaaactgtttgaaagaacaaagaagcaactgagggaaaatgctgaggatatgggcaatggttgtttcaaaatataccacaaatgtgacaatgcctgcatagggtcaatcagaaatggaacttatgaccatgatgtatacagagacgaagcattgaacaaccggttccagatcaaaggtgttgagctaaagtcaggatacaaagattgggtcctatggatttcctttgccatatcatgttttttgctttgtattgttttgctggggttcatcatgtgggcctgccaaaaaggcaacattaggtgcaacatttgcatttga

SEQ ID NO: 31548 - RNA, 1701 nt, synthetic construct
  misc_feature 1..1701: note = hemagglutinin__InfluenzaA__ABG48170
  source 1..1701: mol_type = other RNA
atgaagactatcattgctttgagctacattttatgcctggtttttgctcaaaaacttcccggaaatgacaacagcacggcaacgctgtgcctggggcaccatgcagtgccaaacggaacgctagtgaaaacaatcacgaatgaccaaattgaagtaactaatgctactgagctggttcagagttcctcaacaggtagaatatgcgacagtcctcaccaaatccttgatggagaaaactgcacactaatagatgctctattgggagaccctcattgtgatggcttccaaaataaggaatgggacctttttgttgaacgcagcaaagcctacagcaactgttacccttatgatgtgccggattatgtctcccttaggtcactagttgcctcatcaggcacgctggagtttaacaatgaaagtttcaattggactggagtcgctcagaatggaacaagctctgcttgcaaaaggagatctgataaaagtttctttagtagactgaattggttgcaccaattaaaatacaaatatccagcactgaacgtgactatgccaaacaatgaaaaatttgacaaattgtacatttggggggttcaccacccgggtacagacagtgaccaaatcagcctatatgctcaagcatcagggagagtcacagtctctaccaaaagaagccaacaaactgtaatcccgaatatcggatctagaccctgggtaaggggtgtctccagcagaataagcatctattggacaatagtaaaaccgggagacatacttttgattaacagcacagggaatctaattgctcctcggggttacttcaaaatacgaagtgggaaaagctcaataatgaagtcagatgcacccattggcaaatgcaattttgaatgcatcactccaaatggaagcattcccaatggcaaaccatttcaaaatgtaaacaggatcacatatggggcctgtcccagatatgttaagcaaaacactctgaaattggcaacagggatgcggaatgtgccagagaaacaaactagaggcatattcggtgcaatcgcgggcttcatagaaaatggttgggagggaatgatggacggttggtacggtttcaggcaccagaattctgagggcacagggcaagcagcagatcttaaaagcactcaagcagcaatcaaccaaatcaacgggaaactgaataggttaatcgagaaaacgaacgagaaattccatcaaattgaaaaagaattctcagaagtagaagggagaattcaggacctcgagaaatatgtcgaggacactaaaatagatctctggtcgtacaatgcggagcttcttgttgccctggagaaccaacatacaattgatctaactgactcagaaatgaacaaactgtttgaaagaacaaagaagcaactgagggaaaatgctgaggatatgggcaatggttgtttcaaaatataccacaaatgtgacaatgcctgcatagggtcaatcagaaatggaacttatgaccatgatgtgtacagagatgaagcattaaacaaccggttccagatcaaaggtgttgaactgaagtcaggatacaaagattggatcctatggatttcctttgccatatcatgttttttgctttgtattgttttactggggttcatcatgtgggcctgccaaaaaggcaacattaggtgcaacatttgcatttga

SEQ ID NO: 31549 - RNA, 1701 nt, synthetic construct
  misc_feature 1..1701: note = hemagglutinin__InfluenzaA__ABG48181
  source 1..1701: mol_type = other RNA
atgaagactatcattgctttgagctacattttatgcctggttttcgctcaaaaacttcccggaaatgacaacagcacggcaacgctgtgtctggggcatcatgcagtgccaaacggaacgctagtgaaaacaatcacgaatgaccaaattgaagtaactaatgctactgagctggttcagagttcctcaacaggtagaatatgcgacagtcctcaccaaatccttgatggagaaaactgcacactaatagatgctctattgggagaccctcattgtgatggcttccaaaataaggaatgggacctttttgttgaacgcagcaaagcctacagcaactgttacccttatgatgtgccggattatgtctcccttaggtcactagttgcctcatcaggcacgctggagtttaacaatgaaagcttcaattggactggagtcgctcagaatggaacaagctatgcttgcaaaaggagatctgataaaagtttctttagtagattgaattggttgcaccaattaaaatacaaatatccagcactgaacgtgactatgccaaacaatgaaaaatttgacaaattgtacatttggggggttcaccacccgggtacagacagtgaccaaatcagcctatatgctcaagcatcggggagagtcacagtctctaccaaaagaagccaacaaactgtaatcccgaatatcggatctagaccctgggtaaggggtgtctccagcagaataagcatctattggacaatagtaaaaccgggagacatacttttgattaacagcacagggaatctaattgctcctcggggttacttcaaaatacgaagtgggaaaagctcaataatgaggtcagatgcacccattggcaaatgcaattctgaatgcatcactccaaatggaagcattcccaatgacaaaccatttcaaaatgtaaacaggatcacatatggggcctgtcccagatatgttaagcaaaacactctgaaattggcaacagggatgcggaatgtgccagagaaacaaactagaggcatattcggtgcaatcgcgggcttcatagaaaatggttgggagggaatgatggacggttggtacggtttcaggcatcaaaattctgagggcacagggcaagcagcagatcttaaaagcactcaagcagcaatcaaccaaatcaacgggaaactgaataggttaatcgagaaaacgaacgagaaattccatcaaattgaaaaagaattctcagaagtagaagggagaattcaggacctcgagaaatatgttgaggacactaaaatagatctctggtcgtacaatgcggagcttcttgttgccctggagaaccaacatacaattgatctaactgactcagaaatgaacaaactgtttgaaagaacaaagaagcaactgagggaaaatgctgaggatatgggcaatggttgtttcaaaatataccacaaatgtgacaatgcctgcatagggtcaatcagaaatggaacttatgaccatgatgtatacagagacgaagcattgaacaaccggttccagatcaaaggtgttgagctgaagtcaggatacaaagattgggtcctatggatttcctttgccatatcatgttttttgctttgtattgttttgctggggttcatcatgtgggcctgccaaaaaggcaacattaggtgcaacatttgcatttga

SEQ ID NO: 31550 - RNA, 1701 nt, synthetic construct
  misc_feature 1..1701: note = hemagglutinin__InfluenzaA__ABG48192
  source 1..1701: mol_type = other RNA
atgaagactatcattgctttgagctacattttatgcctggttttcgctcaaaaacttcccggaaatgacaacagcacggcaacgctgtgtctggggcatcatgcagtgccaaacggaacgctagtgaaaacaatcacgaatgaccaaattgaagtaactaatgctactgagctggttcagagttcctcaacaggtagaatatgcgacagtcctcaccaaatccttgatggagaaaactgcacactaatagatgctctattgggagaccctcattgtgatggcttccaaaataaggaatgggacctttttgttgagcgcagcaaagcctacagcaactgttacccttatgatgtgccggattatgtctcccttaggtcactagttgcctcatcaggcacgctggagtttaacaatgaaagcttcaattggactggagtcgctcagaatggaacaagctctgcttgcaaaaggagatctgataaaagtttctttagtagattgaattggttacaccaattaaaatacaaatatccagcactgaacgtgactatgccaaacaatgaaaaatttgacaaattgtacatttggggggttcaccacccgggtacagacagtgaccaaatcagcctatatgctcaagcatcagggagagtcacagtctctaccaaaagaagccaacaaactgtaatcccgaatatcggatctagaccctgggtaaggggtgtctccagcagaataagcatctattggacaatagtaaaaccgggagacatacttttgattaacagcacagggaatctaattgctcctcggggttacttcaaaatacgaagtgggaaaagctcaataatgaggtcagatgcacccattggcaagtgcaattctgaatgcatcactccaaatggaagcattcccaatgacaaaccatttcaaaatgtaaacaggatcacatatggggcctgtcccagatatgttaagcaaaacactctgaaattggcaacagggatgcggaatgtgccagagaaacaaactagaggcatattcggtgcaatcgcgggcttcatagaaaatggttgggagggaatgatggacggttggtacggtttcaggcatcaaaattctgagggcacagggcaagcagcagatcttaaaagcactcaagcagcaatcaaccaaatcaacgggaaactgaatagattaatcgagaaaacgaacgagaaattccatcaaattgaaaaagaattctcagaagtagaagggagaattcaggacctcgagaaatatgttgaggacactaaaatagatctctggtcgtacaatgcggagcttcttgttgccctggagaaccaacatacaattgatctaactgactcagaaatgaacaaactgtttgaaagaacaaagaagcaactgagggaaaatgctgaggatatgggcaatggttgtttcaaaatataccacaaatgtgacaatgcctgcatagggtcaatcagaaatggaacttatgaccatgatgtatacagagacgaagcattgaacaaccggttccagatcaaaggtgttgagctaaagtcaggatacaaagattgggtcctatggatttcctttgccatatcatgttttttgctttgtattgttttgctggggttcatcatgtgggcctgccaaaaaggcaacattaggtgcaacatttgcatttga

SEQ ID NO: 31551 - RNA, 1701 nt, synthetic construct
  misc_feature 1..1701: note = hemagglutinin__InfluenzaA__ABG48203
  source 1..1701: mol_type = other RNA
atgaagactatcattgctttgagctacattctatgtctggttttcgctcaaaaacttcccggaaatgacaacagcacggcaacgctgtgccttgggcaccatgcagtaccaaacggaacgatagtgaaaacaatcacaaatgaccaaattgaagttactaatgctactgagctggttcagagttcctcaacaggtggaatatgcgacagtcctcatcagatccttgatggagaaaactgcacactaatagatgctctattgggagaccctcagtgtgatggcttccaaaataagaaatgggacctttttgttgaacgcagcaaagcctacagcaactgttacccttatgatgtgccggatcatgcctcccttaggtcactagttgcctcatccggcacactggagtttaacaatgaaagcttcgattggactggagtcactcagaatggaacaagctctgcttgcaaaaggagatctaataaaagtttctttagtagattgaattggttgacccacttaaaatacaaatacccagcattgaacgtgactatgccaaacaatgaaaaatttgacaaattgtacatttggggggttcaccacccgggtacggacagtgaccaaatcagcctatatgctcaagcatcaggaagaatcacagtctctaccaaaagaagccaacaaactgtaatcccgaatatcggatctagacccagggtaagggatgtctccagccgaataagcatctattggacaatagtaaaaccgggagacatacttttgattaacagcacagggaatctaattgctcctcggggttacttcaaaatacgaagtgggaaaagctcaataatgagatcagatgcacccattggcaaatgcaattctgaatgcatcactccaaatggaagcattcccaatgacaaaccatttcaaaatgtaaacaggatcacatatggggcctgtcccagatatgttaagcaaaacactctgaaattggcaacagggatgcgaaatgtaccagagaaacaaactagaggcatatttggcgcaatcgcgggtttcatagaaaatggttgggagggaatggtggacggttggtacggtttcaggcatcaaaattctgagggcacaggacaagcagcagatctcaaaagcactcaagcagcaatcaaccaaatcaatgggaaactgaataggttaatcgggaaaacaaacgagaaattccatcagattgaaaaagaattctcagaagtagaagggagaattcaggacctcgagaaatatgttgaggacactaaaatagatctctggtcatacaacgcggagcttcttgttgccctggagaaccaacatacaattgatctaactgactcagaaatgaacaaactgtttgaaagaacaaagaagcaactgagggaaaatgctgaggatatgggcaatggttgtttcaaaatataccacaaatgtgacaatgcctgcatagggtcaatcagaaatggaacttatgaccatgatgtgtacagagatgaagcattaaacaaccggttccagatcaaaggtgttgagctgaagtcaggatataaagattggatcctatggatttcctttgccatatcatgttttttgctttgtgttgctttgttggggttcatcatgtgggcctgccaaaaaggcaacattaggtgcaacgtttgcatttga

SEQ ID NO: 31552 - RNA, 1701 nt, synthetic construct; identical to SEQ ID NO: 31024
  misc_feature 1..1701: note = hemagglutinin__InfluenzaA__ABG48214
  source 1..1701: mol_type = other RNA

SEQ ID NO: 31553 - RNA, 1701 nt, synthetic construct; identical to SEQ ID NO: 31024
  misc_feature 1..1701: note = hemagglutinin__InfluenzaA__ABG48236
  source 1..1701: mol_type = other RNA

SEQ ID NO: 31554 - RNA, 1701 nt, synthetic construct
  misc_feature 1..1701: note = hemagglutinin__InfluenzaA__ABG48247
  source 1..1701: mol_type = other RNA
atgaagactatcattgctttgagctacattctatgtctggttttcgctcaaaaacttcccggaaatgacaacaacacggcaacgctgtgccttgggcaccatgcagtaccaaacggaacgatagtgaaaacaatcacaaatgaccaaattgaagttactaatgctactgagctggttcagagttcctcaacaggtggaatatgcgacagtcctcatcagatccttgatggagaaaactgcacactaatagatgctctattgggagaccctcagtgtgatggcttccaaaataagaaatgggacctttttgttgaacgcagcaaagcctacagcaactgttacccttatgatgtgccggatcatgcctcccttaggtcactagttgcctcatccggcacactggagtttaacaatgaaagcttcgattggactggagtcactcagaatggaacaagctctgcttgcaaaaggagatctaataaaagtttctttagtagattgaattggttgacccacttaaaatacaaatacccagcattgaacgtgactatgccaaacaatgaaaaatttgacaaattgtacatttggggggttcaccacccgggtacggacagtgaccaaatcagcctatatgctcaagcatcaggaagaatcacagtctctaccaaaagaagccaacaaactgtaatcccgaatatcggatctagacccagggtaagggatgtctccagccgaataagcatctattggacaatagtaaaaccgggagacatacttttgattaacagcacagggaatctaattgctcctcggggttacttcaaaatacgaagtgggaaaagctcaataatgagatcagatgcacccattggcaaatgcaattctgaatgcatcactccaaatggaagcattcccaatgacaaaccatttcaaaatgtaaacaggatcacatatggggcctgccccagatatgttaagcaaaacactctgaaattggcaacagggatgcgaaatgtaccagagaaacaaactagaggcatatttggcgcaatcgcgggtttcatagaaaatggttgggagggaatggtggacggttggtacggtttcaggcatcaaaattctgagggcacaggacaagcagcagatctcaaaagcactcaagcagcaatcaaccaaatcaatgggaaactgaataggttaatcgggaaaacaaacgagaaattccatcagattgaaaaagaattctcagaagtagaagggagaattcaggacctcgagaaatatgttgaggacactaaaatagatctctggtcatacaacgcggagcttcttgttgccctggagaaccaacatacaattgatctaactgactcagaaatgaacaaactgtttgaaagaacaaagaagcaactgagggaaaatgctgaggatatgggcaatggttgtttcaaaatataccacaaatgtgacaatgcctgcatagggtcaatcagaaatggaacttatgaccatgatgtgtacagagatgaagcattaaacaaccggttccagatcaaaggtgttgagctgaagtcaggatataaagattggatcctatggatttcctttgccatatcatgttttttgctttgtgttgctttgttggggttcatcatgtgggcctgccaaaaaggcaacattaggtgcaacatttgcatttga

SEQ ID NO: 31555 - RNA, 1701 nt, synthetic construct
  misc_feature 1..1701: note = hemagglutinin__InfluenzaA__ABG48269
  source 1..1701: mol_type = other RNA
atgaagactatcattgctttgagctacattctatgtctggttttcgctcaaaaacttcccggaaatgacaacagcacggcaacgctgtgccttgggcaccatgcagtaccaaacggaacaatagtgaaaacaatcacgaatgaccaaattgaagttactaatgctactgaactggttcagagttccccaacaggtggaatatgcgacagtcctcatcagatccttgatggagaaaactgcacactaatagatgctctattgggagaccctcagtgtgatggcttccaaaataagaaatgggacctttttgtcgaacgcagcaaagcccacagcaactgttacccttatgatgtgccggattatgcctcccttaggtcactagttgcctcatccggcacactggagtttaacaatgaaagcttcaattggactggagtcactcaaaatggaacaagttctgcttgcaaaaggagatctaataaaagtttctttagtagattgaattggttgacccacttaaaattcaaatacccagcattgaacgtgactatgccaaacaatgaaaaatttgacaaattgtacatttggggggttcaccacccgggtacggacaatgaccaaatcagcctatatgctcaagcatcaggaagaatcacagtctctaccaaaagaagccaacaaactgtaatcccgaatatcggatctagacccagggtaagggatgtccccagcagaataagcatctattggacaatagtaaaaccgggagacatacttttgattaacagcacagggaatctaattgctcctcggggttacttcaaaatacgaagtgggaaaagctcaataatgagatcagatgcacccattggcaaatgcaattctgaatgcatcactccaaatggaagcattcccaatgacaaaccatttcaaaacgtaaacaggatcacatatggggcctgtcccagatatgttaagcaaaacactctgaaattggcaacagggatgcgaaacgtaccagagaaacaaactagaggcatatttggcgcaatcgcgggtttcatagaaaatggttgggagggaatggtggacggttggtacggtttcaggcatcaaaattctgagggaacaggacaagcagcagatctcaaaagcactcaagcagcaatcaaccaaatcaatgggaagctgaataggttgatcgggaaaacaaacgagaaattccatcaaattgaaaaagaattctcagaagtagaagggagaattcaggacctcgagaaatatgttgaggacactaaaatagatctctggtcatacaacgcggagcttcttgttgccctggagaaccaacatacaattgatctaactgactcagaaatgaacaaactgtttgaaagaacaaagaagcaactgagggaaaatgctgaggatatgggcaatggttgtttcaaaatataccacaaatgtgacaatgcctgcatagggtcaatcagaaatggaacttatgaccatgatgtatacagagatgaagcattaaacaaccggttccagatcaaaggtgttgagctgaagtcaggatacaaagattggatcctatggatttcctttgccatatcatgttttttgctttgtgttgctttgttggggttcatcatgtgggcctgccaaaaaggcaacattaggtgcaacatttgcatttga

SEQ ID NO: 31556 - RNA, 1701 nt, synthetic construct
  misc_feature 1..1701: note = hemagglutinin__InfluenzaA__ABG48291
  source 1..1701: mol_type = other RNA
atgaagactatcattgctttgagctacattttatgtctggttttcgctcaaaaacttcccggaaatgacaacagcacagcaacgctgtgcctgggacatcatgcagtgccaaacggaacgctagtgaaaacaatcacgaatgatcaaattgaagtgactaatgctactgagctggttcagagttcctcaacaggtagaatatgcgacagtcctcaccgaatccttgatggaaaaaactgcacactgatagatgctctattgggagaccctcattgtgatggcttccaaaataaggaatgggacctttttgttgaacgcagcaaagcttacagcaactgttacccttatgatgtgccggattatgcctcccttaggtcactagttgcctcatcaggcaccctggagtttatcaatgaagacttcaattggactggagtcgctcaggatgggggaagctatgcttgcaaaaggggatctgttaacagtttctttagtagattgaattggttgcacaaatcagaatacaaatacccagcgctgaacgtgtctatgccaaacaatggcaaatttaacaaattgtacatttggggggttcaccacccgagcacggacagtgaccaaaccagcctatatgttcgagcatcagggagagtcacagtctctaccaaaagaagccaacaaactgtaaccccgaatatcgggtctagaccctgggtaaggggtctgtccagtagaataagcatctattggacaatagtaaaaccgggagacatacttttgattaatagcacagggaatctaattgctcctcggggttacttcaaaatacgaaatgggaaaagctcaataatgaggtcagatgcacccattggcacctgcagttttgaatgcatcactccaaatggaagcattcccaatgacaaaccttttcaaaatgtaaacaggatcacatatggggcctgccccagatatgttaagcaaaacactctgaaattggcaacagggatgcggaatgtaccagagaaacaaactagaggcatattcggcgcaatcgcaggtttcatagaaaatggttgggagggaatggtagacggttggtacggtttcaggcatcaaaattctgagggcacaggacaagcagcagatcttaaaagcactcaagcagcaatcgaccaaatcaacgggaaactgaataggttaatcgagaaaacgaacgagaaattccatcaaatcgaaaaagaattctcagaagtagaagggagaattcaggacctcgagaaatatgttgaagacactaaaatagatctctggtcttacaacgcggagcttcttgttgccctggagaaccaacatacaattgatctaactgactcagaaatgaacaaactgtttgaaaaaacaaggaagcaactgagggaaaatgctgaggacatgggcaatggttgcttcaaaatataccacaaatgtgacaatgcctgcatagggtcaatcagaaatggaacttatgaccatgatgtatacagagatgaagcattaaacaaccggttccagatcaaaggtgttgagctgaagtcaggatacaaagattggatcctatggatttcctttgccatatcatgctttttgctttgtgttgttttgctggggttcatcatgtgggcctgccaaaaaggcaacattaggtgcaacatttgcatttga

SEQ ID NO: 31557 - RNA, 1701 nt, synthetic construct
  misc_feature 1..1701: note = hemagglutinin__InfluenzaA__ABG48335
  source 1..1701: mol_type = other RNA
atgaagactatcattgctttgagctacattttatgtctggttttcgctcaaaaacttcccggaaatgacaacagcacagcaacgctgtgcctgggacaccatgcagtgccaaacggaacgctagtgaaaacaatcacgaatgatcaaattgaagtgactaatgctactgagctggttcagagttcctcaacaggtagaatatgcgacagtcctcaccgaatccttgatggaaaaaactgcacactgatagatgctctattgggagaccctcattgtgatggcttccaaaataaggaatgggacctttttgttgaacgcagcaaagcttacagcaactgttacccttatgatgtgccggattatgcctcccttaggtcactagttgcctcatcaggcaccctagagtttatcaatgaagacttcaattggactggagtagctcaggatgggaaaagctatgcttgcaaaaggggatctgttaacagtttctttagtagattgaattggttgcacaaattagaatacaaatatccagcgctgaacgtgactatgccaaacaatggcaaatttgacaaattgtacatttggggggttcaccacccgagcacggacagtgaccaaaccagcctatatgttcgagcatcagggagagtcacagtctctaccaaaagaagccaacaaactgtaatcccgaatatcgggtctagaccctgggtaaggggtctgtccagtagaataagcatctattggacaatagtaaaaccgggagacatacttttgattaatagcacagggaatctaattgctcctcggggttacttcaaaatacgaaatgggaaaagctcaataatgaggtcagatgcacccattggcaactgcagttctgaatgcatcactccaaatggaagcattcccaatgacaaaccttttcaaaatgtaaacaggatcacatatggggcctgccccagatatgttaagcaaaacactctgaaattggcaacagggatgcggaatgtaccagagaaacaaactagaggcatattcggcgcaatcgcaggtttcatagaaaatggttgggagggaatggtagacggttggtacggtttcaggcatcaaaattctgagggcacaggacaagcagcagatcttaaaagcactcaagcagcaatcgaccaaatcaacgggaaactgaataggttaatcgagaaaacgaacgagaaattccatcaaatcgaaaaagaattctcagaagtagaagggagaattcaggacctcgagaaatatgttgaagacactaaaatagatctctggtcttacaacgcggagcttcttgttgccctggagaaccaacatacaattgatctaactgactcagaaatgaacaaactgtttgaaagaacaaggaagcaactgagggaaaatgctgaggacatgggcaatggttgcttcaaaatataccacaaatgtgacaatgcctgcatagggtcaatcagaaatggaacttatgaccatgatgtatacagagacgaagcattaaacaaccggttccagatcaaaggtgttgagctgaagtcaggatacaaagattggatcctatggatttcctttgccatatcatgctttttgctttgtgttgttttgctggggttcatcatgtgggcctgccaaaaaggcaacattaggtgcaacatttgcatttga

SEQ ID NO: 31558 - RNA, 1701 nt, synthetic construct
  misc_feature 1..1701: note = hemagglutinin__InfluenzaA__ABG48346
  source 1..1701: mol_type = other RNA
atgaagactatcattgctttgagctacattttatgtctggttttcgctcaaaaacttcccggaaatgacaacagcacagcaacgctgtgcctgggacaccatgcagtgccaaacggaacgctagtgaaaacaatcacgaatgatcaaattgaagtgactaatgctactgagctggttcagagttcctcaacaggtagaatatgcgacagtcctcaccgaatccttgatggaaaaaactgcacactgatagatgctctattgggagaccctcattgtgatggcttccaaaataaggaatgggacctttttgttgaacgcaacaaagcttacagcaactgttacccttatgatgtgccggattatgcctcccttaggtcactagttgcctcatcaggcaccctagagtttatcaatgaagacttcaattggactggagtagctcaggatgggaaaagctatgcttgcaaaaggggatctgttaacagtttctttagtagattgaattggttgcacaaattagaatacaaatatccagcgctgaacgtgactatgccaaacaatggcaaatttgacaaattgtacatttggggggttcaccacccgagcacggacagtgaccaaaccagcctatatgttcgagcatcagggagagtcacagtctctaccaaaagaagccaacaaactgtaatcccgaatatcgggtctagaccctgggtaaggggtctgtccagtagaataagcatctattggacaatagtaaaaccgggagacatacttttgattaatagcacagggaatctaattgctcctcggggttacttcaaaatacgaaatgggaaaagctcaataatgaggtcagatgcacccattggcaactgcagttctgaatgcatcactccaaatggaagcattcccaatgacagaccttttcaaaatgtaaacaggatcacatatggggcctgccccagatatgttaagcaaaacactctgaaattggcaacagggatgcggaatgtaccagagaaacaaactagaggcatattcggcgcaatcgcaggtttcatagaaaatggttgggagggaatggtagacggttggtacggtttcaggcatcaaaattctgagggcacaggacaagcagcagatcttaaaagcactcaagcagcaatcgaccaaatcaacgggaaactgaataggttaatcgagaaaacgaacgagaaattccatcaaatcgaaaaagaattctcagaagtagaagggagaattcaggacctcgagaaatatgttgaagacactaaaatagatctctggtcttacaacgcggagcttcttgttgccctggagaaccaacatacaattgatctaactgactcagaaatgaacaaactgtttgaaagaacaaggaagcaactgagggaaaatgctgaggacatgggcaatggttgcttcaaaatataccacaaatgtgacaatgcctgcatagggtcaatcagaaatggaacttatgaccatgatgtatacagagacgaagcattaaacaaccggttccagatcaaaggtgttgagctgaagtcaggatacaaagattggatcctatggatttcctttgccatatcatgctttttgctttgtgttgttttgctggggttcatcatgtgggcctgccaaaaaggcaacattaggtgcaacatttgcatttga

SEQ ID NO: 31559 - RNA, 1701 nt, synthetic construct
  misc_feature 1..1701: note = hemagglutinin__InfluenzaA__ABG48357
  source 1..1701: mol_type = other RNA
atgaagactatcattgctttgagctacattttatgtctggttttcgctcaaaaacttcccggaaatgacaacagcacagcaacgctgtgcctgggacaccatgcagtgccaaacggaacgctagtgaaaacaatcacgaatgatcaaattgaagtgactaatgctactgagctggttcagagttcctcaacaggtagaatatgcgacagtcctcaccgaatccttgatggaaaaaactgcacactgatagatgctctattgggagaccctcattgtgatggcttccaaaataaggaatgggacctttttgttgaacgcagcaaagcttacagcaactgttacccttatgatgtgccggattatgcctcccttaggtcactagttgcctcatcaggcaccctggagtttatcaatgaagacttcaattggactggagtcgctcaggatgggaaaagctatgcttgcaaaaggggatctgttaacagtttctttagtagattgaattggttgcacaaattagaatacaaatatccagcgctgaacgtgactatgccaaacaatggcaaatttgacaaattgtacatttggggggttcaccacccgagcacggacagtgaccaaaccagcctatatgttcgagcatcagggagagtcacagtctctaccaaaagaagccaacaaactgtaatcccgaatatcgggtctagaccctgggtaaggggtctgtccagtagaataagcatctattggacaatagtaaaaccgggagacatacttttgattaatagcacagggaatctaattgctcctcggggttacttcaaaatacgaaatgggaaaagctcaataatgaggtcagatgcacccattggcaactgcagttccgaatgcatcactccaaatggaagcattcccaatgacaaaccttttcaaaatgtaaacaggatcacatatggggcctgccccagatatgttaagcaaaacactctgaaattggcaacagggatgcggaatgtaccagagaaacaaactagaggcatattcggcgcaatcgcaggtttcatagaaaatggttgggagggaatggtagacggttggtacggtttcaggcatcaaaattctgagggcacaggacaagcagcagatcttaaaagcactcaagcagcaatcgaccaaatcaacgggaaactgaataggttaatcgagaaaacgaacgagaaattccatcaaatcgaaaaagaattctcagaagtagaagggagaattcaggacctcgagaaatatgttgaagacactaaaatagatctctggtcttacaacgcggagcttcttgttgccctggagaaccaacatacaattgatctaactgactcagaaatgaacaaactgtttgaaagaacaaggaagcaactgagggaaaatgctgaggacatgggcaatggttgcttcaaaatataccacaaatgtgacaatgcctgcatagggtcaatcagaaatggaacttatgaccatgatgtatacagagacgaagcattaaacaaccggttccagatcaaaggtgttgagctgaagtcaggatacaaagattggatcctatggatttcctttgccatatcatgctttttgctttgtgttgttttgctggggttcatcatgtgggcctgccaaaaaggcaacattaggtgcaacatttgcatttga

SEQ ID NO: 31560 - RNA, 1701 nt, synthetic construct
  misc_feature 1..1701: note = hemagglutinin__InfluenzaA__ABG48368
  source 1..1701: mol_type = other RNA
atgaagactatcattgctttgagctacattttatgtctggttttcgctcaaaaacttcccggaaatgacaacagcacagcaacgctgtgcctgggacaccatgcagtgccaaacggaacgctagtgaaaacaatcacgaatgatcaaattgaagtgactaatgctactgagctggttcagagttcctcaacaggtagaatatgcgacagtcctcaccgaatccttgatggaaaaaactgcacactgatagatgctctattgggagaccctcattgtgatggcttccaaaataaggaatgggacctttttgttgaacgcagcaaagcttacagcaactgttacccttatgatgtgccggattatgcctcccttaggtcactagttgcctcatcaggcaccctagagtttatcaatgaagacttcaattggactggagtggctcaggatgggaaaagctatgcttgcaaaaggggatctgttaacagtttctttagtagattgaattggttgcacaaattagaatacaaatatccagcgctgaacgtgactatgccaaacaatggcaaatttgacaaattgtacatttggggggttcaccacccgagcacggacagtgaccaaaccagcctatatgttcgagcatcagggagagtcacagtctctaccaaaagaagccaacaaactgtaatcccgaatatcgggtctagaccctgggtaaggggtctgtccagtagaataagcatctattggacaatagtaaaaccgggagacatacttttgattaatagcacagggaatctaattgctcctcggggttacttcaaaataagaaatgggaaaagctcaataatgaggtcagatgcacccattggcaactgcagttctgaatgcatcactccaaatggaagcattcccaatgacaaaccttttcaaaatgtaaacaggatcacatatggggcctgccccagatatgttaagcaaaacactctgaaattggcaacagggatgcggaatgtaccagagaaacaaactagaggcatattcggcgcaatcgcaggtttcatagaaaatggttgggagggaatggtagacggttggtacggtttcaggcatcaaaattctgagggcacaggacaagcagcagatcttaaaagcactcaagcagcaatcgaccaaatcaacgggaaactgaataggttaatcgagaaaacgaacgagaaattccatcaaatcgaaaaagaattctcagaagtagaagggagaattcaggacctcgagaaatatgttgaagacactaaaatagatctctggtcttacaacgcggagcttcttgttgccctggagaaccaacatacaattgatctaactgactcagaaatgaacaaactgtttgaaagaacaaggaagcaactgagggaaaatgctgaggacatgggcaatggttgcttcaaagtataccacaaatgtgacaatgcctgcatagagtcaatcagaaatggaacttatgaccatgatgtatacagagacgaagcattaaacaaccggttccagatcaaaggtgttgagctgaagtcaggatacaaagattggatcctatggatttcctttgccatatcatgctttttgctttgtgttgttttgctggggttcatcatgtgggcctgccaaaaaggcaacattaggtgcaacatttgcatttga

SEQ ID NO: 31561 - RNA, 1701 nt, synthetic construct
  misc_feature 1..1701: note = hemagglutinin__InfluenzaA__ABG67135
  source 1..1701: mol_type = other RNA
atgaagactatcattgctttgagctacattttatgtctggttttcgctcaaaaacttcccggaaatgacaacagcacggcaacgctgtgcctgggacaccatgcagtgccaaacggaacgctagtgaaaacaatcacgaatgaccaaattgaagtgactaatgctactgagctggttcagagttcctcaacaggtagaatatgcgacagtcctcaccgaatccttgatggaaaaaactgcacactgatagatgctctattgggagaccctcattgtgatggcttccaaaataaggaatgggacctttttgttgaacgcagcaaagcttacagcaactgttacccttatgatgtgccggattatgcctcccttaggtcactagttgcctcatccggcaccctggagtttaacaatgaaagcttcaattggactggagtcgctcagaatggaacaagctatgcttgcaaaaggagatctgttaaaagtttctttagtagattgaattggttgcacaaattagaatacaaatatccagcacagaacgtgactatgccaaacaatgacaaatttgacaaattgtacatttggggggttcaccacccgagtacggacagtgaccaaaccagcctatatgttcaagcatcagggagagtcacagtctctaccaaaagaagccaacaaactgtaatcccgaatatcggatctagaccctgggtaaggggtgtctccagcagaataagcatctattggacaatagtaaaaccgggagacatacttttgattaacagcacagggaatctaattgctcctcggggttacttcaaaatacgaagtgggaaaagctcaataatgaggtcagatgcacccattggcaactgcaattctgaatgcatcactccaaatggaagcattcccaatgacaaaccatttcaaaatgtaaacaggatcacatatggggcctgtcccagatatgttaagcaaaacactctgaaattggcaacagggatgcggaatgtaccagagaaacaaactagaggcatattcggcgcaatcgcaggtttcatagaaaatggttgggagggaatggtagacggttggtacggtttcaggcatcaaaattctgagggcacaggacaagcagcagatcttaaaagcactcaagcagcaatcaaccaaatcaacgggaaactgaataggttaatcgagaaaacgaacgagaaattccatcaaatcgaaaaagaattctcagaagtagaagggagaattcaggacctcgagaaatatgttgaagacactaaaatagatctctggtcgtacaacgcggagcttcttgttgccctggagaaccaacatacaattgatctaactgactcagaaatgaacaaactgtttgaaagaacaaggaagcaactgagggaaaatgctgaggacatgggcaatggttgcttcaaaatataccacaaatgtgacaatgcctgcatagggtcaatcagaaatggaacttatgaccatgatgtatacagagacgaagcattaaacaaccggttccagatcaaaggtgttgagctgaagtcaggatacaaagattggatcctatggatttcctttgccatatcatgttttttgctttgtgttgttttgctggggttcatcatgtgggcctgccaaaaaggcaacattaggtgcaacatttgcatttga

SEQ ID NO: 31562 - RNA, 1701 nt, synthetic construct; identical to SEQ ID NO: 31392
  misc_feature 1..1701: note = hemagglutinin__InfluenzaA__ABG67146
  source 1..1701: mol_type = other RNA

SEQ ID NO: 31563 - RNA, 1701 nt, synthetic construct
  misc_feature 1..1701: note = hemagglutinin__InfluenzaA__ABG67157
  source 1..1701: mol_type = other RNA
atgaagactatcattgctttgagctacattttatgtctggttttcgctcaaaaacttcccggaaatgacaacagcacagcaacgctgtgcctgggacaccatgcagtgccaaacggaacgctagtgaaaacaatcacgaatgatcaaattgaagtgactaatgctactgagctggttcagagttccccaacaggtagaatatgcaacagtcctcaccggatcattgatggaaagaactgcacactgatagatgctctattgggagaccctcattgtgatggcttccaaaataaggaatgggacctttttgttgaacgcagcaaagcttacagcaactgttacccttatgatgtgccggattatgcctcccttaggtcactagttgcctcatcaggcacactggagtttatcaacgaaaacttcaattggactggagtcgctcaggatgggaaaagctatgcttgcaaaaggggatctgttaacagtttctttagtagattgaattggttgcacaaattagaatacaaatatccagcgctgaacgtgactatgccaaacaatggcaaatttgacaaattgtacatttggggggttcaccacccgagcacggacagtgaccaaaccagcctatatgtccgagcatcagggagagtcacagtctctaccaaaagaagccaacaaactgtaatcccagatatcgggtatagaccatgggtaagaggtctgtccagtagaataagcatctattggacaatagtaaaaccgggagacatacttttgattaatagcacagggaatctaattgctcctcggggttacttcaaactacgaaatgggaaaagctcaataatgaggtcagatgcacccattggcaactgcagttctgaatgcatcactccaaatggaagcattcccaatgacaaaccttttcaaaatgtaaacaggatcacttatggggcctgccccagatatattaagcaaaacactctgaaattggcaacagggatgcggaatgtaccagagaaacaaactagaggcatatttggcgcaatcgcaggtttcatagaaaatggttgggagggaatggtagacggttggtacggtttcaggcatcaaaattctgagggcacaggacaagctgcagatcttaaaagcactcaagcagcaatcgaccaaatcaacgggaaactgaataggttagtcgagaaaacgaacgagaaattccatcaaatcgaaaaagaattctcagaagtagaagggagaattcaggacctcgagaaatatgttgaagacactaaaatagatctctggtcttacaatgcggagcttcttgttgctctggagaaccaacatacaattgatctaactgactcagaaatgaacaaactgtttgaaagaacaaagaagcaactgagggaaaatgctgaggacatgggcaatggttgtttcaaaatataccacaaatgtgacaatgcctgcatagggtcaatcagaaatggaacttatgaccatgatgtatacagagacgaagcattaaacaaccggttccagatcaaaggtgttgagctgaagtcaggatacaaagattggatcctatggatttcctttgccatatcatgctttttgctttgtgttgttttgcttgggttcatcatgtgggcctgccaaaaaggcaacattaggtgcaacatttgcatttga

SEQ ID NO: 31564 - RNA, 1701 nt, synthetic construct
  misc_feature 1..1701: note = hemagglutinin__InfluenzaA__ABG67168
  source 1..1701: mol_type = other RNA
atgaagactatcattgctttgagctacattttatgtctggttttcgctcaaaaacttcccggaaatgacaacagcacagcaacgctgtgcctgggacaccatgcagtgccaaacggaacgctagtgaaaacaatcacgaatgatcaaattgaagtgactaatgctactgagctggttcagagttccccaacaggtagaatatgcgacagtcctcaccgaatccttgatggaaagaactgcacactgatagatgctctattgggagaccctcattgtgatggcttccaaaataaggaatgggacctttttgttgaacgcagcaaagcttacagcaactgttacccttatgatgtgccggattatgcctcccttaggtcactagttgcctcatcaggcaccctggagtttaccaacgaaaacttcaattggactggagtcgctcaggatgggaaaagctatgcttgcaaaaggggatctgttaacagtttctttagtagattgaattggttgcacaaattagaatacaaatatccagcgctgaacgtgactatgccaaacaatggcaaatttgacaaattgtacatttggggggttcaccacccgagcacggacagtgaccaaaccagcctatatgtccgagcatcagggaaagtcacagtctctaccaaaagaagccaacaaactgtaatcccggatatcgggtatagaccatgggtaaggggtctttccagtagaataagcatctattggacaatagtaaaaccgggagacatacttttgattaatagcacagggaatctaattgctcctcggggttacttcaaaatacgaaatgggaaaagctcaataatgaggtcagatgcacccattggcaactgcagttctgaatgcatcactccaaatggaagcattcccaatgacaaaccttttcaaaatgtaaacaggatcacatatggggcctgccccagatatgttaagcaaaacactctgaaattggcaacagggatgcggaatgtaccagagaaacaaactagaggcatattcggcgcaatcgcaggtttcatagagaatggttgggagggaatggtagacggttggtacggtttcaggcatcagaattctgagggcacaggacaagctgcagatcttaaaagcactcaagcagcaatcgaccaaatcaacgggaaactgaataggttagtcgagaaaacgaacgagaaattccatcaaatcgaaaaagaattctcagaagtagaagggagaattcaggacctcgagaaatatgttgaagacactaaaatagatctctggtcttacaatgcggagcttcttgttgctctggagaaccaacatacaattgatctaactgactcagaaatgaacaaactatttgaaagaacaaggaagcaactgagggaaaatgctgaggacatgggcaatggttgtttcaaaatataccacaaatgtgacaatgcctgcatagggtcaatcagaaatggaacttatgaccatgatgtatacagagacgaagcattaaacaaccggttccagatcaaaggtgttgagctgaagtcaggatacaaagattggatcctatggatttcctttgccatatcatgctttttgctttgtgttgttttgcttgggttcatcatgtgggcctgccaaaaaggcaacattaggtgcaacatttgcatttga

SEQ ID NO: 31565 - RNA, 1701 nt, synthetic construct; identical to SEQ ID NO: 31527
  misc_feature 1..1701: note = hemagglutinin__InfluenzaA__ABG67179
  source 1..1701: mol_type = other RNA

SEQ ID NO: 31566 - RNA, 1701 nt, synthetic construct
  misc_feature 1..1701: note = hemagglutinin__InfluenzaA__ABG67190
  source 1..1701: mol_type = other RNA
atgaagactatcattgctttgagctacattttatgtctggttttcgctcaaaaacttcccggaaatgacaacagcacagcaacgctgtgcctgggacaccatgcagtgccaaacggaacgctagtgaaaacaatcacgaatgatcaaattgaagtgactaatgctactgagctggttcagagtttcccaacaggtagaatatgcgacagtcctcaccgaatccttgatggaaagaactgcacactgatagatgctctattgggagaccctcattgtgatggcttccaaaataaggaatgggacctttttgttgaacgcagcaaagcttacagcaactgttacccttatgatgtgccggattatgcctcccttaggtcactagttgcctcatcaggcaccctggagtttaccaacgaaaacttcaattggactggagtcgctcaggatgggaaaagctatgcttgcaaaaggggatctgttaacagtttctttagtagattgaattggttgcacaaattagaatacaaatatccagcgctgaacgtgactatgccaaacaatggcaaatttgacaaattgtacatttggggggttcaccacccgagcacggacagtgaccaaaccagcctatatgtccgagcatcagggaaagtcacagtctctaccaaaagaagccaacaaactgtaatcccggatatcgggtatagaccatgggtaaggggtctgtccagtagaataagcatctattggacaatagtaaaaccgggagacatacttttgattaatagcacagggaatctaattgctcctcggggttacttcaaaatacgaaatgggaaaagctcaataatgaggtcagatgcacccattggcaactgcagttctgaatgcatcactccaaatggaagcattcccaatgacaaaccttttcaaaatgtaaacaggatcacatatggggcctgccccagatatgttaagcaaaacactctgaaattggcaacagggatgcggaatgtaccagagaaacaaactagaggcatattcggcgcaatcgcaggtttcatagaaaatggttgggagggaatggtagacggttggtacggtttcaggcatcagaattctgagggcacaggacaagctgcagatcttaaaagcactcaagcagcaatcgaccaaatcaacgggaaactgaataggttagtcgagaaaacgaacgagaaattccatcaaatcgaaaaagaattctcagaagtagaagggagaattcaggacctcgagaaatatgttgaagacactaaaatagatctctggtcttacaatgcggagcttcttgttgctctggagaaccaacatacaattgatctaactgactcagaaatgaacaaactatttgaaagaacaaggaagcaactgagggaaaatgctgaggacatgggcaatggttgtttcaaaatataccacaaatgtgacaatgcctgcatagggtcaatcagaaatggaacttatgaccatgatgtatacagagacgaagcattaaacaaccggttccagatcaaaggtgttgagctgaagtcaggatacaaagattggatcctatggatttcctttgccatatcatgctttttgctttgtgttgttttgcttgggttcatcatgtgggcctgccaaaaaggcaacattaggtgcaacatttgcatttga

SEQ ID NO: 31567 - RNA, 1701 nt, synthetic construct
  misc_feature 1..1701: note = hemagglutinin__InfluenzaA__ABG67212
  source 1..1701: mol_type = other RNA
atgaagactatcattgctttgagctacattttatgtctggttttcgctcaaaaacttcccggaaatgacaacagcacagcaacgctgtgcctgggacaccatgcggtgccaaacggaacgctagtgaaaacaatcacgaatgatcaaattgaagtgactaatgctactgagctggttcagagttcctcaacaggtagaatatgcgacagtcctcaccgaatccttgatggaaaaaactgcacactgatagatgctctattgggagaccctcattgtgatggcttccaaaataaggaatgggacctttttgttgaacgcagcaaagcttacagcaactgttacccttatgatgtgccggattatgcctcccttaggtcactagttgcctcatcaggcaccctggagtttatcaatgaagacttcaattggactggagtcgctcaggatgggaaaagctatgcttgcaaaaggggatctgttaacagtttctttagtagattgaattggttgcacaaattagaatacagatatccagcgctgaacgtgactatgccaaacaatggcaaatttgacaaattgtacatttggggggttcaccacccgagcacggacagtgaccaaaccagcctatatgttcgagcatcagggagagtcacagtctctaccaaaagaagccaacaaactgtaatcccgaatatcgggtttagaccctgggtaaggggtctgtccagtagaataagcatctattggacaatagtaaaaccgggagacatacttttgattaatagcacagggaatctaattgctcctcggggttacttcaaaatacggaatgggaaaagctcaataatgaggtcagatgcacccattggcaactgcagttctgaatgcatcactccaaatggaagcattcccaatgacaaaccttttcaaaatgtaaacaggatcacatatggggcctgccccagatatgttaagcaaaacactctgaagttggcaacagggatgcggaatgtaccagagaaacaaactagaggcatattcggcgcaatcgcaggtttcatagaaaatggttgggagggaatggtagacggttggtacggtttcaggcatcaaaattctgagggcacaggacaagcagcagatcttaaaagcactcaagcagcaatcgaccaaatcaacgggaaactgaataggttaatcgagaaaacgaacgagaaattccatcaaatcgaaaaagaattctcagaagtagaagggagaattcaggacctcgagaaatatgttgaagacactaaaatagatctctggtcttacaacgcggggcttcttgttgccctggagaaccaacatacaattgatctaactgactcagaaatgaacaaactgtttgaaagaacaaggaagcaactgagggaaaatgctgaggacatgggcaatggttgcttcaaaatataccacaaatgtgacaatgcctgcatagggtcaatcagaaatggaacttatgaccatgatgtatacagagacgaagcattaaacaaccggttccagatcaaaggtgttgagctgaagtcaggatacaaagattggatcctatggatttcctttgccatatcatgctttttgctttgtgttgttttgctggggttcatcatgtgggcctgccaaaaaggcaacattaggtgcaacatttgcatttga

SEQ ID NO: 31568 - RNA, 1701 nt, synthetic construct
  misc_feature 1..1701: note = hemagglutinin__InfluenzaA__ABG67223
  source 1..1701: mol_type = other RNA
atgaagactatcattgctttgagctacattttatgtctggttttcgctcaaaaacttcccggaaatgacaacagcacagcaacgctgtgcctgggacaccatgcagtgccaaacggaacgctagtgaaaacaatcacgaatgatcaaattgaagtgactaatgctactgagctggttcagagttcctcaacaggtagaatatgcgacagtcctcaccgaatccttgatggaaaaaactgcacactgatagatgctctattgggagaccctcattgtgatggcttccaaaataaggaatgggacctttttgttgaacgcagcaaagcttacagcaactgttacccttatgatgtgccggattatgcctcccttaggtcactagttgcctcatcaggcaccctggagtttatcaatgaagacttcaattggactggagtcgctcaggatgggaaaagctatgcttgcaaaaggggatctgttaacagtttctttagtagattgaattggttgcacaaattagaatacaaatatccagcgctgaacgtgactatgccaaacaatggcaaatttgacaaattgtacatttggggggttcaccacccgagcacggacagtgaccaaaccagcctatatgttcgagcatcagggagagtcacagtctctaccaaaagaagccaacaaactgtaatcccgaatatcgggtttagaccctgggtaaggggtctgtccagtagaataagcatctattggacaatagtaaaaccgggagacatacttttgattaatagcacagggaatctaattgctcctcggggttacttcaaaatacgaaatgggaaaagctcaataatgaggtcagatgcacccattggcaactgcagttctgaatgcatcactccaaatggaagcattcccaatgacaaaccttttcaaaatgtaaacaggatcacatatggggcctgccccagatatgttaagcaaaacactctgaagttggcaacagggatgcggaatgtaccagagaaacaaactagaggcatattcggcgcaatcgcaggtttcatagaaaatggttgggagggaatggtagacggttggtacggtttcaggcatcaaaattctgagggcacaggacaagcagcagatcttaaaagcactcaagcagcaatcgaccaaatcaacgggaaactgaataggttaatcgagaaaacgaacgaaaaattccatcaaatcgaaaaagaattctcagaagtagaagggagaattcaggacctcgagaaatatgttgaagacactaaaatagatctctggtcttacaacgcggggcttcttgttgccctggagaaccaacatacaattgatctaactgactcagaaatgaacaaactgtttgaaagaacaaggaagcaactgagggaaaatgctgaggacatgggcaatggttgcttcaaaatataccacaaatgtgacaatgcctgcatagggtcaatcagaaatggaacttatgaccatgatgtatacagagacgaagcattaaacaaccggttccagatcaaaggtgttgagctgaagtcaggatacaaagattggatcctatggatttcctttgccatatcatgctttttgctttgtgttgttttgctggggttcatcatgtgggcctgccaaaaaggcaacattaggtgcaacatttgcatttga

SEQ ID NO: 31569 - RNA, 1701 nt, synthetic construct
  misc_feature 1..1701: note = hemagglutinin__InfluenzaA__ABG67234
  source 1..1701: mol_type = other RNA
atgaagactatcattgctttgagctacattttatgtctggttttcgctcaaaaacttcccggagatgacaacagcacagcaacgctgtgcctgggacaccatgcagtgccaaacggaacgctagtgaaaacaatcacgaatgatcaaattgaagtgactaatgctactgagctggttcagagttcctcaacaggtagaatatgcgacagtcctcaccgaatccttgatggaaaaaactgcacactgatagatgctctattgggagaccctcattgtgatggcttccaaaataaggaatgggacctttttgttgaacgcagcaaagcttacagcaactgttacccttatgatgtgccggattatgcctcccttaggtcactagttgcctcatcaggcaccctggagtttatcaatgaagacttcaattggactggagtcgctcaggatgggaaaagctatgcttgcaaaaggggatctgttaacagtttctttagtagattgaattggttgcacaaattagaatacaaatatccagcgctgaacgtgactatgccaaacaatggcaaatttgacaaattgtacatttggggggttcaccacccgagcacggacagtgaccaaaccagcctatatgttcgagcatcagggagagtcacagtctctaccaaaagaagccaacaaactgtaatcccgaatatcgggtttagaccctgggtaaggggtctgtccagtagaataagcatctattggacaatagtagaaccgggagacatacttttgattaatagcacagggaatctaattgctcctcggggttacttcaaaatacgaaatgggaaaagctcaataatgaggtcagatgcacccattggcaactgcagttctgaatgcatcactccaaatggaagcattcccaatgacaaaccttttcaaaatgtaaacaggatcacatatggggcctgccccagatatgttaagcaaaacactctgaagttggcaacagggatgcggaatgtaccagagaaacaaactagaggcatattcggcgcaattgcaggtttcatagaaaatggttgggagggaatggtagacggttggtacggtttcaggcatcaaaattctgagggcacaggacaagcagcagatcttaaaagcactcaagcagcaatcgaccaaatcaacgggaaactgaataggttaatcgagaaaacgaacgagaaattccatcaaatcgaaaaagaattctcagaagtagaagggagaattcaggacctcgagaaatatgttgaagacactaaaatagatctctggtcttacaacgcggggcttcttgttgccctggagaaccaacatacaattgatctaactgactcagaaatgaacaaactgtttgaaagaacaaggaagcaactgagggaaaatgctgaggacatgggcaatggttgcttcaaaatataccacaaatgtgacaatgcctgcatagggtcaatcagaaatggaacttatgaccatgatgtatacagagacgaagcattaaacaaccggttccagatcaaaggtgttgagctgaagtcaggatacaaagattggatcctatggatttcctttgccatatcatgctttttgctttgtgttgttttgctggggttcatcatgtgggcctgccaaaaaggcaacattaggtgcaacatttgcatttga

SEQ ID NO: 31570 - RNA, 1701 nt, synthetic construct
  misc_feature 1..1701: note = hemagglutinin__InfluenzaA__ABG67245
  source 1..1701: mol_type = other RNA
atgaagactatcattgctttgagctacattttatgtctggttttcgctcaaaaacttcccggaaatgacaacagcacagcaacgctgtgcctgggacaccatgcagtgccaaacggaacgctagtgaaaacaatcacgaatgatcaaattgaagtgactaatgctactgagctggttcagagttcctcaacaggtagaatatgcgacagtcctcaccgaatccttgatggaaaaaactgcacactgatagatgctctattgggagaccctcattgtgatggcttccaaaataaggaatgggacctttttgttgaacgcagcaaagcttacagcaactgttacccttatgatgtgccggattatgcctcccttaggtcactagttgcctcatcaggcaccctggagtttatcaatgaagacttcaattggactggagtcgctcaggatgggaaaagctatgcttgcaaaaggggatctgttaacagtttctttagtagattgaattggttgcacaaattagaatacaaatatccagcgctgaacgtgactatgccaaacaatggcaaatttgacaaattgtacatttggggggttcaccacccgagcacggacagtgaccaaaccagcctatatgttcgagcatcagggagagtcacagtctctaccaaaagaagccaacaaactgtaatcccgaatatcgggtttagaccctgggtaaggggtctgtccagtagaataagcatctattggacaatagtaaaaccgggagacatacttttgattaatagcacagggaatctaattgctcctcggggttacttcaaaatacgaaatgggaaaagctcaataatgaggtcagatgcacccattggcaactgcagttctgaatgcatcactccaaatggaagcattcccaatgacaaaccttttcaaaatgtaaacaggatcacatatggggcctgccccagatatgttaagcaaaacactctgaagttggcaacagggatgcggaatgtaccagagaaacaaactagaggcatattcggcgcaattgcaggtttcatagaaaatggttgggagggaatggtagacggttggtacggtttcaggcatcaaaattctgagggcacaggacaagcagcagatcttaaaagcactcaagcagcaatcgaccaaatcgacgggaaactgaataggttaatcgagaaaacgaacgagaaattccatcaaatcgaaaaagaattctcagaagtagaagggagaattcaggacctcgagaaatatgttgaagacactaaaatagatctctggtcttacaacgcggggcttcttgttgccctggagaaccaacatacaattgatctaactgactcagaaatgaacaaactgtttgaaagaacaaggaagcaactgagggaaaatgctgaggacatgggcaatggttgcttcaaaatataccacaaatgtgacaatgcctgcatagggtcaatcagaaatggaacttatgaccatgatgtatacagagacgaagcattaaacaaccggttccagatcaaaggtgttgagctgaagtcaggatacaaagattggatcctatggatttcctttgccatatcatgctttttgctttgtgttgttttgctggggttcatcatgtgggcctgccaaaaaggcaacattaggtgcaacatttgcatttga

SEQ ID NO: 31571 - RNA, 1698 nt, synthetic construct; identical to SEQ ID NO: 31246
  misc_feature 1..1698: note = hemagglutinin__InfluenzaA__ABG67477
  source 1..1698: mol_type = other RNA

SEQ ID NO: 31572 - RNA, 1698 nt, synthetic construct; identical to SEQ ID NO: 31304
  misc_feature 1..1698: note = hemagglutinin__InfluenzaA__ABG67491
  source 1..1698: mol_type = other RNA

SEQ ID NO: 31573 - RNA, 1701 nt, synthetic construct
  misc_feature 1..1701: note = hemagglutinin__InfluenzaA__ABG67502
  source 1..1701: mol_type = other RNA
atgaagactatcattgctttgagctacattttatgtctggttttcgctcaaaaacttcccggaaatgacaacagcacggcaacgctgtgcctggggcaccatgcagtgccaaacggaacgctagtgaaaacaatcacgaatgaccaaattgaagtgactaatgctactgagctggttcagagttcctcaacaggtagaatatgcgacagtcctcaccaaatccttgatggagaaaactgcacactaatagatgctctattgggagaccctcattgtgatggcttccaaaataaggaatgggacctttttgttgaacgcagcaaagcctacagcaactgttacccttatgatgtgtcggattatgtctcccttaggtcactagttgcctcatcaggcacgctggagtttaacaatgaaagcttcaattggactggagtcgctcagaatggaacaagctctgcttgcaaaaggagatctgataaaagtttctttagtagattgaattggttgcaccaattaaaatacaaatatccagcactgaacgtgactatgccaaacaatgaaaaatttgacaaattgtacatttggggggttcaccacccgggtacagacagtgaccaaatcagcctatatgctcaagcatcagggagagtcacagtctctaccaaaagaagccaacaaactgtaatcccgaatatcggatctagaccctgggtaaggggtatctccagcagaataagcatctattggacaatagtaaaaccgggagacatacttttgattaacagcacagggaatctaattgctcctcggggttacttcaaaatacgaagtgggaaaagctcaataatgaggtcagatgcacccattggcaaatgcaattctgaatgcatcactccaaatggaagcattcccaatgacaaaccatttcaaaatgtaaacaggatcacatatgggccctgtcccagatatgttaagcaaaacactctgaaattggcaacagggatgcggaatgtgccagagaaacaaactagaggcatattcggtgcaatcgcgggcttcatagaaaatggttgggagggaatgatggacggttggtacggtttcaggcatcaaaattctgagggcacagggcaagcagcagatcttaaaagcactcaagcagcaatcaaccaaatcaacgggaaactgaataggttaatcgagaaaacgaacgagaaattccatcaaattgaaaaagaattctcagaagtagaagggagaattcaggacctcgagaaatatgttgaggacactaaaatagatctctggtcgtacaatgcggagcttcttgttgccctggagaaccaacatacaattgatctaactgactcagaaatgaacaaactgtttgaaagaacaaagaagcaactgagggaaaatgctgaggatatgggcaatggttgtttcaaaatataccacaaatgtgacaatgcctgcatagggtcaatcagaaatggaacttatgaccatgatgtatacagagacgaagcattgaacaaccggttccagatcaaaggtgttgagctgaagtcaggatacaaagattggatcctatggatttcctttgccatatcatgttttttgctttgtattgttttgctggggttcatcatgtgggcctgccaaaaaggcaacattaggtgcaacatttgcatttga

SEQ ID NO: 31574 - RNA, 1701 nt, synthetic construct
  misc_feature 1..1701: note = hemagglutinin__InfluenzaA__ABG67524
  source 1..1701: mol_type = other RNA
atgaagactatcattgctttgagctacattttatgtctggttttcgctcaaaaacttcccggaaatgacaacagcacggcaacgctgtgcctggggcaccatgcagtgccaaacggaacgctagtgaaaacaatcacgaatgaccaaattgaagtgactaatgctactgagctggttcagagttcctcaacaggtagaatatgcgacagtcctcaccaaatccttgatggagaaaactgcacactaatagatgctctattgggagaccctcattgtgatggcttccaaaataaggaatgggacctttttgttgaacgcagcagagcctacagcaactgttacccttatgatgtgccggattatgtctcccttaggtcactagttgcctcatcaggcacgctggagtttaacaatgaaagcttcaattggactggagtcgctcagaatggaacaagctctgcttgcaaaaggagatctgataaaagtttctttagtagattgaattggttgcaccaattaaaatacaaatatccagcactgaacgtgactatgccaaacaatgaaaaatttgacaaattgtacatttggggggttcaccacccgggtacagacagtgaccaaatcagcctatatgctcaagcatcagggagagtcacagtctctaccaaaagaagccaacaaactgtaattccgaatatcggatctagaccctgggtaaggggtgtctccagcagaataagcatctattggacaatagtaaaaccgggagacatacttttgattaacagcacagggaatctaattgctcctaggggttacttcaaaatacgaagtgggaaaagctcaataatgaggtcagatgcacccattggcaaatgcaattctgaatgcatcactccaaatggaagcattcccaatgacaaaccatttcaaaatgtaaacaggatcacatatgggccctgtcccagatatgttaagcaaaacactctgaaattggcaacagggatgcggaatgtgccagagaaacaaactagaggcatattcggtgcaatcgcgggcttcatagaaaatggttgggagggaatgatggacggttggtacggtttcaggcatcaaaattctgagggcacagggcaagcagcagatcttaaaagcactcaagcagcagtcaaccaaatcaacgggaaactgaataggttaatcgagaaaacgaacgagaaattccatcaaattgaaaaagaattctcagaagtagaagggagaattcaggacctcgagaaatatgttgaggacactaaaatagatctctggtcgtacaatgcggagcttcttgttgccctggagaaccaacatacaattgatctaactgactcagaaatgaacaaactgtttgaaagaacaaagaagcaactgagggaaaatgctgaggatatgggcaatggttgtttcaaaatataccacaaatgtgacaatgcctgcatagggtcaattagaaatggaacttatgaccatgatgtatacagagacgaagcattaaacaaccggttccagatcaaaggtgttgagctgaagtcaggatacaaagattggatcctatggatttcctttgccatatcatgttttttgctttgtattgttttgctggggttcatcatgtgggcctgccaaaaaggcaacattaggtgcaacatttgcatttga

SEQ ID NO: 31575 - RNA, 1701 nt, synthetic construct
  misc_feature 1..1701: note = hemagglutinin__InfluenzaA__ABG67535
  source 1..1701: mol_type = other RNA
atgaagactatcattgctttgagctacattttatgcctggttttcgctcaaaaacttcccggaaatgacaacagcacggcaacgctgtgtctggggcatcatgcagtgccaaacggaacgctagtgaaaacaatcacgaatgaccaaattgaagtaactaatgctactgagctggttcagagttcctcaacaggtagaatatgcgacagtcctcaccaaatccttgatggagaaaactgcacactaatagatgctctattgggagaccctcattgtgatggcttccaaaataaggaatgggacctttttgttgaacgcagtaaagcctacagcaactgttacccttatgatgtgccggattatgtctcccttaggtcactagttgcctcatcaggcacgctggagtttaacaatgaaagcttcaattggactggagtcgctcagaatggaacaagctctgcttgcaaaaggagatctgataaaagtttctttagtagattgaattggttgcaccaattaaaatacaaatatccagcactgaacgtgactatgccaaacaatgaaaaatttgacaaattgtacatttggggggttcaccacccgggtacagacagtgaccaaatcagcctatatgctcaagcatcggggagagtcacagtctctaccaaaagaagccaacaaactgtaatcccgaatatcggatctagaccctgggtaaggggtgtctccagcagaataagcatctattggacaatagtaaaaccgggagacatacttttgattaacagcacagggaatctaattgctcctcggggttacttcaaaatacgaagtgggaaaagctcaataatgaggtcagatgcacccattggcaaatgcaattctgaatgcatcactccaaatggaagcattcccaatgacaaaccatttcaaaatgtaaacaggatcacatatggggcctgtcccagatatgttaagcaaaacactctgaaattggcaacagggatgcggaatgtgccagagaaacaaactagaggcatattcggtgcaatcgcgggcttcatagaaaatggttgggagggaatgatggacggttggtacggtttcaggcatcaaaattctgagggcacagggcaagcagcagatcttaaaagcactcaagcagcaatcaaccaaatcaacgggaaactgaataggttaatcgagaaaacgaacgagaaattccatcaaattgaaaaagaattctcagaagtagaagggagaattcaggacctcgagaaatatgttgaggacactaaaatagatctctggtcgtacaatgcggagcttcttgttgccctggagaaccaacatacaattgatctaactgactcagaaatgaacaaactgtttgaaagaacaaagaagcaactgagggaaaatgctgaggatatgggcaatggttgtttcaaaatataccacaaatgtgacaatgcctgcatagggtcaatcagaaatggaacttatgaccatgatgtatacagagacgaagcattgaacaaccggttccagatcaaaggtgttgagctgaagtcaggatacaaagattgggtcctatggatttcctttgccatatcatgttttttgctttgtattgttttgctggggttcatcatgtgggcctgccaaaaaggcaacattaggtgcaacatttgcatttga

SEQ ID NO: 31576 - RNA, 1701 nt, synthetic construct; identical to SEQ ID NO: 31024
  misc_feature 1..1701: note = hemagglutinin__InfluenzaA__ABG67546
  source 1..1701: mol_type = other RNA

SEQ ID NO: 31577 - RNA, 1701 nt, synthetic construct
  misc_feature 1..1701: note = hemagglutinin__InfluenzaA__ABG67557
  source 1..1701: mol_type = other RNA
atgaagactatcattgctttgagctacattctatgtctggttttcgctcaaaaacttcccggaaatgacaacagcacggcaacgctgtgccttgggcaccatgcagtaccaaacggaacgatagtgaaaacaatcacaaatgaccaaattgaagttactaatgctactgagctggttcagagttcctcaacaggtggaatatgcgacagtcctcatcagatccttgatggagaaaactgcacactaatagatgctctattgggagaccctcagtgtgatggcttccaaaataagaaatgggacctttttgttgaacgcagcaaagcctacagcaactgttacccttatgatgtgccggatcatgcctcccttaggtcactagttgcctcatccggcacactggagtttaacaatgaaagcttcgattggactggagtcactcagaatggaacaagctctgcttgcaaaaggagatctaataaaagtttctttagtagattgaattggttgacccacttaaaatacaaatacccagcattgaacgtgactatgccaaacaatgaaaaatttgacaaattgtacatttggggggttcaccacccgggtacggacagtgaccaaatcagcctatatgctcaagcatcaggaagaatcacagtctctaccaaaagaagccaacaaactgtaatcccgaatatcggatctagacccagggtaagggatgtctccagccgaataagcatctattggacaatagtaaaaccgggagacatacttttgattaacagcacagggaatctaattgctcctcggggttacttcaaaatacgaagtgggaaaagctcaataatgagatcagatgcacccattggcaaatgcaattctgaatgcatcactccaaatggaagcattcccaatgacaaaccatttcaaaatgtaaacaggatcacatatggggcctgtcccagatatgttaagcaaaacactctgaaattggcaacagggatgcgaaatgtaccagagaaacaaactagaggcatatttggcgcaatcgcgggtttcatagaaaatggttgggagggaatggtggacggttggtacggtttcaggcatcaaaattctgagggcacaggacaagcagcagatctcaaaagcactcaagcaacaatcaaccaaatcaatgggaaactgaataggttaatcgggaaaacaaacgagaaattccatcagattgaaaaagaattctcagaagtagaagggagaattcaggacctcgagaaatatgttgaggacactaaaatagatctctggtcatacaacgcggagcttcttgttgccctggagaaccaacatacaattgatctaactgactcagaaatgaacaaactgtttgaaagaacaaagaagcaactgagggaaaatgctgaggatatgggcaatggttgtttcaaaatataccacaaatgtgacaatgcctgcatagggtcaatcagaaatggaacttatgaccatgatgtgtacagagatgaagcattaaacaaccggttccagatcaaaggtgttgagctgaagtcaggatataaagattggatcctatggatttcctttgccatatcatgttttttgctttgtgttgctttgttggggttcatcatgtgggcctgccaaaaaggcaacattaggtgcaacatttgcatttga

SEQ ID NO: 31578 - RNA, 1701 nt, synthetic construct; identical to SEQ ID NO: 31514
  misc_feature 1..1701: note = hemagglutinin__InfluenzaA__ABG67568
  source 1..1701: mol_type = other RNA

SEQ ID NO: 31579 - RNA, 1701 nt, synthetic construct
  misc_feature 1..1701: note = hemagglutinin__InfluenzaA__ABG67579
  source 1..1701: mol_type = other RNA
atgaagactatcattgctttgagctacattctatgtctggttttcgctcaaaaacttcccggaaatgacaacagcacggcaacgctgtgccttgggcaccatgcagtaccaaacggaacgatagtgaaaacaatcacaaatgaccaaattgaagttactaatgctactgagctggttcagagttcctcaacaggtggaatatgcgacagtcctcatcagatccttgatggagaaaactgcacactaatagatgctctattgggagaccctcagtgtgatggcttccaaaataagaaatgggacctttttgttgaacgcagcaaagcctacagcaactgttacccttatgatgtgccggatcatgcctcccttaggtcactagttgcctcatccggcacactggagtttaacaatgaaagcttcgattggactggagtcactcagaatggaacaagctctgcttgcaaaaggagatctaataaaagtttctttagtagattgaattggttgacccacttaaaatacaaatacccagcattgaacgtgactatgccaaacaatgaaaaatttgacaaattgtacatttggggggttcaccacccgggtacggacagtgaccaaatcagcctatatgctcaagcatcaggaagaatcacagtctctaccaaaagaagccaacaaactgtaatcccgaatatcggatctagacccagggtaagggatgtctccagccgaataagcatctattggacaatagtaaaaccgggagacatacttttgattaacagcacagggaatctaattgctcctcggggttacttcaaaatacgaagtgggaaaagctcaataatgagatcagatgcacccattggcaaatgcaattctgaatgcatcactccaaatggaagcattcccaatgacaaaccatttcaaaatgtaaacaggatcacatatggggcctgtcccagatatgttaagcaaaacactctgaaattggcaacagggatgcgaaatgtaccagagaaacaaactagaggcatatttggcgcaatcgcgggtttcatagaaaatggttgggagggaatggtggacggttggtacggtttcaggcatcaaaattctgagggcacaggacaagcagcagatctcaaaagcactcaagcagcaatcaaccaaatcaatgggaaactgaataggttaatcgggaaaacaaacgagaaattccatcagattgaaaaagaattctcagaagtagaagggagaattcaggacctcgagaaatatgttgaggacactaaaatagatctctggtcatacaacgcagagcttcttgttgccctggagaaccaacatacaattgatctaactgactcagaaatgaacaaactgtttgaaagaacaaagaagcaactgagggaaaatgctgaggatatgggcaatggttgtttcaaaatataccacaaatgtgacaatgcctgcatagggtcaatcagaaatggaacttatgaccatgatgtgtacagagatgaagcattaaacaaccggttccagatcaaaggtgttgagctgaagtcaggatataaagattggatcctatggatttcctttgccatatcatgttttttgctttgtgttgctttgttggggttcatcatgtgggcctgccaaaaaggcaacattaggtgcaacatttgcatttga

SEQ ID NO: 31580 - RNA, 1701 nt, synthetic construct; identical to SEQ ID NO: 31024
  misc_feature 1..1701: note = hemagglutinin__InfluenzaA__ABG67590
  source 1..1701: mol_type = other RNA

SEQ ID NO: 31581 - RNA, 1701 nt, synthetic construct; identical to SEQ ID NO: 31042
  misc_feature 1..1701: note = hemagglutinin__InfluenzaA__ABG67601
  source 1..1701: mol_type = other RNA

SEQ ID NO: 31582 - RNA, 1701 nt, synthetic construct; identical to SEQ ID NO: 31514
  misc_feature 1..1701: note = hemagglutinin__InfluenzaA__ABG67612
  source 1..1701: mol_type = other RNA

SEQ ID NO: 31583 - RNA, 1701 nt, synthetic construct; identical to SEQ ID NO: 31514
  misc_feature 1..1701: note = hemagglutinin__InfluenzaA__ABG67623
  source 1..1701: mol_type = other RNA

SEQ ID NO: 31584 - RNA, 1701 nt, synthetic construct
  misc_feature 1..1701: note = hemagglutinin__InfluenzaA__ABG67634
  source 1..1701: mol_type = other RNA
atgaagactatcattgctttgagctacattctatgtctggttttcgctcaaaaacttcccggaaatgacaacaacacggcaacgctgtgccttgggcaccatgcagtaccaaacggaacgatagtgaaaacaatcacaaatgaccaaattgaagttactaatgctactgagctggttcagagttcctcaacaggtggaatatgcgacagtcctcatcagatccttgatggagaaaactgcacactaatagatgctctattgggagaccctcagtgtgatggcttccaaaataagaaatgggacctttttgttgaacgcagcaaagcctacagcaactgttacccttatgatgtgccggatcatgcctcccttaggtcactagttgcctcatccggcacactggagtttaacaatgaaagcttcgattggactggagtcactcagaatggaacaagctctgcttgcaaaaggagatctaataaaagtttctttagtagattgaattggttgacccacttaaaatacaaatacccagcattgaacgtgactatgccaaacaatgaaaaatttgacaaattgtacatttggggggttcaccacccgggtacggacagtgaccaaatcagcctatatgctcaagcatcaggaagaatcacagtctctaccaaaagaagccaacaaactgtaatcccgaatatcggatctagacccagggtaagggatgtctccagccgaataagcatctattggacaatagtaaaaccgggagacatacttttgattaacagcacagggaatctaattgctcctcggggttacttcaaaatacgaagtgggaaaagctcaataatgagatcagatgcacccattggcaaatgcaattctgaatgcatcactccaaatggaagcattcccaatgacaaaccatttcaaaatgtaaacaggatcacatatggggcctgccccagatatgttaagcaaaacactctgaaattggcaacagggatgcgaaatgtaccagagaaacaaactagaggcatatttggcgcaatcgcgggtttcatagaaaatggttgggagggaatggtggacggttggtacggtttcaggcatcaaaattctgagggcacaggacaagcagcagatctcaaaagcactcaagcagcaatcaaccaaatcaatgggaaactgaataggttaatcgggaaaacaaacgagaaattccatcagattgaaaaagaattctcagaagtagaagggagaattcaggacctcgagaaatatgttgaggacactaaaatagatctctggtcatacaacgcggagcttcttgttgccctggagaaccaacatacaattgatctaactgactcaaaaatgaacaaactgtttgaaagaacaaagaagcaactgagggaaaatgctgaggatatgggcaatggttgtttcaaaatataccacaaatgtgacaatgcctgcatagggtcaatcagaaatggaacttatgaccatgatgtgtacagagatgaagcattaaacaaccggttccagatcaaaggtgttgagctgaagtcaggatataaagattggatcctatggatttcctttgccatatcatgttttttgctttgtgttgctttgttggggttcatcatgtgggcctgccaaaaaggcaacattaggtgcaacatttgcatttga

SEQ ID NO: 31585 - RNA, 1701 nt, synthetic construct
  misc_feature 1..1701: note = hemagglutinin__InfluenzaA__ABG67645
  source 1..1701: mol_type = other RNA
atgaagactatcattgctttgagctacattctatgtctggttttcgctcaaaaacttcccggaaatgacaacagcacggcaacgctgtgccttgggcaccatgcagtaccaaacggaacgatagtgaaaacaatcacaaatgaccaaattgaagttactaatgctactgagctggttcagagttcctcaacaggtggaatatgcgacagtcctcatcagatccttgatggagaaaactgcacactaatagatgctctattgggagaccctcagtgtgatggcttccaaaataagaaatgggacctttttgttgaacgcagcaaagcctacagcaactgttacccttatgatgtgccggatcatgcctcccttaggtcactagttgcctcatccggcacactggagtttaacaatgaaagcttcgattggactggagtcactcagaatggaacaagctctgcttgcaaaaggagatctaataaaagtttctttagtagattgaattggttgacccacttaaaatacaaatacccagcattgaacgtgactatgccaaacaatgaaaaatttgacaaattgtacatttggggggttcaccacccgggtacggacagtgaccaaatcagcctatatgctcaagcatcaggaagaatcacagtctctaccaaaagaagccaacaaactgtaatcccgaatatcggatctagacccagggtaagggatgtctccagccgaataagcatctattggacaatagtaaaaccgggagacatacttttgattaacagcacagggaatctaattgctcctcggggttacttcaaaatacgaagtgggaaaagctcaataatgagatcagatgcacccattggcaaatgcaattctgaatgcatcactccaaatggaagcattcccaatgacaaaccatttcaaaatgtaaacaggatcacatatggggcctgtcccagatatgttaagcaaaacactctgaaattggcaacagggatgcgaaatgtaccagagaaacaaactagaggcatatttggcgcaatcgcgggtttcatagaaaatggttgggagggaatggtggacggttggtacggtttcaggcatcaaaattctgagggcacaggacaagcagcagatctcaaaagcactcaagcagcaatcaaccaaatcaatgggaaactgaataggttaatcgggaaaacaaacgagaaattccatcagattgaaaaagaattctcagaagtagaagggagaattcaggacctcgagaaatatgttgaggacactaaaatagatctctggtcatacaacgcggagcttcttgttgccctggagaaccaacatacaattgatctaactgattcagaaatgaacaaactgtttgaaagaacaaagaagcaactgagggaaaatgctgaggatatgggcaatggttgtttcaaaatataccacaaatgtgacaatgcctgcatagggtcaatcagaaatggaacttatgaccatgatgtgtacagagatgaagcattaaacaaccggttccagatcaaaggtgttgagctgaagtcaggatataaagattggatcctatggatttcctttgccatatcatgttttttgctttgtgttgctttgttggggttcatcatgtgggcctgccaaaaaggcaacattaggtgcaacatttgcatttga

SEQ ID NO: 31586 - RNA, 1701 nt, synthetic construct
  misc_feature 1..1701: note = hemagglutinin__InfluenzaA__ABG67656
  source 1..1701: mol_type = other RNA
atgaagactatcattgctttgagctacattctatgtctggttttcgctcaaaaacttcccggaaatgacaacagcacggcaacgctgtgccttgggcaccatgcagtaccaaacggaacgatagtgaaaacaatcacaaatgaccaaattgaagttactaatgctactgagctggttcagagttcctcaacaggtggaatatgcgacagtcctcatcagatccttgatggagaaaactgcacactaatagatgctctattgggagaccctcagtgtgatggcttccaaaataagaaatgggacctttttgttgaacgcagcaaagcctacagcaactgttacccttatgatgtgccggatcatgcctcccttaggtcactagttgcctcatccggcacactggagtttaacaatgaaagcttcgattgggctggagtcactcagaatggaacaagctctgcttgcaaaaggagatctaataaaagtttctttagtagattgaattggttgacccacttaaaatacaaatacccagcattgaacgtgactatgccaaacaatgaaaaatttgacaaattgtacatttggggggttcaccacccgggtacggacagtgaccaaatcagcctatatgctcaagcatcaggaagaatcacagtctctaccaaaagaagccaacaaactgtaatcccgaatatcggatctagacccagggtaagggatgtctccagccgaataagcatctattggacaatagtaaaaccgggagacatacttttgattaacagcacagggaatctaattgctcctcggggttacttcaaaatacgaagtgggaaaagctcaataatgagatcagatgcacccattggcaaatgcaattctgaatgcatcactccaaatggaagcattcccaatgacaaaccatttcaaaatgtaaacaggatcacatatggggcctgtcccagatatgttaagcaaaacactctgaaattggcaacagggatgcgaaatgtaccagagaaacaaactagaggcatatttggcgcaatcgcgggtttcatagaaaatggttgggagggaatggtggacggttggtacggtttcaggcatcaaaattctgagggcacaggacaagcagcagatctcaaaagcactcaagcagcaatcaaccaaatcaatgggaaactgaataggttaatcgggaaaacaaacgagaaattccatcagattgaaaaagaattctcagaaatagaagggagaattcaggacctcgagaaatatgttgaggacactaaaatagatctctggtcatacaacgcggagcttcttgttgccctggagaaccaacatacaattgatctaactgactcagaaatgaacaaactgtttgaaagaacaaagaagcaactgagggaaaatgctgaggatatgggcaatggttgtttcaaaatataccacaaatgtgacaatgcctgcatagggtcaatcagaaatggaacttatgaccatgatgtgtacagagatgaagcattaaacaatcggttccagatcaaaggtgttgagctgaagtcaggatataaagattggatcctatggatttcctttgccatatcatgttttttgctttgtgttgctttgttggggttcatcatgtgggcctgccaaaaaggcaacattaggtgcaacatttgcatttga

SEQ ID NO: 31587 - RNA, 1701 nt, synthetic construct
  misc_feature 1..1701: note = hemagglutinin__InfluenzaA__ABG67667
  source 1..1701: mol_type = other RNA
atgaagactatcattgctttgagctacattttatgtcaggttttcgctcaaaaacttcccggaaatgacaacagcacagcaacgctgtgcctgggacaccatgcagtgccaaacggaacgctagtgaaaacaatcacgaatgatcaaattgaagtgactaatgctactgagctggttcagagttcctcaacaggtagaatatgcgacagtcctcaccgaatccttgatggaaaaaactgcacactaatagatgctctattgggagaccctcattgtgatggcttccaaaataaggaatgggacctttttgttgaacgcagcaaagcttacagcaactgttacccttatgatgtgccggattatgcctcccttaggtcactagttgcctcatcaggcaccctggagtttaccaatgaaggcttcaattggattggagtcgctcaggatgggaaaagctatgcttgcaaaaggggatctgttaacagtttctttagtagattgaattggttgcacaaattagaatacaaatatccagcactgaacgtgactatgccaaacaatgacaaatttgacaaattgtacatttggggggttcaccacccgagcacggatagtgaccaaaccagcctatatgttcaagcatcagggagagtcacagtctctaccaaaagaagccaacaaactgtaatcccgaatatcgggtccagaccctgggtgaggggcatctccagtagaataagcatctattggacaatagtaaaaccgggagacatacttttgattaacagcacagggaatctaattgctcctcggggttacttcaaaatacgaaatgggaaaagctcaataatgaggtcagatgcacccattgacaactgcaattctgaatgcatcactccaaatggaagcattcccaatgacaaaccttttcaaaatgtaaacaggatcacatatggggcctgtcccagatatgttaagcaaaacactctgaaattggcaacagggatgcggaatgtaccagagaaacaaactagaggcatattcggcgcaatcgcaggtttcatagaaaatggttgggagggaatgatagacggttggtacggtttcaggcatcaaaattctgagggcacaggacaagcagcagatcttaaaagcactcaagcagcaatcgatcaaatcaacgggaaactgaataggttaatcgagaaaacgaacgagaaattccatcaaatcgaaaaagaattctcagaagtagaagggagaattcaggacctcgagaaatatgttgaagacactaaaatagatctctggtcttacaacgcggagcttcttgttgccctggagaatcaacatacaattgatctaactgactcagaaatgaacaaactgtttgaaagaacaaggaagcaactgagggaaaatgctgaggacatgggcaatggttgcttcaaaatataccacaaatgtgacaatgcctgcatagggtcaatcagaaatggaacttatgaccatgatgtatacagagacgaagcattaaacaaccggttccagatcaaaggtgttgagctgaagtcgggatacaaagattggatcctatggatttcttttgccatatcatgctttttgctttgtgttgttttgctggggttcatcatgtgggcctgccaaaaaggcaacattaggtgcaacatttgcatttga

SEQ ID NO: 31588 - RNA, 1701 nt, synthetic construct
  misc_feature 1..1701: note = hemagglutinin__InfluenzaA__ABG79941
  source 1..1701: mol_type = other RNA
atgaagactatcattgctttgagctacattttatgtctggttttcgctcaaaaacttcccggaaatgacaacagcacggcaacgctgtgcctggggcaccatgcagtgccaaacggaacgctagtgaaaacaatcacgaatgaccaaattgaagtgactaatgctactgagctggttcagagttcctcaacaggtggaatatgcgacagtcctcaccaaatccttgatggagaaaactgcacactaatagatgctctattgggagaccctcattgtgatggcttccaaaataaggaatgggacctttttgttgaacgcagcaaagcctacagcaactgttacccttatgatgtgccggattatgcctcccttaggtcactagttgcctcatccggcacactggagtttaacaatgaaagcttcaattggactggagtcgctcagaatggaacaagctctgcttgcaaaaggagatctaataaaagtttctttagtagattgaattggttgcaccaattaaaatacaaatacccagcactgaacgtgactatgccaaacaatgaaaaatttgacaaattgtacatttggggggttcaccacccgagtacggacagtgaccaaatcagcctatatgctcaagcaccagggagagtcacagtctctaccaaaagaagccaacaaactgtaatcccgaatatcggatctagaccctgggtaaggggtgtctccagcagaataagcatctattggacaatagtaaaaccgggagacatacttttgattaactgcacagggaatctaattgctcctcggggttacttcaaaatacgaagtgggaaaagctcaataatgaggtcagatgcatccattggcaaatgcaattctgaatgcatcactccaaatggaagcattcccaatgacaaaccatttcaaaatgtaaacaggatcacatatggggcctgtcccagatatgttaagcaaaacactctgaaattggcaacagggatgcggaatgtaccagagaaacaaactagaggcatattcggcgcaatcgcgggtttcatagaaaatggttgggagggaatggtggacggttggtacggtttcaggcatcaaaattctgagggcacaggacaagcagcagatctcaaaagcactcaagcagcaatcaaccaaatcaacgggaaactgaataggttaatcgagaaaacgaacgagaaattccatcaaattgaaaaagaattctcagaagtggaagggagaattcaggacctcgagaaatatgttgaggacactaaaatagatctctggtcgtacaacgcggagcttcttgttgccctggagaaccagcatacaattgatctaactgactcagaaatgaacaaactgtttgaaagaacaaagaagcaactgagggaaaatgctgaggatatgggcaatggttgtttcaaaatataccacaaatgtgacaatgcctgcatagggtcaatcagaaatgggacttatgaccatgatgtatacagagacgaagcattaaacaaccggttccagatcaaaggtgttgagctgaagtcaggatacaaagattggatcctatggatttcctttgccatatcatgttttttgctttgtgttgtcttgctggggttcatcatgtgggcctgccaaaaaggcaacattaggtgcagcatttgcatttga

SEQ ID NO: 31589 - RNA, 1701 nt, synthetic construct; identical to SEQ ID NO: 31425
  misc_feature 1..1701: note = hemagglutinin__InfluenzaA__ABG79952
  source 1..1701: mol_type = other RNA

SEQ ID NO: 31590 - RNA, 1701 nt, synthetic construct
  misc_feature 1..1701: note = hemagglutinin__InfluenzaA__ABG79974
  source 1..1701: mol_type = other RNA
atgaagactatcattgctttgagctacattttatgcctggttttcgctcaaaaacttcccggaaatgacaacagcacagcaacgctgtgcctgggacaccatgcagtgccaaacggaacgctagtgaaaacaatcacgaatgatcaaattgaagtgactaatgctactgagctggttcagagttccccaacaggtagaatatgcgacagtcctcaccgaatccttgatggaaagaactgcacactgatagatgctctattgggagaccctcattgtgatggcttccaaaataaggaatgggacctttttgttgaacgcagcaaagcttacagcaactgttacccttatgatgtgccggattatgcctcccttaggtcactagttgcctcatcaggcaccctggagtttaccaacgaaaacttcaattggactggagtcgctcaggatgggaaaagctatgcttgcaaaaggggatctgttaacagtttctttagtagattgaattggttgcacaaattagaatacaaatatccagcgctgaacgtgactatgccaaacaatggcaaatttgacaaattgtacatttggggggttcaccacccgagcacggacagtgaccaaaccagcctatatgtccgagcatcagggaaagtcacagtctctaccaaaagaagccaacaaactgtaatcccggatatcgggtatagaccatgggtaaggggtctgtccagtagaataagcatctattggacaatagtaaaaccgggagacatacttttgattaatagcacagggaatctaattgctcctcggggttacttcaaaatacgaaatgggaaaagctcaataatgaggtcagatgcacccattggcaactgcagttctgaatgcatcactccaaatggaagcattcccaatgacaaaccttttcaaaatgtaaacaggatcacatatggggcctgccccagatatgttaagcaaaacactctgaaattggcaacagggatgcggaatgtaccagagaaacaaactagaggcatattcggcgcaatcgcaggtttcatagaaaatggttgggagggaatggtagacggttggtacggtttcaggcatcagaattctgagggcacaggacaagctgcagatcttaaaagcactcaagcagcaatcgaccaaatcaacgggaaactgaataggttagtcgagaaaacgaacgagaaattccatcaaatcgaaaaagaattctcagaagtagaagggagaattcaggacctcgagaaatatgttgaagacactaaaatagatctctggtcttacaatgcggagcttcttgttgctctggagaaccaacatacaattgatctaactgactcagaaatgaacaaactatttgaaagaacaaggaagcaactgagggaaaatgctgaggacatgggcaatggttgtttcaaaatataccacaaatgtgacaatgcctgcatagggtcaatcagaaatggaacttatgaccatgatgtatacagagacgaagcattaaacaaccggttccagatcaaaggtgttgagctgaagtcaggatacaaagattggatcctatggatttcctttgccatatcatgctttttgctttgtgttgttttgcttgggttcatcatgtgggcctgccaaaaaggcaacattaggtgcaacatttgcatttga

SEQ ID NO: 31591 - RNA, 1701 nt, synthetic construct; identical to SEQ ID NO: 31527
  misc_feature 1..1701: note = hemagglutinin__InfluenzaA__ABG79985
  source 1..1701: mol_type = other RNA

SEQ ID NO: 31592 - RNA, 1701 nt, synthetic construct
  misc_feature 1..1701: note = hemagglutinin__InfluenzaA__ABG79996
  source 1..1701: mol_type = other RNA
atgaagactatcattgctttgagctacattttatgtctggttttcgctcaaaaacttcccggaaatgacaacagcacagcaacgctgtgcctgggacaccatgcagtgccaaacggaacgctagtgaaaacaatcacgaatgatcaaattgaagtgactaatgctactgagctggttcagagttccccaacaggtagaatatgcgacagtcctcaccgaatccttgatggaaagaactgcacactgatagatgctctattgggagaccctcattgtgatggcttccaaaataaggaatgggacctttttgttgaacgcagcaaagcttacagcaactgttacccttatgatgtgccggattatgcctcccttaggtcactagttgcctcatcaggcaccctggagtttaccaacgaaaacttcaattggactggagtcgctcaggatgggaaaagctattcttgcaaaaggggatctgttaacagtttctttagtagattgaattggttgcacaaattagaatacaaatatccagcgctgaacgtgactatgccaaacaatggcaaatttgacaaattgtacatttggggggttcaccacccgagcacggacagtgaccaaaccagcctatatgtccgagcatcagggaaagtcacagtctctaccaaaagaagccaacaaactgtaatcccggatatcgggtatagaccatgggtaaggggtctgtccagtagaataagcatctattggacaatagtaaaaccgggagacatacttttgattaatagcacagggaatctaattgctcctcggggttacttcaaaatacgaaatgggaaaagctcaataatgaggtcagatgcacccattggcaactgcagttctgaatgcatcactccaaatggaagcattcccaatgacaaaccttttcaaaatgtaaacaggatcacatatggggcctgccccagatatgttaagcaaaacactctgaaattggcaacagggatgcggaatgtaccagagaaacaaactagaggcatattcggcgcaatcgcaggtttcatagaaaatggttgggagggaatggtagacggttggtacggtttcaggcatcagaattctgagggcacaggacaagctgcagatcttaaaagcactcaagcagcaatcgaccaaatcaacgggaaactgaataggttagtcgagaaaacgaacgagaaattccatcaaatcgaaaaagaattctcagaagtagaagggagaattcaggacctcgagaaatatgttgaagacactaaaatagatctctggtcttacaatgcggagcttcttgttgctctggagaaccaacatacaattgatctaactgactcagaaatgaacaaactatttgaaagaacaaggaagcagctgagggaaaatgctgaggacatgggcaatggttgtttcaaaatataccacaaatgtgacaatgcctgcatagggtcaatcagaaatggaacctatgaccatgatgtatacagagacgaagcattaaacaaccggttccagatcaaaggtgttgagctgaagtcaggatacaaagattggatcctatggatttcctttgccatatcatgctttttgctttgtgttgttttgcttgggttcatcatgtgggcctgccaaaaaggcaacattaggtgcaacatttgcatttga

SEQ ID NO: 31593 - RNA, 1701 nt, synthetic construct; identical to SEQ ID NO: 31527
  misc_feature 1..1701: note = hemagglutinin__InfluenzaA__ABG80007
  source 1..1701: mol_type = other RNA

SEQ ID NO: 31594 - RNA, 1701 nt, synthetic construct; identical to SEQ ID NO: 31527
  misc_feature 1..1701: note = hemagglutinin__InfluenzaA__ABG80018
  source 1..1701: mol_type = other RNA

SEQ ID NO: 31595 - RNA, 1701 nt, synthetic construct; identical to SEQ ID NO: 31495
  misc_feature 1..1701: note = hemagglutinin__InfluenzaA__ABG80029
  source 1..1701: mol_type = other RNA

SEQ ID NO: 31596 - RNA, 1701 nt, synthetic construct; identical to SEQ ID NO: 31495
  misc_feature 1..1701: note = hemagglutinin__InfluenzaA__ABG80040
  source 1..1701: mol_type = other RNA

SEQ ID NO: 31597 - RNA, 1701 nt, synthetic construct
  misc_feature 1..1701: note = hemagglutinin__InfluenzaA__ABG80051
  source 1..1701: mol_type = other RNA
atgaagactatcattgctttgagctacattttatgtctggttttcgctcaaaaacttcccggaaatgacaacagcacagcaacgctgtgcctgggacaccatgcagtgccaaacggaacgctagtgaaaacaatcacgaatgatcaaattgaagtgaccaatgctactgagctggttcagagttccccaacaggtagaatatgcgacagtcctcaccgaatccttgatggaaagaactgcacactgatagatgctctattgggagaccctcattgtgatggcttccaaaataaggaatgggacctttttgttgaacgcagcaaagcttacagcaactgttacccttatgatgtgccggattatgcctcccttaggtcactagttgcctcatcaggcaccctggagtttaccaacgaaaacttcaattggactggagtcgctcaggatgggaaaagctatgcttgcaaaaggggatctgttaacagtttctttagtagattgaattggttgcacaaattagaatacaaatatccagcgctgaacgtgactatgccaaacaatggcaaatttgacaaattgtacatttggggggttcaccacccgagcacggacagtgaccaaaccagcctatatgtccgagcatcagggaaagtcacagtctctaccaaaagaagccaacaaactgtaatcccggatatcgggtatagaccatgggtaaggggtctgtccagtagaataagcatctattggacaatagtaaaaccgggagacatacttttgattaatagcacagggaatctaattgctcctcggggttacttcaaaatacgaaatgggaaaagctcaataatgaggtcagatgcacccattggcaactgcagttctgaatgcatcactccaaatggaagcattcccaatgacaaaccttttcaaaatgtaaacaggatcacatatggggcctgccccagatatgttaagcaaaacactctgaaattggcaacagggatgcggaatgtaccagagaaacaaactagaggcatattcggcgcaatcgcaggtttcatagaaaatggttgggagggaatggtagacggttggtacggtttcaggcatcagaattctgagggcacaggacaagctgcagatcttaaaagcactcaagcagcaatcgaccaaatcaacgggaaactgaataggttagtcgagaaaacgaacgagaaattccatcaaatcgaaaaagaattctcagaagtagaagggagaattcaggacctcgagaaatatgttgaagacactaaaatagatctctggtcttacaatgcggagcttcttgttgctctggagaaccaacatacaattgatctaactgactcagaaatgaacaaactatttgaaagaacaaggaagcaactgagggaaaatgctgaggacatgggcaatggttgtttcaaaatataccacaaatgtgacaatgcctgcatagggtcaatcagaaatggaacttatgaccatgatgtatacagagacgaagcattaaacaaccggttccagatcaaaggtgttgagctgaagtcaggatacaaagattggatcctatggatttcctttgccatatcatgctttttgctttgtgttgttttgcttgggttcatcatgtgggcctgccaaaaaggcaacattaggtgcaacatttgcatttga

SEQ ID NO: 31598 - RNA, 1701 nt, synthetic construct
  misc_feature 1..1701: note = hemagglutinin__InfluenzaA__ABG80062
  source 1..1701: mol_type = other RNA
atgaagactatcattgctttgagctacattttatgtctggttttcgctcaaaaacttcccggaaatgacaacagcacagcaacgctgtgcctgggacaccatgcagtgccaaacggaacgctagtgaaaacaatcacgaatgatcaaattgaagtgactaatgctactgagctggttcagagttcctcaacaggtagaatatgcgacagtcctcaccgaatccttgatggaaaaaactgcacactgatagatgctctattgggagaccctcattgtgatggcttccaaaataaggaatgggacctttttgttgaacgcagcaaagcttacagcaactgttacccttatgatgtgccggattatgcctcccttaggtcactagttgcctcatcaggcaccctggagtttaccaaggaaggcttcaattggactggagtcgctcaggatgggaaaagctatgcttgcaaaaggggatctgttaacagtttctttagtagattgaattggttgcacaaattagaatacaaatatccagcactgaacgtgactatgccaaacaatgacaaatttgacaaattgtacatttggggggttcaccacccgagcacggacagtgaccaaaccagcctatatgttcaagcatcagggagagtcacagtctctaccaaaagaagccaacaaactgtaatcccgaatatcgggtctagaccctgggtaaggggtatctccagtagaataagcatctattggacaatagtaaaaccgggagacatacttttgattaacagcacagggaatctaattgctcctcggggttacttcaaaatacgaaatgggaaaagctcaataatgaggtcagatgcacccattggcaactgcaattctgaatgcatcactccaaatggaagcattcccaatgacaaaccttttcaaaatgtaaacaggatcacatatggggcctgtcccagatatgttaagcaaaacactctgaagttggcaacagggatgcggaatgtaccagagaaacaaactagaggcatattcggcgcaatcgcaggtttcatagaaaatggttgggagggaatggtagacggttggtacggtttcaggcatcaaaattctgagggcacaggacaagcagcagatcttaaaagcactcaagcagcaatcgaccaaatcaacgggaagctgaataggttaatcgagaaaacgaacgaaaaattccatcaaatcgaaaaagaattctcagaagtagaagggagaattcaggacctcgagaaatatgttgaagacactaaaatagatctctggtcttacaacgcggagcttcttgttgccctggagaaccaacatacaattgatctaactgactcagaaatgaacaaactgtttgaaagaacaaggaagcaactgagggaaaatgctgaggacatgggcaatggttgcttcaaaatataccacaaatgtgacaatgcctgcatagggtcaatcagaaatggaacttatgaccatgatgtatacagagacgaagcattaaacaaccggttccagatcaaaggtgttgagctgaagacaggatacaaagattggatcctatggatttcctttgccatatcatgctttttgctttgtgttgttttgctggggttcatcatgtgggcctgccaaaaaggcaacattaggtgcaacatttgcatttga

SEQ ID NO: 31599 - RNA, 1701 nt, synthetic construct
  misc_feature 1..1701: note = hemagglutinin__InfluenzaA__ABG80073
  source 1..1701: mol_type = other RNA
atgaagactatcattgctttgagctacattttatgtctggttttcgctcaaaaacttcccggaaatgacaacagcacagcaacgctgtgcctgggacaccatgcagtgccaaacggaacgctagtgaaaacaatcacgaatgatcaaattgaagtgactaatgctactgagctggttcagagttcctcaacaggtagaatatgcgacagtcctcacagaatccttgatgggaaaaactgcacactgatagatgctctattgggagaccctaattgtgatggcttccaaaataaggaatgggacctttttgttgaacgcagcaaagcttacagcaactgttacccttatgatgtgccggattatgcctcccttaggtcactagttgcctcatcaggcaccctggagtttaccaatgaagacttcaattggactggagtcgctcaggatgggggaagctatgcttgcaaaaggggatctgttaacagtttctttagtagattgaattggttgcacaaattagaatacaaatatccagcgctgaacgtgactatgccaaacaatggcaaatttgacaaattgtacatttggggggttcaccacccgagcacggacagtgaccaaaccagcctatatgttcgagcatcagggagagtcacagtctctaccaaaagaagccaacaaactgtaaccccgaatatcgggtctagaccctgggtaaggggtctgtccagtagaataagcatctattggacaatagtaaaaccgggagacatacttttgattaatagcacaggaaatctaattgctcctcggggttacttcaaaatacgaaatgggaaaagctcaataatgaggtcagatgcacccattggcacctgcagttctgaatgcatcactccaaatggaagcattcccaatgacaaaccttttcaaaatgtaaacaggatcacatatggggcctgccccagatacgttaagcaaaacactctgaaattggcaacagggatgcggaatgtaccagagaaacaaactagaggcatattcggcgcaatcgcaggtttcatagaaaatggttgggagggaatggtagacggttggtacggtttcaggcatcaaaattctgagggcacaggacaagcagcagatcttaaaagcactcaagcagcaatcgaccaaatcaacgggaaactgaataggttaatcgagaaaacgaacgagaaattccatcaaatcgaaaaagaattctcagaagtagaagggagaattcaggacctcgagaaatatgttgaagacactaaaatagatctctggtcttacaacgcggagcttcttgttgccctggagaaccaacatacaattgatctaactgactcagaaatgaacaaactgtttgaaaaaacaaggaagcaactgagggaaaatgctgaggacatgggcaatggttgcttcaaaatataccacaaatgtgacaatgcctgcatagggtcaatcagaaatgggacttatgaccatgatgtatacagagacgaagcattaaacaaccggttccagatcaaaggtgttgagctgaagtcaggatacaaagattggatcctatggatttcctttgccatatcatgctttttgctttgtgttgttttgctggggttcatcatgtgggcctgccaaaaaggcaacattaggtgcaacatttgcatttga

SEQ ID NO: 31600 - RNA, 1701 nt, synthetic construct
  misc_feature 1..1701: note = hemagglutinin__InfluenzaA__ABG80084
  source 1..1701: mol_type = other RNA
atgaagactatcattgctttgagctacattttatgtctggttttcgctcaaaaacttcccggaaatgacaacagcacagcaacgctgtgcctgggacaccatgcagtgccaaacggaacgctagtgaaaacaatcacgaatgatcaaattgaagtgactaatgctactgagctggttcagagttcctcaacaggtagaatatgcgacagtcctcaccgaatccttgatgggaaaaactgcacactgatagatgctctattgggagaccctcattgtgatggcttccaaaataaggaatgggacctttttgttgaacgcagcaaagcttacagcaactgttacccttatgatgtgccggattatgcctcccttaggtcactagttgcctcatcaggcaccctggagtttatcaatgaagacttcaattggactggagtcgctcaggatgggaaaagctatgcttgcaaaaggggatctgttaacagtttctttagtagattgaattggctgcacaaattagaatacaaatatccagcgctgaacgtgactatgccaaacaatggcaaatttgacaaattgtacatttggggggttcaccacccgagcacggacagtgaccaaaccagcctatatgttcgagcatcagggagagtcacagtctctaccaaaagaagccaacaaactgtaatcccgaatatcgggtttagaccctgggtaaggggtctgtccagtggaataagcatctattggacaatagtaaaaccgggagacatacttttgattaatagcacagggaatctaattgctcctcggggttacttcaaaatacgaaatgggaaaagctcaataatgaggtcagatgcacccattggcaactgcagttctgaatgcatcactccaaatggaagcattcccaatgacaaaccttttcaaaatgtaaacaggatcacatatggggcctgccccagatatgttaagcaaaacactctgaagttggcaacagggatgcggaatgtaccagagaaacaaactagaggcatattcggcgcaatcgcaggtttcatagaaaatggttgggagggaatggtagacggttggtacggtttcaggcatcaaaattctgagggcacaggacaagcagcagatcttaaaagcactcaagcagcaatcgaccaaatcaacgggaaactgaataggttaatcgagaaaacgaacgagaaattccatcaaatcgaaaaagaattctcagaagtagaagggagaattcaggacctcgagaaatatgttgaagacactaaaatagatctctggtcttacaacgcggggcttcttgttgccctggagaaccaacatacaattgatctaactgactcagaaatgaacaaactgtttgaaagaacaagaaagcaactgagggaaaatgctgaggacatgggcaatggttgcttcaaaatataccacaaatgtgacaatgcctgcatagggtcaatcagaaatggaacttatgaccatgatatatacagagacgaagcattaaacaaccggttccagatcaaaggtgtcgagctgaagtcaggatacaaagattggatcctatggatttcctttgccatatcatgctttttgctttgtgttgttttgctggggttcatcatgtgggcctgccaaaaaggcaacattaggtgcaacatttgcatttga

SEQ ID NO: 31601 - RNA, 1701 nt, synthetic construct
  misc_feature 1..1701: note = hemagglutinin__InfluenzaA__ABG80095
  source 1..1701: mol_type = other RNA
atgaagactatcattgctttgagctacattttatgtctggttttcgctcaaaaacttcccggaaatgacaacagcacagcaacgctgtgcctgggacaccatgcagtgccaaacggaacgctagtgaaaacaatcacgaatgatcaaattgaagtgactaatgctactgagctggttcagagttcctcaacaggtagaatatgcgacagtcctcaccgaatccttgatggaaaaaactgcacactgatagatgctctattgggagaccctcattgtgatggcttccaaaataaggaatgggacctttttgttgaacgcagcaaagcttacagcaactgttacccttatgatgtgccggattatgcctcccttaggtcactagttgcctcatcaggcaccctggagtttatcaatgaagacttcaattggactggagtcgctcaggatgggaaaagctatgcttgcaaaaggggatctgttaacagtttctttagtagattgaattggctgcacaaattagaatacaaatatccagcgctgaacgtgactatgccaaacaatggcaaagttgacaaattgtacatttggggggttcaccacccgagcacggacagtgaccaaaccagcctatatgttcgagcatcagggagagtcacagtctctaccaaaagaagccaacaaactgtaatcccgaatatcgggtttagaccctgggtaaggggtctgtccagtagaataagcatctattggacaatagtaaaaccgggagacatacttttgattaatagcacagggaatctaattgctcctcggggttacttcaaaatacgaaatgggaaaagctcaataatgaggtcagatgcacccattggcaactgcagttctgaatgcatcactccaaatggaagcattcccaatgacaaaccttttcaaaatgtaaacaggatcacatatggggcctgccccagatatgttaagcaaaacactctgaagttggcaacagggatgcggaatgtaccagagaaacaaactagaggcatattcggcgcaatcgcaggtttcatagaaaatggttgggagggaatggtagacggttggtacggtttcaggcatcaaaattctgagggcacaggacaagcagcagatcttaaaagcactcaagcagcaatcgaccaaatcaacgggaaactgaataggttaatcgagaaaacgaacgagaaattccatcaaatcgaaaaagaattctcagaagtagaagggagaattcaggacctcgagaaatatgttgaagacactaaaatagatctctggtcttacaacgcggggcttcttgttgccctggagaaccaacatacaattgatctaactgactcagaaatgaacaaactgtttgaaagaacaaggaagcaactgagggaaaatgctgaggacatgggcaatggttgcttcaaaatataccacaaatgtgacaatgcctgcatagggtcaatcagaaatggaacttatgaccatgatgtatacagagacgaagcattaaacaaccggttccagatcaaaggtgtcgagctgaagtcaggatacaaagattggatcctatggatttcctttgccatatcatgctttttgctttgtgttgttttgctggggttcatcatgtgggcctgccaaaaaggcaacattaggtgcaacatttgcatttga

SEQ ID NO: 31602 - RNA, 1701 nt, synthetic construct
  misc_feature 1..1701: note = hemagglutinin__InfluenzaA__ABG80106
  source 1..1701: mol_type = other RNA
atgaagactatcattgctttgagctacattttatgtctggttttcgctcaaaaacttcccggaaatgacaacagcacagcaacgctgtgcctgggacaccatgcggtgccaaacggaacgctagtgaaaacaatcacgaatgatcaaattgaagtgactaatgctactgagctggttcagagttcctcaacaggtagaatatgcgacagtcctcaccgaatccttgatggaaaaaactgcacactgatagatgccctattgggagaccctcattgtgatggcttccaaaataaggaatgggacctttttgttgaacgcagcaaagcttacagcaactgttacccttatgatgtgccggattatgcctcccttaggtcactagttgcctcatcaggcaccctggagtttatcaatgaagacttcaattggactggagtcgctcaggatgggaaaagctatgcttgcaaaaggggatctgttaacagtttctttagtagattgaattggttgcacaaattagaatacaaatatccagcgctgaacgtgactatgccaaacaatggcaaatttgacaaattgtacatttggggggttcaccacccgagcacggacagtgaccaaaccagcctatatgttcgagcatcagggagagtcacagtctctaccaaaagaagccaacaaactgtaatcccgaatatcgggtttagaccctgggtaaggggtctgtccagtagaataagcatctattggacaatagtaaaaccgggagacatacttttgattaatagcacagggaatctaattgctcctcggggttacttcaaaatacggaatgggaaaagctcaataatgaggtcagatgcacccattggcaactgcagttctgaatgcatcactccaaatggaagcattcccaatgacaaaccttttcaaaatgtaaacaggatcacatatggggcctgccccagatatgttaagcaaaacactctgaagttggcaacagggatgcggaatgtaccagagaaacaaactagaggcatattcggcgcaatcgcaggtttcatagaaaatggttgggagggaatggtagacggttggtacggtttcaggcatcaaaattctgagggcacaggacaagcagcagatcttaaaagcactcaagcagcaatcgaccaaatcaacgggaaactgaataggttaatcgagaaaacgaacgagaaattccatcaaatcgaaaaagaattctcagaagtagaagggagaattcaggacctcgagaaatatgttgaagacactaaaatagatctctggtcttacaacgcggggcttcttgttgccctggagaaccaacatacaattgatctaactgactcagaaatgaacaaactgtttgaaagaacaaggaagcaactgagggaaaatgctgaggacatgggcaatggttgcttcaaaatataccacaaatgtgacaatgcctgcatagggtcaatcagaaatggaacttatgaccatgatgtatacagagacgaagcattaaacaaccggttccagatcaaaggtgttgagctgaagtcaggatacaaagattggatcctatggatttcctttgccatatcatgctttttgctttgtgttgttttgctggggttcatcatgtgggcctgccaaaaaggcaacattaggtgcaacatttgcatttga

SEQ ID NO: 31603 - RNA, 1701 nt, synthetic construct
  misc_feature 1..1701: note = hemagglutinin__InfluenzaA__ABG80117
  source 1..1701: mol_type = other RNA
atgaagactatcattgctttgagctacattttatgtctggttttcgctcaaaaacttcccggaaatgacaacagcacagcaacgctgtgcctgggacaccatgcggtgccaaacggaacgctagtgaaaacaatcacgaatgatcaaattgaagtgactaatgctactgagctggttcagagttcctcaacaggtagaatatgcgacagtcctcaccgaatccttgatggaaaaaactgcacactgatagatgctctattgggagaccctcattgtgatggcttccaaaataaggaatgggacctttttgttgaacgcagcaaagcttacagcaactgttacccttatgatgtgccggattatgcctcccttaggtcactagttgcctcatcaggcaccctggagtttatcaatgaagacttcaattggactggagtcgctcaggatgggaaaagctatgcttgcaaaaggggatctgttaacagtttctttagtagattgaattggttgcacaaattagaatacaaatacccagcgctgaacgtgactatgccaaacaatggcaaatttgacaaattgtacatttggggggttcaccacccgagcacggacagtgaccaaaccagcctatatgttcgagcatcagggagagtcacagtctctaccaaaagaagccaacaaactgtaatcccgaatatcgggtttagaccctgggtaaggggtctgtccagtagaataagcatctattggacaatagtaaaaccgggagacatacttttgattaatagcacagggaatctaattgctcctcggggttacttcaaaatacggaatgggaaaagctcaataatgaggtcagatgcacccattggcaactgcagttctgaatgcatcactccaaatggaagcattcccaatgacaaaccttttcaaaatgtaaacaggatcacatatggggcctgccccagatatgttaagcaaaacactctgaagttggcaacagggatgcggaatgtaccagtgaaacaaactagaggcatattcggcgcaatcgcaggtttcatagaaaatggttgggagggaatggtagacggttggtacggtttcaggcatcaaaattctgagggcacaggacaagcagcagaccttaaaagcactcaagcagcaatcgaccaaatcaacgggaaactgaataggttaatcgagaaaacgaacgagaaattccatcaaatcgaaaaagaattctcagaagtagaagggagaattcaggacctcgagaaatatgttgaagacactaaaatagatctctggtcttacaacgcggggcttcttgttgccctggagaaccaacatacaattgatctaactgactcagaaatgaacaaactgtttgaaagaacaaggaagcaactgagggaaaatgctgaggacatgggcaatggttgcttcaaaatataccacaaatgtgacaatgcctgcatagggtcaatcagaaatggaacttatgaccatgatgtatacagagacgaagcattaaacaaccggttccagatcaaaggtgttgagctgaagtcaggatacaaagattggatcctatggatttcctttgccatatcatgctttttgctttgtgttgttttgctggggttcatcatgtgggcctgccaaaaaggcaacattaggtgcaacatttgcatttga

SEQ ID NO: 31604 - RNA, 1701 nt, synthetic construct
  misc_feature 1..1701: note = hemagglutinin__InfluenzaA__ABG80128
  source 1..1701: mol_type = other RNA
atgaagactatcattgctttgagctacattttatgtctggttttcgctcaaaaacttcccggaaatgacaacagcacagcaacgctgtgcctgggacaccatgcagtgccaaacggaacgctagtgaaaacaatcacgaatgatcgaattgaagtgactaatgctactgagctggttcagagttcctcaacaggtagaatatgcgacagtcctcaccgaatccttgatggaaaaaactgcacactgatagatgctctattgggagaccctcattgtgatggcttccaaaataaggaatgggacctttttgttgaacgcagcaaagcttacagcaactgttacccttatgatgtgccggattatgcctcccttaggtcactagttgcctcatcaggcaccctggagtttatcaatgaagacttcaattggactggagtcgctcaggatgggaaaagctatgcttgcaaaaggggatctgttaacagtttctttagtagattgaattggctgcacaaattagaatacaaatatccagcgctgaacgtgactatgccaaacaatggcaaatttgacaaattgtacatttggggggttcaccacccgagcacggacagtgaccaaaccagcctatatgttcgagcatcagggagagtcacagtctctaccaaaagaagccaacaaactgtaatcccgaatatcgggtttagaccctgggtaaggggtctgtccagtagaataagcatctattggacaatagtaaaaccgggagacatacttttgattaatagcacagggaatctaattgctcctcggggttacttcaaaatacgaaatgggaaaagctcaataatgaggtcagatgcacccattggcaactgcagttctgaatgcatcactccaaatggaagcattcccaatgacaaaccttttcaaaatgtaaacaggatcacatatggggcctgccccagatatgttaagcaaaacactctgaagttggcaacagggatgcggaatgtaccagagaaacaaactagaggcatattcggcgcaatcgcaggtttcatagaaaatggttgggagggaatggtagacggttggtacggtttcaggcatcaaaattctgagggcacaggacaagcagcagatcttaaaagcactcaagcagcaatcgaccaaatcaacgggaaactgaataggttaatcgagaaaacgaacgagaaattccatcaaatcgaaaaagaattctcagaagtagaagggagaattcaggacctcgagaaatatgttgaagacactaaaatagatctctggtcttacaacgcggggcttcttgttgccctggagaaccaacatacaattgatctaactgactcagaaatgaacaaactgtttgaaagaacaaggaagcaactgagggaaaatgctgaggacatgggcaatggttgcttcaaaatataccacaaatgtgacaatgcctgcatagggtcaatcagaaatggaacttatgaccatgatgtatacagagacgaagcattaaacaaccggttccagatcaaaggtgtcgagctgaagtcaggatacaaagattggatcctatggatttcctttgccatatcatgctttttgctttgtgttgttttgctggggttcatcatgtgggcctgccaaaaaggcaacattaggtgcaacatttgcatttga

SEQ ID NO: 31605 - RNA, 1701 nt, synthetic construct
  misc_feature 1..1701: note = hemagglutinin__InfluenzaA__ABG80139
  source 1..1701: mol_type = other RNA
atgaagactatcattgctttgagctacattttatgtctggttttcgctcaaaaacttcccggaaatgacaacagcacagcaacgctgtgcctgggacaccatgcagtgccaaacggaacgctagtgaaaacaatcacgaatgatcaaattgaagtgactaatgctactgagctggttcagagttcctcaacaggtagaatatgcgacagtcctcaccgaatccttgatggaaaaaactgcacactaatagatgctctattgggagaccctcattgtgatggcttccaaaataaggaatgggacctttttgttgaacgcagcaaagcttacagcaactgttacccttatgatgtgccggattatgcctcccttaggtcactagttgcctcatcaggcaccctggagtttatcaatgaagacttcaattggactggagtcgctcaggatgggaaaagctatgcttgcaaaaggggatctgttaacagtttctttagtagattgaattggttgcacaaattagaatacaaatatccagcgctgaacgtgactatgccaaacaatggcaaatttgacaaattgtacatttggggggttcaccacccgagcacggacagtgaccaaaccagcctatatgttcgagcatcagggagagtcacagtctctaccaaaagaagccaacaaactgtaatcccgaatatcgggtttagaccctgggtaaggggtctgtccagtagaataagcatctattggacaatagtaaaaccgggagacatacttttgattaatagcacagggaatctaattgctcctcggggttacttcaaaatacgaaatgggaaaagctcaataatgaggtcagatgcacctattggcaactgcagttatgaatgcatcactccaaatggaagcattcccaatgacaaaccttttcaaaatgtaaacaggatcacatatggggcctgccccagatatgttaagcaaaacactctgaagttggcaacggggatgcggaatgtaccagagaaacaaactagaggcatattcggcgcaatcgcaggtttcatagaaaatggttgggagggaatggtagacggttggtacggtttcaggcatcaaaattctgagggcacaggacaagcagcagatcttaaaagcactcaagcagcaatcgaccaaatcaacgggaaactgaataggttaatcgagaaaacgaacgagaaattccatcaaatcgaaaaagaattctcagaagtagaagggagaattcaggacctcgagaaatatgttgaagacactaaaatagatctctggtcttacaacgcggggcttcttgttgccctggagaaccaacatacaattgatctaactgactcagaaatgaacaaactgtttgaaagaacaaggaagcaactgagggaaaatgctgaggacatgggcaatggttgcttcaaaatataccacaaatgtgacaatacctgcatagggtcaatcagaaatggaacttatgaccatgatgtatacagagacgaagcattaaacaaccggttccagatcaaaggtgttgagctgaagtcaggatacaaagattggatcctatggatttcctttgccatatcatgctttttgctttgtgttgttttgctggggttcatcatgtgggcctgccaaaaaggcaacattaggtgcaacatttgcatttga

SEQ ID NO: 31606 - RNA, 1701 nt, synthetic construct
  misc_feature 1..1701: note = hemagglutinin__InfluenzaA__ABG80150
  source 1..1701: mol_type = other RNA
atgaagactatcattgctttgagctacattttatgtctggttttcgctcaaaaacttcccggaaatgacaacagcacagcaacgctgtgcctgggacaccatgcagtgccaaacggaacgctagtgaaaacaatcacgaatgatcaaattgaagtgactaatgctactgagctggttcagagttcctcaacaggtagaatatgcgacagtcctcaccgaatccttgatggaaaaaactgcacactgatagatgctctattgggagaccctcattgtgatggcttccaaaataaggaatgggacctttttgttgaacgcagcaaagcttacagcaactgttacccttatgatgtgccggattatgcctcccttaggtcactagttgcctcatcaggcaccctggagtttatcaatgaaaacttcaattggactggagtcgctcaggatgggaaaagctatgcttgcaaaaggggatctgttaacagtttctttagtagattgaattggctgcataaattagaatacaaatatccagcgctgaacgtgactatgccaaacaatggcaaatttgacaaattgtacatttggggggttcaccacccgagcacggacagtgaccaaaccagcctatatgttcgagcatcagggagagtcacagtctctaccaaaagaagccaacaaactgtaatcccgaatatcgggtttagaccctgggtaaggggtctgtccagtggaataagcatctattggacaatagtaaaaccgggagacatacttttgattaatagcacagggaatctaattgctcctcggggttacttcaaaatacgaaatgggaaaagctcaataatgaggtcagatgcacccattggcaactgcagttctgaatgcatcactccaaatggaagcattcccaatgacaaaccttttcaaaatgtaaacaggatcacatatggggcctgccccagatatgttaagcaaaacactctgaagttggcaacagggatgcggaatgtaccagagaaacaaactagaggcatattcggcgcaatcgcaggtttcatagaaaatggttgggagggaatggtagacggttggtacggtttcaggcatcaaaattctgagggcacaggacaagcagcagatcttaaaagcactcaagcagcaatcgaccaaatcaacggaaaactgaataggttaatcgagaaaacgaacgagaaattccatcaaatcgaaaaagaattctcagaagtagaagggagaattcaggacctcgagaaatatgttgaagacactaaaatagatctctggtcttacaacgcggggcttcttgttgccctggagaaccaacatacaattgatctaactgactcagaaatgaacaaactgtttgaaagaacaaggaagcaactgagggaaaatgctgaggacatgggcaatggttgcttcaaaatataccacaaatgtgacaatgcctgcatagggtcaatcagaaatggaacttatgaccatgatgtatacagagacgaagcattaaacaaccggttccagatcaaaggtgtcgagctgaagtcaggatacaaagattggatcctatggatttcctttgccatatcatgctttttgctttgtgttgttttgctggggttcatcatgtgggcctgccaaaaaggcaacattaggtgcaacatttgcatttga

SEQ ID NO: 31607 - RNA, 1701 nt, synthetic construct
  misc_feature 1..1701: note = hemagglutinin__InfluenzaA__ABG80161
  source 1..1701: mol_type = other RNA
atgaagactatcattgctttgagctacatttcatgtctggttttcgctcaaaaacttcccggaaatgacaacagcacagcaacgctgtgcctgggacaccatgcggtgccaaacggaacgctagtgaaaacaatcacgaatgatcaaattgaagtgactaatgctactgagctggttcagagttcctcaacaggtagaatatgcgacagtcctcatcgaatccttgatggaaaaaactgcacactgatagatgctctattgggagaccctcattgtgatggcttccaaaataaggaatgggacctttttgtcgaacgcagcaaagcttacagcaactgttacccttatgatgtgccggattatgcctcccttaggtcactagttgcctcatcaggcaccctggagtttatcaatgaagacttcaattggactggagtcgctcaggatgggaaaagctatgcttgcaaaaggggatctgttaacagtttctttagtagattgaattggttgcacaaattagaatacaaatatccagcgctgaacgtgactatgccaaacaatggcaaatttgacaaattgtacatttggggggttcaccacccgagcacggacagtgaccaaaccagcctatatgttcaagcatcagggagagtcacagtctctaccaaaagaagccaacaaactgtaatcccgaatatcgggtttagaccctgggtaaggggtctgtccagtagaataagcatctattggacaatagtaaaaccgggagacatacttttgattaatagcacagggaatctaattgctcctcggggttacttcaaaatacggaatgggaaaagctcaataatgaggtcagatgcacccattggcaactgcagttctgaatgcatcactccaaatggaagcattcccaatgacaaaccttttcaaaatgtaaacaggatcacatatggggcctgccccagatatgttaagcaaaacactctgaagttggcaacagggatgcggaatgtaccagagaaacaaactagaggcatattcggcgcaatcgcaggtttcatagaaaatggttgggagggaatggtagacggttggtacggtttcaggcatcaaaattctgagggcacaggacaagcagcagatcttaaaagcactcaagcagcaatcgaccaaatcaacgggaaactgaataggttaatcgagaaaacgaacgagaaattccatcaaatcgaaaaagaattctcagaagtagaagggagaattcaggacctcgagaaatatgttgaagacactaaaatagatctctggtcttacaacgcggggcttcttgttgccctggagaaccaacatacaattgatctaactgactcagaaatgaacaaactgtttgaaagaacaaggaagcaactgagggaaaatgctgaggacatgggcaatggttgcttcaaaatataccacaaatgtgacaatgcctgcatagggtcaatcagaaatggaacttatgaccatgatgtatacagagacgaagcattaaacaaccggttccagatcaaaggtgttgagctgaagtcaggatacaaagattggatcctatggatttcctttgccatatcatgctttttgctttgtgttgttttgctggggttcatcatgtgggcctgccaaaaaggcaacattaggtgcaacatttgcatttga

SEQ ID NO: 31608 - RNA, 1698 nt, synthetic construct
  misc_feature 1..1698: note = hemagglutinin__InfluenzaA__ABG80172
  source 1..1698: mol_type = other RNA
atgaaagtaaaactactggtcctgttatgtacatttacagctacatatgcagacacaatatgtatagggtaccatgccaacaactcaaccgacactgttgacacagtacttgagaagaatgtgacagtgacacactctgtcaacctacttgaggacagtcacaatggaaaactatgtctactaaaaggaatagccccactacaattgggtaattgcagcgttgccggatggatcttaggaaacccagaatgcgaattactgatttccaaggaatcatggtcctacattgtagaaacaccaaatcctgagaatggaacatgttacccagggtatttcgccgactatgaggaactgagggagcaattgagttcagtatcttcatttgagagattcgaaatattccccaaagaaagctcatggcccaaccacaccgtaaccggagtatcagcatcatgctcccataatgggaaaagcagtttttacagaaatttgctatggctgacggggaagaatggtttgtacccaaacctgagcaagtcctatgcaaacaacaaagagaaagaagtccttgtactatggggtgttcatcacccgcctaacataggggaccaaagggccctctatcatacagaaaatgcttatgtctctgtagtgtcttcacattatagcagaagattcaccccagaaatagccaaaagacccaaagtaagagatcaggaaggaagaatcaactactactggactctgctggaacccggggatacaataatatttgaggcaaatggaaatctaatagcgccacggtatgctttcgcactgagtagaggctttggatcaggaatcatcacctcaaatgcaccaatggatgaatgtgatgcgaagtgtcaaacacctcagggagctataaacagcagtcttcctttccagaacgtacacccagtcacaataggagagtgtccaaagtatgtcaggagtgcaaaattaaggatggttacaggactaaggaacatcccatccattcaatccagaggtttgtttggagccattgccggtttcattgaaggggggtggactggaatggtagatgggtggtatggttatcatcatcagaatgagcaaggatctggctatgccgcagatcaaaaaagcacacaaaatgccattaacgggattacaaacaaggtgaattctgtaattgagaaaatgaacactcaattcacagctgtgggcaaagaattcaacaaattggaaagaaggatggaaaacttaaataaaaaagttgatgatgggtttctagacatttggacatataatgcagaattgttggttctactggaaaatgaaaggactttggatttccataactccaatgtgaagaatctgtatgagaaagtaaaaagccaattaaagaataatgccaaagaaataggaaacgggtgttttgaattctatcacaagtgtaacaatgaatgcatggagagtgtgaaaaatggaacttatgactatccaaaatattccgaagaatcaaagttaaacagggagaaaattgatggagtgaaattggaatcaatgggagtctatcagattctggcgatctactcaactgtcgccagttccctggttcttttggtctccctgggggcaatcagcttctggatgtgttccaatgggtctttgcagtgtagaatatgcatctga

SEQ ID NO: 31609 - RNA, 1698 nt, synthetic construct
  misc_feature 1..1698: note = hemagglutinin__InfluenzaA__ABG80183
  source 1..1698: mol_type = other RNA
atgaaagtaaaactactggtcctgttatgtacatttacagctacatatgcagacacaatatgtatagggtaccatgccaacaactcaaccgacactgttgacacagtacttgagaagaatgtgacagtgacacactctgtcaacctacttgaggacagtcacaatggaaaactatgtctactaaaaggaatagccccactacaattgggtaattgcagcgttgccggatggatcttaggaaacccagaatgcgaattactgatttccaaggaatcatggtcctacattgtagaaacaccaaatcctgagaatggaacatgttacccagggtatttcgccgactatgaggaactgagggagcaattgagttcagtatcttcatttgagagattcgaaatattccccaaagaaagctcatggcccaaccacaccgtaaccggagtatcagcatcatgctcccataatgggaaaagcagtttttacagaaatttgctatggctgacggggaagaatggtttgtacccaaacctgagcaagtcctatgcaaacaacaaagagaaagaagtccttgtactatggggtgttcatcacccgcctaacatagggggccaaagggccctctatcatacagaaaatgcttatgtctctgtagtgtcatcacattatagcagaagattcaccccagaaatagccaaaagacccaaagtaagagatcaggaaggaagaatcaactactactggactctgctggaacccggggatacaataatatttgaggcaaatggaaatctaatagcgccacggtatgctttcgcactgagtagaggctttggatcaggaatcatcacctcaaatgcaccaatggatgaatgtgatgcgaagtgtcaaacacctcagggagctataaacagcagtcttcctttccagaacgtacacccagtcacaataggagagtgtccaaagtatgtcaggagtgcaaaattaaggatggttacaggactaaggaacatcccatccattcaatccagaggtttgtttggagccattgccggtttcattgaaggggggtggactggaatggtagatgggtggtatggttatcatcatcagaatgagcaaggatctggctatgccgcagatcaaaaaagcacacaaaatgccattaacgggattacaaacaaggtgaattctgtaattgagaaaatgaacactcaattcacagctgtgggcaaagaattcaacaaattggagagaaggatggaaaacttaaataaaaaagttgatgatgggtttctagacatttggacatataatgcagaattgttggttctactggaaaatgaaaggactttggatttccatgactccaatgtgaagaatctgtatgagaaagtaaaaagccaattaaagaataatgccaaagaaataggaaacgggtgttttgaattctatcacaagtgtaacaatgaatgcatggagagtgtgaaaaatggaacttatgactatccaaaatattccgaagaatcaaagttaaacagggagaaaattgatggagtgaaattggaatcaatgggagtctatcagattctggcgatctactcaactgtcgccagttccctggttcttttggtctccctgggggcaatcagcttctggatgtgttccaatgggtctttgcagtgtagaatatgcatctga

SEQ ID NO: 31610 - RNA, 1701 nt, synthetic construct
  misc_feature 1..1701: note = hemagglutinin__InfluenzaA__ABG80194
  source 1..1701: mol_type = other RNA
atgaagactatcattgctttgagctacattttatgtctggttttcgctcaaaaacttcccgtaaatgacaacagcacggcaacgctgtgcctgggacaccatgcagtgccaaacggaacgctagtgaaaacaatcacgaatgaccacattgaagtgactaatgctactgagctggttcagagttcctcaacaggtagaatatgcgacagtcctcaccaaatccttgatggagaaaactgcacgctaatagatgctctattgggagaccctcattgtgatggcttccaaaataaggaatggaacctttttgttgaacgcagcacagcctacagcaactgttacccttatgatgtgccggattatgcctcccttaggtcactagttgcctcatccggcacactggagtttaacaatgaaagcttcaattggactggagtcgctcagaatggaacaagctctgcttgcaaaaggagatctattaaaagtttctttagtagattgaattggttgcaccaattaaaatacaaatatccagcactgaacgtgactatgccaaacaatgaaaaatttgacaaattgtacatttggggggttcaccacccgagtacggacagtgaccaaatcagcctatatgctcaagcatcagggagagtcacagtctctaccaaaagaagccaacaaactgtaatcccgaatatcggatctagaccctgggtaaggggtgtctccagcataataagcatctattggacaatagtaaaaccgggagacatacttttgattaacagcacagggaatctaattgctcctcggggttactttaaaatacgaagtgggaaaagctcaataatgaggtcaaatgcacccattggcaaatgcaattctgaatgcatcactccaaatggaagcattcccaatgacaaaccatttcaaaatgtaaacaggatcacatatggggcctgtcccagatatgttaagcaaaacactctgaaattggcaacagggatgcggaatgtaccagagaaacaaactagaggcatattcggcgcaatcgcgggtttcatagaaaatggttgggagggaatggtggacggttggtacggtttcaggcatcaaaattctgagggcacaggacaagcagcagatcttaaaagcactcaagcagcaatcaaccaaatcaacgggaaactgaataggttaatcgagaaaacaaacgagaaattccatcaaattgaaaaagaattctcagaagtagaagggagaattcaggacctcgagaaatatgttgaggacactaaaatagatctctggtcgtacaacgcggagcttcttgttgccctggagaaccaacatacaattgatctaactgactcagaaatgaacaaactgtttgaaagaacaaggaagcaactgagggaaaatgctgaggatatgggcaatggttgtttcaaaatataccacaaatgtgacaatgcctgcatagggtcaatcagaaatggaacttatgaccatgatgtatacagagacgaagcattaaacaaccggttccagatcaaaggtgttgagctgaagtcaggatacaaagattggatcctatggatttcctttgccatatcatgttttttgctttgtgttgttttgctggggttcatcatgtgggcctgccaaaaaggcaacattaggtgcaacatttgcatttga

SEQ ID NO: 31611 - RNA, 1701 nt, synthetic construct
  misc_feature 1..1701: note = hemagglutinin__InfluenzaA__ABG80205
  source 1..1701: mol_type = other RNA
atgaagactatcattgctttgagctacattttatgtctggttttcgctcaaaaacttcccggaaatgacaacagcacggcaacgctgtgcctggggcaccatgcagtgccaaacggaacgctagtgaaaacaatcacgaatgaccaaattgaagtgaccaatgctactgagctggttcagagttcctcaacaggtggaatatgcgacagtcctcaccaaatccttgatggagaaaactgcacactaatagatgctctattgggagaccctcattgtgatggcttccaaaataaggaatgggacctttttgttgaacgcagcaaagcctacagcaactgttacccttatgatgtgccggattatgcctcccttaggtcactagttgcctcatccggcacactggagtttaacaatgaaagcttcaattggactggagtcgctcagaatggaacaagctctgcttgcaaaaggagatctaataaaagtttctttagtagattgaattggttgcaccaattaaaatacaaatacccagcactgaacgtggctatgccaaacaatgaaaaatttgacaaattgtacatttggggggttcaccacccgagtacggacagtgaccaaatcagcctatatgctcaagcaccagggagagtcacagtctctaccaaaagaagccaacaaactgtaatcccgaatatcggatctagaccctgggtaaggggtgtctccagcagaataagcatctattggacaatagtaaaaccgggagacatacttttgattaactgcacagggaatctaattgctcctcggggttacttcaaaatacgaagtgggaaaagctcaataatgaggtcagatgcatccattggcaaatgcaattctgaatgcatcactccaaatggaagcattcccaatgacaaaccatttcaaaatgtaaacaggatcacatatggggcctgtcccagatatgttaagcaaaacactctgaaattggcaacagggatgcggaatgtaccagagaaacaaactagaggcatattcggcgcaatcgcgggtttcatagaaaatggttgggagggaatggtggacggttggtacggtttcaggcatcaaaattctgagggcacaggacaagcagcagatctcaaaagcactcaagcagcaatcaaccaaatcaacgggaaactgaataggttaatcgagaaaacgaacgagaaattccatcaaattgaaaaagaattctcagaagtggaagggagaattcaggacctcgagaaatatgttgaggacactaaaataaatctctggtcgtacaacgcggagcttcttgttgccctggagaaccagcatacaattgatctaactgactcagaaatgaacaaactatttgaaagaacaaagaagcaactgagggaaaatgctgaggatatgggcaatggttgtttcaaaatataccacaaatgtgacaatgcctgcatagggtcaatcagaaatgggacttatgaccatgatgtatacagagacgaagcattaaacaaccggttccagatcaaaggtgttgagctgaagtcaggatacaaagattggatcctatggatttcctttgccatatcatgttttttgctttgtgttgtcttgctggggttcatcatgtgggcctgccaaaaaggcaacattaggtgcaacatttgcatttga

SEQ ID NO: 31612 - RNA, 1701 nt, synthetic construct
  misc_feature 1..1701: note = hemagglutinin__InfluenzaA__ABG80216
  source 1..1701: mol_type = other RNA
atgaagactatcattgctttgagctacattttatgtctggttttcgctcaaaaacttcccgtaaatgacaacagcacggcaacgctgtgcctgggacaccatgcagtgccaaacggaacgctagtgaaaacaatcacgaatgaccacattgaagtgactaatgctactgagctggttcagagttccccaacaggtagaatatgcgacagtcctcaccaaatccttgatggagaaaactgcacactaatagatgctctattgggagaccctcattgtgatggcttccaaaataaggaatgggacctttttgttgaacgcagcacagcctacagcaactgttacccttatgatgtgccggattatgcctcccttaggtcactagttgcctcatccggcacactggagtttaacaatgaaagcttcaattggactggagtcgctcagaatggaacaagctctgcttgcaaaaggagatctattaaaagtttctttagtagattgaattggttgcaccaattaaaatacaaatatccagcactgaacgtgactatgccaaacaatgaaaaatttgacaaattgtacatttggggggttcaccacccgagtacggacagtgaccaaatcagcctatatgctcaagcaccagggagagtcacagtctctaccaaaagaagccaacaaactgtaatcccgaatatcggatctagaccctgggtaaggggtgtctccagcagaataagcatctattggacaatagtaaaaccgggagacatacttttgattaacagcacagggaatctaattgctcctcggggttacttcaaaatacgaagtgggaaaagctcaataatgaggtcaaatacacccattggcaaatgcaattctgaatgcatcactccaaatggaagcattcccaatgacaaaccatttcaaaatgtaaacaggatcacatatggggcctgtcccagatatgttaagcaaaacactctgaaattggcaacagggatgcggaatgtaccagagaaacaaactagaggcatattcggcgcaattgcgggtttcatagaaaatggttgggaaggaatggtggacggttggtacggtttcaggcatcaaaattctgagggcacaggacaagcagcagatcttaaaagcactcaagctgcaatcaaccaaatcaacgggaaactgaataggttaatcgagaaaacaaacgagaaattccatcaaattgaaaaagaattctcagaagtagaagggagaattcaggacctcgagaaatatgttgaggacaccaaaatagatctctggtcgtacaacgcggagcttcttgttgccctggagaaccaacatacaattgatctaactgactcagaaatgaacaaactgtttgaaagaacaaggaagcaactgagggaaaatgctgaggatatgggcaatggttgtttcaaaatataccacaaatgtgacaatgcctgcatagggtcaatcagaaatggaacttatgaccatgatgtatacagagacgaagcattaaacaaccggttccagatcaaaggtgttgagctgaagtcaggatacaaagattggatcctatggatttcctttgccatatcatgttttttgctttgtgttgttttgctggggttcatcatgtgggcctgccaaaaaggcaacattaggtgcaacatttgcatttga

SEQ ID NO: 31613 - RNA, 1701 nt, synthetic construct
  misc_feature 1..1701: note = hemagglutinin__InfluenzaA__ABG80227
  source 1..1701: mol_type = other RNA
atgaagactatcattgctttgagctacattttatgcctggttttcgctcaaaaacttcccggaaatgacaacagcacggcaacgctgtgtctggggcatcatgcagtgccaaacggaacgctagtgaaaacaatcacgaatgaccaaattgaagtaactaatgctactgagctggttcagagttcctcaacaggtagaatatgcgacagtcctcaccaaatccttgatggagaaaactgcacactaatagatgctctattgggagaccctcattgtgatggcttccaaaataaggaatgggacctttttgttgaacgcagcaaagcctacagcaactgttacccttatgatgtgccggattatgtctcccttaggtcactagttgcctcatcaggcacgctggagtttaacaatgaaagcttcaattggactggagtcgctcagaatggaacaagctctgcttgcaaaaggagatctgataaaagtttctttagtaaattgaattggttgcaccaattaaaatacaaatatccagcactgaacgtgactatgccaaacaatgaaaaatttgacaaattgtacatttggggggttcaccacccgggtacagacagtgaccaaatcagcctatatgctcaagcatcagggagagtcacagtctctaccaaaagaagccaacaaactgtaatcccgaatatcggatctagaccctgggtaaggggtgtctccagcagaataagcatctattggacaatagtaaaaccgggagacatacttttgattaacagcacagggaatctaattgctcctcggggttacttcaaaatacgaagtgggaaaagctcaataatgaggtcagatgcacccattggcaaatgcaattctgaatgcatcactccaaatggaagcattcccaatgacaaaccatttcaaaatgtaaacaggatcacatatggggcatgtcccagatatgttaagcaaaacactctgaaattggcaacagggatgcggaatgtgccagagaaacaaactagaggcatattcggtgcaatcgcgggcttcatagaaaatggttgggagggaatgatggacggttggtacggtttcaggcatcaaaattctgagggcacagggcaagcagcagatcttaaaagcactcaagcagcaatcaaccaaatcaacgggaagctgaataggttaatcgagaaaacgaacgagaaattccatcaaattgaaaaagaattctcagaagtagaagggagaattcaggacctcgagaaatatgttgaggacactaaaatagatctctggtcgtacaatgcggagcttcttgttgccctggagaaccaacatacaattgatctaactgactcagaaatgaacaaactgtttgaaagaacaaagaagcaactgagggaaaatgctgaggatatgggcaatggttgtttcaaaatataccacaaatgtgacaatgcctgcatagggtcaatcagaaatggaacttatgaccatgatgtatacagagacgaagcattgaacaaccggttccagatcaaaggtgttgagctgaagtcaggatacaaagattgggtcctatggatttcctttgccatatcatgttttttgctttgtattgttttgctggggttcatcatgtgggcctgccaaaaaggcaacattaggtgcaacatttgcatttga

SEQ ID NO: 31614 - RNA, 1701 nt, synthetic construct; identical to SEQ ID NO: 31517
  misc_feature 1..1701: note = hemagglutinin__InfluenzaA__ABG80238
  source 1..1701: mol_type = other RNA

SEQ ID NO: 31615 - RNA, 1701 nt, synthetic construct
  misc_feature 1..1701: note = hemagglutinin__InfluenzaA__ABG80249
  source 1..1701: mol_type = other RNA
atgaagactatcattgctttgagctacattctatgtctggttttcgctcaaaaacttcccggaaatgacaacagcacggcaacgctgtgccttgggcaccatgcagtaccaaacggaacgatagtgaaaacaatcacaaatgaccaaattgaagttactaatgctactgagctggttcagagttcctcaacaggtggaatatgcgacagtcctcatcagatccttgatggagaaaactgcacactaatagatgctctattgggagaccctcagtgtgatggcttccaaaataagaaatgggacctttttgttgaacgcagcaaagcctacagcaactgttacccttatgatgtgccggatcatgcctcccttaggtcactagttgcctcatccggcacactggagtttaacaatgaaagcttcgattggactggagtcactcagaatggaacaagctctgcttgcaaaaggagatctaataaaagtttctttagtagattgaattggttgacccacttaaaatacaaatacccagcattgaacgtgactatgccaaacaatgaaaaatttgacaaattgtacatttggggggttcaccacccgggtacggacagtgaccaaatcagcctatatgctcaagcatcaggaagaatcacagtctctaccaaaagaagccaacaaactgtaatcccgaatatcggatctagacccagggtaagggatgtctccagccgaataagcatctattggacaatagtaaaaccgggagacatacttttgattaacagcacagggaatctaattgctcctcggggttacttcaaaatacgaagtgggaaaagctcaataatgagatcagatgcacccattggcaaatgcaattctgaatgcatcactccaaatggaagcattcccaatgacaaaccatttcaaaatgtaaacaggatcacatatggggcctgtcccagatatgttaagcaaaacactctgaaattggcaacagggatgcgaaatgtaccagagaaacaaactagaggcatatttggcgcaatcgcgggtttcatagaaaatggttgggagggaatggtggacggttggtacggtttcaggcatcaaaattctgagggcacaggacaagcagcagatctcaaaagcactcaagcagcaatcaaccaaatcaatgggaaactgaataggttaatcgggaaaacaaacgagaaattccatcagattgaaaaagaattctcagaagtagaagggagaattcaggacctcgagaaatatgttgaggacactaaaatagatctctggtcatacaacgcggagcttcttgttgccctggagaaccaacatacaattgatctaactgactcagaaatgaacaaactgtttgaaagaacaaagaagcaactgagggaaaatgctgaggatatgggcaatggttgtttcaaaatataccacaaatgtgacaatgcctgcatagggtcaatcagaaatggaacttatgaccatgatgtgtacagagatgaagcattaaacaaccggttccagatcaaaggtgttgagctgaagtcaggatataaagattggatcctatggatttcctttgccatatcatgttttttactttgtgttgctttgttggggttcatcatgtgggcctgccaaaaaggcaacattaggtgcaacatttgcatttga

SEQ ID NO: 31616 - RNA, 1701 nt, synthetic construct; identical to SEQ ID NO: 31517
  misc_feature 1..1701: note = hemagglutinin__InfluenzaA__ABG80260
  source 1..1701: mol_type = other RNA

SEQ ID NO: 31617 - RNA, 1701 nt, synthetic construct
  misc_feature 1..1701: note = hemagglutinin__InfluenzaA__ABG80271
  source 1..1701: mol_type = other RNA
atgaagactatcattgctttgagctacattctatgtctggttttcgctcaaaaacttcccggaaatgacaacagcacggcaacgctgtgccttgggcaccatgcagtaccaaacggaacggtagtgaaaacaatcacaaatgaccaaattgaagttactaatgctactgagctggttcagagttcctcaacaggtggaatatgcgacagtcctcatcagatccttgatggagaaaactgcacactaatggatgctctattgggagaccctcagtgtgatggcttccaaaataagaaatgggacctttttgttgaacgcagcaaagcctacagcaactgttacccttatgatgtgccggattatgcctcccttaggtcactagttgcctcatccggcacactggagtttaacaatgaaagcttcaattggactggagtcactcaaaatggaacaagctctgcttgcaaaaggagatctaataacagtttctttagtagattgaattggttgacccacttaaaattcaaatacccagcattgaacgtgactatgccaaacaatgaaaaatttgacaaattgtacatttggggggttcaccacccgggtacggacaatgaccaaatcagcctatatgctcaagcatcaggaagaatcacagtctctaccaaaagaagccaacaaactgtaatcccgaatatcggatctagacccagggtaagggatatccccagcagaataagcatctattggacaatagtaaaaccaggagacatacttttgattaacagcacagggaatctaattgctcctcggggttacttcaaaatacgaagtgggaaaagctcaataatgagatcagatgcacccattggcaaatgcaattctgaatgcatcactccaaatggaagcattcccaatgacaaaccatttcaaaatgtaaacaggatcacatatggggcctgtcccagatatgttaagcaaaacactctgaaattggcaacagggatgcgaaatgtaccagagaaacaaactagaggcatatttggcgcaatcgcgggtttcatagaaaatggttgggagggaatggtggatggttggtacggtttcaggcatcaaaattctgagggaacaggacaagcagcagatctcaaaagcactcaagcagcaatcaaccaaatcaatgggaagctgaataggttgatcgggaaaaccaacgagaaattccatcagattgaaaaagaattctcagaagtagaagggagaattcaggacctcgagaaatatgttgaggacactaaaatagatctctggtcatacaacgcggagcttcttgttgccctggagaaccaacatacaattgatctaactgactcagaaatgaacaaactgtttgaaagaacaaaaaagcaactgagggaaaatgctgaggatatgggcaatggttgtttcaaaatataccacaaatgtgacaatgcctgcataggatcaatcagaaatggaacttatgaccatgatgtatacagagatgaagcattaaacaaccggttccagatcaaaggtgttgagctgaagtcaggatacaaagattggatcctatggatttcctttgccatatcatgttttttgctttgtgttgctttgttggggttcatcatgtgggcctgccaaaaaggcaacattaggtgcaacatttgcatttga

SEQ ID NO: 31618 - RNA, 1701 nt, synthetic construct; identical to SEQ ID NO: 31095
  misc_feature 1..1701: note = hemagglutinin__InfluenzaA__ABG80282
  source 1..1701: mol_type = other RNA

SEQ ID NO: 31619 - RNA, 1701 nt, synthetic construct; identical to SEQ ID NO: 30822
  misc_feature 1..1701: note = hemagglutinin__InfluenzaA__ABG80293
  source 1..1701: mol_type = other RNA

SEQ ID NO: 31620 - RNA, 1701 nt, synthetic construct
  misc_feature 1..1701: note = hemagglutinin__InfluenzaA__ABG80304
  source 1..1701: mol_type = other RNA
atgaagactatcattgctttgagctacattctatgtctggttttcgctcaaaaacttcccggaaatgacaacagcacggcaacgctgtgccttgggcaccatgcagtaccaaacggaacgatagtgaaaacaatcacgaatgaccaaattgaagttactaatgctactgagctggttcagagttcctcaacaggtggaatatgcgacagtcctcatcagatccttgatggagaaaactgcacactaatagatgctctattgggagaccctcagtgtgatggcttccaaaataagaaatgggacctttttgttgaacgcagcaaagcctacagcaactgttacccttatgatgtgccggattatgcctcccttaggtcactagttgcctcatccggcacactggagtttaacaatgaaagcttcaattggactggagtcactcaaaatggaacaagctctgcttgcaaaaggagatctaataacagtttctttagtagattgaattggttgacccatttaaaattcaaatacccagcattgaacgtgactatgccaaacaatgaaaaatttgacaaattgtacatttggggggttcaccacccgggtacgaacaatgaccaaatcaacctatatgctcaagcatcaggaagaatcacagtctctaccaaaagaagccaacaaactgtaatcccgaatatcggatctagacccagggtaagggatatccccagcagaataagcatctattggacaatagtaaaaccgggagacatacttttgattaacagcacagggaatctaattgctcctcggggttacttcaaaatacgaagtgggaaaagctcaataatgagatcagatgcacccattggcaaatgcaattctgaatgcatcactccaaatggaagcattcccaatgacaaaccatttcaaaatgtaaacaggatcacatatggggcctgtcccagatatgttaagcaaaacactctgaaattggcaacagggatgcgaaatgtaccagagaaacaaactagaggcatatttggcgcaatcgcgggtttcatagaaaatggttgggagggaatggtggatggttggtacggtttcaggcatcaaaattctgagggaataggacaagcagcagatctcaaaagcactcaagcagcaatcaaccaaatcaatgggaagctgaataggttgatcgggaaaaccaacgagaaattccatcagattgaaaaagaattctcagaagtagaagggagaattcaggacctcgagaaatatgttgaggacactaaaatagatctctggtcatacaacgcggagcttcttgttgccctggagaaccaacatacaattgatctaactgactcagaaatgaacaaactgtttgaaagaacaaagaagcaactgagggaaaatgctgaggatatgggcaatggttgtttcaaaatataccacaaatgtgacaatgcctgcatagggtcaatcagaaatggaacttatgaccatgatgtatacagagatgaagcattaaacaaccggttccagatcaaaggtgttgagctgaagtcaggatacaaagattggatcctatggatttcctttgccatatcatgttttttgctttgtgttgctttgttggggttcatcatgtgggcctgccaaaaaggcaacattaggtgcaacatttgcatttga

SEQ ID NO: 31621 - RNA, 1701 nt, synthetic construct
  misc_feature 1..1701: note = hemagglutinin__InfluenzaA__ABG80315
  source 1..1701: mol_type = other RNA
atgaagactatcattgctttgagctacattctatgtctggttttcgctcaaaaacttcccggaaatgacaacagcacggcaacgctgtgccttgggcaccatgcagtaccaaacggaacgatagtgaaaacaatcacgaatgaccaaattgaagttactaatgctactgagctgattcagagttcctcaacaggtggaatatgcgacagtcctcatcagatccttgatggagaaaactgcacactaatagatgctctattgggagaccctcagtgtgatggcttccaaaataagaaatgggacctttttgttgaacgcagcaaagcctacagcaactgttacccttatgatgtgccggattatgcctcccttaggtcactagttgcctcatccggcacactggagtttaacaatgaaagcttcaattggactggagtcactcaaaatggaacaagctctgcttgcaaaaggagatctaataacagtttctttagtagattgaattggttgacccacttaaaattcaaatacccagcattgaacgtgactatgccaaacaatgaaaaatttgacaaattgtacatttggggggttcaccacccgggtacggacaatgaccaaatcagcctatatgctcaagcatcaggaagaatcacagtctctaccaaaagaagccaacaaactgtaatcccgaatatcggatctagacccagggtaagggatatccccagcagaataagcatctattggacaatagtaaaaccgggagacatgcttttgattaacagcacagggaatctaattgctcctcggggttacttcaaaatacgaagtgggaaaagctcaataatgagatcagatgcacccattggcaaatgcaattctgaatgcatcactccaaatggaagcattcccaatgacaaaccatttcaaaatgtaaacaggatcacatatggggcctgtcccagatatgttaagcaaaacactctgaaattggcaacagggatgcgaaatgtaccagagaaacaaactagaggcatatttggcgcaatcgcgggtttcatagaaaatggttgggagggaatggtggatggttggtacggtttcaggcatcaaaattctgagggaacaggacaagcagcagatctcaaaagcactcaagcagcaatcaaccaaatcaatgggaagctgaataggttgatcgggaaaaccaacgagaaattccatcagattgaaaaagaattctcagaagtagaagggagaattcaggacctcgagaaatatgttgaggacactaaaatagatctctggtcatacaacgcggagcttcttgttgccctggagaaccaacatacaattgatctaactgactcagaaatgaacaaactgtttgaaagaacaaagaagcaactgagggaaaatgctgaggatatgggcaatggttgtttcaaaatataccacaaatgtgacaatgcctgcatagggtcaatcagaaatggaacttatgaccatgatgtatacagagatgaagcattaaacaaccggttccagatcaaaggtgttgagctgaagtcaggatacaaagattggatcctatggatttcctttgccatatcatgttttttgctttgtgttgctttgttggggttcatcatgtgggcctgccaaaaaggcaacattaggtgcaacatttgcatttga

SEQ ID NO: 31622 - RNA, 1701 nt, synthetic construct
  misc_feature 1..1701: note = hemagglutinin__InfluenzaA__ABG80326
  source 1..1701: mol_type = other RNA
atgaagactatcattgctttgagctacattctatgtctggttttcgctcaaaaacttcccggaaatgacaacagcacggcaacgctgtgccttgggcaccatgcagtaccaaacggaacgatagtgaaaacaatcacgaatgaccaaattgaagttactaatgctactgagctggttcagagttcctcaacaggtggaatatgcgacagtcctcatcagatccttgatggagaaaactgcacactaatagatgctctattgggagaccctcagtgtgatggcttccaaaataagaaatgggacctttttgttgaacgcagcaaagcctacagcaactgttacccttatgatgtgccggattatgcctcccttaggtcactagttgcctcatccggaacactggagtttaacaatgaaagcttcaattggactggagtcactcaaaatggaacaagctctgcttgcaaaaggagatctaataacagtttctttagtagattgaattggttgacccatttaaaattcaaatacccagcattgaacgtgactatgccaaacaatgaaaaatttgacaaattgtacatttggggggttcaccacccgggtacgaacaatgaccaaatcagcctatatgctcaagcatcaggaagaatcacagtctctaccaaaagaagccaacaaactgtaatcccgaatatcggatctagacccagggtaagggatatccccagcagaataagcatctattggacaatagtaaaaccgggagacatacttttgattaacagcacagggaatctaattgctcctcggggttacttcaaaatacgaagtgggaaaagctcaataatgagatcagatgcacccattggcaaatgcaattctgaatgcatcactccaaatggaagcattcccaatgacaaaccatttcaaaatgtaaacaggatcacatatggggcctgtcccagatatgttaagcaaaacactctgaaattggcaacagggatgcgaaatgtaccagagaaacaaactagaggcatatttggcgcaatcgcgggtttcatagaaaatggttgggagggaatggtggatggttggtacggtttcaggcatcaaaattctgagggaataggacaagcagcagatctcaaaagcactcaagcagcaatcaaccaaatcaatgggaagctgaataggttgatcgggaaaaccaacgagaaattccatcagattgaaaaagaattctcagaagtagaagggagaattcaggacctcgagaaatatgttgaggacactaaaatagatctctggtcatacaacgcggagcttcttgttgccctggagaaccaacatacaattgatctaactgactcagaaatgaacaaactgtttgaaagaacaaagaagcaactgagggaaaatgctgaggatatgggcaatggttgtttcaaaatataccacaaatgtgacaatgcctgcatagggtcaatcagaaatggaacttatgaccatgatgtatacagagatgaagcattaaacaaccggttccagatcaaaggtgttgagctgaagtcaggatacaaagattggatcctatggatttcctttgccatatcatgttttttgctttgtgttgctttgttggggttcatcatgtgggcctgccaaaaaggcaacattaggtgcaacatttgcatttga

SEQ ID NO: 31623 - RNA, 1701 nt, synthetic construct; identical to SEQ ID NO: 30826
  misc_feature 1..1701: note = hemagglutinin__InfluenzaA__ABG80337
  source 1..1701: mol_type = other RNA

SEQ ID NO: 31624 - RNA, 1701 nt, synthetic construct
  misc_feature 1..1701: note = hemagglutinin__InfluenzaA__ABG80359
  source 1..1701: mol_type = other RNA
atgaagactatcattgctttgagctacattttatgtctggttttcgctcaaaaacttcccggaaatgacaacagcacagcaacgctgtgcctgggacatcatgcagtgccaaacggaacgctggtgaaaacaatcacgaatgatcaaattgaagtgactaatgctactgagctggttcagagttcctcaacaggtagaatatgcgacagtcctcaccgaatccttgatgggaaaaactgcacactgatagatgctctattgggagaccctcattgtgatggcttccaaaataaggaatgggacctttttgttgaacgcagcaaagcttacagcaactgttacccttatgatgtgccggattatgcctcccttaggtcactagttgcctcatcaggcaccctggagtttatcaatgaagacttcaattggactggagtcgctcaggatgggggaagctatgcttgcaaaaggggatctgttaacagtttctttagtagattgaattggttgcacaaattagaatacaaatatccagcgctgaacgtgactatgccaaacaatggcaaatttgacaaattgtacatttggggggttcaccacccgagcacggacagtgaccaaaccagcctatatgttcgagcatcagggagagtcacagtctctaccaaaagaagccaacaaactgtaaccccgaatatcgggtctagaccctgggtaaggggtctgtccagtagaataagcatctattggacaatagtaaaaccgggagacatacttttgattaatagcacagggaatctaattgctcctcggggttacttcaaaatacgaaatgggaaaagctcaataatgaggtcagatgcacccattggcaactgcagttctgaatgcatcactccaaatggaagcattcccagtgacaaaccttttcaaaatgtaaacaggatcacatatggggcctgccccagatatgttaagcaaaacactctgaaattggcaacagggatgcggaatgtaccagagaaacaaactagaggcatattcggcgcaatcgcaggtttcatagaaaatggttgggagggaatggtagacggttggtacggtttcaggcatcaaaattctgagggcacaggacaagcagcagatcttaaaagcactcaagcagcagtcgaccaaatcaacgggaaactgaataggttaatcgagagaacgaacgagaaatttcatcaaatcgaaaaagaattctcagaagtagaaggaagaattcaggacctcgagaaatatgttgaagacactaaaatagatctctggtcttacaacgcggagcttcttgttgccctggagaaccaacatacaattgatctaactgactcagaaatgaacaaactgtttgaaaaaacaaggaagcaactgagggaaaatgctgaggacatgggcaatggttgcttcaaaatataccacaaatgtgacaatgcctgcatagggtcaatcagaaatggaacttatgaccatgatgtatacagagacgaagcattaaacaaccggttccagatcaaaggtgttgagctgaagtcaggatacaaagattggatcctatggatttcctttgccatatcatgctttttgctttgtgttgttttgctggggttcatcatgtgggcctgccaaaaaggcaacattaggtgcaacatttgcatttga

SEQ ID NO: 31625 - RNA, 1701 nt, synthetic construct
  misc_feature 1..1701: note = hemagglutinin__InfluenzaA__ABG80370
  source 1..1701: mol_type = other RNA
atgaagactatcattgctttgagctacattttatgtctggttttcgctcaaaaacttcccggaaatgacaacagcacagcaacgctgtgcctgggacaccatgcagtgccaaacggaacgctagtgaaaacaatcacgaatgatcaaattgaagtgactaatgctactgagctggttcagagttcctcaacaggtagaatatgcgacagtcctcaccgaatccttgatggaaaaaactgcacactgatagatgctctattgggagaccctcattgtgatggcttccaaaataaggaatgggacctttttgttgaacgcagcaaagcttacagcaactgttacccttatgatgtgccggattatgcctcccttaggtcactagttgcctcatcaggcaccctggagtttatcaatgaagacttcaattggactggagtcgctcaggatgggaaaagctatgcttgcaaaaggggatctgttaaaagtttctttagtagattgaattggttgcacaaattagagtacaaatatccagcgctgaacgtgactatgccaaacaatggcaaatttgacaaattgtacatttggggggttcaccacccgagcacggacagtgaccaaaccagcctatatgttcgagcatcagggagagtcacagtctctaccaaaagaagccaacaaactgtaatcccgaatatcgggtctagaccctgggtaaggggtctgtccagtagaataagcatctattggacaatagtaaaaccgggagacatacttttgattaatagcacagggaatctaattgctcctcggggttacttcaaaatacgaaatgggaaaagctcaataatgaggtcagatgcacccattggcaactgcagttccgaatgcatcactccaaatggaagcattcccaatgacaaaccttttcaaaatgtaaacaggatcacatatggggcctgccccagatatgttaagcaaaacactctgaaattggcaacagggatgcggaatgtaccagagaaacaaactagaggcatattcggcgcaatcgcaggtttcatagaaaatggttgggagggaatggtagacggttggtacggtttcaggcatcaaaattctgagggcacaggacaagcagcagatcttaaaagcactcaagcagcaatcgaccaaatcaacgggaaactgaataggttaatcgagaaaacgaacgagaaattccatcaaatcgaaaaagaattctcagaagtagaagggagaattcaggacctcgagaaatatgttgaagacactaaaatagatctctggtcttacaacgcggagcttcttgttgccctggagaaccaacatacaattgatctaactgactcagaaatgaacaaactgtttgaaagaacaaggaagcaactgagggaaaatgctgaggacatgggcaatggttgcttcaaaatataccacaaatgtgacaatgcctgcatagggtcaatcagaaatggaacttatgaccatgatgtatacagagacgaagcattaaacaaccggttccagatcaaaggtgttgagctgaagtcaggatacaaagattggatcctatggatttcctttgccatatcatgctttttgctttgtgttgttttgctggggttcatcatgtgggcctgccaaaaaggcaacattaggtgcaacatttgcatttga

SEQ ID NO: 31626 - RNA, 1701 nt, synthetic construct
  misc_feature 1..1701: note = hemagglutinin__InfluenzaA__ABG80392
  source 1..1701: mol_type = other RNA
atgaagactatcattgctttgagctacattttatgtctggttttcgctcaaaaacttcccggaaatgacaacagcacagcaacgctgtgcctgggacaccatgcagtgccaaacggaacgctagtgaaaacaatcacgaatgatcaaattgaagtgactaatgctactgagctggttcagagttcctcaacaggtagaatatgcgacagtcctcaccgaatccttgatggaaaaaactgcacactgatagatgctctattgggagaccctcattgtgatggcttccaaaataaggaatgggacctttttgttgaacgcagcaaagcttacagcaactgttacccttatgatgtgccggattatgcctcccttaggtcactagttgcctcatcaggcaccctggagtttatcaatgaagacttcaattggactggagtcgctcaggatgggaaaagctatgcttgcaaaaggggatctgttaacagtttctttagtagattgaattggttgcacaaattagaatacaaatatccagcgctgaacgtgactatgccaaacaatggcaaatttgacaaattgtacatttggggggttcaccacccgagcacggacagtgaccaaaccagcctatatgttcgagcatcagggagagtcacagtctctaccaaaagaagccaacaaactgtaatcccgaatatcgggtctagaccctgggtaaggggtctgtccagtagaataagcatctattggacaatagtaaaaccgggagacatacttttgattaatagcacagggaatctaattgctcctcggggttacttcaaaatacgaaatgggaaaagctcaataatgaggtcagatgcacccattggcaactgcagttctgaatgcatcactccaaatggaagcattcccaatgacaaaccttttcaaaatgtaaacaggatcacatatggggcctgccccagatatgttaagcaaaacactctgaaattggcaacagggatgcggaatgtaccagagaaacaaactagaggcatattcggcgcaatcgcaggtttcatagaaaatggttgggagggaatggtagacggttggtacggtttcaggcatcaaaattctgagggcacaggacaagcagcagatcttaaaagcactcaagcagcaatcgaccaaatcaacgggaaactgaataggttaatcgagaaaacgaacgagaaattccatcaaatcgaaaaagaattctcagaagtagaagggagaattcaggacctcgagaaatatgttgaagacactaaaatagatctctggtcttacaacgcggagcttcttgttgccctggagaaccaacatacaattgatctaactgactcagaaatgaacaaactgtttgaaagaacaaggaagcaactgagggaaaatgctgaggacatgggcaatggttgcttcaaaatataccacaaatgtgacaatgcctgcatagggtcaatcagaaatggaacttatgaccatgatgtatacagagacgaagcactaaacaaccggttccagatcaaaggtgttgagctgaagtcaggatacaaagattggatcctatggatttcctttgccatatcatgcttcttgctttgtgttgttttgctggggttcatcatgtgggcctgccaaaaaggcaacattaggtgcaacatttgcatttga

SEQ ID NO: 31627 - RNA, 1701 nt, synthetic construct; identical to SEQ ID NO: 31557
  misc_feature 1..1701: note = hemagglutinin__InfluenzaA__ABG80403
  source 1..1701: mol_type = other RNA

SEQ ID NO: 31628 - RNA, 1701 nt, synthetic construct; identical to SEQ ID NO: 31557
  misc_feature 1..1701: note = hemagglutinin__InfluenzaA__ABG80414
  source 1..1701: mol_type = other RNA

SEQ ID NO: 31629 - RNA, 1701 nt, synthetic construct
  misc_feature 1..1701: note = hemagglutinin__InfluenzaA__ABG80425
  source 1..1701: mol_type = other RNA
atgaagactatcattgctttgagctacattttatgtctggttttcgctcaaaaacttcccggaaatgacaacagcacagcaacgctgtgcctgggacaccatgcagtgccaaacggaacgctagtgaaaacaattacgaatgatcaaattgaagtgactaatgctactgagctggttcagagttcctcaacaggtagaatatgcgacagtcctcaccgaatccttgatggaaaaaactgcacactgatagatgctctattgggagaccctcattgtgatggcttccaaaataaggaatgggacctttttgttgaacgcagcaaagcttacagcaactgttacccttatgatgtgccggattatgcctcccttaggtcactagttgcctcatcaggcaccctagagtttatcaatgaagacttcaattggactggagtagctcaggatgggaaaagctatgcttgcaaaaggggatctgttaacagtttctttagtagattgaattggttgcacaaattagaatacaaatatccagcgctgaacgtgactatgccaaacaatggcaaatttgacaaattgtacatttggggggttcaccacccgagcacggacagtgaccaaaccagcctatatgttcgagcatcagggagagtcacagtctctaccaaaagaagccaacaaactgtaatcccgaatatcgggtctagaccctgggtaaggggtctgtccagtagaataagcatctattggacaatagtaaaaccgggagacatacttttgattaatagcacagggaatctaattgctcctcggggttacttcaaaatacgaaatgggaaaagctcaataatgaggtcagatgcacccattggcaactgcagttctgaatgcatcactccaaatggaagcattcccaatgacaaaccttttcaaaatgtaaacaggatcacatatggggcctgccccagatatgttaagcaaaacactctgaaattggcaacagggatgcggaatgtaccagagaaacaaactagaggcatattcggcgcaatcgcaggtttcatagaaaatggttgggagggaatggtagacggttggtacggtttcaggcatcaaaattctgagggcacaggacaagcagcagatcttaaaagcactcaagcagcaatcgaccaaatcaacgggaaactgaataggttaatcgagaaaacgaacgagaaattccatcaaatcgaaaaagaattctcagaagtagaagggagaattcaggacctcgagaaatatgttgaagacactaaaatagatctctggtcttacaacgcggagcttcttgttgccctggagaaccaacatacaattgatctaactgactcagaaatgaacaaactgtttgaaagaacaaggaagcaactgagggaaaatgctgaggacatgggcaatggttgcttcaaaatataccacaaatgtgacaatgcctgcatagggtcaatcagaaatggaacttatgaccatgatgtatacagagacgaagcattaaacaaccggttccagatcaaaggtgttgagctgaagtcaggatacaaagattggatcctatggatttcctttgccatatcatgctttttgctttgtgttgttttgctggggttcatcatgtgggcctgccaaaaaggcaacattaggtgcaacatttgcatttga

SEQ ID NO: 31630 - RNA, 1701 nt, synthetic construct
  misc_feature 1..1701: note = hemagglutinin__InfluenzaA__ABG88289
  source 1..1701: mol_type = other RNA
atgaagactattattgctttgagctacattttatgtctggttttcgctcaaaaacttcccggaaatgacaacagcacggcaacgctgtgcctgggacaccatgcagtgccaaacggaacgctagtgaaaacaatcacgaatgaccaaattgaagtgactaatgctactgagctggttcagggttcctcaacaggtagaatatgcgacagtcctcaccgaatccttgatggaaaaaactgcacactgatagatgctctattgggagaccctcattgtgatggcttccaaaataaggaatgggacctttttgttgaacgcagcaaagcttacagcaactgttacccttatgatgtgccggattatgcctcccttaggtcactagttgcctcatcaggcaccctggagtttaacaatgaaagcttcaattggactggagtcgcccagaatggaacaagctatgcttgcaaaaggagatctgttaaaagtttctttagtagattgaattggttgcacaaattagaatacaaatatccagcactgaacgtgactatgccaaacaatgacaaatttgacaaattgtacatttggggggttcaccacccgagtacggacagtgaccaaaccagcctatatgttcaagcatcagggagagtcacagtctctaccaaaagaagccaacaaactgtaatcccgaatatcggatctagaccctgggtaaggggtgtctccagcagaataagcatatattggacaatagtaaaaccgggagacatacttttgattaacagcacagggaatctaattgctcctcggggttacttcaaaatacgaagtgggaaaagctcaataatgaggtcagatgcacccattgacaactgcaattctgaatgcatcactccaaatggaagcattcccaatgacaaaccatttcaaaatgtaaacaggatcacatatggggcctgtcccagatatgttaagcaaaacactctgaaattggcaacagggatgcggaatgtaccagagaaacaaactagaggcatattcggcgcaatcgcaggtttcatagaaaatggttgggagggaatggtagacggttggtacggtttcaggcatcaaaattctgagggcacaggacaagcagcagatcttaaaagcactcaagcagcaatcaaccaaatcaacgggaaactgaataggttaatcgagaaaacgaacgagaaattccatcaaatcgaaaaagaattctcagaagtagaagggagaattcaggacctcgagaaatatgttgaagacactaaaatagatctctggtcgtacaacgcggagcttcttgttgccctggagaaccaacatacaattgatctaactgactcagaaatgaacaaactgtttgaaagaacaaggaagcaactgagggaaaatgctgaggacatgggcaatggttgcttcaaaatataccacaaatgtgacaatgcctgcatagggtcaatcagaaatggaacttatgaccatgatgtatacagagacgaagcattaaacaaccggttccagatcaaaggtgttgagctgaagtcaggatacaaagattggatcctatggatttcctttgccatatcatgttttttgctttgtgttgttttgttggggttcatcatgtgggcctgccaaaaaggcaacattaggtgcaacatttgcatttga

SEQ ID NO: 31631 - RNA, 1701 nt, synthetic construct
  misc_feature 1..1701: note = hemagglutinin__InfluenzaA__ABG88300
  source 1..1701: mol_type = other RNA
atgaaagcaaaactactagtcctgttgtgtgcatttacagctacatatgcagacacaatatgtataggctaccatgcgaacaactcaaccgacactgttgacacagtacttgagaagaacgtgacagtgacacactctgtcaacctacttgaggacagtcacaacggaaaactatgccgactaaaaggaacagccccactacaattgggtaattgcagcgttgccggatggatcctaggaaacccagaatgcgaatcactgttttctaaggaatcatggtcctacattgcagaaacaccaaaccctgagaatggaacatgttacccagggtatttcgccgactatgaggaactgagggagcaattgagctcagtatcatcattcgagagattcgaaatattccccaaggaaagctcatggcccaaccacaccgtaaccaaaggagtgacggcatcatgctcacataatgggaaaagcagtttttacaaaaatttgctatggctgacggaaaagaatggcttgtacccagatctgagcaagtcctatgtaaacaacaaggagaaagaagtccttgtactatggggtgttcatcacccgtctaacataggggaccaaagggccatctatcatacagaaaatgcttatgtctctgtagtgtcttcacattatagcagaagattcaccccagaaataacaaaaagacccaaagtaagagatcaagaagggagaattaactactactggactctgctggaacccggggacacaataatatttgaggcaaatggaaatctaatagcgccatggtacgctttcgcactgagtagaggctttgggtcaggaatcatcacctcaaacgcatcaatgggtgaatgtgacgctaagtgtcaaacaccccaaggagctataaacagtagtcttcctttccagaatgtgcacccagtcacaataggagagtgtcccaagtatgtcaggagtacaaaattaaggatggttacaggactaagaaacatcccatccattcaatctagaggtttgtttggagccattgccggtttcattgaaggggggtggactggaatgatagatggatggtatggttaccatcatcagaatgaacaaggatctggctatgctgcagaccaaaaaagcacacaaaatgccattgatgggattacaaacaaggtgaattctgtaatcgagaaaatgaacactcaattcacagctgtaggcaaagaattcaacaaattagagagaaggatggaaaacttaaataagaaagttgatgatgggtttctggacatttggacatataatgcagagttgttggttctcctggaaaatgaaaggactttggattttcatgactcaaatgtgaagaatctgtatgagaaagtaaaaacccaattgaagaataatgccaaagaaatcgggaacgggtgttttgaattctatcacaagtgtaacaatgaatgcatggaaagtgtgaaaaatggaacttatgactatccaaaatattccgaagaatcaaagttaaacagggaaaaaattgatggagtgaaattggaatcaatgggagtctatcagattctggcgatctactcaactgtcgccagttcactggtgcttttggtctccctgggggcaatcagtttctggatgtgttctaatgggtctttgcagtgtagaatatgcatctga

SEQ ID NO: 31632 - RNA, 1701 nt, synthetic construct; identical to SEQ ID NO: 31415
  misc_feature 1..1701: note = hemagglutinin__InfluenzaA__ABG88311
  source 1..1701: mol_type = other RNA

SEQ ID NO: 31633 - RNA, 1701 nt, synthetic construct
  misc_feature 1..1701: note = hemagglutinin__InfluenzaA__ABG88322
  source 1..1701: mol_type = other RNA
atgaaagcaaaactactagtcctgttgtgtgcatttacagctacatatgcagacacaatatgtataggctaccatgcgaacaactcaaccgacactgttgacacagtacttgagaagaacgtgacagtgacacactctgtcaacctacttgaggacagtcacaacggaaaactatgccgactaaaaggaacagccccactacaattgggtaattgcagcgttgccggatggatcttaggaaacccagaatgcgaatcactgttttctaaggaatcatggtcctacattgcagaaacaccaaaccctgagaatggaacatgttacccagggtatttcgccgactatgaggaactgagggagcaattgagctcagtatcatcattcgagagattcgaaatattccccaaggaaagctcatggcccaaccacaccgtaaccaaaggagtgacggcatcatgctcccacaatgggaaaagcagtttttacaaaaatttgctatggctgacggaaaagaatggcttgtacccaattctgagcaagtcctatgtaaacaacaaggagaaagaagtccttgtactatggggtgttcatcacccgtctaacataggggaccaaagggccatctatcatacagaaaatgcttatgtctctgtagtgtcttcacattatagcagaagattcaccccagaaatagcaaaaagacccaaagtaagagatcaagaagggagaatcaactactactggactctgctggaacccggggacacaataatatttgaggcaaatggaaatctaatagcgccatggtacgctttcgcactgagtagaggctttgggtcaggaatcatcacctcaaacgcatcaatgggtgaatgtgacgctaagtgtcaaacaccccaaggagctataaacagtagtcttcctttccagaatgtacacccagtcacaataggagagtgtcccaagtatgtcaggagtacaaaattaaggatggttacaggactaagaaacatcccatccattcaatctagaggtttgtttggagccattgccggtttcattgaaggggggtggactggaatgatagatggatggtatggttatcatcatcagaatgaacaaggatctggctatgctgcagaccaaaaaagcacacaaaatgccattgatgggattacaaacaaggtgaattctgtaatcgaaaaaatgaacactcaattcacagctgtaggcaaagaattcaacaaattagagagaaggatggaaaacttaaataagaaagttgatgatggatttctagacatttggacatataatgcagagttgttggttctcctggaaaatgaaaggactttggattttcacgactcaaatgtgaagaatctgtatgagaaagtaaaaaaccaattgaagaataatgccaaagaaatcgggaacgggtgttttgaattctatcacaagtgtaacaatgaatgcatggaaagtgtgaaaaatggaacttatgactatccaaaatattccgaagaatcaaagttaaacagggaaaaaattgatggagtgaaattggaatcaatgggagtctatcagattctggcgatctactcaactgtcgccagttcactggtacttttggtctccctgggggcaatcagtttctggatgtgttctaatgggtctttgcagtgtagaatatgcatctga

SEQ ID NO: 31634 - RNA, 1701 nt, synthetic construct
  misc_feature 1..1701: note = hemagglutinin__InfluenzaA__ABG88333
  source 1..1701: mol_type = other RNA
atgaaagcaaaactactggtcctgttatgtgcactttcagctacagatgcagacacaatatgtataggctaccatgcgaacaactcaaccgatactgttgacacagtactcgaaaagaacgtgacagtgacacactctgtcaacctacttgaggacagtcacaacggaaaactatgcagactaaaaggaatagccccactacaattggggaaatgcagcattgcaggatggatcttaggaaacccagaatgtgaatcactgttttctaagaaatcatggtcctacattgcagaaacaccaaactccgagaatggaacatgttacccagggtatttcgccgactatgaggaactgagggagcaattgagttcagtatcatctttcgagagattcgaaatattccccaaggaaagttcatggcccaaacacaacgtaaccagaggagtaacggcatcatgctcccataaggggaaaagcagtttttacagaaatttgctatggctgacggagaaaaatggctcgtacccaaatctgagcaagtcctatgttaacaacaaagagaaagaagtccttgtactatggggtgttcatcacccgtctaacatagaggaccaaaagaccatctatcgtaaagaaaatgcttatgtctctgtagtgtcttcacattataacaggagattcaccccagaaatatcaaaacgacccaaagtaagaggtcaagaagggagaattaactactactggactctgctggaacccggggacacaataatatttgaggcaaatggaaatctaatagcgccatggtatgctttcgcactgagtagaggctttgggtcaggaatcatcacctcaaatgcatcgatggatgaatgtgacgcgaagtgtcaaacaccccagggagctataaacagtagtcttcctttccagaatgtacacccagtcacaataggagagtgcccaaaatacgtcaggagtacaaaattaaggatggttacagggctaaggaacatcccatccattcaatccagaggtttgtttggagccattgccggtttcattgaagggggatggactggaatgatagatggatggtatggttatcatcatcagaatgaacagggatctggctatgctgcagatcaaaaaagcacacaaaatgccattaacgggattacaaacaaggtgaactctgttatcgagaaaatgaacactcaattcacagctgtaggtaaagaattcaacaaactagaaaaaaggatggaaaacttaaataaaaaagttgatgatggatttctggacatttggacatataatgcagaattgttggttctactggaaaatgaaaggactttggattttcatgactcaaatgtgaagaacctgtatgagaaagtaaaaagccaattaaagaataatgccaaagaaataggaaacgggtgttttgaattctaccacaagtgtaacaatgaatgcatggaaagtgtaaaaaatggaacttatgactatccaaaatattcagaggaatcaaagttaaacagggaaaaaattgatggagtgaaattggaatcaatgggagtctatcagattctggcgatctactcaactgtcgccagttcactggtgcttttggtctccctgggggcaatcagcttctggatgtgttctaatgggtctttgcagtgcagaatatgcatctga

SEQ ID NO: 31635 - RNA, 1701 nt, synthetic construct
  misc_feature 1..1701: note = hemagglutinin__InfluenzaA__ABG88344
  source 1..1701: mol_type = other RNA
atgaaagcaaaactactggtcctgttatgtgcactttcagctacagatgcagacacaatatgtataggctaccatgcgaacaactcaaccgatactgttgacacagtactcgaaaagaacgtgacagtgacacactctgtcaacctacttgaggacagtcacaacggaaaactatgcagactaaaaggaatagccccactacaattggggaaatgcagcattgccggatggatcttaggaaacccagaatgtgaatcactgttttctaagaaatcatggtcctacattgcagaaacaccaaactccgagaatggaacatgttacccagggtatttcgccgactatgaggaactgagggagcaattgagttcagtatcatctttcgagagattcgaaatattccccaaggaaagttcatggcccaaacacaacgtaaccagaggagtaacggcatcatgctcccataaggggaaaagcagtttttacagaaatttgctatggctgacggagaaaaatggctcgtacccaaatctgagcaagtcctatgttaacaacaaagagaaagaagtccttgtactatggggtgttcatcacccgtctaacatagaggaccaaaagaccatctatcgtaaagaaaatgcttatgtctctgtagtgtcttcacattataacaggagattcaccccagaaatatcaaaacgacccaaagtaagaaatcaagaagggagaattaactactactggactctgctggaacccggggacacaataatatttgaggcaaatggaaatctaatagcgccatggtatgctttcgcactgagtagaggctttgggtcaggaatcatcacctcaaacgcatcgatggatgaatgtgacgcgaagtgtcaaacaccccagggagctataaacagtagtcttcctttccagaatgtacacccagtcacaataggagagtgcccaaaatacgtcaggagtacaaaattaaggatggttacaggactaaggaacatcccatccattcaatccagaggtttgtttggagccattgccggtttcattgaagggggatggactggaatgatagatggatggtatggttatcatcatcagaatgaacagggatctggctatgctgcagatcaaaaaagcacacaaaatgccattaacgggattacaaacaaggtgaactctgttatcgagaaaatgaacactcaattcacagctgtaggtaaagaattcaacaaactagaaaaaaggatggaaaacttaaataaaaaagttgatgatggatttctggacatttggacatataatgcagaattgttggttctactggaaaatgaaaggactttggattttcatgactcaaatgtgaagaacctgtatgagaaagtaaaaagccaattaaagaataatgccaaagaaataggaaacgggtgttttgaattctaccacaagtgtaacaatgaatgcatggaaagtgtaaaaaatggaacttatgactatccaaaatattcagaggaatcaaagttaaacagggaaaaaattgatggagtgaaattggaatcaatgggagtctatcagattctggcgatctactcaactgtcgccagttcactggtgcttttggtctccctgggggcaatcagcttctggatgtgttctaatgggtctttgcagtgcagaatatgcatctga

SEQ ID NO: 31636 - RNA, 1701 nt, synthetic construct
  misc_feature 1..1701: note = hemagglutinin__InfluenzaA__ABG88355
  source 1..1701: mol_type = other RNA
atgaagactatcattgctttgagctacattttatgtctggttttcgctcaaaaacttcccggaaatgacaacagcacagcaacgctgtgcctgggacaccatgcagtgccaaacggaacgctagtgaaaacaatcacgaatgatcaaattgaagtgactaatgctactgagctggttcagagttccccaacaggtagaatatgcgacagtcctcaccgaatccttgatggaaagaactgcacactgatagatgctctattgggagaccctcattgtgatggcttccaaaataaggaatgggacctttttgttgaacgcagcaaagcttacagcaactgttacccttatgatgtgccggattatgcctcccttaggtcactagttgcctcatcaggcaccctggagtttaccaacgaaaacttcaattggactggagtcgctcaggatgggaaaagctatgcttgcaaaaggggatctgttaacagtttctttagtagattgaattggttgcacaaattagaatacaaatatccagcgctgaacgtgactatgccaaacaatggcaaatttgacaaattgtacatttggggggttcaccacccgagcacggacagtgaccaaaccagcctatatgtccgagcatcagggaaagtcacagtctctaccaaaagaagccaacaaactgtaatcccggatatcgggtatagaccatgggtaaggggtctttccagtagaataagcatctattggacaatagtaaaaccgggagacatacttttgattaatagcacagggaatctaattgctcctcggggttacttcaaaatacgaaatggggaaagctcaataatgaggtcagatgcacccattggcaactgcagttctgaatgcatcactccaaatggaagcattcccaatgacaaaccttttcaaaatgtaaacaggatcacatatggggcctgccccagatatgttaagcaaaacactctgaaattggcaacagggatgcggaatgtaccagagaaacaaactagaggcatattcggcgcaatcgcaggtttcatagaaaatggttgggagggaatggtagacggttggtacggtttcaggcatcagaattctgagggcacaggacaagctgcagatcttaaaagcactcaagcagcaatcgaccaaatcaacgggaaactgaataggttagtcgagaaaacgaacgagaaattccatcaaatcgaaaaagaattctcagaagtagaagggagaattcaggacctcgagaaatatgttgaagacactaaaatagatctctggtcttacaatgcggagcttcttgttgctctggagaaccaacatacaattgatctaactgactcagaaatgaacaaactatttgaaagaacaaggaagcaactgagggaaaatgctgaggacatgggcaatggttgtttcaaaatataccacaaatgtgacaatgcctgcatagggtcaatcagaaatggaacttatgaccatgatgtatacagagacgaagcattaaacaaccggttccagatcaaaggtgttgagctgaagtcaggatacaaagattggatcctatggatttcctttgccatatcatgctttttgctttgtgttgttttgcttgggttcatcatgtgggcctgccaaaaaggcaacattaggtgcaacatttgcatttga

SEQ ID NO: 31637 - RNA, 1701 nt, synthetic construct
  misc_feature 1..1701: note = hemagglutinin__InfluenzaA__ABG88366
  source 1..1701: mol_type = other RNA
atgaagactatcattgctttgagctactttttatgtctggttttcgctcaaaaacttcccggaaatgacaacagcacagcaacgctgtgcctgggacaccatgcagtgccaaacggaacgctagtgaaaacaatcacgaatgatcaaattgaagtgactaatgctactgagctggttcagaattccccaacaggtagaatatgcgacagtcctcaccgaatccttgatggaaagaactgcacactgatagatgctctattgggagaccctcattgtgatggcttccaaaataaggaatgggacctttttgttgaacgcagcaaagcttacagcaactgttacccttatgatgtgccggattatgcctcccttaggtcactagttgcctcatcaggcaccctggagtttaccaacgaaaacttcaattggactggagtcgctcaggatgggaaaagctatgcttgcaaaaggggatctgttaacagtttctttagtagattgaattggttgcacaaattagaatacaaatatccagcgctgaacgtgactatgccaaacaatggcaaatttgacaaattgtacatttggggggttcaccacccgagcacggacagtgaccaaaccagcctatatgtccgagcatcagggaaagtcacagtctctaccaaaagaagccaacaaactgtaatcccggatatcgggtatagaccatgggtaaggggtctgtccagtagaataagcatctattggacaatagtaaaaccgggagacatacttttgattaatagcacagggaatctaattgctcctcggggttacttcaaaatacgaaatgggaaaagctcaataatgaggtcagatgcacccattggcaactgcagttctgaatgcatcactccaaatggaagcattcccaatgacaaaccttttcaaaatgtaaacaggatcacatatggggcctgccccagatatgttaagcaaaacactctgaaattggcaacagggatgcggaatgtaccagagaaacaaactagaggcatattcggcgcaatcgcaggtttcatagaaaatggttgggagggaatggtagacggttggtacggtttcaggcatcagaattctgagggcacaggacaagctgcggatcttaaaagcactcaagcagcaatcgaccaaatcaacgggaaactgaataggttagtcgagaaaacgaacgagaaattccatcaaatcgaaaaagaattctcagaagtagaagggagaattcaggacctcgagaaatatgttgaagacactaaaatagatctctggtcttacaatgcggagcttcttgttgctctggagaaccaacatacaattgatctaactgactcagaaatgaacaaactatttgaaagaacaaggaagcaactgagggaaaatgctgaggacatgggcaatggttgtttcaaaatataccacaaatgtgacaatgcctgcatagggtcaatcagaaatggaacttatgaccatgatgtatacagagacgaagcattaaacaaccggttccagatcaaaggtgttgagctgaagtcaggatacaaagattggatcctatggatttcctttgccatatcatgctttttgctttgtgttgttttgcttgggttcatcatgtgggcctgccaaaaaggcaacattaggtgcaacatttgcatttga

SEQ ID NO: 31638 - RNA, 1701 nt, synthetic construct
  misc_feature 1..1701: note = hemagglutinin__InfluenzaA__ABG88377
  source 1..1701: mol_type = other RNA
atgaagactatcattgctttgagctacattttatgtctggttttcgctcaaaaacttcccggaaatgacaacagcacagcaacgctgtgcctgggacaccatgcagtgccaaacggaacgctagtgaaaacaatcacgaatgatcaaattgaagtgactaatgctactgagctggttcagagttccccaacaggtagaatatgcgacagtcctcaccgaatccttgatggaaagaactgcacactgatagatgctctattgggagaccctcattgtgatggcttccaaaataaggaatgggacctttttgttgaacgcagcaaagcttacagcaactgttacccttatgatgtgccggattatgcctcccttaggtcactagttgcctcatcaggcaccctggagtttaccaacgaaaacttcaattggactggagtcgctcaggatgggaaaagctatgcttgcaaaaggggatctgttaacagtttctttagtagattgaattggttgcacaaattagaatacaaatatccagcgctgaacgtgactatgccaaacaatggcaaatttgacaaattgtacatttggggggttcaccacccgagcacggacagtgaccaaaccagcctatatgtccgagcatcagggaaagtcacagtctctaccaaaagaagccaacaaactgtaatcccggatatcggatatagaccatgggtaaggggtctgtccagtagaataagcatctattggacaatagtaaaaccgggagacatacttttgattaatagcacagggaatctaattgctcctcggggttacttcaaaatacgaaatgggaaaagctcaataatgaggtcagatgcacccattggcaactgcagttctgaatgcatcactccaaatggaagcattcccaatgacaaaccttttcaaaatgtaaacaggatcacatatggggcctgccccagatatgttaagcaaaacactctgaaattggcaacagggatgcggaatgtaccagagaaacaaactagaggcatattcggcgcaatcgcaggtttcatagaaaatggttgggagggaatggtagacggttggtacggtttcaggcatcagaattctgagggcacaggacaagctgcagatcttaaaagcactcaagcagcaatcgaccaaatcaacgggaaactgaataggttagtcgagaaaacgaacgagaaattccatcaaatcgaaaaagaattctcagaagtagaagggagaattcaggacctcgagaaatatgttgaagacactaaaatagatctctggtcttacaatgcggagcttcttgttgctctggagaaccaacatacaattgatctaactgactcagaaatgaacaaactatttgaaagaacaaggaagcaactgagggaaaatgctgaggacatgggcaatggttgtttcaaaatataccacaaatgtgacaatgcctgcatagggtcaatcagaaatggaacttatgaccatgatgtatacagagacgaagcattaaacaaccggttccagatcaaaggtgttgagctgaagtcaggatacaaagattggatcctatggatttcctttgccatatcatgctttttgctttgtgttgttttgcttgggttcatcatgtgggcctgccaaaaaggcaacattaggtgcaacatttgcatttga

SEQ ID NO: 31639 - RNA, 1701 nt, synthetic construct; identical to SEQ ID NO: 31527
  misc_feature 1..1701: note = hemagglutinin__InfluenzaA__ABG88388
  source 1..1701: mol_type = other RNA

SEQ ID NO: 31640 - RNA, 1701 nt, synthetic construct
  misc_feature 1..1701: note = hemagglutinin__InfluenzaA__ABG88399
  source 1..1701: mol_type = other RNA
atgaagactatcattgctttgagctacattttatgtctggttttcgctcaaaaacttcccggaaatgacaacagcacagcaacgctgtgcctgggacaccatgcagtgccaaacggaacgctagtgaaaacaatcacgaatgatcaaattgaagtgactaatgctactgagctggttcagagttcctcaacaggtagaatatgcgacagtcctcaccgaatccttgatggaaaaaactgcacactgatagatgctctattgggagaccctcattgtgatggcttccaaaataaggaatgggacctttttgttgaacgcagcaaagcttacagcaactgttacccttatgatgtgccggattatgcctcccttaggtcactagttgcctcatcaggcaccctggagtttaccaaggaaagcttcaattggactggagtcgctcaggatgggaaaagctatgcttgcaaaaggggatctgttaacagtttctttagtagattgaattggttgcacaaattagaatacaaatatccagcactgaacgtgactatgccaaacaatgacaaatttgacaaattgtacatttggggggttcaccacccgagcacggacagtgaccaaaccagcctatatgttcaagcatcagggagagtcacagtctctaccaaaagaagccaacaaactgtaatcccgaatatcgggtctagaccctgggtaaggggtatctccagtagaataagcatctattggacaatagtaaaaccgggagacatacttttgattaacagcacagggaatctaattgctcctcggggttacttcaaaatacgaaatgggaaaagctcaataatgaggtcagatgcacccattggcaactgcaattctgaatgcatcactccaaatggaagcattcccaatgacaaaccttttcaaaatgtaaacaggatcacatatggggcctgtcccagatatgttaagcaaaacactctgaagttggcaacagggatgcggaatgtaccagagaaacaaactagaggcatattcggcgcaatcgcaggtttcatagaaaatggttgggagggaatggtagacggttggtacggtttcaggcatcaaaattctgagggcacaggacaagcagcagatcttaaaagcactcaagcagcaatcgaccaaatcaacgggaagctgaataggttaatcgagaaaacgaacgaaaaattccatcaaatcgaaaaagaattctcagaagtagaagggagaattcaggacctcgagaaatatgttgaagacactaaaatagatctctggtcttacaacgcggagcttcttgttgccctggagaaccaacatacaattgatctaactgactcagaaatgaacaaactgtttgaaagaacaaggaagcaactgagggaaaatgctgaggacatgggcaatggttgcttcaaaatataccacaaatgtgacaatgcctgcatagggtcaatcagaaatggaacttatgaccatgatgtatacagagacgaagcattaaacaaccggttccagatcaaaggtgttgagctgaagtcaggatacaaagattggatcctatggatttcctttgccatatcatgctttttgctttgtgttgttttgctggggttcatcatgtgggcctgccaaaaaggcaacattaggtgcaacatttgcatttga

SEQ ID NO: 31641 - RNA, 1701 nt, synthetic construct
  misc_feature 1..1701: note = hemagglutinin__InfluenzaA__ABG88410
  source 1..1701: mol_type = other RNA
atgaagactatcattgctttgagctacattttatgtctggttttcgctcaaaaacttcccggaaacgacaacagcacagcaacgctgtgcctgggacaccatgcagtgccaaacggaacgctagtgaaaacaatcacgaatgatcaaattgaagtgactaatgctactgagctggttcagagttcctcaacaggtagaatatgcgacagtcctcaccgaatccttgatggaaaaaactgcacactgatagatgctctattgggagaccctcattgtgatggcttccaaaataaggaatgggacctttttgttgaacgcagcaaagcttacagcaactgttacccttatgatgtgccggattatgcctcccttaggtcactagttgcctcatcaggcaccctggagtttatcaatgaagacttcaattggactggagtcgctcaagatgggaaaagctatgcttgcaaaaggggatctgttaacagtttctttagtagattgaattggctgcacaaattagaatacaaatatccagcgctgaacgtgactatgccaaacaatggcaaatttgacaaattgtacatttggggggttcaccacccgagcacggacagtgaccaaaccagcctatatgttcgagcatcagggagagtcacagtctctaccaaaagaagccaacaaactgtaatcccgaatatcgggtttagaccctgggtaaggggtctgtccagtagaataagcatctattggacaatagtaaaaccgggagacatacttttgattaatagcacagggaatctaattgctcctcggggttacttcaaaatacgaaatgggaaaagctcaataatgaggtcagatgcacccattggcaactgcagttctgaatgcatcactccaaatggaagcattcccaatgacaaaccttttcaaaatgtaaacaggatcacatatggggcctgccccagatatgttaagcaaaacactctgaagttggcaacagggatgcggaatgtaccagagaaacaaactagaggcatattcggcgcaatcgcaggtttcatagaaaatggttgggagggaatggtagacggttggtacggtttcaggcatcaaaattctgagggcacaggacaagcagcagatcttaaaagcactcaagcagcaatcgaccaaatcaacgggaaactgaataggttaatcgagaaaacgaacgagaaattccatcaaatcgaaaaagaattctcagaagtagaagggagaattcaggacctcgagaaatatgttgaagacactaaaatagatctctggtcttacaacgcggggcttcttgttgccctggagaaccaacatacaattgatctaactgactcagaaatgaacaaactgtttgaaagaacaaggaagcaactgagggaaaatgctgaggacatgggcaatggttgcttcaaaatataccacaaatgtgacaatgcctgcatagggtcaatcagaaatggaacttatgaccatgatgtatacagagacgaagcattaaacaaccggttccagatcaaaggtgtcgagctgaagtcaggatacaaagattggatcctatggatttcctttgccatatcatgctttttgctttgtgttgttttgctggggttcatcatgtgggcctgccaaaaaggcaacattaggtgcaacatttgcatttga

SEQ ID NO: 31642 - RNA, 1701 nt, synthetic construct
  misc_feature 1..1701: note = hemagglutinin__InfluenzaA__ABG88421
  source 1..1701: mol_type = other RNA
atgaagactatcattgctttgagctacattttatgtctggttttcgctcaaaaacttcccggaaatgacaacagcacagcaacgctgtgcctgggacaccatgcggtgccaaacgggacgctagtgaaaacaatcacgaatgatcaaattgaagtgactaatgctactgagctggttcagagttcctcaacaggtagaatatgcgacagtcctcaccgaatccttgatggaaaaaactgcacactgatagatgctctattgggagaccctcattgtgatggcttccaaaataaggaatgggacctttttgttgaacgcagcaaagcttacagcaactgttacccttatgatgtgccggattatgcctcccttaggtcactagttgcctcatcaggcaccctggagtttatcaatgaagacttcaattggactggagtcgctcaggatggaaaaagctatgcttgcaaaaggggatctgttaacagtttctttagtagattgaattggttgcacaaattagaatacaaatatccagcgctgaacgtgactatgccaaacaatggcaaatttgacaaattgtacatttggggggttcaccacccgagcacggacagtgaccaaaccagcctatatgttcgagcatcagggagagtcacagtctctaccaaaagaagccaacaaactgtaatcccgaatatcgggtttagaccctgggtaaggggtctgtccagtagaataagcatctattggacaatagtaaaaccgggagacatacttttgattaatagcacagggaatctaattgctcctcggggttacttcaaaatacggaatgggaaaagctcaataatgaggtcagatgcacccattggcaactgcagttctgaatgcatcactccaaatggaagcattcccaatgacaaaccttttcaaaatgtaaacaggatcacatatggggcctgccccagatatgttaagcaaaacactctgaagttggcaacagggatgcggaatgtaccagagaaacaaactagaggcatattcggcgcaatcgcaggtttcatagaaaatggttgggagggaatggtagacggttggtacggtttcaggcatcaaaattctgagggcacaggacaagcagcagatcttaaaagcactcaagcagcaatcgaccaaatcaacgggaaactgaataggttaatcgagaaaacgaacgagaaattccatcagatcgaaaaagaattctcagaagtagaagggagaattcaggacctcgagaaatatgttgaagacactaaaatagatctctggtcttacaacgcggggcttcttgttgccctggagaaccaacatacaattgatctaactgactcagaaatgaacaaactgtttgaaagaacaaggaagcaactgagggaaaatgctgaggacatgggcaatggttgcttcaaaatataccacaaatgtgacaatgcctgcatagggtcaatcagaaatggaacttatgaccatgatgtatacagagacgaagcattaaacaaccggttccagatcaaaggtgttgagctgaagtcaggatacaaagattggatcctatggatttcctttgccatatcatgctttttgctttgtgttgttttgctggggttcatcatgtgggcctgccaaaaaggcaacattaggtgcaacatttgcatttga

SEQ ID NO: 31643 - RNA, 1701 nt, synthetic construct
  misc_feature 1..1701: note = hemagglutinin__InfluenzaA__ABG88432
  source 1..1701: mol_type = other RNA
atgaagactatcattgctttgagctacattttatgtctggttttcgctcaaaaacttcccggaaatgacaacagcacagcaacgctgtgcctgggacaccatgcggtgccaaacggaacgctagtgaaaacaatcacgaatgatcaaattgaagtgactaatgctactgagctggttcagagttcctcaacaggtagaatatgcgacagtcctcaccgaatccttgatggaaaaaactgcacactgatagatgctctattgggagaccctcattgtgatggcttccaaaataaggaatgggacctttttgttgaacgcagcaaagcttacagcaactgttacccttatgatgtgccggattatgcctcccttaggtcactagttgcctcatcaggcaccctggagtttatcaatgaagacttcaattggactggagtcgctcaggatgggaaaagctatgcttgcaaaaggggatctgttaacagtttctttagtagattgaattggttgcacaaattagaatacaaatatccagcgctgaacgtgactatgccaaacaatggcaaatttgacaaattgtacatttggggggttcaccacccgagcacggacagtgaccaaaccagcctatatgttcgagcatcagggagagtcacagtctctaccaaaagaagccaacaaactgtaatcccgaatatcgggtttagaccctgggtaaggggtctgtccagtagaataagcatctattggacaatagtaaaaccgggagacatacttttgattaatagcacagggaatctaattgctcctcggggttacttcaaaatgcggaatgggaaaagctcaataatgaggtcagatgcacccattggcaactgcagttctgaatgcatcactccaaatggaagcattcccaatgacaaaccttttcaaaatgtaaacaggatcacatatggggcctgccccagatatgttaagcaaaacactctgaagttggcaacagggatgcggaatgtaccagagaaacaaactagaggcatattcggcgcaatcgcaggtttcatagaaaatggttgggagggaatggtagacggttggtacggtttcaggcatcaaaattctgagggcacaggacaagcagcagatcttaaaagcactcaagcagcaatcgaccaaatcaacgggaaactgaataggttaatcgagaaaacgaacgagaaattccatcaaatcgaaaaagaattctcagaagtagaagggagaattcaggacctcgagaaatatgttgaagacactaaaatagatctctggtcttacaacgcggggcttcttgttgccctggagaaccaacatacaattgatctaactgactcagaaatgaacaaactgtttgaaagaacaaggaagcaactgagggaaaatgctgaggacatgggcaatggttgcttcaaaatataccacaaatgtgacaatgcctgcatagggtcaatcagaaatggaacttatgaccatgatgtatacagagacgaagcattaaacaaccggttccagatcaaaggtgttgagctgaagtcaggatacaaagattggatcctatggatttcctttgccatatcatgctttttgctttgtgttgttttgctggggttcatcatgtgggcctgccaaaaaggcaacattaggtgcaacatttgcatttga

SEQ ID NO: 31644 - RNA, 1701 nt, synthetic construct; identical to SEQ ID NO: 31534
  misc_feature 1..1701: note = hemagglutinin__InfluenzaA__ABG88443
  source 1..1701: mol_type = other RNA

SEQ ID NO: 31645 - RNA, 1701 nt, synthetic construct
  misc_feature 1..1701: note = hemagglutinin__InfluenzaA__ABG88454
  source 1..1701: mol_type = other RNA
atgaagactatcattgctttgagctacattttatgtctggttttcgctcaaaaacttcccggaaatgacaacagcacagcaacgctgtgcctgggacaccatgcagtgccaaacggaacgctagtgaagacaatcacgaatgatcaaattgaagtgactaatgctactgagctggttcagagttcctcaacaggtagaatatgcgacagtcctcaccgaatccttgatggaaaaaactgcacactgatagatgctctattgggagaccctcattgtgatggcttccaaaataaggaatgggacctttttgttgaacgcagcaaagcttacagcaactgttacccttatgatgtgccggattatgcctcccttaggtcactagttgcctcatcaggcaccctggagtttatcaatgaagacttcaattggactggagtcgctcaggatgggaaaagctatgcttgcaaaaggggatctgctaacagtttctttagtagattgaattggttgcacaaattagaatacaaatatccagcgctgaacgtgactatgccaaacaatggcaaatttgacaaattgtacatttggggggttcaccacccgagcacggacagtgaccaaaccagcctatatgttcgagcatcagggggagtcacagtctctaccaaaagaagccaacaaactgtaatcccgaatatcgggtctagaccctgggtaaggggtctgtccagtagaataagcatctattggacaatagtaaaaccgggagacatacttttgattaatagcacagggaatctaattgctcctcggggttacttcaaaatacgaagtgggaaaagctcaataatgaggtcagatgcatccattggcaactgcagttctgaatgcatcactccaaatggaagcattcccaatgacaaaccttttcaaaatgtaaacaggatcacatatggggcctgccccagatatgttaagcaaaacactctgaaattggcaacagggatgcggaatgtaccagagaaacaaactagaggcatattcggcgcaatcgcaggtttcatagaaaatggttgggagggaatggtagacggttggtacggtttcaggcatcaaaattctgagggcacaggacaagcagcagatcttaaaagcactcaagcagcaatcgaccaaatcaacgggaaactgaataggttaatcggtaaaacgaacgataaattccatcaaatcgaaaaagaattctcagaagtagaagggagaattcaggacctcgagaaatatgttgaagacactaaaatagatctctggtcttacaacgcggagcttcttgttgccctggagaaccaacatacaattgatctaactgactcagaaatgaacaaactgtttgaaagaacaaggaagcaactgagagaaaatgctgaggacatgggcaatggttgcttcaaaatataccacaaatgtgacaatgcctgcatagggtcaatcagaaatggaacttatgaccatgatgtatacagagacgaagcattaaacaaccggttccagatcaaaggtgttgagctgaagtcaggatacaaagattggatcctatggatttcctttgccatatcatgctttttgctttgtgttgttttgctggggttcatcatgtgggcctgccaaaaaggcaacattaggtgcaacatttgcatttga

SEQ ID NO: 31646 - RNA, 1701 nt, synthetic construct
  misc_feature 1..1701: note = hemagglutinin__InfluenzaA__ABG88465
  source 1..1701: mol_type = other RNA
atgaagactatcattgctttgagctacattttatgtctggttttcgctcaaaaacttcccggaaatgacaacagcacagcaacgctgtgcctgggacaccatgcagtgccaaacggaacgctagtgaaaacaatcacgaatgatcaaattgaagtgactaatgctactgagctggttcagagttcctcaacaggtagaatatgcgacagtcctcaccgaatccttgatggaaaaaactgcacactgatagatgctctattgggagaccctcattgtgatggcttccaaaataaggaatgggacctttttgttgaacgcagcaaagcttacagcaactgttacccttatgatgtgccggattatgcctcccttaggtcactagttgcctcatcaggcaccctggagtttatcaatgaagacttcaattggactggagtcgctcaggatgggaaaagctatgcttgcaaaaggggatctgttaacagtttctttagtagattgaattggttgcacaaattagaatacaaatatccagcgctgaacgtgactatgccaaacaatggcaaatttgacaaattgtacatttggggggttcaccacccgagcacggacagtgaccaaaccagcctatatgttcgagcatcagggagagtcacagtctctaccaaaagaagccaacaaactgtaatcccgaatatcgggtttagaccctgggtaaggggtctgtccagtagaataagcatctattggacaatagtaaaaccgggagacatacttttgattaatagcacagggaatctaattgctcctcggggttacttcaaaatacgaaatgggaaaagctcaataatgaggtcagatgcacccattggcaactgcagttctgaatgcatcactccaaatggaagcattcccaatgacaaaccttttcaaaatgtaaacaggatcacatatggggcctgccccagatatgttaagcaaaacactctgaagttggcaacagggatgcggaatataccagagaaacaaactagaggcatattcggcgcaatcgcaggtttcatagaaaatggttgggagggaatggtagacggttggtacggtttcaggcatcaaaattctgagggcacaggacaagcagcagatcttaaaagcactcaagcagcaatcgaccaaatcaacgggaaactgaataggttaatcgagaaaacgaacgagaaattccatcaaatcgaaaaagaattctcagaagtagaagggagaattcaggacctcgagaaatatgttgaagacactaaaatagatctctggtcttacaacgcggggcttcttgttgccctggagaaccaacatacaattgatctaactgactcagaaatgaacaaactgtttgaaagaacaaggaagcaactgagggaaaatgctgaggacatgggcaatggttgcttcaaaatataccacaaatgtgacaatgcctgcatagggtcaatcagaaatggaacttatgaccatgatgtatacagagacgaagcattaaacaaccggttccagatcaaaggtgttgagctgaagtcaggatacaaagattggatcctatggatttcctttgccatatcatgctttttgctttgtgttgttttgctggggttcatcatgtgggcctgccaaaaaggcaacattaggtgcaacatttgcatttga

SEQ ID NO: 31647 - RNA, 1701 nt, synthetic construct
  misc_feature 1..1701: note = hemagglutinin__InfluenzaA__ABG88476
  source 1..1701: mol_type = other RNA
atgaagactatcattgctttgagctacattttatgtctggttttcgctcaaaaacttcccggaaatgacaacagcacagcaacgctgtgcctgggacaccatgcagtgccaaacggaacgctagtgaaaacaatcacgaatgatcaaattgaagtgactaatgctactgagctggttcagagttcctcaacaggtagaatatgcgacagtcctcaccgaatccttgatggaaaaaactgcacactgatagatgctctattgggagaccctcattgtgatggcttccaaaataaggaatgggacctttttgttgaacgcagcaaagcttacagcaactgttacccttatgatgtgccggattatgcctcccttaggtcactagttgcctcatcaggcaccctggagtttatcaatgaagacttcaattggactggagtcgctcaggatgggaaaagctatgcttgcaaaaggggatctgttaacagtttctttagtagattgaattggctgcacaaattagaatacaaatatccagcgctgaacgtgactatgccaaacaatggcaaatttgacaaattatacatttggggggttcaccacccgagcacggacagtgaccaaaccagcctatatgttcgagcatcagggagagtcacagtctctaccaaaagaagccaacaaactgtaatcccgaatatcgggtttagaccctgggtaaggggtctgtccagtagaataagcatctattggacaatagtaaaaccgggagacatacttttgattaatagcacagggaatctaattgctcctcggggttacttcaaaatacgaaatgggaaaagctcaataatgaggtcagatgcacccattggcaactgcagttctgaatgcatcactccaaatggaagcattcccaatgacaaaccttttcaaaatgtaaacaggatcacatatggggcctgccccagatatgttaagcaaaacactctgaagttggcaacagggatgcggaatgtaccagagaaacaaactagaggcatattcggcgcaatcgcaggtttcatagaaaatggttgggagggaatggtagacggttggtacggtttcaggcatcaaaattctgagggcacaggacaagcagcagatcttaaaagcactcaagcagcaatcgaccaaatcaacgggaaactgaataggttaatcgagaaaacgaacgagaaattccatcaaatcgaaaaagaattctcagaagtagaagggagaattcaggacctcgagaaatatgttgaagacactaaaatagatctctggtcttacaacgcggggcttcttgttgccctggagaaccaacatacaattgatctaactgactcagaaatgaacaaactgtttgaaagaacaaggaagcaactgagggaaaatgctgaggacatgggcaatggttgcttcaaaatataccacaaatgtgacaatgcctgcataggatcaatcagaaatggaacttatgaccatgatgtatacagagacgaagcattaaacaaccggttccagatcaaaggtgtcgagctgaagtcaggatacaaagattggatcctatggatttcctttgccatatcatgctttttgctttgtgttgttttgctggggttcatcatgtgggcctgccaaaaaggcaacattaggtgcaacatttgcatttga

SEQ ID NO: 31648 - RNA, 1701 nt, synthetic construct
  misc_feature 1..1701: note = hemagglutinin__InfluenzaA__ABG88487
  source 1..1701: mol_type = other RNA
atgaagactatcattgctttgagctacattttatgtctggttttcgctcaaaaacttcccggaaatgacaacagcacagcaacgctgtgcctgggacatcatgcggtgccaaacggaacgctagtgaaaacaatcacgaatgatcaaattgaagtgactaatgctactgagctggttcagagttcctcaacaggtagaatatgcgacagtcctcaccgaatccttgatggaaaaaactgcacactgatagatgctctattgggagaccctcattgtgatggcttccaaaataaggaatgggacctttttgttgaacgcagcaaagcttacagcaactgttacccttatgatgtgccggattatgcctcccttaggtcactagttgcctcatcaggcaccctggagtttatcaatgaagacttcaattggactggagtcgctcaggatgggaaaagctatgcttgcaaaaggggatctgttaacagtttctttagtagattgaattggttgcacaaattagaatacaaatatccagcgctgaacgtgactatgccaaacaatggcaaatttgacaaattgtacatttggggggttcaccacccgagcacggacagtgaccaaaccagcctatatgttcgagcatcagggagagtcacagtctctaccaaaagaagccaacaaactgtaatcccgaatatcgggtttagaccctgggtaaggggtctgtccagtagaataagcatctattggacaatagtaaaaccgggagacatacttttgattaatagcacagggaatctaattgctcctcggggttacttcaaaatacggaatgggaaaagctcaataatgaggtcagatgcacccattggcaactgcagttctgaatgcatcactccaaatggaagcattcccaatgacaaaccttttcaaaatgtaaacaggatcacatatggggcctgccccagatatgtaaagcaaaacactctgaagttggcaacagggatgcggaatgtaccagagaaacaaactagaggcatattcggcgcaatcgcaggtttcatagaaaatggttgggagggaatggtagacggttggtacggtttcaggcatcaaaattctgagggcacaggacaagcagcagatcttaaaagcactcaagcagcaatcgaccaaatcaacgggaaactgaataggttaatcgagaaaacgaacgagaaattccatcaaatcgaaaaagaattctcagaagtagaggggagaattcaggacctcgagaaatatgttgaagacactaaaatagatctctggtcttacaacgcggggcttcttgttgccctggagaaccaacatacaattgatctaactgactcagaaatgaacaaactgtttgaaagaacaaggaagcaactgagggaaaatgctgaggatatgggcaatggttgcttcaaaatataccacaaatgtgacaatgcctgcatagggtcaatcagaaatggaacttatgaccatgatgtatacagagacgaagcattaaacaaccggttccagatcaaaggtgttgagctgaagtcaggatacaaagattggatcctatggatttcctttgccatatcatgctttttgctttgtgttgttttgctggggttcatcatgtgggcctgccaaaaaggcaacattaggtgcaacatttgcatttga

SEQ ID NO: 31649 - RNA, 1701 nt, synthetic construct
  misc_feature 1..1701: note = hemagglutinin__InfluenzaA__ABG88498
  source 1..1701: mol_type = other RNA
atgaagactatcattgctttgagctacattttatgtctggttttcgctcaaaaacttcccggaaatgacaacagcacagcaacgctgtgcctgggacaccatgcggtgccaaacggaacgctagtgaaaacaatcacgaatgatcaaattgaagtgactaatgctactgagctggttcagagttcctcaacaggtagaatatgcgacagtcctcaccgaatccttgatggaaaaaactgcacactgatagatgctctattgggagaccctcattgtgatggcttccaaaataaggaatgggacctttttgttgaacgcagcaaagcttacagcaactgttacccttatgatgtgccggattatgcctcccttaggtcactagttgcctcatcaggcaccctggagtttatcaatgaagacttcaattggactggagtcgctcaggatgggaaaagctatgcttgcaaaaggggatctgttaacagtttctttagtagattgaattggttgcacaaattagaatacaaatatccagcgctgaacgtgactatgccaaacaatggcaaatttgacaaattgtacatttggggggttcaccacccgagcacggacagtgaccaaaccagcctatatgttcgagcatcagggagagtcacagtctctaccaaaagaagccaacaaactgtaatcccgaatatcgggtttagaccctgggtaaggggtctgtccagtagaataagcatctattggacaatagtaaaaccgggagacatacttttgattaatagcacagggaatctaattgctcctcggggttacttcaaaatacggaatgggaaaagctcaataatgaggtcagatgcacccattggcaactgcagttctgaatgcatcactccaaatggaagcattcccaatgacaaaccttttcaaaatgtaaacaggatcacatatggggcctgccccagatatgttaagcaaaacactctgaagttggcaacagggatgcggaatgtaccagagaaacaaactagaggcatattcggcgcaatcgcaggtttcatagaaaatggttgggagggaatggtagacggttggtacggtttcaggcatcaaaattctgagggcacaggacaagcagcagatcttaaaagcactcaagcagcaatcgaccaaatcaacgggaaactgaataggttaatcgagaaaacgaacgagaaattccatcaaatcgaaaaagaattctcagaagtagaagggagaattcaggacctcgagaaatatgttgaagacactaaaatagatctctggtcttacaacgcggggcttcttgttgccctggagaaccaacatacaattgatctaactgactcagaaatgaacaaactgtttgaaagaacaaggaagcaactgagggaaaatgctgaggacatgggcaatggttgcttcaaaatataccacaaatgtgacaatgcctgcatagggtcaatcagaaatggaacttatgaccatgatgtatacagagacgaagcattaaacaaccggttccagatcaaaggtgttgagctgaagtcaggatacaaagattggatcctatggatttcctttgccatatcatgctttttgctttgtgttgttttgctggggttcatcatgtgggcctgccaaaaaggcaacattaggtgcaacatttgcatttga

SEQ ID NO: 31650 - RNA, 1701 nt, synthetic construct
  misc_feature 1..1701: note = hemagglutinin__InfluenzaA__ABG88509
  source 1..1701: mol_type = other RNA
atgaagactatcattgctttgagctacattttatgtctggttttcgctcaaaaacttcccggaaatgacaacagcacagcaacgctgtgcctgggacaccatgcagtgccaaacggaacgctagtgaaaacaatcacgaatgatcaaattgaagtgactaatgctactgagctggttcagagttcctcaacaggtagaatatgcgacagtcctcaccgaatccttgatggaaaaaactgcacactgatagatgctctattgggagaccctcattgtgatggcttccaaaataaggaatgggacctttttgttgaacgcagcaaagcttacagcaactgttacccttatgatgtgccggattatgcctcccttaggtcactagttgcctcatcaggcaccctggagtttatcaatgaagacttcaattggactggagtcgctcaggatgggaaaagctatgcttgcaaaaggggatctgtcaacagtttctttagtagattgaattggctgcacaaattagaatacaaatatccagcgctgaacgtgactatgccaaacaatggcaaatttgacaaattgtacatttggggggttcaccacccgagcacggacagtgaccaaaccagcctatatgttcgagcatcagggagagtcacagtctctaccaaaagaagccaacaaactgtaatcccgaatatcgggtttagaccctgggtaaggggtctgtccagtagaataagcatctattggacaatagtaaaaccgggagacatacttttgattaatagcacagggaatctaattgctcctcggggttacttcaaaatacgaaatgggaaaagctcaataatgaggtcagatgcacccattggcaactgcagttctgaatgcatcactccaaatggaagcattcccaatgacaaaccttttcaaaatgtaaacaggatcacatatggggcctgccccagatatgttaagcaaaacactctgaagttggcaacagggatgcggaatgtaccagagaaacaaactagaggcatattcggcgcaatcgcaggtttcatagaaaatggttgggagggaatggtagacggttggtacggtttcaggcatcaaaattctgagggcacaggacaagcagcagatcttaaaagcactcaagcagcaatcgaccaaatcaacgggaaactgaataggttaatcgagaaaacgaacgagaaattccatcaaatcgaaaaagaattctcagaagtagaagggagaattcaggacctcgagaaatatgttgaagacactaaaatagatctctggtcttacaacgcggggcttcttgttgccctggagaaccaacatacaattgatctaactgactcagaaatgaacaaactgtttgaaagaacaaggaagcaactgagggaaaatgctgaggacatgggcaatggttgcttcaaaatataccacaaatgtgacaatgcctgcatagggtcaatcagaaatggaacttatgaccatgatgtatacagagacgaagcattaaacaaccggttccagatcaaaggtgtcgagctgaagtcaggatacaaagattggatcctatggatttcctttgccatatcatgctttttgctttgtgttgttttgctggggttcatcatgtgggcctgccaaaaaggcaacattaggtgcaacatttgcatttga

SEQ ID NO: 31651 - RNA, 1701 nt, synthetic construct
  misc_feature 1..1701: note = hemagglutinin__InfluenzaA__ABG88520
  source 1..1701: mol_type = other RNA
atgaagactatcattgctttgagctacatttcatgtctggttttcgctcaaaaacttcccggaaatgacaacagcacagcaacgctgtgcctgggacaccatgcggtgccaaacggaacgctagtgaaaacaatcacgaatgatcaaattgaagtgactaatgctactgagctggttcagagttcctcaacaggtagaatatgcgacagtcctcatcgaatccttgatggaaaaaactgcacactgatagatgctctattgggagaccctcattgtgatggcttccaaaataaggaatgggacctttttgttgaacgcagcaaagcttacagcaactgttacccttatgatgtgccggattatgcctcccttaggtcactagttgcctcatcaggcaccctggagtttatcaatgaagacttcaattggactggagtcgctcaggatgggaaaagctatgcttgcaaaaggggatctgttaacagtttctttagtagattgaattggttgcacaaattagaatacaaatatccagcgctgaacgtgactatgccaaacaatggcaaatttgacaaattgtacatttggggggttcaccacccgagcacggacagtgaccaaaccagcctatatgttcgagcatcagggagagtcacagtctctaccaaaagaagccaacaaactgtaatcccgaatatcgggtttagaccctgggtaaggggtctgtccagtagaataagcatctattggacaatagtaaaaccgggagacatacttttgattaatagcacagggaatctaattgctcctcggggttacttcaaaatacggaatgggaaaagctcaataatgaggtcagatgcacccattggcaactgcagttctgaatgcatcactccaaatggaagcattcccaatgacaaaccttttcaaaatgtaaacaggatcacatatggggcctgccccagatatgttaagcaaaacactctgaagttggcaacagggatgcggaatgtaccagagaaacaaactagaggcatattcggcgcaatcgcaggtttcatagaaaatggttgggagggaatggtagacggttggtacggtttcaggcatcaaaattctgagggcacaggacaagcagcagatcttaaaagcactcaagcagcaatcgaccaaatcaacgggaaactgaataggttaatcgagaaaacgaacgagaaattccatcaaatcgaaaaagaattctcagaagtagaagggagaattcaggacctcgagaaatatgttgaagacactaaaatagatctctggtcttacaacgcggggcttcttgttgccctggagaaccaacatacaattgatctaactgactcagaaatgaacaaactgtttgaaagaacaaggaagcaactgagggaaaatgctgaggacatgggcaatggttgcttcaaaatataccacaaatgtgacaatgcctgcatagggtcaatcagaaatggaacttatgaccatgatgtatacagagacgaagcattaaacaaccggttccagatcaaaggtgttgagctgaagtcaggatacaaagattggatcctatggatttcctttgccatatcatgctttttgctttgtgttgttttgctggggttcaccatgtgggcctgccaaaaaggcaacattaggtgcaacatttgcatttga

SEQ ID NO: 31652 - RNA, 1701 nt, synthetic construct
  misc_feature 1..1701: note = hemagglutinin__InfluenzaA__ABG88531
  source 1..1701: mol_type = other RNA
atgaagactatcattgctttgagctacattttatgtctggttttcgctcaaaaacttcccggaaatgacaacagcacagcaacgctgtgcctgggacaccatgcagtgccaaacggaacgctagtgaaaacaatcacgaatgatcaaattgaagtgactaatgctactgagctggttcagagttcctcaacaggtagaatatgcgacagtcctcaccgaatccttgatggaaaaaactgcacactgatagatgctctattgggagaccctcattgtgatggcttccaaaataaggaatgggacctttttgttgaacgcagcaaagcttacagcaactgttacccttatgatgtgccggattatgcctcccttaggtcactagttgcctcatcaggcaccctggagtttatcaatgaagacttcaattggactggagtcgctcaggatgggaaaagctatgcttgcaaaaggggatctgttaacagtttctttagtagattgaattggctgcacaaattagaatacaaatatccagcgctgaacgtgactatgccaaacaatggcaaatttgacaaattgtacatttggggggttcaccacccgagcacggacagtgtccaaaccagcctatatgttcgagcatcagggagagtcacagtctctaccaaaagaagccaacaaactgtaatcccgaatatcgggtttagaccctgggtaaggggcctgtccagtagaataagcatctattggacaatagtaaaaccgggagacatacttttgattaatagcacagggaatctaattgctcctcggggttacttcaaaatacgaaatgggaaaagctcaataatgaggtcagatgcacccattggcaactgcagttctgaatgcatcactccaaatggaagcattcccaatgacaaaccttttcaaaatgtaaacaggatcacatatggggcctgccccagatatgttaagcaaaacactctgaagttggcaacagggatgcggaatgtaccagagaaacaaactagaggcatattcggcgcaatcgcaggtttcatagaaaatggttgggagggaatggtagacggttggtacggtttcaggcatcaaaattctgagggcacaggacaagcagcagatcttaaaagcactcaagcagcaatcgaccaaatcaacgggaaactgaataggttaatcgagaaaacgaacgagaaattccatcaaatcgaaaaagaattctcagaagtagaagggagaattcaggacctcgagaaatatgttgaagacactaaaatagatctctggtcttacaacgcggggcttcttgttgccctggagaaccaacatacaattgatctaactgactcagaaatgaacaaactgtttgaaagaacaaggaagcaactgagggaaaatgctgaggacatgggcaatggttgcttcaaaatataccacaaatgtgacaatgcctgcatagggtcaatcagaaatggaacttatgaccatgatgtatacagagacgaagcattaaacaaccggttccagatcaaaggtgtcgagctgaagtcaggatacaaagattggatcctatggatttcctttgccatatcatgctttttgctttgtgttgttttgctggggttcatcatgtgggcctgccaaaaaggcaacattaggtgcaacatttgcatttga

SEQ ID NO: 31653 - RNA, 1698 nt, synthetic construct; identical to SEQ ID NO: 31539
  misc_feature 1..1698: note = hemagglutinin__InfluenzaA__ABG88553
  source 1..1698: mol_type = other RNA

SEQ ID NO: 31654 - RNA, 1701 nt, synthetic construct
  misc_feature 1..1701: note = hemagglutinin__InfluenzaA__ABG88564
  source 1..1701: mol_type = other RNA
atgaagactatcattgctttgagctacattttatgtctggttttcgctcaaaaacttcccgtaaatgacaacagcacggcaacgctgtgcctgggacaccatgcagtgccaaacggaacgctagtgaaaacaatcacgaatgaccacattgaagtgactaatgctactgagttggttcagagttcctcaacaggtagaatatgcgacagtcctcaccaaatccttgatggagaaaactgcacactaatagatgctctattgggagaccctcattgtgatggcttccaaaataaggaatgggacctttttgttgaacgcagcacagcctacagcaactgttacccttatgatgtgccggattatgcctcccttaggtcactagttgcctcctccggcacactggagtttaacaatgaaagcttcaattggactggagtcgctcagaatggaacaagctctgcttgcaaaaggagatctattaaaagtttctttagtagattgaattggttgcaccaattaaaatacaaatatccagcactgaacgtgactatgccaaacaatgaaaaatttgacaaattgtacatttggggggttcaccacccgagtacggacagtgaccaaatcagcctatatgctcaagcatcagggagagtcacagtctctaccaaaagaagccaacaaactgtaatcccgaatatcggatctagaccctgggtaaggggtgtctccagcagaataagcatctattggacaatagtaaaaccgggagacatacttttgattaacagcacagggaatctaattgctcctcggggttactttaaaatacgaagtgggaaaagctcaataatgaggtcaaatgcacccattggcaaatgcaattctgaatgcatcactccaaatggaagcattcccaatgacaaaccatttcaaaatgtaaacaggatcacatatggggcctgtcccagatatgttaagcaaaacactctgaaattggcaacaggaatgcggaatgtaccagagaaacaaactagaggcatattcggcgcaatcgcgggtttcatagaaaatggttgggagggaatggtagacggttggtatggtttcaggcatcaaaattctgagggcacaggacaagcagcagatcttaaaagcactcaagcagcaatcaaccaaatcaacgggaaactgaataggttaatcgagaaaacaaacgagaaattccatcaaattgaaaaagaattctcagaagtagaagggagaattcaggacctcgagaaatatgttgaggacactaaaatagatctctggtcgtacaacgcggagcttcttgttgccctggagaaccaacatacaattgatctaacagactcagaaatgaacaaactgtttgaaagaacaaggaagcaactgagggaaaatgctgaggagatgggcaatggttgtttcaaaatataccacaaatgtgacaatgcctgcatagggtcaatcagaaatggaacttatgaccatgatgtatacagagacgaagcattaaacaaccggttccagatcaaaggtgttgagctgaagtcaggatacaaagattggatcctatggatttcctttgccatatcatgttttttgctttgtgttgttttgctggggttcatcatgtgggcctgccaaaaaggcaacattaggtgcaacatttgcatttga

SEQ ID NO: 31655 - RNA, 1701 nt, synthetic construct; identical to SEQ ID NO: 31244
  misc_feature 1..1701: note = hemagglutinin__InfluenzaA__ABG88575
  source 1..1701: mol_type = other RNA

SEQ ID NO: 31656 - RNA, 1701 nt, synthetic construct; identical to SEQ ID NO: 31154
  misc_feature 1..1701: note = hemagglutinin__InfluenzaA__ABG88586
  source 1..1701: mol_type = other RNA

SEQ ID NO: 31657 - RNA, 1701 nt, synthetic construct
  misc_feature 1..1701: note = hemagglutinin__InfluenzaA__ABG88597
  source 1..1701: mol_type = other RNA
atgaagactatcattgctttgagctacattttatgtctggttttcgctcaaaaacttcccgcaaatgacaacagcacggcaacgctgtgcctgggacaccatgcagtgccaaacggaacgctagtgaaaacaatcacgaatgacaacattgaagtgactaatgctactgagctggttcagagttcctcaacaggcagaatatgcgacagtcctcaccaaatccttgatggagaaaactgcacactaatagatgctctattgggagaccctcattgtgatggcttccaaaataaggaatgggacctttttgttgaacgcagcacagcctacagcaactgttacccttatgatgtgccggattatgcctcccttaggtcactagttgcctcatccggcacactggagtttaacaacgaaagcttcaattggactggagtcgatcagaatggaacaagctctgcttgcaaaaggagatctaataaaagtttctttagtagattgaattggttgcaccaattaaaatacaaatatccagcactgaacgtgactatgccaaacaatgaaaaatttgacaaattgtacatttggggggttcaccacccgagtacggacagtgaccaaatcagcctatatgctcaagcatcagggagagtcacagtctctaccaaaagaagccaacaaactgtaatcccgaatatcggatctagaccctgggtaaggggtgtctccagcagaataagcatctattggacaatagtaaaaccgggagacatacttttgattaacagcacagggaatctaattgctcctcggggttacttcaaaatacgaagtgggaaaagctcaataatgaggtcaaatgcacccattggaaaatgcaattctgaatgcatcactccaaatggaagcattcccaatgacaaaccatttcaaaatgtaaacaggatcacatatggggcctgtcccaggtatgttaaacaaaacactctgaaattggcaacagggatgcggaatgtaccagagaaacaaactagaggcatattcggcgcaatcgcaggtttcatagaaaatggttgggagggaatggtggacggttggtacggtttcaggcatcaaaattctgagggcacaggacaagcagcagatcttaaaagcactcaagcagcaatcaaccaaatcaacgggaaactgaataggttaatcgagaaaacaaacgagaaattccatcaaattgaaaaagaattctcagaagtagaagggagaattcaggacctcgagaaatatgttgaggacactaaaatagatctctggtcgtacaacgcggagcttcttgttgccctggagaaccaacatacaattgatctaactgactcagaaatgaacaaactgttcgaaagaacaaggaagcaactgagggaaaatgctgaggatatgggcaatggttgtttcaaaatataccacaaatgtgacaatgcctgcatagggtcaatcagaaatggaacttatgaccatgatgtatacagagacgaagcattaaacaaccggttccagatcaaaggtgttgagctgaagtcaggatacaaagattggatcctatggatttcctttgccatatcatgttttttgctttgtgttgttttgctggggttcatcatgtgggcctgccaaaaaggcaacattaggtgcaacatttgcatttaa

SEQ ID NO: 31658 - RNA, 1701 nt, synthetic construct
  misc_feature 1..1701: note = hemagglutinin__InfluenzaA__ABG88608
  source 1..1701: mol_type = other RNA
atgaagactatcattgctttgagctacattttatgtctggttttcgctcaaaaacttcccggaaatgacaacagcacggcaacgctgtgcctggggcaccatgcagtgccaaacggaacgctagtgaaaacaatcacgaatgaccaaattgaagtgactaatgctactgagctggttcagagttcctcaacaggtagaatatgcgacagtcctcaccaaatccttgatggagaaaactgcacactaatagatgctctattgggagaccctcattgtgatggcttccaaaataaggaatgggacctttttgttgaacgcagcagagcctacagcaactgttacccttatgatgtgccggattatgtctcccttaggtcactagttgcctcatcaggcacgctggagtttaacaatgaaagcttcaattggactggagtcgctcagaatggaacaagctctgcttgcaaaaggagatctgataaaagtttctttagtagattgaattggttgcaccaattaaaatacaaatatccagcactgaacgtgactatgccaaacaatgaaaaatttgacaaattgtacatttggggggttcaccacccgggtacagacagtgaccaaatcagcctatatgctcaagcatcagggagagtcacagtctctaccaaaagaagccaacaaaccgtaatcccgaatatcggatctagaccctgggtaaggggtgtctccagcagaataagcatctattggacaatagtaaaaccgggagacatacttttgattaacagcacagggaatctaattgctcctcggggttacttcaaaatacgaagtgggaaaagctcaataatgaggtcagatgcacccattggcaaatgcaattctgaatgcatcactccaaatggaagcattcccaatgacaaaccatttcaaaatgtaaacaggatcacatatgggccctgtcccagatatgttaagcaaaacactctgaaattggcaacagggatgcggaatgtgccagagaaacaaactagaggcatattcggtgcaatcgcgggcttcatagaaaatggttgggagggaatgatggacggttggtacggtttcaggcatcaaaattctgagggcacagggcaagcagcagatcttaaaagcactcaagcagcaatcaaccaaatcaacgggaaactgaataggttaatcgagaaaacgaacgagaaattccatcaaattgaaaaagaattctcagaagtagaagggagaattcaggacctcgagaaatatgttgaggacactaaaatagatctctggtcgtacaatgcggagcttcttgttgccctggagaaccaacatacaattgatctaactgactcagaaatgaacaaactgtttgaaagaacaaagaagcaactgagggaaaatgctgaggatatgggcaatggttgtttcaaaatataccacaaatgtgacaatgcctgcatagggtcaatcagaaatggaacttatgaccatgatgtatacagagacgaagcattgaacacccggttccagatcaaaggtgttgagctgaagtcaggatacaaagattggatcctatggatttcctttgccatatcatgttttttgctttgtattgttttgctggggttcatcatgtgggcctgccaaaaaggcaacattaggtgcaacatttgcatttga

SEQ ID NO: 31659 - RNA, 1701 nt, synthetic construct; identical to SEQ ID NO: 31066
  misc_feature 1..1701: note = hemagglutinin__InfluenzaA__ABG88619
  source 1..1701: mol_type = other RNA

SEQ ID NO: 31660 - RNA, 1701 nt, synthetic construct
  misc_feature 1..1701: note = hemagglutinin__InfluenzaA__ABG88630
  source 1..1701: mol_type = other RNA
atgaagactatcattgctttgagctacattttatgcctggttttcgctcaaaaacttcccggaaatgacaacagcacggcaacgctgtgcctggggcaccatgcagtgccaaacggaacgctagtgaaaacaatcacgaatgaccaaattgaagtaactaatgctactgagctggttcagagttcctcaacaggtagaatatgcgacagtcctcaccaagtccttgatggagaaaactgcacactaatagatgctctattgggagaccctcattgtgatggcttccaaaataaggaatgggacctttttgttgaacgcagcaaagcctacagcaactgttacccttatgatgtgccggattatgtctcccttaggtcactagttgcctcatcaggcacgctggagtttaacaatgaaagcttcaattggactggagtcgctcagaatggaacaagctctgcttgcaaaaggagatctgataaaagtttctttagtagattgaattggttgcaccaattaaaatacaaatatccagcactgaacgtgactatgccaaacaatgaaaaatttgacaaattgtacatttggggggtccaccacccgggtacagacagtgaccaaatcagcctatatgctcaagcatcagggagagtcacagtctctaccaaaagaagccaacaaactgtaatcccgaatatcggatctagaccctgggtaaggggtgtctccagcagaataagcatctattggacaatagtaaaaccgggagacatacttttgattaacagcacagggaatctaattgctcctcggggttactttaaaatacgaagtgggaaaagctcaataatgaggtcagatgcacccattggcaaatgcaattctgaatgcatcactccaaatggaagcattcccaatgacaaaccatttcaaaatgtaaacaggatcacatatggggcctgtcccagatatgttaagcaaaaaactctgaaattggcaacagggatgcggaatgtgccagagaaacaaactagaggcatattcggtgcaatcgcgggcttcatagaaaatggttgggagggaatgatggacggttggtacggtttcaggcatcaaaattctgagggcacagggcaagcagcagatcttaaaagcactcaagcagcaatcaaccaaatcaacgggaaactgaataggttgattgagaaaacgaacgagaaattccatcaaattgaaaaagaattctcagaagtagaagggagaattcaggacctcgagaaatatgtcgaggacactaaaatagatctctggtcgtacaatgcggagcttcttgttgccctggagaaccaacatacaattgatctaactgactcagaaatgaacaaactgtttgaaagaacaaagaagcaactgagggaaaatgctgaggatatgggcaatggttgtttcaaaatataccacaaatgtgacaatgcctgcatagggtcaatcagaaatggaacttatgaccatgatgtatacagagacgaagcattgaacaaccggttccagatcaaaggtgttgagctgaagtcaggatacaaagattggatcctatggatttcctttgccatatcatgttttttgctttgtattgttttactggggttcatcatgtgggcctgccaaaaaggcaacattaggtgcaacatttgcatttga

SEQ ID NO: 31661 - RNA, 1701 nt, synthetic construct
  misc_feature 1..1701: note = hemagglutinin__InfluenzaA__ABG88641
  source 1..1701: mol_type = other RNA
atgaagactatcattgctttgagctacattttatgcctggttttcgctcaaaaacttcccggaaatgacaacagcacggcaacgctgtgcctggggcaccatgcagtgccaaacggaacgctagtgaaaacaatcacgaatgaccaaattgaagtgactaatgctactgagctggttcagagttcctcaacaagtagaatatgcgacagtcctcaccaaatccttgatggagaaaactgcacactaatagatgctctattgggagaccctcattgtgatggcttccaaaataaggaatgggacctttttgttgaacgcagcaaagcctacagcaactgttacccttatgatgtgccggattatgtctcccttaggtcactagttgcctcatcaggcacgctggagtttaacaatgaaagcttcaattggactggagtcgctcagaatggaacaagctctgcttgcaaaaggagatctgataaaagtttctttagtagattgaattggttgcaccaattaaaatacaaatatccagcactgaacgtgactatgccaaacaatgaaaaatttgacaaattgtacatttggggggttcaccacccgggtacagacagtgaccaaatcagcctatatgctcaagcatcagggagagtcacagtctctaccaaaagaagccaacaaactgtaatcccgaatatcggatctggaccctgggtaaggggtgtctccagcagaataagcatctattggacaatagtaaaaccgggagacatacttttgattaacagcacagggaatctaattgctcctcggggttacttcaaaatacgaagtgggaaaagctcaataatgaggtcagatgcacccattggcaaatgcaattctgaatgcatcactccaaatggaagcattcccaatggcaaaccatttcaaaatgtaaacaggatcacatatggggcatgtcccagatatgttaagcaaaacactctgaaattggcaacagggatgcggaatgtgccagagaaacaaactagaggcatattcggtgcaatcgcgggcttcatagaaaatggttgggagggaatgatggacggttggtacggtttcaggcatcagaattctgagggcacagggcaagcagcagatcttaaaagcactcaagcagcaatcaaccaaatcaacgggaaactgaataggttaatcgagaaaacgaacgagaaattccatcaaattgaaaaagaattctcagaagtagaagggagaattcaggacctcgagaaatatgtcgaggacactaaaatagatctctggtcgtacaatgcggagcttcttgttgccctggagaaccaacatacaattgatctaactgactcagaaatgaacaaactgtttgaaagaacaaagaagcaactgagggaaaatgctgaggatatgggcaatggttgtttcaaaatataccacaaatgtgacaatgcctgcatagggtcaatcagaaatggaacttatgaccatgatgtatacagagacgaagcattgaacaaccggttccagatcaaaggtgttgagctgaagtcaggatacaaagattggatcctatggatttcctttgccacatcatgttttttactttgtattgttttactggggttcatcatgtgggcctgccaaaaaggcaacattaggtgcaacatttgcatttga

SEQ ID NO: 31662 - RNA, 1701 nt, synthetic construct; identical to SEQ ID NO: 31024
  misc_feature 1..1701: note = hemagglutinin__InfluenzaA__ABG88652
  source 1..1701: mol_type = other RNA

SEQ ID NO: 31663 - RNA, 1701 nt, synthetic construct
  misc_feature 1..1701: note = hemagglutinin__InfluenzaA__ABG88663
  source 1..1701: mol_type = other RNA
atgaagactatcattgctttgagctacattctatgtctggttttcgctcaaaaacttcccggaaatgacaacagcacggcaacgctgtgccttgggcaccatgcagtaccaaacggaacgatagtgaaaacaatcacaaatgaccaaattgaagttactaatgctactgagctggttcagagttcctcaacaggtggaatatgcgacagtcctcatcagatccttgatggagaaaactgcacattaatagatgctctattgggagaccctcagtgtgatggcttccaaaataagaaatgggacctttttgttgaacgcagcaaagcctacagcaactgttacccttatgatgtgccggatcatgcctcccttaggtcactagttgcctcatccggcacactggagtttaacaatgaaagcttcgattggactggagtcactcagaatggaacaagctctgcttgcaaaaggagatctaataaaagtttctttagtagattgaattggttgacccacttaaaatacaaatacccagcattgaacgtgactatgccaaacaatgaaaaatttgacaaattgtacatttggggggttcaccacccgggtacggacagtgaccaaatcagcctatatgctcaagcatcaggaagaatcacagtctctaccaaaagaagccaacaaactgtaatcccgaatatcggatctagacccagggtaagggatgtctccagccgaataagcatctattggacaatagtaaaaccgggagacatacttttgattaacagcacagggaatctaattgctcctcggggttacttcaaaatacgaagtgggaaaagctcaataatgagatcagatgcacccattggcaaatgcaattctgaatgcatcactccaaatggaagcattcccaatgacaaaccatttcaaaatgtaaacaggatcacatatggggcctgtcccagatatgttaagcaaaacactctgaaattggcaacagggatgcgaaatgtaccagagaaacaaactagaggcatatttggcgcaatcgcgggtttcatagaaaatggttgggagggaatggtggacggttggtacggtttcaggcatcaaaattctgagggcacaggacaagcagcagatctcaaaagcactcaagcagcaatcaaccaaatcaatgggaaactgaataggttaatcgggaaaacaaacgagaaattccatcagattgaaaaagaattctcagaagtagaagggagaattcaggacctcgagaaatatgttgaggacactaaaatagatctctggtcatacaacgcggagcttcttgttgccctggagaaccaacatacaattgatctaactgactcagaaatgaacaaactgtttgaaagaacaaagaagcaactgagggaaaatgctgaggatatgggcaatggttgtttcaaaatataccacaaatgtgacaatgcctgcatagggtcaatcagaaatggaacttatgaccatgatgtgtacagagatgaagcattaaacaaccggttccagatcaaaggtgttgagctgaagtcaggatataaagattggatcctatggatttcctttgccatatcatgttttttgctttgtgttgctttgttggggttcatcatgtgggcctgccaaaaaggcaacattaggtgcaacatttgcatttga

SEQ ID NO: 31664 - RNA, 1701 nt, synthetic construct; identical to SEQ ID NO: 31517
  misc_feature 1..1701: note = hemagglutinin__InfluenzaA__ABG88674
  source 1..1701: mol_type = other RNA

SEQ ID NO: 31665 - RNA, 1701 nt, synthetic construct; identical to SEQ ID NO: 31024
  misc_feature 1..1701: note = hemagglutinin__InfluenzaA__ABG88685
  source 1..1701: mol_type = other RNA

SEQ ID NO: 31666 - RNA, 1701 nt, synthetic construct
  misc_feature 1..1701: note = hemagglutinin__InfluenzaA__ABG88696
  source 1..1701: mol_type = other RNA
atgaagactatcattgctttgagctacattctatgtctggttttcgctcaaaaacttcccggaaatgacaacagcacggcaacgctgtgccttgggcaccatgcagtaccaaacggaacgatagtgaaaacaatcacaaatgaccaaattgaagttactaatgctactgagctggttcagagttcctcaacaggtggaatatgcgacagtcctcatcagatccttgatggagaaaactgcacactaatagatgctctattgggagaccctcagtgtgatggcttccaaaataagaaatgggacctttttgttgaacgcagcaaagcctacagcaactgttacccttatgatgtgccggatcatgcctcccttaggtcactagttgcctcatccggcacactggagtttaacaatgaaagcttcgattggactggagtcactcagaatggaacaagctctgcttgcaaaaggagatctaataaaagtttctttagtagattgaattggttgacccacttaaaatacaagtacccagcattgaacgtgactatgccaaacaatgaaaaatttgacaaattgtacatttggggggttcaccacccgggtacggacagtgaccaaatcagcctatatgctcaagcatcaggaagaatcacagtctctaccaaaagaagccaacaaactgtaatcccgaatatcggatctagacccagggtaagggatgtctccagccgaataagcatctattggacaatagtaaaaccgggagacatacttttgattaacagcacagggaatctaattgctcctcggggttacttcaaaatacgaagtgggaaaagctcaataatgagatcagatgcacccattggcaaatgcaattctgaatgcatcactccaaatggaagcattcccaatgacaaaccatttcaaaatgtaaacaggatcacatatggggcctgccccagatatgttaagcaaaacactctgaagttggcaacagggatgcgaaatgtaccagagaaacaaactagaggcatatttggcgcaatcgcgggtttcatagaaaatggttgggagggaatggtggacggttggtacggtttcaggcatcaaaattctgagggcacaggacaagcagcagatctcaaaagcactcaagcagcaatcaaccaaatcaatgggaaactgaataggttaatcgggaaaacaaacgagaaattccatcagattgaaaaagaattctcagaagtagaagggagaattcaggacctcgagaaatatgttgaggacactaaaatagatctctggtcatacaacgcggagcttcttgttgccctggagaaccaacatacaattgatctaactgactcagaaatgaacaaactgtttgaaagaacaaagaagcaactgagggaaaatgctgaggatatgggcaatggttgtttcaaaatataccacaaatgtgacaatgcctgcatagggtcaatcagaaatggaacttatgaccatgatgtgtacagagatgaagcattaaacaaccggttccagatcaaaggtgttgagctgaagtcaggatataaagattggatcctatggatttcctttgccatatcatgttttttgctttgtgttgctttgttggggttcatcatgtgggcctgccaaaaaggcaacattaggtgcaacatttgcatttga

SEQ ID NO: 31667 - RNA, 1701 nt, synthetic construct; identical to SEQ ID NO: 30826
  misc_feature 1..1701: note = hemagglutinin__InfluenzaA__ABG88707
  source 1..1701: mol_type = other RNA

SEQ ID NO: 31668 - RNA, 1701 nt, synthetic construct; identical to SEQ ID NO: 31622
  misc_feature 1..1701: note = hemagglutinin__InfluenzaA__ABG88718
  source 1..1701: mol_type = other RNA

SEQ ID NO: 31669 - RNA, 1701 nt, synthetic construct
  misc_feature 1..1701: note = hemagglutinin__InfluenzaA__ABG88729
  source 1..1701: mol_type = other RNA
atgaagactatcattgctttgagctacattttatgtctggttttcgctcaaaaacttcccggaaatgacaacagcacagcaacgctgtgcctgggacatcatgcagtgccaaacggaacactagtgaaaacaatcacgaatgatcaaattgaagtgactaatgctactgagctggttcagagttcctcaacaggtagaatatgcgacagtcctcaccgaatccttgatgggaaaaactgcacactgatagatgctctattgggagaccctcattgtgatggcttccaaaataaggaatgggacctttttgttgaacgcagcaaagcttacagcaactgttacccttatgatgtgccggattatgcctcccttaggtcactagttgcctcatcaggcaccctggagtttatcaatgaagacttcaattggactggagtcgctcaggatgggggaagctatgcttgcaaaaggggatctgttaacagtttctttagtagattgaattggttgcacaaattagaatacaaatatccagcgctgaacgtgactatgccaaacagtggcaaatttgacaaattgtacatttggggggttcaccacccgagcacggacagtgaccaaaccagcctatatgttcgagcatcagggagagtcacagtctctaccaaaagaagccaacaaactgtaaccccgaatatcgggtctagaccctgggtaaggggtctgtccagtagaataagcatctattggacaatagtaaaaccgggagacatacttttgattaatagcacagggaatctaattgctcctcggggttacttcaaaatacgaaatgggaaaagctcaataatgaggtcagatgcacccattggcaactgcagttctgaatgcatcactccaaatggaagcattcccaatgacaaaccttttcaaaatgtaaacaggatcacatatggggcctgccccagatatgttaagcaaaacactctgaaattggcaacagggatgcggaatgtaccagagaaacaaactagaggcatattcggcgcaatcgcaggtttcatagaaaatggttgggagggaatggtagacggttggtacggtttcaggcatcaaaattctgagggcacaggacaagcagcagatcttaaaagcactcaagcagcaatcgaccaaatcaacgggaaactgaataggttaatcgagaaaacgaacgagaaatttcatcaaatcgaaaaagaattctcagaagtagaagggagaattcaggacctcgagaaatatgttgaagacactaaaatagatctctggtcttacaacgcggagcttcttgttgccctggagaaccaacatacaattgatctaactgactcagaaatgaacaaactgtttgaaaaaacaaggaagcaactgagggaaaatgctgaggacatgggcaatggttgcttcaaaatataccacaaatgtgacaatgcctgcatagggtcaatcagaaatggaacttatgatcatgatgtatacagagacgaagcattaaacaaccggttccagatcaaaggtgttgagctgaagtcaggatacaaagattggatcctatggatttcctttgccatatcatgctttttgctttgtgttgttttgctggggttcatcatgtgggcctgccaaaaaggcaacattaggtgcaacatttgcatttga

SEQ ID NO: 31670 - RNA, 1701 nt, synthetic construct
  misc_feature 1..1701: note = hemagglutinin__InfluenzaA__ABG88740
  source 1..1701: mol_type = other RNA
atgaagactatcattgctttgagctacattttatgtctggttttcgctcaaaaacttcccggaaatgacaacagcacagcaacgctgtgcctgggacaccatgcagtgccaaacggaacgctagtgaaaacaatcacgaatgatcaaattgaagtgactaatgctactgagctggttcagagttcctcaacaggtagaatatgcgacagtcctcaccgaatccttgatggaaaaaactgcacactgatagatgctctattgggagaccctcattgtgatggcttccaaaataaggaatgggacctttttgttgaacgcagcaaagcttacagcaactgttacccttatgatgtgccggattatgcctcccttaggtcactagttgcctcatcaggcaccctggagtttatcaatgaagacttcaattggactggagtcgctcaggatgggaaaagctatgcttgcaaaaggggatctgttaacagtttctttagtagattgaattggttgcacaaattagaatacaaatatccagcgctgaacgtgactatgccaaacaatggcaaatttgacaaattgtacatttggggggttcaccacccgagcacggacagtgaccaaaccagcctatatgttcgagcatcagggagagtcacagtctctaccaaaagaagccaacaaactgtaatcccgaatatcgggtctagaccctgggtaaggggtctgtccagtagaataagcatctattggacaatagtaaaaccgggagacatacttttgattaatagcacagggaatctaattgctcctcggggttacttcaaaatacgaaatgggaaaagctcaataatgaggtcagatgcacccattggcaactgcagttccgaatgcatcactccaaatggaagcattcccaatgacaaaccttttcaaaatgtaaacaggatcacatatggggcctgccccagatatattaagcaaaacactctgaaattggcaacagggatgcggaatgtaccagagaaacaaactagaggcatattcggcgcaatcgcaggtttcatagaaaatggttgggagggaatggtagacggttggtacggtttcaggcatcaaaattctgagggcacaggacaagcagcagatcttaaaagcactcaagcagcaatcgaccaaatcaacgggaaactgaataggttaatcgagaaaacgaacgagaaattccatcaaatcgaaaaagaattctcagaagtagaagggagaattcaggacctcgagaaatatgttgaagacactaaaatagatctctggtcttacaacgcggagcttcttgttgccctggagaaccaacatacaattgatctaactgactcagaaatgaacaaactgtttgaaagaacaaggaagcaactgagggaaaatgctgaggacatgggcaatggttgcttcaaaatataccacaaatgtgacaatgcctgcatagggtcaatcagaaatggaacttatgaccatgatgtatacagagacgaagcattaaacaaccggttccagatcaaaggtgttgagctgaagtcaggatacaaagattggatcctatggatttcctttgccatatcatgctttttgctttgtgttgttttgctggggttcatcatgtgggcctgccaaaaaggcaacattaggtgcaacatttgcatttga

SEQ ID NO: 31671 - RNA, 1701 nt, synthetic construct; identical to SEQ ID NO: 31559
  misc_feature 1..1701: note = hemagglutinin__InfluenzaA__ABG88751
  source 1..1701: mol_type = other RNA

SEQ ID NO: 31672 - RNA, 1701 nt, synthetic construct
  misc_feature 1..1701: note = hemagglutinin__InfluenzaA__ABG88762
  source 1..1701: mol_type = other RNA
atgaagactatcattgctttgagctacattttatgtctggttttcactcaaaaacttcccggaaatgacaacagcacagcaacgctgtgcctgggacatcatgcagtgccaaacggaacgctagtgaaaacaatcacgaatgatcaaattgaagtgactaatgctactgagctggttcagagttcctcaacaggtagaatatgcgacagtcctcaccgaatccttgatggaaaaaactgcacactgatagatgctctattgggagaccctcattgtgatggcttccaaaataaggaatgggacctttttgttgaacgcagcaaagcttacagcaactgttacccttatgatgtgccggattatgcctcccttaggtcactagttgcctcatcaggcaccctggagtttatcaatgaagacttcaattggactggagtcgctcaggatgggggaagctatgcttgcaaaaggggatctgttaacagtttctttagtagattgaattggttgcacaaattagaatacaaatatccagcgctgaacgtgactatgccaaacaatggcaaatttgacaaattgtacatttggggggttcaccacccgagcacggacagtgaccaaaccagcctatatgttcgagcatcagggagagtcacagtctctaccaaaagaagccaacaaactgtaatcccgaatatcgggtctagaccctgggtaaggggtctgtccagtagaataagcatctattggacaatagtaaaaccgggagacatacttttgattaatagcacagggaatctaattgctcctcggggttacttcaaaatacgaaatgggaaaagctcaataatgagatcagatgcatccattggcaactgcagttctgaatgcatcactccaaatggaagcattcccaatgacaaaccttttcaaaatgtaaacaggatcacatatggggcctgccccagatatgttaagcaaaacactctgaaattggcaacagggatgcggaatgtaccagagaaacaaactagaggcatattcggcgcaatcgcaggtttcatagaaaatggttgggagggaatggtagacggttggtacggtttcaggcatcagaattctgagggcacaggacaagcagcagatcttaaaagcactcaagcagcaatcgaccaaatcaacgggaaactgaataggttaatcgagaaaacgaacgagaaattccatcaaatcgaaaaagaagtctcagaagtagaagggagaattcaggacctcgagaaatatgttgaagacactaaaatagatctctggtcttacaacgcggagcttcttgttgccctggagaaccaacatacaattgatctaactgactcagaaatgaacaaactgtttgaaagaacaaggaagcaactgagggaaaatgctgaggacatgggcaatggttgcttcaaaatataccacaaatgtgacaatgcctgcatagggtcaatcagaaatggaacttatgaccatgatgtatacagagacgaagcattaaacaaccggttccagatcaaaagtgttgagctgaagtcaggatacaaagattggatcctatggatttcctttgccatatcatgctttttgctttgtgttgttttgctggggttcatcatgtgggcctgccaaaaaggcaacattaggtgcaacatttgcatttga

SEQ ID NO: 31673 - RNA, 1701 nt, synthetic construct
  misc_feature 1..1701: note = hemagglutinin__InfluenzaA__ABG88773
  source 1..1701: mol_type = other RNA
atgaagactatcattgctttgagctacattttatgtctggttttcgctcaaaaacttcccggaaatgacaacagcacagcaacgctgtgcctgggacaccatgcagtgccaaacggaacgctagtgaaaacaatcacgaatgatcaaattgaagtgactaatgctactgagctggttcagagttcctcagcaggtagaatatgcgacagtcctcaccgaatccttgatggaaaaaactgcacactgatagatgctctattgggagaccctcattgtgatggcttccaaaataaggaatgggacctttttgttgaacgcagcaaagcttacagcaactgttacccttatgatgtgccggattatgcctcccttaggtcactagttgcctcatcaggcaccctggagtttatcaatgaagacttcaattggactggagtcgctcaggatgggaaaagctatgcttgcaaaaggggatctgttaacagtttctttagtagattgaattggttgcacaaattagaatacaaatatccagcgctgaacgtgactatgccaaacaatggcaaatttgacaaattgtacatttggggggttcaccacccgagcacggacagtgaccaaaccagcctatatgttcgagcatcagggagagtcacagtctctaccaaaagaagccaacaaactgtaatcccgaatatcgggtctagaccctgggtaaggggtctgtccagtagaataagcatctattggacaatagtaaaaccgggagacatacttttgattaatagcacagggaatctaattgctcctcggggttacttcaaaatacgaaatgggaaaagctcaataatgaggtcagatgcacccattggcaactgcagttctgaatgcatcactccaaatggaagcattcccaatgacaaaccttttcaaaatgtaaacaggatcacatatggggcctgccccagatatgttaagcaaaacactctgaaattggcaacagggatgcggaatgtaccagagaaacaaactagaggcatattcggcgcaatcgcaggtttcatagaaaatggttgggagggaatggtagacggttggtacggtttcaggcatcaaaattctgagggcacaggacaagcagcagatcttaaaagcactcaagcagcaaccgaccaaatcaacgggaaactgaataggttaatcgagaaaacgaacgagaaattccatcaaatcgaaaaagaattctcagaagtagaagggagaattcaggacctcgagaaatatgttgaagacactaaaatagatctctggtcttacaacgcggagcttcttgttgccctggagaaccaacatacaattgatctaactgactcagaaatgaacaaactgtttgaaagaacaaggaagcaactgagggaaaatgctgaggacatgggcaatggttgcttcaaaatataccacaaatgtgacaatgcctgcatagggtcaatcagaaatggaacttatgaccatgatgtatacagagacgaagcattaaacaaccggttccagatcaaaggtgttgagctgaagtcaggatacaaagattggatcctatggatttcctttgccatatcatgctttttgctttgtgttgttttgctggggttcatcatgtgggcctgccaaaaaggcaacattaggtgcaacatttgcatttga

SEQ ID NO: 31674 - RNA, 1701 nt, synthetic construct
  misc_feature 1..1701: note = hemagglutinin__InfluenzaA__ABG88784
  source 1..1701: mol_type = other RNA
atgaagactatcattgctttgagctacattttatgtctggttttcgctcaaaaacttcccggaaatgacaacagcacagcaacgctgtgcctgggacaccatgcagtgccaaacggaacgctagtgaaaacaatcacgaatgatcaaattgaagtgactaatgctactgagctggttcagagttcctcaacaggtagaatatgcgacagtcctcaccgcatccttgatggaaaaaactgcacactgatagatgctctattgggagaccctcattgtgatggcttccaaaataaggaatgggacctttttgttgaacgcagcaaagcttacagcaactgttacccttatgatgtgccggattatgcctcccttaggtcactagttgcctcatcaggcaccctagagtttatcaatgaagacttcaattggactggagtagctcaggatgggaaaagctatgcttgcaaaaggggatctgttaacagtttctttagtagattgaattggttgcacaaattagaatacaaatatccagcgctgaacgtgactatgccaaacaatggcaaatttgacaaattgtacatttggggggttcaccacccgagcacggacagtgaccaaaccagcctatatgttcgagcatcagggagagtcacagtctctaccaaaagaagccaacaaactgtaatcccgaatatcgggtctagaccctgggtaaggggtctgtccagtagaataagcatctattggacaatagtaaaaccgggagacatacttttgattaatagcacagggaatctaattgctcctcggggttacttcaaaatacgaaatgggaaaagctcaataatgaggtcagatgcacccattggcaactgcagttctgaatgcatcactccaaatggaagcattcccaatgacaaaccttttcaaaatgtaaacaggatcacatatggggcctgccccagatatgttaagcaaaacactctgaaattggcaacagggatgcggaatgtaccagagaaacaaactagaggcatattcggcgcaatcgcaggtttcatagaaaatggttgggagggaatggtagacggttggtacggtttcaggcatcaaaattctgagggcacaggacaagcagcagatcttaaaagcactcaagcagcaatcgaccaaatcaacgggaaactgaataggttaatcaagaaaacgaacgagaaattccatcaaatcgaaaaagaattctcagaagtagaagggagaattcaggacctcgagaaatatgttgaagacactaaaatagatctctggtcttacaacgcggagcttcttgttgccctggagaaccaacatacaattgatctaactgactcagaaatgaacaaactgtttgaaagaacaaggaaacaactgagggaaaatgctgaggacatgggcaatggttgcttcaaaatataccacaaatgtgacaatgcctgcatagggtcaatcagaaatggaacttatgaccatgatgtatacagagacgaagcattaaacaaccggttccagatcaaaggtgttgagctgaagtcaggatacaaagattggatcctatggatttcctttgccatatcatgctttttgctttgtgttgttttgctggggttcatcatgtgggcctgccaaaaaggcaacattaggtgcaacatttgcatttga

SEQ ID NO: 31675 - RNA, 1701 nt, synthetic construct
  misc_feature 1..1701: note = hemagglutinin__InfluenzaA__ABG88806
  source 1..1701: mol_type = other RNA
atgaagactatcattgctttgagctacattttatgcctggttttcgctcaaaaacttcccggaaatgacaacagcacggcaacgctgtgcctggggcatcatgcggtgccaaacggaacgctagtgaaaacaatcacgaatgaccaaattgaagtaactaatgctactgagctggttcagagttcctcaacaggtagaatatgcgacagtcctcatcaaatccttgatggagaaaactgcacactaatagatgctctattgggagaccctcattgtgatggcttccaaaataaggaatgggacctttttgttgaacgcagcaaagcctacagcaactgttacccttatgatgtgccggattatgtctcccttaggtcactagttgcctcatcaggcacgctggagtttaacaatgaaagcttcaattggactggagtcgctcagaatggaacaagctctgcttgcaaaaggagatctgataaaagtttctttagtagattgaattggttgcaccaattaaaatacaaatatccagcactgaacgtgactgtgccaaacaatgaaaaatttgacaaattgtacatttggggggttcaccacccgggtacagacagtgaccaaatcagcctatatgctcaagcatcagggagagtcacagtctctaccaaaagaagccaacaaactgtaatcccgaatatcggatctagaccctgggtaaggggtgtctccagcagaataagcatctattggacaatagtaaaaccgggagacatacttttgattaacagcacagggaatctaattgctccacggggttacttcaaaatacgaagtgggaaaagctcaataatgaggtcagatgcacccattggcaaatgcaattctgaatgcatcactccaaatggaagcattcccaatgacaaaccatttcaaaatgtaaacaggatcacatatggggcctgtcccagatatgttaagcaaaacactctgaaattggcaacagggatgcggaatgtgccagagaaacaaactagaggcatattcggtgcaatcgcgggcttcatagaaaatggttgggagggaatgatggacggttggtacggtttcaggcatcaaaattctgagggcacagggcaagcagcagatcttaaaagcactcaagcagcaatcaaccaaattaacgggaaactgaataggttaatcgagaaaacgaacgagaaattccatcaaattgaaaaagaattctcagaagtagaagggagaattcaggacctcgagaaatatgttgaggacactaaaatagatctctggtcgtacaatgcggagcttcttgttgccctggagaaccaacatacaattgatctaactgactcagaaatgaacaaactgtttgaaagaacaaagaagcaactgagggaaaatgctgaggatatgggcaatggttgtttcaaaatataccacaaatgtgacaatgcctgcatagggtcaatcagaaatggaacttatgaccatgatgtatacagagacgaagcattgaacaaccggttccagatcaaaggtgttgagctgaagtcaggatacaaagattggatcctatggatttcctttgccatatcatgttttttgctttgtattgttttgctggggttcatcatgtgggcctgccaaaaaggcaacattaggtgcaacatttgcatttga

SEQ ID NO: 31676 - RNA, 1704 nt, synthetic construct
  misc_feature 1..1704: note = hemagglutinin__InfluenzaA__ABI16504
  source 1..1704: mol_type = other RNA
atggagaaaatagtgcttcttcttgcaatagtcagccttgttaaaagtgatcagatttgcattggttaccatgcaaacaactcgacagagcaggttgacacaataatggaaaagaacgttactgttacacatgcccaagacatactggaaaagacacacaacgggaagctctgcgatctagatggagtgaagcctctgattttaagagattgtagtgtagctggatggctcctcggaaacccaatgtgtgacgaattcatcaatgtgccggaatggtcttacatagtggagaaggccaacccagccaatgacctctgttacccagggaatttcaacgactatgaagaactgaaacacctattgagcagaataaaccattttgagaaaattcagatcatctccaaaagttcttggtccgatcatgaagcctcatcaggggtgagctcagcatgtccataccagggaacgccctcctttttcagaaatgtggtatggcttatcaaaaagaacaatacatacccaacaataaagagaagctacaataataccaaccaggaagatcttttgatactgtggggaattcatcattctaataatgcggcagagcagacaaagctctatcaaaacccaaccacctatatttccgttgggacatcaacactaaacctgagattggtaccaaaaatagctactagatccaaagtaaacgggcaaagtggaaggatggatttcttctggacaattttaaaaccgaatgatgcaatcaacttcgagagtaatggaaatttcattgctccagaatatgcatacaaaattgtcaagaaaggggactcagcaattatgaaaagtgaagtggaatatggtaactgcaacaccaagtgtcaaactccaataggggcgataaactctagtatgccattccacaacatacaccctctcaccatcggggaatgccccaaatatgtgaaatcaaacaaattagtccttgcgactgggctcagaaatagtcctctaagagagagaagaagaaaaagaggactatttggagctatagcaggttttatagagggaggatggcagggaatggtagatggttggtatgggtaccaccatagcaatgagcaggggagtgggtacgctgcagacaaagaatccactcaaaaggcaatagatggagtcaccaataaggtcaactcgatcattgacaaaatgaacactcagtttgaggccgttggaagggaatttaataacttagaaaggagaatagagaatttaaacaagaaaatggaagacggattcctagatgtctggacttataatgctgaacttctggttctcatggaaaatgagagaactctagacttccatgactcaaatgtcaagaacctttacgacaaggtccgactacagcttagggataatgcaaaggaactgggtaacggttgtttcgagttctatcacaaatgtgataatgaatgtatggaaagtgtaagaaacggaacgtatgactacccgcagtattcagaagaagcaagattaaaaagagaggaaataagtggagtaaaattggaatcaataggaacttaccaaatactgtcaatttattcaacagttgcgagttctctagcactggcaatcatggtggctggtctatctttatggatgtgctccaatgggtcgttacaatgcagaatttgcatttaa

SEQ ID NO: 31677 - RNA, 1701 nt, synthetic construct; identical to SEQ ID NO: 31161
  misc_feature 1..1701: note = hemagglutinin__InfluenzaA__ABI20793
  source 1..1701: mol_type = other RNA

SEQ ID NO: 31678 - RNA, 1701 nt, synthetic construct
  misc_feature 1..1701: note = hemagglutinin__InfluenzaA__ABI20837
  source 1..1701: mol_type = other RNA
atgaaagcaaaactactagtcctgttgtgtgcatttacagctacatatgcagacacaatatgtataggctaccatgcgaacaactcaactgacactgttgacacagtacttgagaagaacgtgacagtgacacactctgtcaacctacttgaggacagtcacaacggaaaactatgccgactaaaaggaacagccccactacaattgggtaattgcagcgttgccggatggatcttaggaaacccagaatgcgaatcactgttttctaaggaatcatggtcctacattgcagaaacaccaaaccctgagaatggaacatgttacccagggtatttcgccgactatgaggaactgagggagcaattgagctcagtatcatcattcgagagattcgaaatattccccaaggaaagctcatggcccaaccacaccgtaaccaaaggagtaacggcatcatgctcccataatgggaaaagcagtttttacaaaaatttgctatggctgacagagaagaatggcttgtacccaaatctgagcaagtcctatgtaaacaacaaggagaaagaagtccttgtactatggggtgttcatcacccgtctaacataggggaccaaagggccatctatcatacagaaaatgcttatgtctctgtagtgtcttcacattatagcagaagattcaccccagaaatagcaaaaagacccaaagtaagagaccaagaagggagaattaactactactggactctgctggaacccggggacacaataatatttgaggcaaatggaaatctaatagcgccatggtacgctttcgcactgagtagaggctttgggtcaggaatcatcacctcaaacgcatcaatgggtgaatgtgacgctaagtgtcaaacaccccaaggagctataaacagtagtcttcctttccagaatgtacacccagtcacaataggagagtgtccaaagtatgtcaggagtacaaaattaaggatggttacaggactaaggaacatcccatccattcaatccagaggtttgtttggagccattgccggtttcattgaaggagggtggactggaatgatagatggatggtatggttatcatcatcagaatgaacaaggatccggctatgctgcggaccaaaaaagcacacaaaatgccattaatgggattacaaacaaagtgaattctgtaatcgagaaaatgaacactcaattcacagctgtaggcaaagaattcaacaaattagaaagaaggatggaaaacttaaataagaaagttgatgatggatttctggacatttggacatataatgcagaattgttggttctcctggaaaatgaaaggactttggattttcatgactcaaatgtgaagaatctgtatgagaaagtaaaaacccaattgaagaataatgccaaagaaatagggaacgggtgttttgaattctatcacaagtgtaacaatgaatgcatggaaagtgtgaaaaatggaacttatgactatccaaaatactccgaagaatcaaagttaaacagggaaaaaattgatggagtgaaattggaatcaatgggagtctatcagattctggcgatctactcaactgtcgccagttcactggtgcttttggtctccctgggggcaatcagtttctggatgtgttctaatgggtctttgcagtgtagaatatgcatctga

SEQ ID NO: 31679 - RNA, 1701 nt, synthetic construct
  misc_feature 1..1701: note = hemagglutinin__InfluenzaA__ABI20848
  source 1..1701: mol_type = other RNA
atgaaagcaaaactactagtcctgttgtgtgcatttacagctacatatgcagacacaatatgtataggctaccatgcgaacaactcaaccgacactgttgacacagtacttgagaagaacgtgacagtgacacactctgtcaacctacttgaggacagtcacaacggaaaactatgccgactaaaaggaacagccccactacaattgggtaattgcagcgttgccggatggatcttaggaaacccagaatgcgaatcactgttttctaaggaatcatggtcctacattgcagaaacaccaaaccctgagaatggaacatgttacccagggtatttcgccgactatgaggaactgaaggagcaattgagctcagtatcatcattcgagagattcgaaatattccccaaggaaagctcatggcccaaccacacagtaaccaaaggagtgacggcatcatgctcccataatgggaaaagcagtttttacaaaaatttgctatggctgacggaaaagaatggcttgtacccaaatctgagcaagtcctatgtaaacaacaaggagaaagaagtccttgtactatggggtgttcatcacccgtctaacataggggaccaaagggccatctatcatacagaaaatgcccatgtctctgtggtgtcttcgcattatagcagaagattcaccccagaaatagcaaaaagacccaaagtaagagatcaagaagggagaattaactactactggactctgctggaacccggggacacaataatatttgaggcaaatggaaatctaatagcgccatggtacgctttcgcattgagtagaggctttgggtcaggaatcatcacctcaaacgcatcaatgggtgaatgtgacgctaagtgtcaaacaccccaaggagctataaacagtagtcttcctttccagaatgtacacccagtcacaataggagagtgtcccaagtatgtcaggagtacaaaattaaggatggttacaggactaagaaacatcccatccattcaatctagaggtttgtttggagccattgccggtttcattgaaggggggtggactggaatgatagatggatggtacggttatcatcatcagaatgaacaaggatctggatatgctgcagacaaaaaaagcacacaaaatgccattgatgggattacaaacaaggtgaattctgtaatcgagaaaatgaacactcaattcacagctgtaggcaaagaattcaacaaattagagagaaggatggaaaacttaaataagaaagttgatgatggatttctggacatttggacatataatgcagagttgttggttctcctggaaaatgaaaggactttggattttcatgactcaaatgtgaagaatctgtatgagaaagtaaaaaaccaattgaagaataatgccaaagaaatcgggaacgggtgttttgaattctatcacaagtgtaacaatgaatgcatggaaagtgtgaaaaatggaacttatgactatccaaaatattccgaagaatcaaagttaaaaagggaaaaaattgatggagtgaaattggaatcaatgggagtctatcagattctggcgatctactcaactgtcgccagttcactggtgcttttggtctccctgggggcaatcagtttttggatgtgttctaatgggtctttgcaatgtagaatatgcatctga

SEQ ID NO: 31680 - RNA, 1701 nt, synthetic construct; identical to SEQ ID NO: 31425
  misc_feature 1..1701: note = hemagglutinin__InfluenzaA__ABI20859
  source 1..1701: mol_type = other RNA

SEQ ID NO: 31681 - RNA, 1701 nt, synthetic construct
  misc_feature 1..1701: note = hemagglutinin__InfluenzaA__ABI20870
  source 1..1701: mol_type = other RNA
atgaaagcaaaactactagtcctgttatgtgcatttacagctacatatgcagacacaatatgtataggctaccatgcgaacaactcaaccgacactgttgacacagtacttgagaagaacgtgacagtgacacactctgtcaacctacttgaggacagtcacaacggaaaactatgtcggctaaaaggaatagccccactacaattgggtaattgcagcgttgccggatggatcttaggaaatccagaatgcgaatcactgttttctaaggaatcatggtcctacattgcagaaacaccaaaccctgagaatggaacatgttacccagggaatttcgcagactatgaggaactgagagagcaattgagttcagtatcatcattcgagagattcgaaatattccccaaagaaagctcatggcccaaccacaccgtaactaaaggagtaacggtatcatgctcccataatgggaaaagcagtttttacagaaatttgctatggctgacagagaagaatggcttgtacccaaatctgagcaagtcctatgtaaacaacaaagagaaagaagtccttgtactatggggtgttcatcacccgtctaacatgagggaccaaagggccatctatcatacagaaaatgcttatgtttctgtagtgtcttcacattatagcagaagattcaccccagaaatagcaaaaagacccaaagtaagagatcaagaaggaagaattaactactactggactctgctggaacccggggacacaataatatttgaggcaaatggaaatctaatagcgccaaggtatgctttcgcactgagtagaggctttgggtcaggaatcatcacctcaaacgcatcaatggatgaatgtgacgcgaagtgtcaaacaccccaaggagctataaacagtagtcttcctttccagaacgtacacccagtcacaataggagagtgtccaaagtatgtcaggagtacaaaattaaggatggttacaggactaaggaacatcccatccattcaatccagaggtttgtttggagccattgccggtttcattgaaggggggtggactggaatgatagatggatggtatggttatcatcatcagaatgaacaaggatctggctatgctgcggaccaaaagagcacacaaaatgccattaatgggattacaaacaaggtgaattctgtaatcgagaaaatgaacactcaattcacagctgtgggcaaagaattcaacaaattagaaagaaggatggaaaacttaaataaaaaagttgatgatggatttctggacatttggacatataatgcagaattgttggttctactggaaaatgaaaggactttggattttcatgactcaaatgtgaagaatctgtatgagaaagtaaaaagccaattgaagaataatgccaaagaaatagggaacgggtgttttgaattctatcacaagtgtaacaatgaatgcatggaaagtgtgaaaaatggaacttatgactatccaaaatattccgaagaatcaaagttaaacagggaaaagattgatggagtgaaattggaatcaatgggagtctatcagattctggcgatctactcaactgtcgccagttcactggtgcttttggtctccctgggggcaatcagcttctggatgtgttctaatgggtctttgcagtgtagaatatgcatctga

SEQ ID NO: 31682 - RNA, 1701 nt, synthetic construct
  misc_feature 1..1701: note = hemagglutinin__InfluenzaA__ABI20881
  source 1..1701: mol_type = other RNA
atgaagactatcattgctttgagctacattttatgtctggttttcgctcaaaaacttcccggaaatgacaacagcacagcaacgctgtgcctgggacaccatgcagtgccaaacggaacgctagtgaaaacaatcacgaatgatcaaattgaagtgactaatgctactgagctggttcagagttcctcaacaggtagaatatgcgacagtcctcaccgaatccttgatggaaaaaactgcacactgatagatgctctattgggagaccctcattgtgatggcttccaaaataaggaatgggacctttttgttgaacgcagcaaagcttacagcaactgttacccttatgatgtgccggattatgcctcccttaggtcactagttgcctcatcaggcaccctggagtttaccaaggaaggcttcaattggactggagtcgctcaggatgggaaaagctatgcttgcaaaaggggatctgttaacagtttctttagtagattgaattggttgcacaaattagaatacaaatatcctgcactgaacgtgactatgccaaacaatgacaaatttgacaaattgtacatttggggggttcaccacccgagcacggacagtgaccaaaccagcctatatgttcaagcatcagggagagtcacagtctctaccaaaagaagccaacaaactgtaatcccgaatatcgggtctagaccctgggtaaggggtatctccagtagaataagcatctattggacaatagtaaaaccgggagacatacttttgattaacagcacagggaatttaattgctcctcggggttacttcaaaatacgaaatgggaaaagctccataatgaggtcagatgcacccattggcaactgcaattctgaatgcatcactccaaatggaagcattcccaatgacaaaccttttcaaaatgtaaacaggatcacatatggggcctgtcccagatatgttaagcaaaacactctgaagttggcaacagggatgcggaatgtaccagagaaacaaactagaggcatattcggcgcaatcgcaggtttcatagaaaatggttgggagggaatggtagacggttggtacggtttcaggcatcaaaattctgagggcacaggacaagcagcagatcttaaaagcactcaagcagcaatcgaccaaatcaacgggaaactgaataggttaatcgagaaaacgaacgagaaattccatcaaatcgaaaaagaattctcagaagtagaagggagaattcaggacctcgagaaatatgttgaagacactaaaatagatctctggtcttacaacgcggagcttcttgttgccctggagaaccaacatacaattgatctaactgactcagaaatgaacaaactgtttgaaagaacaaggaagcaactgagggaaaatgctgaggacatgggcaatggttgcttcaaaatataccacaaatgtgacaatgcctgcatagggtcaatcagaaatggaacttatgaccatgatgtatacagagacgaagcattaaacaaccggttccagatcaaaggtgttgagctgaagtcagggtacaaagattggatcctatggatttcctttgccatatcatgctttttgctttgtgttgttttgctggggttcatcatgtgggcctgccaaaaaggcaacattaggtgcaacatttgcatttga

SEQ ID NO: 31683 - RNA, 1701 nt, synthetic construct
  misc_feature 1..1701: note = hemagglutinin__InfluenzaA__ABI20892
  source 1..1701: mol_type = other RNA
atgaagactatcattgctttgagctacattttatgtctggttttcgctcaaaaacttcccggaaatgacaacagcacagcaacgctgtgcctgggacaccatgcagtgccaaacggaacgctagtgaaaacaatcacgaatgatcaaattgaagtgactaatgctactgagctggttcagagttcctcaacaggtagaatatgcgacagtcctcaccgaatccttgatggaaaaaactgcacactgatagatgctctattgggagaccctcattgtgatggcttccaaaataaggaatgggacctttttgttgaacgcagcaaagcttacagcaactgttacccttatgatgtgccggattatgcctcccttaggtcactagttgcctcatcaggcaccctggagtttaccaaggaaggcttcaattggactggagtcgctcaggatgggaaaagctatgcttgcaaaaggggatctgttaacagtttctttagtagattgaattggttgcacaaattagaatacaaatatccagcactgaacgtgactatgccaaacaatgacaaatttgacaaattgtacatttggggggttcaccacccgagcacggacagtgaccaaaccagcctatatgttcaagcatcagggagagtcacagtctctaccaaaagaagccaacaaactgtaatcccgaatatcgggtctagaccctgggtaaggggtatctccagtagaataagcatccattggacaatagtaaaaccgggagacatacttttgattaccagcacagggaatctaattgctcctcggggttacttcaaaatacgaaatgggaaaagctcaataatgaggtcagatgcacccattggcaactgcaattctgaatgcatcactccaaatggaagcattcccaatgacaaaccttttcaaaatgtaaacaggatcacatatggggcctgtcccagatatgttaagcaaaacactctgaagttggcaacagggatgcggaatgtaccagagaaacaaactagaggcatattcggcgcaatcgcaggtttcatagaaaatggttgggagggaatggtagacggttggtacggtttcaggcatcaaaattctgagggcacaggacaagcagcagatcttaaaagcactcaagcagcaatcgaccaaatcaacgggaagctgaataggttaatcgagaaaacgaacgaaaaattccatcaaatcgaaaaagaattctcagaagtagaagggagaattcaggacctcgagaaatatgttgaagacactaaaatagatctctggtcttacaacgcggagcttcttgttgccctggagaaccaacatacaattgatctaactgactcagaaatgaacaaactgtttgaaagaacaaggaagcaactgagggaaaatgctgaggacatgggcaatggttgcttcaaaatataccacaaatgtgacaatgcctgcatagggtcaatcagaaatggaacttatgaccatgatgtatacagagacgaagcattaaacaaccggttccagatcaaaggtgttgagctgaagtcaggatacaaagattggatcctatggatttcctttgccatatcatgctttttgctttgtgttgttttgctggggttcatcatgtgggcctgccaaaaaggcaacattaggtgcaacatttgcatttga

SEQ ID NO: 31684 - RNA, 1701 nt, synthetic construct
  misc_feature 1..1701: note = hemagglutinin__InfluenzaA__ABI20903
  source 1..1701: mol_type = other RNA
atgaagactatcattgctttgagctacattttatgtctggttttcgctcaaaaacttcccggaaatgacaacagcacagcaacgctgtgcctgggacaccatgcagtgccaaacggaacgctagtgaaaacaatcacgaatgatcaaattgaagtgactaatgctactgagctggttcagaattccccaacaggtagaatatgcgacagtcctcaccgaatccttgatggaaagaactgcacactgatagatgctctattgggagaccctcattgtgatggcttccaaaataaggaatgggacctttttgttgaacgcagcaaagcttacagcaactgttacccttatgatgtgccggattatgcctcccttaggtcactagttgcctcatcaggcaccctggagtttaccaacgaaaacttcaattggactggagtcgctcaggatgggaaaagctatgcttgcaaaaggggatctgttaacagtttctttagtagattgaattggttgcacaaattagaatacaaatatccagcgctgaacgtgactatgccaaacaatggcaaatttgacaaattgtacatttggggggttcaccacccgagcacggacagtgaccaaaccagcctatatgtccgagcatcagggaaagtcacagtctctaccaaaagaagccaacaaactgtaatcccggatatcgggtatagaccatgggtaaggggtctgtccagtagaataagcatctattggacaatagtaaaaccgggagacatacttttgattcatagcacagggaatctaattgctcctcggggttacttcaaaatacgaaatgggaaaagctcaataatgaggtcagatgcacccattggcaactgcagttctgaatgcatcactccaaatggaagcattcccaatgacaaaccttttcaaaatgtaaacaggatcacatatggggcctgccccagatatgttaagcaaaacactctgaaattggcaacagggatgcggaatgtaccagagaaacaaactagaggcatattcggcgcaatcgcaggtttcatagaaaatggttgggagggaatggtagacggttggtacggtttcaggcatcagaattctgagggcacaggacaagctgcagatcttaaaagcactcaagcagcaatcgaccaaatcaacgggaaactgaataggttagtcgagaaaacgaacgagaaattccatcaaatcgaaaaagaattctcagaagtagaagggagaattcaggacctcgagaaatatgttgaagacactaaaatagatctctggtcttacaatgcggagcttcttgttgctctggagaaccaacatacaattgatctaactgactcagaaatgaacaaactatttgaaagaacaaggaagcaactgagggaaaatgctgaggacatgggcaatggttgtttcaaaatataccacaaatgtgacaatgcctgcatagggtcaatcagaaatggaacttatgaccatgatgtatacagagacgaagcattaaacaaccggttccagatcaaaggtgttgagctgaagtcaggatacaaagattggatcctatggatttcctttgccatatcatgctttttgctttgtgttgttttgcttgggttcatcatgtgggcctgccaaaaaggcaacattaggtgcaacatttgcatttga

SEQ ID NO: 31685 - RNA, 1701 nt, synthetic construct
  misc_feature 1..1701: note = hemagglutinin__InfluenzaA__ABI20914
  source 1..1701: mol_type = other RNA
atgaagactatcattgctttgagctacattttatgtctggttttcgctcaaaaacttcccggaaatgacaacagcacagcaacgctgtgcctgggacaccatgcggtgccaaacggaacgctagtgaaaacaatcacgaatgatcaaattgaagtgactaatgctactgagctggttcagagttcctcaacaggtagaatatgcgacagtcctcaccgaatccttgatggaaaaaactgcacactgatagatgctctattgggagaccctcattgtgatggcttccaaaataaggaatgggacctttttgttgaacgcagcaaagcttacagcaactgttacccttatgatgtgccggattatgcctcccttaggtcactagttgcctcatcaggcaccctggagtttatcaatgaagacttcaattggactggagtcgctcaggatgggaaaagctatgcttgcaaaaggggatctgttaacagtttctttagtagattgaattggttgcacaaattagaatacaaatatccagcgctgaacgtgactatgccaaacaatggcaaatttgacaaattgtacatttggggggttcaccacccgagcacggacagtgaccaaaccagcctatatgttcgagcatcagggagagtcacagtctctaccaaaagaagccaacaaactgtaatcccgaatatcgggtttagaccctgggtaaggggtctgtccagtagaataagcatctattggacaatagtaaaaccgggagacatacttttgattaatagcacagggaatctaattgctcctcggggttacttcaaaatacggaatgggaaaagctcaataatgaggtcagatgcacccattggcaactgcagttctgaatgcatcactccaaatggaagcattcccaatgacaaaccttttcaaaatgtaaacaggatcacatatggggcctgccccagatatgtaaagcaaaacactctgaagttggcaacagggatgcggaatgtaccagagaaacaaactagaggcatattcggcgcaatcgcaggtttcatagaaaatggttgggagggaatggtagacggttggtacggtttcaggcatcaaaattctgagggcacaggacaagcagcagatcttaaaagcactcaagcagcaatcgaccaaatcaacgggaaactgaataggttaatcgagaaaacgaacgagaaattccatcaaatcgaaaaagaattctcagaagtagaagggagaattcaggacctcgagaaatatgttgaagacactaaaatagatctctggtcttacaacgcggggcttcttgttgccctggagaaccaacatacaattgatctaactgactcagaaatgaacaaactgtttgaaagaacaaggaagcaactgagggaaaatgctgaggacatgggcaatggttgcttcaaaatataccacaaatgtgacaatgcctgcatagggtcaatcagaaatggaacttatgaccatgatgtatacagagacgaagcattaaacaaccggttccagatcaaaggtgttgagctgaagtcaggatacaaagattggatcctatggatttcctttgccatatcatgctttttgctttgtgttgtttcgctggggttcatcatgtgggcctgccaaaaaggcaacattaggtgcaacatttgcatttga

SEQ ID NO: 31686 - RNA, 1701 nt, synthetic construct; identical to SEQ ID NO: 31570
  misc_feature 1..1701: note = hemagglutinin__InfluenzaA__ABI20925
  source 1..1701: mol_type = other RNA

SEQ ID NO: 31687 - RNA, 1701 nt, synthetic construct; identical to SEQ ID NO: 31570
  misc_feature 1..1701: note = hemagglutinin__InfluenzaA__ABI20936
  source 1..1701: mol_type = other RNA

SEQ ID NO: 31688 - RNA, 1701 nt, synthetic construct
  misc_feature 1..1701: note = hemagglutinin__InfluenzaA__ABI20947
  source 1..1701: mol_type = other RNA
atgaagactatcattgctttgagctacattttatgtctggttttcgctcaaaaacttcccggaaatgacaacagcacagcaacgctgtgcctgggacaccatgcggtgccaaacggaacgctagtgaaaacaatcacgaatgatcaaattgaagtgactaatgctactgagctggttcagagttcctcaacaggtagaatatgcgacagtcctcaccgaatccttgatggaaaaaactgcacactgatagatgctctattgggagaccctcattgtgatggcttccaaaataaggaatgggacctttttgttgaacgcagcaaagcttacagcaactgttacccttatgatgtgccggattatgcctcccttaggtcactagttgcctcatcaggcaccctggagtttatcaatgaagacttcaattggactggagtcgctcaggatgggaaaagctatgcttgcaaaaggggatctgttaacagtttctttagtagattgaattggttgcacaaattagaatacaaatatccagcgctgaacgtgactatgccaaacaatggcaaatttgacaaattgtacatttggggggttcaccacccgagcacggacagtgaccaaaccagcctatatgttcgagcatcagggagagtcacagtctctaccaaaagaagccaacaaactgtaatcccgaatatcgggtttagaccctgggtaaggggtctgtccagtagaataagcatctattggacaatagtaaaaccgggagacatacttttgattaatagcacagggaatctaattgctcctcggggttacttcaaaatacggaatgggaaaagctcaataatgaggtcagatgcacccattggcaactgcagttctgaatgcatcactccaaatggaagcattcccaatgacaaaccttttcaaaatgtaaacaggatcacatatggggcctgccccagatatgtaaagcaaaacactctgaagttggcaacagggatgcggaatgtaccagagaaacaaactagaggcatattcggcgcaatcgcaggtttcatagaaaatggttgggagggaatggtagacggttggtacggtttcaggcatcaaaattctgagggcacaggacaagcagcagatcttaaaagcactcaagcagcaatcgaccaaatcaacgggaaactgaataggttaatcgagaaaacgaacgagaaattccatcaaatcgaacaagaattctcagaagtagaagggagaattcaggacctcgagaaatatgttgaagacactaaaatagatctctggtcttacaacgcggggcttcttgttgccctggagaaccaacatacaattgatctaactgactcagaaatgaacaaactgtttgaaagaacaaggaagcaactgagggaaaatgctgaggacatgggcaatggttgcttcaaaatataccacaaatgtgacaatgcctgcatagggtcaatcagaaatggaacttatgaccatgatgtatacagagacgaagcattaaacaaccggttccagatcaaaggtgttgagctgaagtcaggatacaaagattggatcctatggatttcctttgccatatcatgctttttgctttgtgttgttttgctggggttcatcatgtgggcctgccaaaaaggcaacattaggtgcaacatttgcatttga

SEQ ID NO: 31689 - RNA, 1701 nt, synthetic construct
  misc_feature 1..1701: note = hemagglutinin__InfluenzaA__ABI20958
  source 1..1701: mol_type = other RNA
atgaagactatcattgctttgagctacattttatgtctggttttcgctcaaaaacttcccggaaatgacaacagcacagcaacgctgtgcctgggacaccatgcggtgccaaacggaacgctagtgaaaacaatcacgaatgatcaaattgaagtgactaatgctactgagctggttcagagttcctcaacaggtagaatatgcgacagtcctcaccgaatccttgatggaaaaaactgcacactgatagatgctctattgggagaccctcattgtgatggcttccaaaataaggaatgggacctttttgttgaacgcagcaaagcttacagcaactgttacccttatgatgtgccggattatgcctcccttaggtcactagttgcctcatcaggcaccctggagtttatcaatgaagacttcaattggactggagtcgctcaggatggaaaaagctatgcttgcaaaaggggatctgttaacagtttctttagtagattgaattggttgtacaaattagaatacaaatatccagcgctgaacgtgactatgccaaacaatggcaaatttgacaaattgtacatatggggggttcaccacccgagcacggacagtgaccaaaccagcctatatgttcgagcatcagggagagtcacagtctctaccaaaagaagccaacaaactgtaatcccgaatatcgggtttagaccctgggtaaggggtctgtccagtagaataagcatctattggacaatagtaaaaccgggagacatacttttgattaatagcacagggaatctaattgctcctcggggttacttcaaaatacggaatgggaaaagctcaataatgaggtcagatgcacccattggcaactgcagttctgaatgcatcactccaaatggaagcattcccaatgacaaaccttttcaaaatgtaaacaggatcacatatggggcctgccccagatatgttaagcaaaacactctgaagttggcaacagggatgcggaatgtaccagagaaacaaactagaggcatattcggcgcaatcgcaggtttcatagaaaatggttgggagggaatggtagacggttggtacggtttcaggcatcaaaattctgagggcacaggacaagcagcagatcttaaaagcactcaagcagcaatcgaccaaatcaacgggaaactgaataggttaatcgagaaaacgaacgagaaattccatcagatcgaaaaagaattctcagaagtagaagggagaattcaggacctcgagaaatatgttgaagacactaaaatagatctctggtcttacaacgcggggcttcttgttgccctggagaaccaacatacaattgatctaactgactcagaaatgaacaaactgtttgaaagaacaaggaagcaactgagggaaaatgctgaggacatgggcaatggttgcttcaaaatataccacaaatgtgacaatgcctgcatagggtcaatcagaaatggaacttatgaccatgatgtatacagagacgaagcattaaacaaccggttccagatcaaaggtgttgagctgaagtcaggatacaaagattggatcctatggatttcctttgccatatcatgctttttgctttgtgttgttttgctggggttcatcatgtgggcctgccaaaaaggcaacattaggtgcaacatttgcatttga

SEQ ID NO: 31690 - RNA, 1701 nt, synthetic construct
  misc_feature 1..1701: note = hemagglutinin__InfluenzaA__ABI20969
  source 1..1701: mol_type = other RNA
atgaagactatcattgctttgagctacattttatgtctggttttcgctcaaaaacttcccgtaaatgacaacagcacggcaacgctgtgcctgggacaccatgcagtgccaaacggaacgctagtgaaaacaatcacgaatgaccacattgaagtgactaatgctactgagctggttcagagttcctcaacaggtagaatatgcgacagtcctcaccaaatccttgatggagaaaactgcacgctaatagatgctctattgggagaccctcattgtgatggcttccaaaataaggaatggaacctttttgttgaacgcagcacagcctacagcaactgttacccttatgatgtgccggattatgcctcccttaggtcactagttgcctcatccggcacactggagtttaacaatgaaagcttcaattggactggagtcgctcagaatggaacaagctctgcttgcaaaaggagatctattaaaagtttctttagtagattgaattggttgcaccaattaaaatacaaatatccagcactgaacgtgactatgccaaacaatgaaaaatttgacaaattgtacatttggggggttcaccacccgagtacggacagtgaccaaatcagcctatatgctcaagcatcagggagagtcacagtctctaccaaaagaagccaacaaactgtaatcccgaatatcggatctagaccctgggtaaggggtgtctccagcagaataagcatctattggacaatagtaaaaccgggagacatacttttgattaacagcacagggaatctaattgctcctcggggttactttaaaatacgaagtgggaaaagctcaataatgaggtcaaatgcacccattggcaaatgcaattctgaatgcatcactccaaatggaagcattcccaatgacaaaccatttcaaaatgtaaacaggatcacatatggggcctgtcccagatatgttaagcaaaacactctgaaattggcaacagggatgcggaatgtaccagagaaacaaactagaggcatattcggcgcaatcgcgggtttcatagaaaatggttgggagggaatggtggacggttggtacggtttcaggcatcaaaattctgagggcacaggacaagcagcagatcttaaaagcactcaagcagcaatcaaccaaatcaacgggaaactgaataggttaatcgagaaaacaaacgagaaattccatcaaattgaaaaagaattctcagaagtagaagggagaattcaggacctcgagaaatatgttgaggacactaaaatagatctctggtcgtacaacgcggagcttcttgttgccctggagaaccaacatacaattgatctaactgactcagaaatgaacaaactgtttgaaagaacaaggaagcaactgagggaaaatgctgaggatatgggcaatggttgtttcaaaatataccacaaatgtgacaatgcctgcatagggtcaatcagaaatggaacttatgaccatgatgtatacagagacgaagcattaaacaaccggttccagatcaaaggtgttgagctgaagtcaggatacaaagattggatcctatggatttcctttgccatatcatgttttttgctttgtgttgttttgctggggttcatcatgtgggcctgccaaaaaggcaacattaggtgcaacatttgcatttga

SEQ ID NO: 31691 - RNA, 1701 nt, synthetic construct
  misc_feature 1..1701: note = hemagglutinin__InfluenzaA__ABI20980
  source 1..1701: mol_type = other RNA
atgaagactatcattgctttgagctacattttatgtctggttttcgctcaaaaacttcccgtaaatgacaacagcacggcaacgctgtgcctgggacaccatgcagtgccaaacggaacgctagtgaaaacaatcacgaatgaccacattgaagtgactaatgctactgagctggttcagagttcctcaacaggtagaatatgcgacagtcctcaccaaatccttgatggagaaaactgcacactaatagatgctctattgggagacccccattgtgatggcttccaaaataaggaatgggacctttttgttgaacgcagcacagcctacagcaactgttacccttatgatgtgccggattatgcctcccttaggtcactagttgcctcatccggcacacttgagtttaacaatgaaagcttcaattggactggagtcgatcagaatggaacaagctctgcttgcaaaaggagatctactaaaagtttctttagtagattgaattggttgcaccaattaaaatacaaatatccagcactgaacgtgactatgccaaacaatgaaaaatttgacaaattgtacatttggggggttcaccatccgagtacggacagtgaccaaatcagcctatatgctcaagcatcagggagagtcacagtctctaccaaaagaagccaacaaactgtaaccccgaatatcggatctagaccctgggtaaggggtgtctccagcagaataagcatttattggacaatagtaaaaccgggagacatacttttgattaacagcacagggaatctaattgctcctcggggttacttcaaaatacgaagtgggaaaagctcaataatgaggtcaaatgcactcattggcaaatgcaattctgaatgcatcactccaaatggaagcattcccaatgacaaaccatttcaaaatgtaaacaggatcacatatggggcctgtcccagatatgttaagcaaaacactctgaaattggcaacagggatgcggaatgtaccagagaaacaaactagaggcatattcggcgcaatcgcaggtttcatagaaaatggttgggagggaatggtggacggttggtacggtttcaggcatcaaaattctgagggcacaggacaagcagcagatcttaaaagcactcaagcagcaatcaaccaaatcaacgggaaactgaataggttaatcgagaaaacaaacgagaaattccatcaaattgaaaaagaattctcagaagtagaagggagaattcaggacctcgagaaatatgttgaggacactaaaatagatctctggtcgtacaacgcggagattcttgttgccctggagaaccaacatacaattgatctaactgactcagaaatgaacaaactgttcgaaagaacaaggaaacaactgagggaaaatgctgaggatatgggcaatggttgtttcaaaatataccacaaatgtgacaatgcctgcatagggtcaatcagaaatggaacttatgaccatgatgtatacagagacgaagcattaaacaaccggttccagatcaaaggtgttgagctgaagtcaggatacaaagattggatcctatggatttcctttgccatatcatgttttttgctttgtgttgttttgctggggttcatcatgtgggcctgccaaaaaggcaacattaggtgcaacatttgcatttga

SEQ ID NO: 31692 - RNA, 1701 nt, synthetic construct
  misc_feature 1..1701: note = hemagglutinin__InfluenzaA__ABI20991
  source 1..1701: mol_type = other RNA
atgaagactatcattgctttgagctacattttatgtctggttttcgctcaaaaacttcccggaaatgacaacagcacggcaacgctgtgcctggggcaccatgcagtgccaaacggaacgctagtgaaaacaatcacgaatgaccaaattgaagtgaccaatgctactgagctggttcagagttcctcaacaggtggaatatgcgacagtcctcaccaaatccttgatggagaaaactgcacactaatagatgctctattgggagaccctcattgtgatggcttccaaaataaggaatgggacctttttgttgaacgcagcaaagcctacagcaactgttacccttatgatgtgccggattatgcctcccttaggtcactagttgcctcatccggcacactggagtttaacaatgaaagcttcaattggactggagtcgctcagaatggaacaagctctgcttgcaaaaggagatctaataaaagtttctttagtagattgaattggttgcaccaattaaaatacaaatacccagcactgaacgtgactatgccaaacaatgaaaaatttgacaaattgtacatttggggggttcaccacccgagtacggacagtgaccaaatcagcctatatgctcaagcaccagggagagtcacagtctctaccaaaagaagccaacaaactgtaatcccgaatatcggatctagaccctgggtaaggggtgtctccagcagaataagcatctattggacaatagtaaaaccgggagacatacttttgattaactgcacagggaatctaattgctcctcggggttacttcaaaatacgaagtgggaaaagctcaataatgaggtcagatgcatccattggcaaatgcaattctgaatgcatcactccaaatggaagcattcccaatgacaaaccatttcaaaatgtaaacaggatcacatatggggcctgtcccagatatgttaagcaaaacactctgaaattggcaacagggatgcggaatgtaccagagaaacaaactagaggcatattcggcgcaatcgcgggtttcatagaaaatggttgggagggaatggtggacggttggtacggtttcaggcatcaaaattctgagggcacaggacaagcagcagatctcaaaagcactcaagcagcaatcaaccaaatcaacgggaaactgaataggttaatcgagaaaacgaacgagaaattccatcaaattgaaaaagaattctcagaagtggaagggagaattcaggacctcgagaaatatgttgaggacactaaaatagatctctggtcgtacaacgcggagcttcttgttgccctggagaaccagcatacaattgatctaactgactcagaaataaacaaactatttgaaagaacaaagaagcaactgagggaaaatgctgaggatatgggcaatggttgtttcaaaatataccacaaatgtgacaatgcctgcatagggtcaatcagaaatgggacttatgaccatgatgtatacagagacgaagcattaaacaaccggttccagatcaaaggtgttgagctgaagtcaggatacaaagattggatcctatggatttcctttgccatatcatgttttttgctttgtgttgtcttgctggggttcatcatgtgggcctgccaaaaaggcaacattaggtgcaacatttgcatttga

SEQ ID NO: 31693 - RNA, 1701 nt, synthetic construct
  misc_feature 1..1701: note = hemagglutinin__InfluenzaA__ABI21002
  source 1..1701: mol_type = other RNA
atgaagactatcattgctttgagctacattttatgtctggttttcgctcaaaaacttcccgtaaatgacaacagcacggcaacgctgtgcctgggacaccatgcagtgccaaacggaacgctagtgaaaacaatcacgaatgaccacattgaagtgactaatgctactgagttggttcagagttcctcaacaggtagaatatgcgacagtcctcaccaaatccttgatggagaaaactgcacactaatagatgctctattgggagaccctcattgtgatggcttccaaaataaggaatgggacctttttgttgaacgcagcacagcctacagcaactgttacccttatgatgtgccggattatgcctcccttaggtcactagttgcctcatccggcacactggagtttaacaatgaaagcttcaattggactggagtcgctcagaatggaacaagctctgcttgcaaaaggagatctattaaaagtttctttagtagattgaattggttgcaccaattaaaatacaaatatccagcactgaacgtgactatgccaaacaatgaaaaatttgacaaattgtacatttggggggttcaccacccgagtacggacagtgaccaaatcagcctatatgctcaagcatcagggagagtcacagtctctaccaaaagaagccaacaaactgtaatcccgaatatcggatctagaccctgggtaaggggtgtctccagcagaataagcatctattggacaatagtaaaaccgggagacatacttttgattaacagcacagggaatctaattgctcctcggggttactttaaaatacgaagtgggaaaagctcaataatgaggtcaaatgcacccattggcaaatgcaattctgaatgcatcactccaaatggaagcattcccaatgacaaaccatttcaaaatgtaaacaggatcacatatggggcctgtcccagatatgttaagcaaaacactctgaaattggcaacaggaatgcggaatgtaccagagaaacaaactagaggcatattcggcgcaatcgcgggtttcatagaaaatggttgggagggaatggtagacggttggtatggtttcaggcatcaaaattctgagggcacaggacaagcagcagatcttaaaagcactcaagcagcaatcaaccaaatcaacgggaaactgaataggttaatcgagaaaacaaacgagaaattccatcaaattgaaaaagaattctcagaagtagaagggagaattcaggacctcgagaaatatgttgaggacactaaaatagatctctggtcgtacaacgcggagcttcttgttgccctggagaatcaacatacaattgatctaacagactcagaaatgaacaaactgtttgaaagaacaaggaagcaactgagggaaaatgctgaggagatgggcaatggttgtttcaaaatataccacaaatgtgacaatgcctgcatagggtcaatcagaaatggaacttatgaccatgatgtatacagagacgaagcattaaacaaccggttccagatcaaaggtgttgagctgaagtcaggatacaaagattggatcctatggatttcctttgccatatcatgttttttgctttgtgttgttttgctggggttcatcatgtgggcctgccaaaaaggcaacattaggtgcaacatttgcatttga

SEQ ID NO: 31694 - RNA, 1701 nt, synthetic construct; identical to SEQ ID NO: 31658
  misc_feature 1..1701: note = hemagglutinin__InfluenzaA__ABI21013
  source 1..1701: mol_type = other RNA

SEQ ID NO: 31695 - RNA, 1701 nt, synthetic construct
  misc_feature 1..1701: note = hemagglutinin__InfluenzaA__ABI21024
  source 1..1701: mol_type = other RNA
atgaagactatcattgctttgagctacattttatgcctggttttcgctcaaaaacttcccggaaatgacaacagcacggcaacgctgtgtctggggcatcatgcagtgccaaacggaacgctagtgaaaacaatcacgaatgaccaaattgaagtaactaatgctactgagctggttcagagttcctcaacaggtagaatatgcgacagtcctcaccaaatccttgatggagaaaactgcacactaatagatgctctattgggagaccctcattgtgatggcttccaaaataaggaatgggacctttttgttgaacgcagcaaagcctacagcaactgttacccttatgatgtgccggattatgtctcccttaggtcactagttgcctcatcaggcacgctggagtttaacaatgaaagcttcaattggactggagtcgctcagaatggaacaagctctgcttgcaaaaggagatctgataaaagtttctttagtaaattgaattggttgcaccaattaaaatacaaatatccagcactgaacgtgactatgccaaacaatgaaaaatttgacaaattgtacatttggggggttcaccacccgggtacagacagtgaccaaatcagcctatatgctcaagcatcagggagagtcacagtctctaccaaaagaagccaacaaactgtaatcccgaatatcggatctagaccctgggtaaggggtgtctccagcagaataagcatctattggacaatagtaaaaccgggagacatacttttgattaacagcacagggaatctaattgctcctcggggttacttcaaaatacgaagtgggaaaagctcaataatgaggtcagatgcacccattggcaaatgcaattctgaatgcatcactccaaatggaagcattcccaatgacaaaccatttcaaaatgtaaacaggatcacatatggggcctgtcccagatatgttaagcaaaacactctgaaattggcaacagggatgcggaatgtgccagagaaacaaactagaggcatattcggtgcaatcgcgggcttcatagaaaatggttgggagggaatgatggacggttggtacggtttcaggcatcaaaattctgagggcacagggcaagcagcagatctcaaaagcactcaagcagcaatcaaccaaatcaacgggaaactgaataggttaatcgagaaaacgaacgagaaattccatcaaattgaaaaagaattctcagaagtagaagggagaattcaggacctcgagaaatatgttgaggacactaaaatagatctctggtcgtacaatgcggagcttcttgttgccctggagaaccaacatacaattgatctaactgactcagaaatgaacaaactgtttgaaagaacaaagaagcaactgagggaaaatgctgaggatatgggcaatggttgtttcaaaatataccacaaatgtgacaatgcctgcatagggtcaatcagaaatggaacttatgaccatgatgtatacagagacgaagcattgaacaaccggttccagatcaaaggtgttgagctgaagtcaggatacaaagattgggtcctatggatttcctttgccatatcatgttttttgctttgtattgttttgctggggttcatcatgtgggcctgccaaaaaggcaacattaggtgcaacatttgcatttga

SEQ ID NO: 31696 - RNA, 1701 nt, synthetic construct; identical to SEQ ID NO: 31074
  misc_feature 1..1701: note = hemagglutinin__InfluenzaA__ABI21035
  source 1..1701: mol_type = other RNA

SEQ ID NO: 31697 - RNA, 1701 nt, synthetic construct
  misc_feature 1..1701: note = hemagglutinin__InfluenzaA__ABI21046
  source 1..1701: mol_type = other RNA
atgaagactatcattgctttgagctacattctatgtctggttttcgctcaaaaacttcccggaaatgacaacagcacggcaacgctgtgccttgggcaccatgcagtaccaaacggaacgatagtgaaaacaatcacaaatgaccaaattgaagttactaatgctactgagctggttcagagttcctcaacaggtggaatatgcgacagtcctcatcagatccttgatggagaaaactgcacactaatagatgctctattgggagaccctcagtgtgatggcttccaaaataagaaatgggacctttttgttgaacgcagcaaagcctacagcaactgttacccttatgatgtgccggatcatgcctcccttaggtcactagttgcctcatccggcacactggagtttaacaatgaaagcttcgattggactggagtcactcagaatggaacaagctctgcttgcaaaaggagatctaataaaagtttctttagtagattgaattggttgacccacttaaaatacaaatacccagcattgaacgtgactatgccaaacaatgaaaaatttgacaaattgtacatttggggggttcaccacccgggtacggacaatgaccaaatcagcctatatgctcaagcatcaggaagaatcacagtctctaccaaaagaagccaacaaactgtaatcccgaatatcggatctagacccagggtaagggatgtctccagccgaataagcatctattggacaatagtaaaaccgggagacatacttttgattaacagcacagggaatctaattgctcctcggggttacttcaaaatacgaagtgggaaaagctcaataatgagatcagatgcacccattggcaaatgcaattctgaatgcatcactccaaatggaagcattccaaatgacaaaccatttcaaaatgtaaacaggatcacatatggggcctgccccagatatgttaagcaaaacactctgaaattggcaacagggatgcgaaatgtaccagagaaacaaactagaggcatatttggcgcaatcgcgggtttcatagaaaatggttgggagggaatggtggacggttggtacggtttcaggcatcaaaattctgagggcacaggacaagcagcagatctcaaaagcactcaagcagcaatcaaccaaatcaatgggaaactgaataggttaatcgggaaaacaaacgagaaattccatcagattgaaaaagaattctcagaagtagaagggagaattcaggacctcgagaaatatgttgaggacactaaaatagatctctggtcatacaacgcggagcttcttgttgccctggagaaccaacatacaattgatctaactgactcagaaatgaacaaactgtttgaaagaacaaagaagcaactgagggaaaatgctgaggatatgggcaatggttgtttcaaaatataccacaaatgtgacaatgcctgcatagggtcaatcagaaatggaacttatgaccatgatgtgtacagagatgaagcattaaacaaccggttccagatcaaaggtgttgagctgaagtcaggatataaagattggatcctatggatttcctttgccatatcatgttttttgctttgtgttgctttgttggggttcatcatgtgggcctgccaaaaaggcaacattaggtgcaacatttgcatttga

SEQ ID NO: 31698 - RNA, 1701 nt, synthetic construct
  misc_feature 1..1701: note = hemagglutinin__InfluenzaA__ABI21057
  source 1..1701: mol_type = other RNA
atgaagactatcattgctttgagctacattctatgtctggttttcgctcaaaaacttcccggaaatgacaacagcacggcaacgctgtgccttgggcaccatgcagtaccaaacggaacgatagtgaaaacaatcacaaatgaccaaattgaagttactaatgctactgagctggttcagaattcctcaacaggtggaatatgcgacagtcctcatcagatccttgatggagaaaactgcacactaatagatgctctattgggagaccctcagtgtgatggcttccaaaataagaaatgggacctttttgttgaacgcagcaaagcctacagcaactgttacccttatgatgtgccggatcatgcctcccttaggtcactagttgcctcatccggcacactggagtttaacaatgaaagcttcgattggactggagtcactcagaatggaacaagctctgcttgcaaaaggagatctaataaaagtttctttagtagattgaattggttgacccacttaaaatacaaatacccagcattgaacgtgactatgccaaacaatgaaaaatttgacaaattgtacatttggggggttcaccacccgggtacggacagtgaccaaatcagcctatatgctcaagcatcaggaagaatcacagtctctaccaaaagaagccaacaaactgtaatcccgaatatcggatctagacccagggtaagggatgtctccagccgaataagcatctattggacaatagtaaaaccgggagacatacttttgattaacagcacagggaatctaattgctcctcggggttacttcaaaatacgaagtgggaaaagctcaataatgagatcagatgcacccattggcaaatgcaattctgaatgcatcactccaaatggaagcattcccaatgacaaaccatttcaaaatgtaaacaggatcacatatggggcctgtcccagatatgttaagcaaaacactctgaaattggcaacagggatgcgaaatgtaccagagaaacaaactagaggcatatttggcgcaatcgcgggtttcatagaaaatggttgggagggaatggtggacggttggtacggtttcaggcatcaaaattctgagggcacaggacaagcagcagatctcaaaagcactcaagcagcaatcaaccaaatcaatgggaaactgaataggttaatcgggaaaacaaacgagaaattccatcagattgaaaaagaattctcagaagtagaagggagaattcaggacctcgagaaatatgttgaggacactaaaatagatctctggtcatacaacgcggagcttcttgttgccctggagaaccaacatacaattgatctaactgactcagaaatgaacaaactgtttgaaagaacaaagaagcaactgagggaaaatgctgaggatatgggcaatggttgtttcaaaatataccacaaatgtgacaatgcctgcatagggtcaatcagaaatggaacttatgaccatgatgtgtacagagatgaagcattaaacaaccggttccagatcaaaggtgttgagctgaagtcaggatataaagattggatcctatggatttcctttgccatatcatgttttttgctttgtgttgctttgttggggttcatcatgtgggcctgccaaaaaggcaacattaggtgcaacatttgcatttga

SEQ ID NO: 31699 - RNA, 1701 nt, synthetic construct
  misc_feature 1..1701: note = hemagglutinin__InfluenzaA__ABI21068
  source 1..1701: mol_type = other RNA
atgaagactatcattgctttgagctacattctatgtctggttttcgctcaaaaacttcccggaaatgacaacagcacggcaacgctgtgccttgggcaccatgcagtaccaaacggaacgatagtgaaaacaatcacgaatgaccaaattgaagttactaatgctactgagctggttcagagttcctcaacaggtggaatatgcgacagtcctcatcagatccttgatggagaaaactgcacactaatagatgctctattgggagaccctcagtgtgatggcttccaaaataagaaatgggacctttttgttgaacgcagcaaagcctacagcaactgttacccttatgatgtgccggattatgcctcccttaggtcactagttgcctcatccggcacactggagtttaacaatgaaagcttcaattggactggagtcactcaaaatggaacaagctctgcttgcaaaaggagatctaataacagtttctttagtagattgaattggttgacccatttaaaattcaaatacccagcattgaacgtgactatgccaaacaatgaaaaatttgacaaattgtacatttggggggttcaccacccgggtacggacaatgaccaaatcagcctatatgctcaagcatcaggaagaatcacagtctctaccaaaagaagccaacaaactgtaatcccgaatatcggatctagacccagggtaagggatatccccagcagaataagcatctattggacaatagtaaaaccgggagacatacttttgattaacagcacagggaatctaattgctcctcggggttacttcaaaatacgaagtgggaaaagctcaataatgagatcagatgcacccattggcaaatgcaattctgaatgcatcactccaaatggaagcattcccaatgacaaaccatttcaaaatgtaaacaggatcacatatggggcctgtcccagatatgttaagcaaaacactctgaaattggcaacagggatgcgaaatgtaccagagaaacaaactagaggcatatttggcgcaatcgcgggtttcatagaaaatggttgggagggaatggtggatggttggtacggtttcaggcatcaaaattctgagggaataggacaagcagcagatctcaaaagcactcaagcagcaatcaaccaaatcaatgggaagctgaataggttgatcgggaaaaccaacgagaaattccatcagattgaaaaagaattctcagaagtagaagggagaattcaggacctcgagaaatatgttgaggacactaaaatagatctctggtcatacaacgcggagcttcttgttgccctggagaaccaacatacaattgatctaactgactcagaaatgaacaaactgtttgaaagaacaaagaagcaactgagggaaaatgctgaggatatgggcaatggttgtttcaaaatataccacaaatgtgacaatgcctgcatagggtcaatcagaaatggaacttatgaccatgatgtatacagagatgaagcattaaacaaccggttccagatcaaaggtgttgagctgaagtcaggatacaaagattggatcctatggatttcctttgccatatcatgttttttgctttgtgttgctttgttggggttcatcatgtgggcctgccaaaaaggcaacattagatgcaacatttgcatttga

SEQ ID NO: 31700 - RNA, 1701 nt, synthetic construct; identical to SEQ ID NO: 30826
  misc_feature 1..1701: note = hemagglutinin__InfluenzaA__ABI21079
  source 1..1701: mol_type = other RNA

SEQ ID NO: 31701 - RNA, 1701 nt, synthetic construct
  misc_feature 1..1701: note = hemagglutinin__InfluenzaA__ABI21090
  source 1..1701: mol_type = other RNA
atgaagactatcattgctttgagctacattctatgtctggttttcgctcaaaaacttcccggaaatgacaacagcacggcaacgctgtgccttgggcaccatgcagtaccaaacggaacggtagtgaaaacaatcacaaatgaccaaattgaagttactaatgctactgagctggttcagagttcctcaacaggtggaatatgcgacagtcctcatcagatccttgatggagaaaactgcacactaatggatgctctattgggagaccctcagtgtgatggcttccaaaataagaaatgggacctttttgttgaacgcagcaaagcctacagcaactgttacccttatgatgtgccggattatgcctcccttaggtcactagttgcctcatccggcacactggagtttaacaatgaaagcttcaattggactggagtcactcaaaatggaacaagctctgcttgcaaaaggagatctaataacagtttctttagtagattgaattggttgacccacttaaaattcaaatacccagcattgaacgtgactatgccaaacaatgaaaaatttgacaaattgtacatttggggggttcaccacccgggtacggacaatgaccaaatcagcctatatgctcaagcatcaggaagaatcacagtctctaccaaaagaagccaacaaactgtaatcccgaatatcggatctagacccagggtaagggatatccccagcagaataagcatctattggacaatagtaaaaccgggagacatacttttgattaacagcacagggaatctaattgctcctcggggttacttcaaaatacgaagtgggaaaagctcaataatgagatcagatgcacccattggcaaatgcaattctgaatgcatcactccaaatggaagcattcccaatgacaaaccatttcaaaatgtaaacaggatcacatatggggcctgtcccagatatgttaagcaaaacactctgaaattggcaacagggatgcgaaatgtaccagagaaacaaactagaggcatatttggcgcaatcgcgggtttcatagaaaatggttgggagggaatggtggatggttggtacggtttcaggcatcaaaattctgagggaacaggacaagcagcagatctcaaaagcactcaagcagcaatcaaccaaatcaatgggaagctgaataggttgatcgggaaaaccaacgagaaattccatcagattgaaaaagaattctcagaagtagaagggagaattcaggacctcgagaaatatgttgaggacactaaaatagatctctggtcatacaacgcggagcttcttgttgccctggagaaccaacatacaattgatctaactgactcagaaatgaacaaactgtttgaaagaacaaaaaagcaactgagggaaaatgctgaggatatgggcaatggttgtttcaaaatataccacaaatgtgacaatgcctgcataggatcaatcagaaatggaacttatgaccatgatgtatacagagatgaagcattaaacaaccggttccagatcaaaggtgttgagctgaagtcaggatacaaagattggatcctatggatttcctttgccatatcatgttttttgctttgtgttgctttgttggggttcatcatgtgggcctgccaaaaaggcaacattaggtgcaacatttgcatttga

SEQ ID NO: 31702 - RNA, 1701 nt, synthetic construct; identical to SEQ ID NO: 31701
  misc_feature 1..1701: note = hemagglutinin__InfluenzaA__ABI21101
  source 1..1701: mol_type = other RNA

SEQ ID NO: 31703 - RNA, 1701 nt, synthetic construct
  misc_feature 1..1701: note = hemagglutinin__InfluenzaA__ABI21123
  source 1..1701: mol_type = other RNA
atgaagactatcattgctttgagctacattctatgtctggttttcgctcaaaaacttcccggaaatgacaacagcacggcaacgctgtgccttgggcaccatgcagtaccaaacggaacgatagtgaaaacaatcacgaatgaccaaattgaagttactaatgctactgagctggttcagagttcctcaacaggtggaatatgcgacagtcctcatcagatccttgatggagaaaactgcacactaatagatgctctattgggagaccctcagtgtgatggcttccaaaataagaaatgggacctttttgttgaacgcagcaaagcctacagcaactgttacccttatgatgtgccggattatgcctcccttaggtcactagttgcctcatccggcacactggagtttaacaatgaaagcttcaattggactggagtcactcaaaatggaacaagctctgcttgcaaaaggagatctaataacagtttctttagtagattgaattggttgacccatttaaaattcaaatacccagcattgaacgtgactatgccaaacaatgaaaaatttgacaaattgtacatttggggggttcaccacccgggtacgaacaatgaccaaatcagcctatatgctcaagcatcaggaagaatcacagtctctaccaaaagaagccaacaaactgtaatcccgaatatcggatctagacccagggtaagggatatccccagcagaataagcatctattggacaatagtaaaaccgggagacatacttttgattaacagcacagggaatctaattgctcctcggggttacttcaaaatacgaagtgggaaaagctcaataatgagatcagatgcacccattggcaaatgcaattctgaatgcatcactccaaatggaagcattcccaatgacaaaccatttcaaaatgtaaacaggatcacatatggggcctgtcccagatatgttaagcaaaacactctgaaattggcaacagggatgcgaaatgtaccagagaaacaaactagaggcatatttggcgcaatcgcgggtttcatagaaaatggttgggagggaatggtggatggttggtacggtttcaggcatcaaaattctgagggaataggacaagcagcagatctcaaaagcactcaagcagcaatcaaccaaatcaatgggaagctgaataggttgatcgggaaaaccaacgagaaattccatcagattgaaaaagaattctcagaagtagaagggagaattcaggacctcgagaaacacgttgaggacactaaaatagatctctggtcatacaacgcggagcttcttgttgccctggagaaccaacatacaattgatctaactgactcagaaatgaacaaactgtttgaaagaacaaagaagcaactgagggaaaatgctgaggatatgggcaatggttgtttcaaaatataccacaaatgtgacaatgcctgcatagggtcaatcagaaatggaacttatgaccatgatgtatacagagatgaagcattaaacaaccggttccagatcaaaggtgttgagctgaagtcaggatacaaagattggatcctatggatttcctttgccatatcatgttttttgctttgtgttgctttgttggggttcatcatgtgggcctgccaaaaaggcaacattaggtgcaacatttgcatttga

SEQ ID NO: 31704 - RNA, 1701 nt, synthetic construct
  misc_feature 1..1701: note = hemagglutinin__InfluenzaA__ABI21134
  source 1..1701: mol_type = other RNA
atgaagactatcattgctttgagctacattctatgtctggttttcgctcaaaaacttcccggaaatgacaacagcacggcaacgctgtgccttgggcaccatgcagtaccaaacggaacggtagtgaaaacaatcacaaatgaccaaattgaagttactaatgctactgagctggttcagagttcctcaacaggtggaatatgcgacagtcctcatcagatccttgatggagaaaactgcacactaatggatgctctattgggagaccctcagtgtgatggcttccaaaataagaaatgggacctttttgttgaacgcagcaaagcctacagcaactgttacccttatgatgtgccggattatgcctcccttaggtcactagttgcctcatccggcacactggagtttaacaatgaaagcttcaattggactggagtcactcaaaatggaacaagctctgcttgcaaaaggagatctaataacagtttctttagtagattgaattggttgacccacttaaaattcaaatacccagcattgaacgtgactatgccaaacaatgaaaaatttgacaaattgtacatttggggggttcaccacccgggtacggacaatgaccaaatcagcctatatgctcaagcatcaggaagaatcacagtctctaccaaaagaagccaacaaactgtaatcccgaatatcggatctagatccagggtaagggatatccccagcagaataagcatctattggacaatagtaaaaccgggagacatacttttgattaacagcacagggaatctaattgctcctcggggttacttcaaaatacgaagtgggaaaagctcaataatgagatcagatgcacccattggcaaatgcaattctgaatgcatcactccaaatggaagcattcccaatgacaaaccatttcaaaatgtaaacaggatcacatatggggcctgtcccagatatgttaagcaaaacactctgaaattggcaacagggatgcgaaatgtaccagagaaacaaactagaggcatatttggcgcaatcgcgggtttcatagaaaatggttgggagggaatggtggatggttggtacggtttcaggcatcaaaattctgagggaacaggacaagcagcagatctcaaaagcactcaagcagcaatcaaccaaatcaatgggaagctgaataggttgatcgggaaaaccaacgagaaattccatcagattgaaaaagaattctcagaagtagaagggagaattcaggacctcgagaaatatgttgaggacactaaaatagatctctggtcatacaacgcggagcttcttgttgccctggagaaccaacatacaattgatctaactgactcagaaatgaacaaactgtttgaaagaacaaaaaagcaactgagggaaaatgctgaggatatgggcaatggttgtttcaaaatataccacaaatgtgacaatgcctgcataggatcaatcagaaatggaacttatgaccatgatgtatacagagatgaagcattaaacaaccggttccagatcaaaggtgttgagctgaagtcaggatacaaagattggatcctatggatttcctttgccatatcatgttttttgctttgtgttgctttgttggggttcatcatgtgggcctgccaaaaaggcaacattaggtgcaacatttgcatttga

SEQ ID NO: 31705 - RNA, 1701 nt, synthetic construct; identical to SEQ ID NO: 30826
  misc_feature 1..1701: note = hemagglutinin__InfluenzaA__ABI21156
  source 1..1701: mol_type = other RNA

SEQ ID NO: 31706 - RNA, 1701 nt, synthetic construct
  misc_feature 1..1701: note = hemagglutinin__InfluenzaA__ABI21167
  source 1..1701: mol_type = other RNA
atgaagactatcattgctttgggctacattctatgtctggttttcgctcaaaaacttcccggaaatgacaacagcacggcaacgctgtgccttgggcaccatgcagtaccaaacggaacgatagtgaaaacaatcacgaatgaccaaattgaagttactaatgctactgagctggttcagagttcctcaacaggtggaatatgcgacagtcctcatcagatccttgatggagaaaactgcacactaatagatgctctattgggagaccctcagtgtgatggcttccaaaataagaaatgggacctttttgttgaacgcagcaaagcctacagcaactgttacccttatgatgtgccggattatgcctcccttaggtcactagttgcctcatccggcacactggagtttaacaatgaaagcttcaattggactggagtcactcaaaatggaacaagctctgcttgcaaaaggagatctaataacagtttctttagtagattgaattggttgacccatttaaaattcaaatacccagcattgaacgtgactatgccaaacaatgaaaaatttgacaaattgtacatttggggggttcaccacccgggtacgaacaatgaccaaatcagcctatatgctcaagcatcaggaagaatcacagtctctaccaaaagaagccaacaaactgtaatcccgaatatcggatctagacccagggtaagggatatccccagcagaataagcatctattggacaatagtaaaaccgggagacatacttttgattaacagcacagggaatctaattgctcctcggggttacttcaaaatacgaagtgggaaaagctcaataatgagatcagatgcacccattggcaaatgcaattctgaatgcatcactccaaatggaagcattcccaatgacaaaccatttcaaaatgtaaacaggatcacatatggggcctgtcccagatatgttaagcaaaacactctgaaattggcaacagggatgcgaaatgtaccagagaaacaaactagaggcatatttggcgcaatcgcgggtttcatagaaaatggttgggagggaatggtggatggttggtacggtttcaggcatcaaaattctgagggaataggacaagcagcagatctcaaaagcactcaagcagcaatcaaccaaatcaatgggaagctgaataggttgatcgggaaaaccaacgagaaattccatcagattgaaaaagaattctcagaagtagaagggagaattcaggacctcgagaaatatgttgaggacactaaaatagatctctggtcatacaacgcggagcttcttgttgccctggagaaccaacatacaattgatctaactgactcagaaatgaacaaactgtttgaaagaacaaagaagcaactgagggaaaatgctgaggatatgggcaatggttgtttcaaaatataccacaaatgtgacaatgcctgcatagggtcaatcagaaatggaacttatgaccatgaagtatacagagatgaagcattaaacaaccggttccagatcaaaggtgttgagctgaagtcaggatacaaagattggatcctatggatttcctttgccatatcatgttttttgctttgtgttgctttgttggggttcatcatgtgggcctgccaaaaaggcaacattaggtgcaacatttgcatttga

SEQ ID NO: 31707 - RNA, 1701 nt, synthetic construct
  misc_feature 1..1701: note = hemagglutinin__InfluenzaA__ABI21178
  source 1..1701: mol_type = other RNA
atgaagactatcattgctttgagctacattctatgtctggttttcgctcaaaaacttcccggaaatgacaacagcacggcaacgctgtgccttgggcaccatgcagtaccaaacggaacgatagtgaaaacaatcacgaatgaccaaattgaagttactaatgctactgagctggttcagagttcctcaacaggtggaatatgcgacagtcctcatcagatccttgatggagaaaactgcacactaatagatgctctattgggagaccctcagtgtgatggcttccaaaataagaaatgggacctttttgttgaacgcagcaaagcctacagcagctgttacccttatgatgtgccggattatgcctcccttaggtcactagttgcctcatccggcacactggagtttaacaatgaaagcttcaattggactggagtcactcaaaatggaacaagctctgcttgcaaaaggagatctaataacagtttctttagtagattgaattggttgacccatttaaaattcaaatacccagcattgaacgtgactatgccaaacaatgaaaaatttgacaaattgtacatttggggggttcaccacccgggtacgaacaatgaccaaatcagcctatatgctcaagcatcaggaagaatcacagtctctaccaaaagaagccaacaaactgtaatcccgaatatcggatctagacccagggtaagggatatccccagcagaataagcatctattggacaatagtaaaaccgggagacatacttttgattaacagcacagggaatctaattgctcctcggggttacttcaaaatacgaagtgggaaaagctcaataatgagatcagatgcacccattggcaaatgcaattctgaatgcatcactccaaatggaagcattcccaatgacaaaccatttcaaaatgtaaacaggatcacatatggggcctgtcccagatatgttaagcaaaacactctgaaattggcaacagggatgcgaaatgtaccagagaaacaaactagaggcatatttggcgcaatcgcgggtttcatagaaaatggttgggagggaatggtggatggttggtacggtttcaggcatcaaaattctgagggaataggacaagcagcagatctcaaaagcactcaagcagcaatcaaccaaatcaatgggaagctgaataggttgatcgggaaaaccaacgagaaattccatcagattgaaaaagaattctcagaagtagaagggagaattcaggacctcgagaaatatgttgaggacactaaaatagatctctggtcatacaacgcggagcttcttgttgccctggagaaccaacatacaattgatctaactgactcagaaatgaacaaactgtttgaaagaacaaagaagcaactgagggaaaatgctgaggatatgggcaatggttgtttcaaaatataccacaaatgtgacaatgcctgcatagggtcaatcagaaatggaacttatgaccatgatgtatacagagatgaagcattaaacaaccggttccagatcaaaggtgttgagctgaagtcaggatacaaagattggatcctatggatttcctttgccatatcatgttttttgctttgtgttgctttgttggggttcatcatgtgggcctgccaaaaaggcaacattaggtgcaacatttgcatttga

SEQ ID NO: 31708 - RNA, 1698 nt, synthetic construct
  misc_feature 1..1698: note = hemagglutinin__InfluenzaA__ABI21200
  source 1..1698: mol_type = other RNA
atgaaagtaaaactactggttctgttatgtacatttacagctacatatgcagacacaatatgtataggctaccatgccaacaactcgaccgacactgttgacacagtacttgagaagaatgtgacagtgacacactctgtcaacctacttgaggacagtcacaatggaaaactatgtctactaaaaggaatagccccactacaattgggtaattgcagcgttgccggatggatcttaggaaacccagaatgcgaattactgatttccaaggaatcatggtcctacattgtagaaacaccaaatcctgagaatggaacatgttacccagggtatttcgccgactatgaggagctgagggagcaattgagttcagtatcttcatttgagaggttcgaaatattccccaaagagagctcatggcccaaccacaccgtaaccggagtatcagcatcatgctcccataacgggaaaagcagtttttacaggaatttgctatggctgacggggaagaatggtttgtatccaaacctgagcaagtcctatgcaaacaacaaagagaaagaggtccttgtactgtggggtgttcatcacccgcctaacataggggaccaaagggccctctatcatacagaaaatgcttatgtctctgtagtgtcttcacattatagcagaagattcaccccagaaatagccaaaagacccaaggtgagagatcaggaaggaagaatcaactactactggactctgctggaacccggggatacaataatatttgaggcaaatggaaatctaatagcgccaaggtttgctttcgcactgagtagaggctttggatcaggaatcatcacctcaaatgcaccaatggatgaatgtgatgcgaagtgtcaaacacctcagggagctataaacagcagtcttcctttccagaatgtacacccagtcacaataggagagtgtccaaagtatgtcaggagtgcaaaattaagaatggttacaggactaaggaacatcccatccattcaatccagaggtttgtttggagccattgccggtttcattgaaggggggtggactggaatggtagatggttggtatggttatcaccatcagaatgagcaaggatctgggtatgctgcagatcaaaaaagcacacaaaatgccattaacgggattacaaacaaggtgaattctgtaattgagaaaatgaacactcaattcacagctgtgggcaaagaattcaacaaattggaaagaaggatggaaaacttaaataaaaaagttgatgatgggtttctagacatttggacatataacgcagaattgttggttctactggaaaatgaaaggactttggacttccatgactccaacgtgaagaatctgtatgagaaagtaaaaagccaattaaagaataatgccaaagaaataggaaacgggtgttttgaattctatcacaagtgtaacgatgaatgcatggagagtgtgaaaaatggaacttatgactatccaaaatattccgaagaatcaaagttgaacagggagagaattgatggagtgaaattggaatcaatgggagtctatcagattctggcgatctactcaacagtcgccagttccctggttcttttggtctccctgggggcaatcagcttctggatgtgttccaatgggtctttgcagtgtagaatatgcatctaa

SEQ ID NO: 31709 - RNA, 1698 nt, synthetic construct
  misc_feature 1..1698: note = hemagglutinin__InfluenzaA__ABI21211
  source 1..1698: mol_type = other RNA
atgaaagttaaactactggttctgttatgtacatttacagctacatatgcagacacaatatgtataggctaccatgccaacaactcgaccgacactgttgacacagtacttgagaagaatgtgacagtgacacactctgtcaacctacttgaggacagtcacaatggaaaactatgtctactaaaaggaatagccccactacaattgggtaattgcagcgttgccggatggatcttaggaaacccagaatgcgaattactgatttccaaggaatcatggtcctacattgtagaaacaccaaatcctgagaatggaacatgttacccagggtatttcgccgactatgaagagctgagggagcaattgagttcagtatcttcatttgagaggttcgaaatattccccaaagagagctcatggcccaaccacaccgtaaccggagtatcagcatcatgctcccataacgggaaaagcagtttttacagaaatttgctatggctgacggggaagaatggtttgtatccaaacctgagcaagtcctatgcaaacaacaaagagaaagaagtccttgtactgtggggtgttcatcacccgcctaacataggggaccaaagggccctctatcatacagaaaatgcttatgtctctgtagtgtcttcacattacagcagaagattcaccccagaaatagccaaaagacccaaggtgagagatcaggaaggaagaatcaactactactggactctgctggaacccggggatacaataatatttgaggcaaatggaaatctaatagcgccaaggtttgctttcgcactgagtagaggctttggatcaggaatcatcacctcaaatgcaccaatggatgaatgtgatgcgaagtgtcaaacacctcagggagctataaacagcagtcttcctttccagaatgtacacccagtcacaataggagagtgtccaaagtatgtcaggagtgcaaaattaagaatggttacaggactaaggaacatcccatccattcaatccagaggtttgtttggagctattgccggtttcattgaaggggggtggactggaatggtagatggttggtatggttatcaccatcagaatgagcaaggatctgggtatgctgcagatcaaaaaagcacacaaaatgccattaacgggattacaaacaaggtgaattctgtaattgagaaaatgaacactcaattcacagctgtgggcaaagaattcaacaaattggaaagaaggatggaaaacttaaataaaaaagttgatgatgggtttctagacatttggacatataacgcagaattgttggttctactggaaaatgaaaggactttggacttccatgactccaacgtgaagaatctgtatgagaaagtaaaaagccaattaaagaataatgccaaagaaataggaaacgggtgttttgaattctatcacaagtgtaacgatgaatgcatggagagtgtgaaaaatggaacttatgactatccaaaatattccgaagaatcaaagttgaacagggagagaattgatggagtgaaattggaatcaatgggagtctatcagattctggcgatctactcaacagtcgccagttccctggttcttttggtctccctgggggcaatcagcttctggatgtgttccaatgggtctttgcagtgtagaatatgcatctaa

SEQ ID NO: 31710 - RNA, 1698 nt, synthetic construct
  misc_feature 1..1698: note = hemagglutinin__InfluenzaA__ABI21233
  source 1..1698: mol_type = other RNA
atgaaagtaaaactactggttctgttatgtacatttacagctacatatgcagacacaatatgtataggctaccatgccaacaactcgaccgacactgttgacacagtacttgagaagaatgtgacagtgacacactctgtcaacctacttgaggacagtcacaatggaaaactatgtctactaaaaggaatagccccactacaattgggtaattgcagcgttgccggatggatcttaggaaacccagaatgcgaattactgatttccaaggaatcatggtcctacattgtagaaacaccaaatcctgagaatggaacatgttacccagggtatttcgccgactatgaggagctgagggagcaattgaattcagtatcttcatttgagaggttcgaaatattccccaaagagagctcatggcccaaccacaccgtaaccggagtatcagcatcatgctcccataacgggaaaagcagtttttacaggaatttgctatggctgacggggaagaatggtttgtatccaaacctgagcaagtcctatgcaaacaacaaagagaaagaagtccttgtactgtggggtgttcatcacccgcctaacataggggaccaaagggccctctatcatacagaaaatgcttatgtctctgtagtgtcttcacattatagcagaagattcaccccagaaatagccaaaagacccaaggtgagagatcaggaaggaagaatcaactactactggactctgctggaacccggggatacaataatatttgaggcaaatggaaatctaatagcgccaaggtttgctttcgcactgagtagaggctttggatcaggaatcatcacctcaaatgcaccaatggatgaatgtgatgcgaagtgtcaaacacctcagggagctataaacagcagtcttcctttccagaatgtacacccagtcacaataggagagtgtccaaagtatgtcaggagtgcaaaattaagaatggttacaggactaaggaacatcccatccattcaatccagaggtttgtttggagccattgccggtttcattgaaggggggtggactggaatggtagatggttggtatggttatcaccatcagaatgagcaaggatctgggtatgctgcagatcaaaaaagcacacaaaatgccattaacgggattacaaacaaggtgaattctgtaattgagaaaatgaacactcaattcacagctgtgggcaaagaattcaacaaattggaaagaaggatggaaaacttaaataaaaaagttgatgatgggtttctagacatttggacatataacgcagaattgttggttctactggaaaatgaaaggactttggacttccatgactccaacgtgaagaatctgtatgagaaagtaaaaagccaattaaagaataatgccaaagaaataggaaacgggtgttttgaattctatcacaagtgtaacgatgaatgcatggagagtgtgaaaaatggaacttatgactatccaaaatattccgaagaatcaaagttgaacagggagagaattgatggagtgaaattggaatcaatgggagtctatcagattctggcgatctactcaacagtcgccagttccctggttcttttggtctccctgggggcaatcagcttctggatgtgttccaatgggtctttgcagtgtagaatatgcatctaa

SEQ ID NO: 31711 - RNA, 1701 nt, synthetic construct
  misc_feature 1..1701: note = hemagglutinin__InfluenzaA__ABI21244
  source 1..1701: mol_type = other RNA
atgaagactatcattgctttgagctacattttatgtctggttttcgctcaaaaacttcccggaaatgacaacagcacagcaacgctgtgcctgggacaccatgcagtgccaaacggaacgctagtgaaaacaatcacgaatgatcaaattgaagtgactaatgctactgagctggttcagagttcctcaacaggtagaatatgcgacagtcctcaccgaatccttgatggaaaaaactgcacactgatagatgctctattgggagaccctcattgtgatggcttccaaaataaggaatgggacctttttgttgaacgcagcaaagcttacagcaactgttacccttatgatgtgccggattatgcctcccttaggtcactagttgcctcatcaggcaccctgaagtttatcaatgaagacttcaattggactggagtcgctcaggatgggaaaagctatgcttgcaaaaggggatctgttaacagtttctttagtagattgaattggttgcacaaattagaatacaaatatccagcgctgaacgtgactatgccaaacaatggcaaatttgacaaattgtacatttggggggttcaccacccgagcacggacagtgaccaaaccagcctatatgttcgagcatcagggagagtcacagtctctaccaaaagaagccaacaaactgtaatcccgaatatcgggtctagaccctgggtaaggggtctgtccagtagaataagcatctattggacaatagtaaaaccgggagacatacttttgattaatagcacagggaatctaattgctcctcggggttacttcaaaatacgaagtgggaaaagctcaataatgaggtcagatgcacccattggcaactgcagttccgaatgcatcactccaaatggaagcattcccaatgacaaaccttttcaaaatgtaaacaggatcacatatggggcctgccccagatatgttaagcaaaacactctgaaattggcaacagggatgcggaatgtaccagagaaacaaactagaggcatattcggcgcaatcgcaggtttcatagaaaatggttgggagggaatggtagacggttggtacggtttcaggcatcaaaattctgagggcacaggacaagcagcagatcttaaaagcactcaagcagcaatcgaccaaatcaacgggaaactgaataggttaatcgagaaaacgaacgagaaattccatcaaatcgaaaaagaattctcagaagtagaagggagaattcaggacctcgagaaatatgttgaagacactaaaatagatctctggtcttacaacgcggagcttcttgttgccctggagaaccaacatacaattgatctaactgactcagaaatgaacaaactgtttgaaagaacaaggaagcaactgagggaaaatgctgaggacatgggcaatggttgcttcaaaatataccacaaatgtgacaatgcctgcatagggtcaatcagaaatggaacttatgaccatgatgtatacagagacgaagcattaaacaaccggttccagatcaaaggtgttgagctgaagtcaggatacaaagattggatcctatggatttcctttgccatatcatgctttttgctttgtgttgttttgctagggttcatcatgtgggcctgccaaaaaggcaacattaggtgcaacatttgcatttga

SEQ ID NO: 31712 - RNA, 1701 nt, synthetic construct
  misc_feature 1..1701: note = hemagglutinin__InfluenzaA__ABI21255
  source 1..1701: mol_type = other RNA
atgaagactatcattgctttgagctacattttatgtctggttttcgctcaaaaacttcccggaaatgacaacagcacagcaacgctgtgcctaggacaccatgcagtgccaaacggaacgctagtgaaaacaatcacgaatgatcaaattgaagtgactaatgctactgagctggttcagagttcctcaacaggtagaatatgcgacagtcctcaccgaatccttgatggaaaaaactgcacactgatagatgctctattgggagaccctcattgtgatggcttccaaaataaggaatgggacctttttgttgaacgcagcaaagcttacagcaactgttacccttatgatgtgccggattatgcctcccttaggtcactagttgcctcatcaggcaccctggagtttatcaatgaagacttcaattggactggagtcgctcaggatgggaaaagctatgcttgcaaaaggggatctgttaacagtttctttagtagattgaattggttgcacaaattagaatacaaatatccagcgctgaacgtgactatgccaaacaatggcaaatttgacaaattgtacatttggggggttcaccacccgagcacggacagtgaccaaaccagcctatatgttcgagcatcagggagagtcacagtctctaccaaaagaagccaacaaactgtaatcccgaatatcgggtctagaccctgggtaaggggtctgtccagtagaataagcatctattggacaatagtaaaaccgggagacatacttttgattaatagcacagggaatctaattgctcctcggggttacttcaaaatacgaaatgggaaaagctcaataatgaggtcagatgcacccattggcaactgcagttccgaatgcatcactccaaatggaagcattcccaatgacaaaccttttcaaaatgtaaacaggatcacatatggggcctgccccagatatgttaagcaaaacactctgaaattggcaacagggatgcggaatgtaccagagaaacaaactagaggcatattcggcgcaatcgcaggtttcatagaaaatggttgggagggaatggtagacggttggtacggtttcaggcatcaaaattctgagggcacaggacaagcagcagatcttaaaagcactcaagcagcaatcgaccaaatcaacgggaaactgaataggttaatcgagaaaacgaacgagaaattccatcaaatcgaaaaagaattctcagaagtagaagggagaattcaggacctcgagaaatatgttgaagacactaaaatagatctctggtcttacaacgcggagcttcttgttgccctggagaaccaacatacaattgatctaactgactcagaaatgaacaaactgtttgaaagaacaaggaagcaactgagggaaaatgctgaggacatgggcaatggttgcttcaaaatataccacaaatgtgacaatgcctgcatagggtcaatcagaaatggaacttatgaccatgatgtatacagagacgaagcattaaacaaccggttccagatcaaaggtgttgagctgaagtcaggatacaaagattggatcctatggatttcctttgccatatcatgctttttgctttgtgttgttttgctggggttcatcatgtgggcctgccaaaaaggcaacattaggtgcaacatttgcatttga

SEQ ID NO: 31713 - RNA, 1701 nt, synthetic construct; identical to SEQ ID NO: 31559
  misc_feature 1..1701: note = hemagglutinin__InfluenzaA__ABI21266
  source 1..1701: mol_type = other RNA

SEQ ID NO: 31714 - RNA, 1701 nt, synthetic construct; identical to SEQ ID NO: 31559
  misc_feature 1..1701: note = hemagglutinin__InfluenzaA__ABI21277
  source 1..1701: mol_type = other RNA

SEQ ID NO: 31715 - RNA, 1701 nt, synthetic construct
  misc_feature 1..1701: note = hemagglutinin__InfluenzaA__ABI21299
  source 1..1701: mol_type = other RNA
atgaagactatcattgctttgagctacattttatgtctggttttcgctcaaaaacttcccggaaatgacaacagcacagcaacgctgtgcctgggacaccatgcagtgccaaacggaacgctagtgaaaacaatcacgaatgatcaaattgaagtgactaatgctactgagctggttcagagttcctcaacaggtagaatatgcgacagtcctcaccgaatccttgatggaaaaaactgcacactgatagatgctctattgggagaccctcattgtgatggcttccaaaataaggaatgggacctttttgttgaacgcagcaaagcttacagcaactgttacccttatgatgtgccggattatgcctcccttaggtcactagttgcctcatcaggcaccctggagtttatcaatgaagacttcaattggactggagtcgctcaggatgggaaaagctatgcttgcaaaaggggatctgttaacagtttctttagtagattgaattggttgcacaaattagaatacaaatatccagcgctgaacgtgactatgccaaacaatgacaaatttgacaaattgtacatttggggggttcaccacccgagcacggacagtgaccaaaccagcctatatgttcgagcatcagggagagtcacagtctctaccaaaagaagtcaacaaactgtaatcccgaatatcgggtctagaccctgggtaaggggtctgtccagtagaataagcatctattggacaatagtaaaaccgggagacatacttttgattaatagcacagggaatctaattgctcctcggggttacttcaaaatacgaaatgggaaaagctcaataatgaggtcagatgcacccattggcaactgcagttctgaatgcatcactccaaatggaagcattcccaatgacaaaccttttcaaaatgtaaacaggatcacatatggggcctgccccagatatgttaagcaaaacactctgaaattggcaacagggatgcggaatgtaccagagaaacaaactagaggcatattcggcgcaatcgcaggtttcatagagaatggttgggagggaatggtagacggttggtacggtttcaggcatcaaaattctgagggcacaggacaagcagcagatcttaaaagcactcaagcagcaatcgaccaaatcaacgggaaactgaataggttaatcgagaaaacgaacgagaaattccatcaaatcgaaaaagaattctcagaagtagaagggagaattcaggacctcgagaaatatgttgaagacactaaaatagatctctggtcttacaacgcggagcttcttgttgccctggagaaccaacatacaattgatctaactgactcagaaatgaacaaactgtttgaaagaacaaggaagcaactgagggaaaatgctgaggacatgggcaatggttgcttcaaaatataccacaaatgtgacaatgcctgcatagggtcaatcagaaatggaacttatgaccatgatgtatacagagacgaagcattaaacaaccggttccagatcaaaggtgttgagctgaagtcaggatacaaagattggatcctatggatttcctttgccatatcatgctttttgctttgtgttgttttgctggggttcatcatgtgggcctgccaaaaaggcaacattaggtgcaacatttgcatttga

SEQ ID NO: 31716 - RNA, 1701 nt, synthetic construct; identical to SEQ ID NO: 31557
  misc_feature 1..1701: note = hemagglutinin__InfluenzaA__ABI21310
  source 1..1701: mol_type = other RNA

SEQ ID NO: 31717 - RNA, 1701 nt, synthetic construct
  misc_feature 1..1701: note = hemagglutinin__InfluenzaA__ABI21321
  source 1..1701: mol_type = other RNA
atgaagactatcattgctttgagctacattttatgtctggttttcgctcaaaaacttcccggaaatgacaacagcacagcaacgctgtgcctgggacaccatgcagtgccaaacggaacgctagtgaaaacaatcacgaatgatcaaattgaagtgactaatgctactgagctggttcagagttcctcaacaggtagaatatgcgacagtcctcaccgaatccttgatggaaaaaactgcacactgatagatgctctattgggagaccctcattgtgatggcttccaaaataaggaatgggacctttttgttgaacgcagcaaagcttacagcaactgttacccttatgatgtgccggattatgcctcccttaggtcactagttgcctcatcaggcaccctagagtttatcaatgaagacttcaattggactggagtagctcaggatgggaaaagctatgcttgcaaaaggggatctgttaacagtttctttagtagattgaattggttgcacaaattagaatacaaatatccagcgctgaacgtgactatgccaaacaatggcaaatttgacaaattgtacatttggggggttcaccacccgagcacggacagtgaccaaaccagcctatatgttcgagcatcagggagagtcacagtctctaccaaaagaagccaacaaactgtaatcccgaatatcgggtctagaccctgggtaaggggtctgtccagtagaataagcatctattggacaatagtaaaaccgggagacatacttttgattaatagcacagggaatctaattgctcctcggggttacttcaaaatacgaaatgggaaaagctcaataatgaggtcagatgcacccattggcaactgcagttctgaatgcatcactccaaatggaagcattcccaatgacaaaccttttcaaaatgtaaacaggatcacatatggggcctgccccagatatgttaagcaaaacactctgaaattggcaacagggatgcggaatgtaccagagaaacaaactagaggcatattcggcgcaatcgcaggtttcatagaaaatggttgggagggaatggtagacggttggtacggtttcaggcatcaaaattctgagggcacaggacaagcagcagatcttaaaagcactcaagcagcaatcgaccaaatcaacgggaaactgaataggttaatcgagaaaacgaacgagaaattccatcaaatcgaaaaagaattctcagaagtagaagggagaattcaggacctcgagaaatatgttgaagacactaaaatagatctctggtcttacaacgcggagcttcttgttgccctggagaaccaacatacaattgatctaactgactcagaaatgaacaaactgtttgaaaaaacaaggaagcaactgagggaaaatgctgaggacatgggcaatggttgcttcaaaatataccacaaatgtgacaatgcctgcatagggtcaatcagaaatggaacttatgaccatgatgtatacagagacgaagcattaaacaaccggttccagatcaaaggtgttgagctgaagtcaggatacaaagattggatcctatggatttcctttgccatatcatgctttttgctttgtgttgttttgctggggttcatcatgtgggcctgccaaaaaggcaacattaggtgcaacatttgcatttga

SEQ ID NO: 31718 - RNA, 1701 nt, synthetic construct
  misc_feature 1..1701: note = hemagglutinin__InfluenzaA__ABI21332
  source 1..1701: mol_type = other RNA
atgaagactatcattgctttgagctacattttatgtctggttttcgctcaaaaacttcccggaaatgacaacagcacagcaacgctgtgcctgggacaccatgcagtgccaaacggaacgctagtgaaaacaatcacgaatgatcaaattgaagtgactaatgctactgagctggttcagagttcctcaacaggtagaatatgcgacagtcctcaccgaatccttgatggaaaaaactgcacactgatagatgctctattgggagaccctcattgtgatggcttccaaaataaggaatgggacctttttgttgaacgcagcaaagcttacagcaactgttacccttatgatgtgccggattatgcctcccttaggtcactagttgcctcatcaggcaccctagagtttatcaatgaagacttcaattggactggagtagctcaggatgggaaaagctatgcttgcaaaaggggatctgttaacagtttctttagtagattgaattggttgcacaaattagaatacaaatatccagcgctgaacgtgactatgccaaacaatggcaaatttgacaaattgtacatttggggggttcaccacccgagcacggacagtgaccaaaccagcctatatgttcaagcatcagggagagtcacagtctctaccaaaagaagccaacaaactgtaatcccgaatatcgggtctagaccctgggtaaggggtctgtccagtagaataagcatctattggacaatagtaaaaccgggagacatacttttgattaatagcacagggaatctaattgctcctcggggttacttcaaaatacgaaatgggaaaagctcaataatgaggtcagatgcacccattggcaactgcagttctgaatgcatcactccaaatggaagcattcccaatgacaaaccttttcaaaatgtaaacaggatcacatatggggcctgccccagatatgttaagcaaaacactctgaaattggcaacagggatgcggaatgtaccagagaaacaaactagaggcatattcggcgcaatcgcaggtttcatagaaaatggttgggagggaatggtagacggttggtacggtttcaggcatcaaaattctgagggcacaggacaagcagcagatcttaaaagcactcaagcagcaatcgaccaaatcaacgggaaactgaataggttaatcgagaaaacgaacgagaaattccatcaaatcgaaaaagaattctcagaagtagaagggagaattcaggacctcgagaaatatgttgaagacactaaaatagatctctggtcttacaacgcggagcttcttgttgccctggagaaccaacatacaattgatctaactgactcagaaatgaacaaactgtttgaaagaacaaggaagcaactgagggaaaatgctgaggacatgggcaatggttgcttcaaaatataccacaaatgtgacaatgcctgcatagggtcaatcagaaatggaacttatgaccatgatgtatacagagacgaagcgttaaacaaccggttccagatcaaaggtgttgagctgaagtcaggatacaaagattggatcctatggatttcctttgccatatcatgctttttgctttgtgttgttttgctggggttcatcatgtgggcctgccaaaaaggcaacattaggtgcaacatttgcatttga

SEQ ID NO: 31719 - RNA, 1701 nt, synthetic construct
  misc_feature 1..1701: note = hemagglutinin__InfluenzaA__ABI21343
  source 1..1701: mol_type = other RNA
atgaagactatcattgctttgagctacattttatgtctggttttcgctcaaaaacttcccggaaatgacaacagcacagcaacgctgtgcctgggacaccatgcagtgccaaacggaacgctagtgaaaacaatcacgaatgatcaaattgaagtgactaatgctactgagctggttcagagttcctcaacaggtagaatatgcgacagtcctcaccgaatccttgatggaaaaaactgcacactgatagatgctctattgggagaccctcattgtgatggcttccaaaataaggaatgggacctttttgttgaacgcagcaaagcttacagcaactgttacccttatgatgtgccggattatgcctcccttaggtcactagttgcctcatcaggcaccctggagtttatcaatgaagacttcaattggactggagtcgctcaggatgggaaaagctatgcttgcaaaaggggatctgttaacagtttctttagtagattgaattggttgcacaaattagagtacaaatatccagcgctgaacgtgactatgccaaacaatggcaaatttgacaaattgtacatttggggggttcaccacccgagcacggacagtgaccaaaccagcctatatgttcgagcatcagggagagtcacagtctctaccaaaagaagccaacaaactgtaatcccgaatatcgggtctagaccctgggtaaggggtctgtccagtagaataagcatctattggacaatagtaaaaccgggagacatacttttgattaatagcacagggaatctaattgctcctcggggttacttcaaaatacgaaatgggaaaagctcaataatgaggtcagatgcacccattggcaactgcagttccgaatgcatcactccaaatggaagcattcccaatgacaaaccttttcaaaatgtaaacaggatcacatatggggcctgccccagatatgttaagcaaaacactctgaaattggcaacagggatgcggaatgtaccagagaaacaaactagaggcatattcggcgcaatcgcaggtttcatagaaaatggttgggagggaatggtagacggttggtacggtttcaggcatcaaaattctgagggcacaggacaagcagcagatcttaaaagcactcaagcagcaatcgaccaaatcaacgggaaactgaataggttaatcgagaaaacgaacgagaaattccatcaaatcgaaaaagaattctcagaagtagaagggagaattcaggacctcgagaaatatgttgaagacactaaaatagatctctggtcttacaacgcggagcttcttgttgccctggagaaccaacatacaattgatctaactgactcagaaatgaacaaactgtttgaaagaacaaggaagcaactgagggaaaatgctgaggacatgggcaatggttgcttcaaaatataccacaaatgtgacaatgcctgcatagggtcaatcagaaatggaacttatgaccatgatgtatacagagacgaagcattaaacaaccggttccagatcaaaggtgttgagctgaagtcaggatacaaagattggatcctatggatttcctttgccatatcatgctttttgctttgtgttgttttgctggggttcatcatgtgggcctgccaaaaaggcaacattaggtgcaacatttgcatttga

SEQ ID NO: 31720 - RNA, 1701 nt, synthetic construct
  misc_feature 1..1701: note = hemagglutinin__InfluenzaA__ABI21354
  source 1..1701: mol_type = other RNA
atgaagactatcattgctttgagctacatttcatgtctggttttcgctcaaaaacttcccggaaatgacaacagcacagcaacgctgtgcctgggacaccatgcagtgccaaacggaacgctagtgaaaacaatcacgaatgatcaaattgaagtgactaatgctactgagctggttcagagttcctcaacaggtagaatatgcgacagtcctcaccgaatccttgatggaaaaaactgcacactgatagatgctctattgggagaccctcattgtgatggcttccaaaataaggaatgggacctttttgttgaacgcagcaaagcttacagcaactgttacccttatgatgtgccggattatgcctcccttaggtcactagttgcctcatcaggcaccctagagtttatcaatgaagacttcaattggactggagtagctcaggatgggaaaagctatgcttgcaaaaggggatctgttaacagtttctttagtagattgaattggttgcacaaattagaatacaaatatccagcgctgaacgtgactatgccaaacaatggcaaatttgacaaattgtacatttggggggttcaccacccgagcacggacagtgaccaaaccagcctatatgttcgagcatcagggagagtcacagtctctaccaaaagaagccaacaaactgtaatcccgaatatcgggtctagaccctgggtaaggggtctgtccagtagaataagcatctattggacaatagtaaaaccgggagacatacttttgattaatagcacagggaatctaattgctcctcggggttacttcaaaatacgaaatgggaaaagctcaataatgaggtcagatgcacccattggcaactgcagttctgaatgcatcactccaaatggaagcattcccaatgacaaaccttttcaaaatgtaaacaggatcacatatggggcctgccccagatatgttaagcaaaacactctgaaattggcaacagggatgcggaatgtaccagagaaacaaactagaggcatattcggcgcaatcgcaggtttcatagaaaatggttgggagggaatggtagacggttggtacggtttcaggcatcaaaattctgagggcacaggacaagcagcagatcttaaaagcactcaagcagcaatcgaccaaatcaacgggaaactgaataggttaatcgagaaaacgaacgagaaattccatcaaatcgaaaaagaattctcagaagtagaagggagaattcaggacctcgagaaatatgttgaagacactaaaatagatctctggtcttacaacgcggagcttcttgttgccctggagaaccaacatacaattgatctaactgactcagaaatgaacaaactgtttgaaagaacaaggaagcaactgagggaaaatgctgaggacatgggcaatggttgcttcaaaatataccacaaatgtgacaatgcctgcatagggtcaatcagaaatggaacttatgaccatgatgtatacagagacgaagcattaaacaaccggttccagatcaaaggtgttgagctgaagtcaggatacaaagattggatcctatggatttcctttgccatatcatgctttttgctttgtgttgttttgctggggttcatcatgtgggcctgccaaaaaggcaacattaggtgcaacatttgcatttga

SEQ ID NO: 31721 - RNA, 1701 nt, synthetic construct
  misc_feature 1..1701: note = hemagglutinin__InfluenzaA__ABI21365
  source 1..1701: mol_type = other RNA
atgaagactatcattgctttgagctacattttatgtctggttttcgctcaaaaacttcccggaaatgacaacagcacagcaacgctgtgcctgggacaccatgcagtgccaaacggaacgctagtgaaaacaatcacgaatgatcaaattgaagtgactaatgctactgagctggttcagagttcctcaacaggtagaatatgcgacagtcctcaccgaatccttgatggaaaaaactgcacactgatagatgctctattgggagaccctcattgtgatggcttccaaaataaggaatgggacctttttgttgaacgcagcaaagcttacagcaactgttacccttatgatgtgccggattatgcctcccttaggtcactagttgcctcatcaggcaccctggagtttatcaatgaagacttcaattggactggagtcgctcaggatgggaaaagctatgcttgcaaaaggggatctgttaacagtttctttagtagattgaattggttgcacaaattagaatacaaatatccagcgctgaacgtgactatgccaaacaatggcaaatttgacaaattgtacatttggggggttcaccacccgagcacggacagtgaccaaaccagcctatatgttcgagcatcagggagagtcacagtctctaccaaaagaagccaacaaactgtaatcccgaatatcgggtctagaccctgggtaaggggtctgtccagtagaataagcatctattggacaatagtaaaaccgggagacatacttttgattaatagcacagggaatctaattgctcctcggggttacttcaaaatacgaaatgggaaaagctcaataatgaggtcagatgcacccattggcaactgcagttctgaatgcatcactccaaatggaagcattcccaatgacaaaccttttcaaaatgtaaacaggatcacatatggggcctgccccagatatgttaagcaaaacactctgaaattggcaacagggatgcggaatgtaccagagaaacaaactagaggcatattcggcgcaatcgcaggtttcatagaaaatggttgggagggaatggtagacggttggtacggtttcaggcatcaaaattctgagggcacaggacaagcagcagatcttaaaagcactcaagcagcaatcgaccaaatcaacgggaaactgaataggttaatcgagaaaacgaacgagaaattccatcaaatcgaaaaagaattctcagaagtagaagggagaattcaggacctcgagaaatatgttgaagacactaaaatagatctctggtcttacaacgcggagcttcttgttgccctggagaaccaacatacaattgatctaactgactcagaaatggacaaactgtttgaaagaacaaggaagcaactgagggaaaatgctgaggacatgggcaatggttgcttcaaaatataccacaaatgtgacaatgcctgcatagggtcaatcagaaatggaacttatgaccatgatgtatacagagacgaagcattaaacaaccggttccagatcaaaggtgttgagctgaagtcaggatacaaagattggatcctatggatttcctttgccatatcatgctttttgctttgtgttgttttgctggggttcatcatgtgggcctgccaaaaaggcaacattaggtgcaacatttgcatttga

SEQ ID NO: 31722 - RNA, 1701 nt, synthetic construct
  misc_feature 1..1701: note = hemagglutinin__InfluenzaA__ABI21376
  source 1..1701: mol_type = other RNA
atgaagactatcattgctttgagctacattttatgtctggttttcgctcaaaaacttcccggaaatgacaacagcacagcaacgctgtgcctgggacaccatgcagtgccaaacggaacgctagtgaaaacaatcacgaatgatcaaattgaagtgactaatgctactgagctggttcagagttcctcaacaggtagaatatgcgacagtcctcaccgaatccttgatggaaaaaactgcacactgatagatgctctattgggagaccctcattgtgatggcttccaaaataaggaatgggacctttttgttgaacgcagcaaagcttacagcaactgttacccttatgatgtgccggattatgcctcccttaggtcactagttgcctcatcaggcaccctggagtttatcaatgaagacttcaattggactggagtcgctcaggatgggaaaagctattcttgcaaaaggggatctgttaacagtttctttagtagattgaattggttgcacaaattagaatacaaatatccagcgctgaacgtgactatgccaaacaatgacaaatttgacaaattgtacatttggggggttcaccacccgagcacggacagtgaccaaaccagcctatatgttcgagcatcagggagagtcacagtctctaccaaaagaagtcaacaaactgtaatcccgaatatcgggtctagaccctgggtaaggggtctgtccagtagaataagcatctattggacaatagtaaaaccgggagacatacttttgattaatagcacagggaatctaattgctcctcggggttacttcaaaatacgaaatgggaaaagctcaataatgaggtcagatgcacccattggcaactgcagttctgaatgcatcactccaaatggaagcattcccaatgacaaaccttttcaaaatgtaaacaggatcacatatggggcctgccccagatatgttaagcaaaacactctgaaattggcaacagggatgcggaatgtaccagagaaacaaactagaggcatattcggcgcaatcgcaggtttcatagagaatggttgggagggaatggtagacggttggtacggtttcaggcatcaaaattctgagggcacaggacaagcagcagatcttaaaagcactcaagcagcaatcgaccaaatcaacgggaaactgaataggttaatcgagaaaacgaacgagaaattccatcaaatcgaaaaagaattctcagaagtagaagggagaattcaggacctcgagaaatatgttgaagacactaaaatagatctctggtcttacaacgcggagcttcttgttgccctggagaaccaacatacaattgatctaactgactcagaaatgaacaaactgtttgaaagaacaaggaagcaactgagggaaaatgctgaggacatgggcaatggttgcttcaaaatataccacaaatgtgacaatgcctgcatagggtcaatcagaaatggaacttatgaccatgatgtatacagagacgaagcattaaacaaccggttccagatcaaaggtgttgagctgaagtcaggatacaaagattggatcctatggatttcctttgccatatcatgctttttgctttgtgttgttttgctggggttcatcatgtgggcctgccaaaaaggcaacattaggtgcaacatttgcatttaa

SEQ ID NO: 31723 - RNA, 1701 nt, synthetic construct; identical to SEQ ID NO: 31557
  misc_feature 1..1701: note = hemagglutinin__InfluenzaA__ABI21387
  source 1..1701: mol_type = other RNA

SEQ ID NO: 31724 - RNA, 1701 nt, synthetic construct
  misc_feature 1..1701: note = hemagglutinin__InfluenzaA__ABI21398
  source 1..1701: mol_type = other RNA
atgaagactatcattgctttgagctacattttatgtctggttttcgctcaaaaacttcccggaaatgacaacagcacagcaacgctgtgcctgggacaccatgcagtgccaaacggaacgctagtgaaaacaatcacgaatgatcaaattgaagtgactaatgctactgagctggttcagagttcctcaacaggtagaatatgcgacagtcctcaccgaatccttgatggaaaaaactgcacactgatagatgctctattgggagaccctcattgtgatggcttccaaaataaggaatgggacctttttgttgaacgcagcaaagcttacagcaactgttacccttatgatgtgccggattatgcctcccttaggtcactagttgcctcatcaggcaccctggagtttgtcaatgaagacttcaattggactggagtcgctcaggatgggaaaagctatgcttgcaaaaggggatctgttaacagtttctttagtagattgaattggttgcacaaattagaatacaaatatccagcgctgaacgtgactatgccaaacaatggcaaatttgacaaattgtacatttggggggttcaccacccgagcacggacagtgaccaaaccagcctatatgttcgagcatcagggagagtcacagtctctaccaaaagaagccaacaaactgtaatcccgaatatcgggtctagaccctgggtaaggggtctgtccagtagaataagcatctattggacaatagtaaaaccgggagacatacttttgattaatagcacagggaatctaattgctcctcggggttacttcaaaatacgaaatgggaaaagctcaataatgaggtcagatgcacccattggcaactgcagttccgaatgcatcactccaaatggaagcattcccaatgacaaaccttttcaaaatgtaaacaggatcacatatggggcctgccccagatatgttaagcaaaacactctgaaattggcaacagggatgcggaatgtaccagagaaacaaactagaggcatattcggcgcaatcgcaggtttcatagaaaatggttgggagggaatggtagacggttggtacggtttcaggcatcaaaattctgagggcacaggacaagcagcagatcttaaaagcactcaagcagcaatcgaccaaatcaacgggaaactgaataggttaatcgagaaaacgaacgagaaattccatcaaatcgaaaaagaattctcagaagtagaagggagaattcaggacctcgagaaatatgttgaagacactaaaatagatctctggtcttacaacgcggagcttcttgttgccctggagaaccaacatacaattgatctaactgactcagaaatgaacaaactgtttgaaagaacaaggaagcaactgagggaaaatgctgaggacatgggcaatggttgcttcaaaatataccacaaatgtgacaatgcctgcatagggtcaatcagaaatggaacttatgaccatgatgtatacagagacgaagcattaaacaaccggttccagatcaaaggtgttgagctgaagtcaggatacaaagattggatcctatggatttcctttgccatatcatgctttttgctttgtgttgttttgctggggttcatcatgtgggcctgccaaaaaggcaacattaggtgcaacatttgcatttga

SEQ ID NO: 31725 - RNA, 1701 nt, synthetic construct
  misc_feature 1..1701: note = hemagglutinin__InfluenzaA__ABI21409
  source 1..1701: mol_type = other RNA
atgaagactatcattgctttgagctacattttatgtctggttttcgctcaaaaacttcccggaaatgacaacagcacagcaacgctgtgcctgggacaccatgcagtgccaaacggaacgctagtgaaaacaatcacgaatgatcaaattgaagtgactaatgctactgagctggttcagagttcctcaacaggtagaatatgcgacagtcctcaccgaatccttgatggaaaaaactgcacactgatagatgctctgttgggagaccctcattgtgatggcttccaaaataaggaatgggacctttttgttgaacgcagcaaagcttacagcaactgttacccttatgatgtgccggattatgcctcccttaggtcactagttgcctcatcaggcaccctagagtttatcaatgaagacttcaattggactggagtagctcaggatgggaaaagctatgcttgcaaaaggggatctgttaacagtttctttagtagattgaattggttgcacaaattagaatacaaatatccagcgctgaacgtgactatgccaaacaatggcaaatttgacaaattgtacatttggggggttcaccacccgagcacggacagtgaccaaaccagcctatatgttcgagcatcagggagagtcacagtctctaccaaaagaagccaacaaactgtaatcccgaatatcgggtctagaccctgggtaaggggtctgtccagtagaataagcatctattggacaatagtaaaaccgggagacatacttttgattaatagcacagggaatctaattgctcctcggggttacttcaaaatacgaaatgggaaaagctcaataatgaggtcagatgcacccattggcaactgcagttctgaatgcatcactccaaatggaagcattcccaatgacaaaccttttcaaaatgtaaacaggatcacatatggggcctgccccagatatgttaagcaaaacactctgaaattggcaacagggatgcggaatgtaccagagaaacaaactagaggcatattcggcgcaatcgcaggtttcatagaaaatggttgggagggaatggtagacggttggtacggtttcaggcatcaaaattctgagggcacaggacaagcagcagatcttaaaagcactcaagcagcaatcgaccaaatcaacgggaaactgaataggttaatcgagaaaacgaacgagaaattccatcaaatcgaaaaagaattctcagaagtagaagggagaattcaggacctcgagaaatatgttgaagacactaaaatagatctctggtcttacaacgcggagcttcttgttgccctggagaaccaacatacaattgatctaactgactcagaaatgaacaaactgtttgaaagaacaaggaagcaactgagggaaaatgctgaggacatgggcaatggttgcttcaaaatataccacaaatgtgacaatgcctgcatagggtcaatcagaaatggaacttatgaccatgatgtatacagagacgaagcattaaacaaccggttccagatcaaaggtgttgagctgaagtcaggatacaaagattggatcctatggatttcctttgccatatcatgctttttgctttgtgttgttttgctggggttcatcatgtgggcctgccaaaaaggcaacattaggtgcaacatttgcatttga

SEQ ID NO: 31726 - RNA, 1701 nt, synthetic construct
  misc_feature 1..1701: note = hemagglutinin__InfluenzaA__ABI21420
  source 1..1701: mol_type = other RNA
atgaagactatcattgctttgagctacattttatgtctggttttcactcaaaaacttcccggaaatgacaacagcacagcaacgctgtgcctgggacatcatgcagtgccaaacggaacgctagtgaaaacaatcacgaatgatcaaattgaagtgactaatgctactgagctggttcagagttcctcaacaggtagaatatgcgacagtcctcaccgaatccttgatggaaaaaactgcacactgatagatgctctattgggagaccctcattgtgatggcttccaaaataaggaatgggacctttttgttgaacgcagcaaagcttacagcaactgttacccttatgatgtgccggattatgcctcccttaggtcactagttgcctcatcaggcaccctggagtttatcaatgaagacttcaattggactggagtcgctcaggatgggggaagctattcttgcaaaaggggatctgttaacagtttctttagtagattgaattggttgcacaaattagaatacaaatatccagcgctgaacgtgactatgccaaacaatggcaaatttgacaaattgtacatttggggggttcaccacccgagcacggacagtgaccaaaccagcctatatgttcgagcatcagggagagtcacagtctctaccaaaagaagccaacaaactgtaatcccgaatatcgggtctagaccctgggtaaggggtctgtccagtagaataagcatctattggacaatagtaaaaccgggagacatacttttgattaatagcacagggaatctaattgctcctcggggttacttcaaaatacgaaatgggaaaagctcaataatgagatcagatgcacccattggcaactgcagttctgaatgcatcactccaaatggaagcattcccaatgacaaaccttttcaaaatgtaaacaggatcacatatggggcctgccccagatatgttaagcaaaacactctgaaattggcaacagggatgcggaatgtaccagagaaacaaactagaggcatattcggcgcaatcgcaggtttcatagaaaatggttgggagggaatggtagacggttggtacggtttcaggcatcagaattctgagggcacaggacaagcagcagatcttaaaagcactcaagcagcaatcgaccaaatcaacgggaaactgaataggttaatcgagaaaacgaacgagaaattccatcaaatcgaaaaagaattctcagaagtagaagggagaattcaggacctcgagaaatatgttgaagacactaaaatagatctctggtcttacaacgcggagcttcttgttgccctggagaaccaacatacaattgatctaactgactcagaaatgaacaaactgtttgaaagaacaaggaagcaactgagggaaaatgctgaggacatgggcaatggttgcttcaaaatataccacaaatgtgataatgcctgcatagggtcaatcagaaatggaacttatgaccatgatgtatacagagacgaagcattaaacaaccggttccagatcaaaagtgttgagctgaagtcaggatacaaagattggatcctatggatttcctttgccatatcatgctttttgctttgtgttgttttgctggggttcatcatgtgggcctgccaaaaaggcaacattaggtgcaacatttgcatttga

SEQ ID NO: 31727 - RNA, 1701 nt, synthetic construct; identical to SEQ ID NO: 31557
  misc_feature 1..1701: note = hemagglutinin__InfluenzaA__ABI21431
  source 1..1701: mol_type = other RNA

SEQ ID NO: 31728 - RNA, 1701 nt, synthetic construct; identical to SEQ ID NO: 31559
  misc_feature 1..1701: note = hemagglutinin__InfluenzaA__ABI21442
  source 1..1701: mol_type = other RNA

SEQ ID NO: 31729 - RNA, 1701 nt, synthetic construct; identical to SEQ ID NO: 31559
  misc_feature 1..1701: note = hemagglutinin__InfluenzaA__ABI21453
  source 1..1701: mol_type = other RNA

SEQ ID NO: 31730 - RNA, 1701 nt, synthetic construct; identical to SEQ ID NO: 31725
  misc_feature 1..1701: note = hemagglutinin__InfluenzaA__ABI21464
  source 1..1701: mol_type = other RNA

SEQ ID NO: 31731 - RNA, 1701 nt, synthetic construct; identical to SEQ ID NO: 31559
  misc_feature 1..1701: note = hemagglutinin__InfluenzaA__ABI21475
  source 1..1701: mol_type = other RNA

SEQ ID NO: 31732 - RNA, 1701 nt, synthetic construct
  misc_feature 1..1701: note = hemagglutinin__InfluenzaA__ABI21486
  source 1..1701: mol_type = other RNA
atgaagactatcattgctttgagctacattttatgtctggttttcgctcaaaaacttcccggaaatgacaacagcacagcaacgctgtgcctgggacaccatgcagtgccaaacggaacgctagtgaaaacaatcacgaatgatcaaattgaagtgactaatgctactgagctggttcagagttcctcaacaggtagaatatgcgacagtcctcaccgaatccttgatggaaaaaactgcacactgatagatgctctattgggagaccctcattgtgatggcttccaaaataaggaatgggacctttttgttgaacgcagcaaagcttacagcaactgttacccttatgatgtgccggattatgcctcccttaggtcactagttgcctcatcaggcaccctggagtttatcaatgaagacttcaattggactggagtcgctcaggatgggaaaagctatgcttgcaaaaggggatctgttaacagtttctttagtagattgaattggttgcacaaattagaatacaaatatccagcgctgaacgtgactatgccaaacaatggcaaatttgacaaattgtacatttggggggttcaccacccgagcacggacagtgaccaaaccagcctatatgttcgagcatcagggagagtcacagtctctaccaaaagaagccaacaaactgtaatcccgaatatcgggtctagaccctgggtaaggggtctgtccagtagaataagcatctattggacaatagtaaaaccgggagacatacttttgattaatagcacagggaatctaattgctcctcggggttacttcaaaatacgaaatgggaaaagctcaataatgaggtcagatgcacccattggcaactgcagttccgaatgcatcactccaaatggaagcattcccaatgacaaaccttttcaaaatgtaaacaggatcacatatggggcctgccccagatatgttaagcaaaacactctgaaattggcaacagggatgcggaatgtaccagagaaacaaactagaggcatattcggcgcaatcgcaggtttcatagaaaatggttgggagggaatggtagacggttggtacggtttcaggcatcaaaattctgagggcacaggacaagcagcagatcttaaaagcactcaagaagcaatcgaccaaatcaacgggaaactgaataggttaatcgagaaaacgaacgagaaattccatcaaatcgaaaaagaattctcagaagtagaagggagaattcaggacctcgagaaatatgttgaagacactaaaatagatctctggtcttacaacgcggagcttcttgttgccctggagaaccaacatacaattgatctaactgactcagaaatgaacaaactgtttgaaagaacaaggaagcaactgagggaaaatgctgaggacatgggcaatggttgcttcaaaatataccacaaatgtgacaatgcctgcatagggtcaatcagaaatggaacttatgaccatgatgtatacagagacgaagcattaaacaaccggttccagatcaaaggtgttgagctgaagtcaggatacaaagattggatcctatggatttcctttgccatatcatgctttttgctttgtgttgttttgctggggttcatcatgtgggcctgccaaaaaggcaacattaggtgcaacatttgcatttga

SEQ ID NO: 31733 - RNA, 1701 nt, synthetic construct; identical to SEQ ID NO: 31559
  misc_feature 1..1701: note = hemagglutinin__InfluenzaA__ABI21497
  source 1..1701: mol_type = other RNA

SEQ ID NO: 31734 - RNA, 1698 nt, synthetic construct
  misc_feature 1..1698: note = hemagglutinin__InfluenzaA__ABI21530
  source 1..1698: mol_type = other RNA
atgaaagcaaaactactagtcctgttatgtacatttacagctacatatgcagacacaatatgtataggctaccatgccaacaactcaaccgacactgttgacacagtacttgagaagaatgtgacagtgacacactctgtcaacctacttgaggacagtcacaatggaaaactatgtctactaaaaggaatagccccactacaattgggtaattgcagcgttgccggatggatcttaggaaacccagaatgcgaatcactgatttctaaggaatcatggtcctacattgtagagacaccaaaccctgagaatggaacatgttacccagggtatttcgccgactatgaggaactgagggagcaattgagttcagtatcttcatttgagaggttcgaaatattccccaaagaaagctcatggcccaaccacaccgtaaccggagtatcggcatcatgctcccataatgggaaaagcagtttttacagaaatttgctatggctgacggagaagaatggcttgtacccaaatctgagcaagtcctatgtaaacaacaaggagaaagaagtccttgtactatggggtgttcatcacccgtctaacataggggtccaaagggccatctatcgtacagaaaatgcttatgtctctgtagtgtcttcacattatagcagaagattcaccccagaaatagcaaaaagacccaaagtaagagatcaggaaggaagaatcaactactactggactctgctggaacccggggacacaataatatttgaggcaaatggaaatctaatagcgccatggtatgctttcgcactgagtagaggctttgagtcaggaatcatcacctcaaatgcaccaatgaatgaatgtgatgcaaagtgtcaaacacctcagggagctataaacagtagtcttcctttccagaatgtacacccagtcacaataggagagtgtccaaagtatgtcaggagtgcaaaattaaggatggttacaggactaaggaacatcccatccattcaatccagaggtttgtttggagccattgccggtttcattgaaggggggtggactggaatgatagatgggtggtatggttatcatcatcagaatgagcaaggatctggctatgctgcagatcaaaaaagcacacaaaatgccattaacgggattacaaacaaggtgaattctgtaattgagaaaatgaacactcaattcacagctgtgggcaaagaattcaacaaattagaaagaaggatggaaaacttaaataaaaaagttgatgatggatttctagacatttggacatataatgcagaattgttggttctactggaaaatgaaaggactttggatttccatgactcaaatgtgaagaatctgtatgagaaagtaaaaagccaattaaagaataatgccaaagaaataggaaacgggtgttttgaattctatcacaagtgtaacaatgaatgcatggaaagtgtgaaaaatggaacttatgactatccaaaatattccgaagaatcaaagttaaacagggagaaaattgatggagtgaaattggaatcaatgggagtctatcagattctggcgatctactcaactgtcgccagttcactggttcttttagtctccctgggggcaatcagcttctggatgtgttccaatgggtctttgcagtgtagaatatgcatctga

SEQ ID NO: 31735 - RNA, 1698 nt, synthetic construct
  misc_feature 1..1698: note = hemagglutinin__InfluenzaA__ABI21552
  source 1..1698: mol_type = other RNA
atgaaagcaaaactactagtcctgttatgtacatttacagctacatatgcagacacaatatgtataggctaccatgccaacaactcaaccgacactgttgacacagtacttgagaagaatgtgacagtgacacactctgtcaacctacttgaggacagtcacaatggaaaactatgtctactaaaaggaatagccccactacaattgggtaattgcagcgttgccggatggatcttaggaaacccagaatgcgaatcactgatttctaaggaatcatggtcctacattgtagagacaccaaaccctgagaatggaacatgttacccagggtatttcgccgactatgaggaactgagggagcaattgagttcagtatcttcatttgagaggttcgaaatattccccaaagaaagctcatggcccaaccacaccgtaaccggagtatcggcatcatgctcccataatgggaaaagcagtttttacagaaatttgctatggctgacggagaagaatggcttgtacccaaatctgagcaagtcctatgtaaacaacaaggagaaagaagtccttgtactatggggtgttcatcacccgtctaacataggggtccaaagggccatctatcatacagaaaatgcttatgtctctgtagtgtcttcacattatagcagaagattcaccccagaaatagcaaaaagacccaaagtaagagatcaggaaggaagaatcaactactactggactctgctggaacccggggacacaataatatttgaggcaaatggaaatctaatagcgccatggtatgctttcgcactgagtagaggctttgagtcaggaatcatcacctcaaatgcaccaatggatgaatgtgatgcaaagtgtcaaacacctcagggagctataaacagtagtcttcctttccagaatgtacacccagtcacaataggagagtgtccaaagtatgtcaggagtgcaaaattaaggatggttacaggactaaggaacatcccatccattcaatccagaggtttgtttggagccattgccggtttcattgaaggggggtggactggaatgatagatgggtggtatggttatcatcatcagaatgagcaaggatctggctatgctgcagatcaaaaaagcacacaaaatgccattaacgggattacaaacaaggtgaattctgtaattgagaaaatgaacactcaattcacagctgtgggcaaagaattcaacaaattagaaagaaggatggaaaacttaaataaaaaagttgatgatggatttctagacatttggacatataatgcagaattgttggttctactggaaaatgaaaggactttggatttccatgactcaaatgtgaagaatctgtatgagaaagtaaaaagccaattaaagaataatgccaaagaaataggaaacgggtgttttgaattctatcacaagtgtaacaatgaatgcatggaaagtgtgaaaaatggaacttatgactatccaaaatattccgaagaatcaaagttaaacagggagaaaattgatggagtgaaattggaatcaatgggagtctatcagattctggcgatctactcaactgtcgccagttcactggttcttttagtctccctgggggcaatcagcttctggatgtgttccaatgggtctttgcagtgtagaatatgcatctga

SEQ ID NO: 31736 - RNA, 1698 nt, synthetic construct
  misc_feature 1..1698: note = hemagglutinin__InfluenzaA__ABI21563
  source 1..1698: mol_type = other RNA
atgaaagcaaaactactagtcctgttatgtacatttacagctacatatgcagacacaatatgtataggctaccatgccaacaactcaaccgacactgttgacacagtacttgagaagaatgtgacagtgacacactctgtcaacctacttgaggacagtcacaatggaaaactatgtctactaaaaggaatagccccactacaattgggtaattgcagcgttgccggatggatcttaggaaacccagaatgcgaatcactgatttctaaggaatcatggtcctacattgtagagacaccaaaccctgagaatggaacatgttacccagggtatttcgccgactatgaggaactgagggagcaattgagttcagtatcttcatttgagaggttcgaaatattccccaaagaaagctcatggcccaaccacaccgtaaccggagtatcggcatcatgctcccataatgggaaaagcagtttttacagaaatttgctatggctgacggagaagaatggcttgtacccaaatctgagcaagtcctatgtaaacaacaaggagaaagaagtccttgtactatggggtgttcatcacccgtctaacataggggtccaaagggccatctatcatacagaaaatgcttatgtctctgtagtgtcttcacattatagcagaagattcaccccagaaatagcaaaaagacccaaagtaagaggtcaggaaggaagaatcaactactactggactctgctggaacccggggacacaataatatttgaggcaaatggaaatctaatagcgccatggtatgctttcgcactgagtagaggctttgagtcaggaatcatcacctcaaatgcaccaatgaatgaatgtgatgcaaagtgtcaaacacctcagggagctataaacagtagtcttcctttccagaatgtacacccagtcacaataggagagtgtccaaagtatgtcaggagtgcaaaattaaggatggttacaggactaaggaacatcccatccattcaatccagaggtttgtttggagccattgccggtttcattgaaggggggtggactggaatgatagatgggtggtatggttatcatcatcagaatgagcaaggatctggctatgctgcagatcaaaaaagcacacaaaatgccattaacgggattacaaacaaggtgaattctgtaattgagaaaatgaacactcaattcacagctgtgggcaaagaattcaacaaattagaaagaaggatggaaaacttaaataaaaaagttgatgatggatttctagacatttggacatataatgcagaattgttggttctactggaaaatgaaaggactttggatttccatgactcaaatgtgaagaatctgtatgagaaagtaaaaagccaattaaagaataatgccaaagaaataggaaacgggtgttttgaattctatcacaagtgtaacaatgaatgcatggaaagtgtgaaaaatggaacttatgactatccaaaatattccgaagaatcaaagttaaacagggagaaaattgatggagtgaaattggaatcaatgggagtctatcagattctggcgatctactcaactgtcgccagttcactggttcttttagtctccctgggggcaatcagcttctggatgtgttccaatgggtctttgcagtgtagaatatgcatctga

SEQ ID NO: 31737 - RNA, 1698 nt, synthetic construct
  misc_feature 1..1698: note = hemagglutinin__InfluenzaA__ABI21574
  source 1..1698: mol_type = other RNA
atgaaagcaaaactactagtcctgttatgtacatttacagctacatatgcagacacaatatgtataggctaccatgccaacaactcaaccgacactgttgacacagtacttgagaagaatgtgacagtgacacactctgtcaacctacttgaggacagtcacaatggaaaactatgtctactaaaaggaatagccccactacaattgggtaattgcagcgttgccggatggatcttaggaaacccagaatgcgaatcactgatttctaaggaatcatggtcctacattgtagagacaccaaaccctgagaatggaacatgttacccagggtatttcgccgactatgaggaactgagggagcaattgagttcagtatcttcatttgagaggttcgaaatattccccaaagaaagctcatggcccaaccacaccgtaaccggagtatcggcatcatgctcccataatgggaaaagcagtttttacagaaatttgctatggctgacggagaagaatggcttgtacccaaatctgagcaagtcctatgtaaacaacaaagagaaagaagtccttgtactatggggtgttcatcacccgtctaacataggggtccaaagggccatctatcatacagaaaatgcttatgtctctgtagtgtcttcacattatagcagaagattcaccccagaaatagcaaaaagacccaaagtaagaggtcaggaaggaagaatcaactactactggactctgctggaacccggggacacaataatatttgaggcaaatggaaatctaatagcgccatggtatgctttcgcactgagtagaggctttgagtcaggaatcatcacctcaaatgcaccaatgaatgaatgtgatgcaaagtgtcaaacacctcagggagctataaacagtagtcttcctttccagaatgtacacccagtcacaataggagagtgtccaaagtatgtcaggagtgcaaaattaaggatggttacaggactaaggaacatcccatccattcaatccagaggtttgtttggagccattgccggtttcattgaaggggggtggactggaatgatagatgggtggtatggttatcatcatcagaatgagcaaggatctggctatgctgcagatcaaaaaagcacacaaaatgccattaacgggattacaaacaaggtgaattctgtaattgagaaaatgaacactcaattcacagctgtgggcaaagaattcaacaaattagaaagaaggatggaaaacttaaataaaaaagttgatgatggatttctagacatttggacatataatgcagaattgttggttctactggaaaatgaaaggactttggatttccatgactcaaatgtgaagaatctgtatgagaaagtaaaaagccaattaaagaataatgccaaagaaataggaaacgggtgttttgaattctatcacaagtgtaacaatgaatgcatggaaagtgtgaaaaatggaacttatgactatccaaaatattccgaagaatcaaagttaaacagggagaaaattgatggagtgaaattggaatcaatgggagtctatcagattctggcgatctactcaactgtcgccagttcactggttcttttagtctccctgggggcaatcagcttctggatgtgttccaatgggtctttgcagtgtagaatatgcatctga

SEQ ID NO: 31738 - RNA, 1701 nt, synthetic construct
  misc_feature 1..1701: note = hemagglutinin__InfluenzaA__ABI21736
  source 1..1701: mol_type = other RNA
atgaagactatcattgctttgagctacattttatgtctggttttcgctcaaaaacttcccggaaatgacaacagcacggcaacgctgtgcctggggcaccatgcagtgccaaacggaacgctagtgaaaacaatcacgaatgaccaaattgaagtgaccaatgctactgagctggttcagagttcctcaacaggtggaatatgcgacagtcctcaccaaatccttgatggagaaaactgcacactaatagatgctctattgggagaccctcattgtgatggcttccaaaataaggaatgggacctttttgttgaacgcagcaaagcctacagcaactgttacccttatgatgtgccggattatgcctcccttaggtcactagttgcctcatccggcacactggagtttaacaatgaaagcttcaattggactggagtcgctcagaatggaacaagctctgcttgcaaaaggagatctaataaaagtttctttagtagattgaattggttgcaccaattaaaatacaaatacccagcactgaacgtgactatgccaaacaatgaaaaatttgacaaattgtacatttggggggttcaccacccgagtacggacagtgaccaaatcagcctatatgctcaagcaccagggagagtcacagtctctaccaaaagaagccaacaaactgtaatcccgaatatcggatctagaccctgggtaaggggtgtctccagcagaataagcatctattggacaatagtaaagccgggagacatacttttgattaactgcacagggaatctaattgctcctcggggttacttcaaaatacgaagtgggaaaagctcaataatgaggtcagatgcatccattggcaaatgcaattctgaatgcatcactccaaatggaagcattcccaatgacaaaccatttcaaaatgtaaacaggatcacatatggggcctgtcccagatatgttaagcaaaacactctgaaattggcaacagggatgcggaatgtaccagagaaacaaactagaggcatattcggcgcaatcgcgggtttcatagaaaatggttgggagggaatggtggacggttggtacggtttcaggcatcaaaattctgagggcacaggacaagcagcagatctcaaaagcactcaagcagcaatcaaccaaatcaacgggaaactgaataggttaatcgagaaaacgaacgagaaattccatcaaattgaaaaagaattctcagaagtggaagggagaattcaggacctcgagaaatatgttgaggacactaaaatagatctctggtcgtacaacgcggagcttcttgttgccctggagaaccagcatacaattgatctaactgactcagaaatgaacaaactatttgaaagaacaaagaagcaactgagggaaaatgctgaggatgtgggcaatggttgtttcaaaatataccacaaatgtgacaatgcctgcatagggtcaatcagaaatgggacttatgaccatgatgtatacagagacgaagcattaaacaaccggttccagatcaaaggtgttgagctgaagtcaggatacaaagattggatcctatggatttcctttgccatatcatgttttttgctttgtgttgtcttgctggggttcatcatgtgggcctgccaaaaaggcaacattaggtgcaacatttgcatttga

SEQ ID NO: 31739 - RNA, 1701 nt, synthetic construct
  misc_feature 1..1701: note = hemagglutinin__InfluenzaA__ABI22159
  source 1..1701: mol_type = other RNA
atgaagactatcattgctttgagctacattctatgtctggttttcgcccaaaaacttcccggaaatgacaacagcacggcaacgctgtgccttgggcaccatgcagtaccaaacggaacgatagtgaaaacaatcacgaatgaccaaattgaagttactaatgctactgagctggttcagagttcctcaacaggtgaaatatgcgacagtcctcatcagatccttgatggagaaaactgcacactaatagatgctctattgggagaccctcagtgtgatggcttccaaaataagaaatgggacctttttgttgaacgcagcaacgcctacagcaactgttacccttatgatgtgccggattatgcctcccttaggtcactagttgcctcatccggcacactggagtttaacaatgaaagcttcaattggactggagtcactcaaaatggaacaagctctgcttgcaaaaggagatctaataacagtttctttagtagattgaattggttgacccacttaaaattcaaatacccagcattgaacgtgactatgccaaacaatgaaaaatttgacaaattgtacatttggggggttcaccacccgggtacggacaatgaccaaatcttcctgtatgctcaagcatcaggaagaatcacagtctctaccaaaagaagccaacaaactgtaatcccgaatatcggatctagacccagagtaaggaatatccccagcagaataagcatctattggacaatagtaaaaccgggagacatacttttgattaacagcacagggaatctaattgctcctaggggttacttcaaaatacgaagtgggaaaagctcaataatgagatcagatgcacccattggcaaatgcaattctgaatgcatcactccaaatggaagcattcccaatgacaaaccatttcaaaatgtaaacaggatcacatatggggcctgtcccagatatgttaagcaaaacactctgaaattggcaacagggatgcgaaatgtaccagagaaacaaactagaggcatatttggcgcaatcgcgggtttcatagaaaatggttgggagggaatggtggatggttggtacggtttcaggcatcaaaattctgagggaataggacaagcagcagatctcaaaagcactcaagcagcaatcaatcaaatcaatgggaagctgaataggttgatcgggaaaaccaacgagaaattccatcagattgaaaaagaattctcagaagtagaagggagaattcaggacctcgagaaatatgttgaggacactaaaatagatctctggtcatacaacgcagagcttcttgttgccctggagaaccaacatacaattgatctaactgactcagaaatgaacaaactgtttgaaagaacaaagaagcaactgagggaaaatgctgaggatatgggcaatggttgtttcaaaatataccacaaatgtgacaatgcctgcataggatcaatcagaaatggaacttatgaccatgatgtatacagagatgaagcattaaacaaccggttccagatcaaaggcgttgagctgaagtcaggatacaaagattggatcctatggatttcctttgccatatcatgttttttgctttgtgttgctttgttggggttcatcatgtgggcctgccaaaaaggcaacattaggtgcaacatttgcatttga

SEQ ID NO: 31740 - RNA, 1707 nt, synthetic construct
  misc_feature 1..1707: note = hemagglutinin__InfluenzaA__ABI23979
  source 1..1707: mol_type = other RNA
atggagaaaatagtacttcttcttgcaataatcagtcttgttaaaagtgatcagatttgcattggttaccatgcaaacaactcgacagagcaggttgacacaataatggaaaagaacgtcactgttacacacgcccaagacatactggaaaagacacacaacgggaagctctgcgatctagacggagtgaagcctctaattttaagagattgtagtgtagctggatggctcctcgggaatccaatgtgtgacgaattcctcaatgtgccggaatggtcttacatagtggagaagatcaatccagccaatgacctctgttacccagggaatttcaacgactatgaagaactgaaacacctattgagcagaataaaccattttgagaaaattcagatcatccccaaaagttcttggtccgatcatgaagcctcatcaggggtgagctcagcatgtccataccagggaaggtcctccttttttagaaatgtggtatggcttatcaaaaaggacaatgcatacccaacaataaagagaagttacaataataccaaccaagaagatcttttggtactgtgggggattcaccatccaaatgatgcggcagagcagacaaggctctatcaaaacccaaccacctatatttccgttgggacatcaacactaaaccagagattggtaccaaaaatagctactagatccaaggtaaacgggcaaagtggaaggatggagttcttttggacaattttaaaaccgaatgatgcaataaattttgagagtaatggaaatttcattgctccagaaaatgcatacaaaattgtcaagaaaggggactcaacaatcatgaaaagtgaattggaatatggtaactgcaacaccaagtgtcaaactccaataggggcgataaactctagtatgccattccacaacatccaccctctcaccatcggggaatgccccaaatatgtgaaatcaaacagattagtccttgcgactgggctcagaaatagccctcaaggagagagaagaagaaaaaagagaggactatttggagctatagcaggttttatagagggaggatggcagggaatggtagatggttggtatgggtaccaccatagcaacgagcaggggagtgggtacgctgcagacaaagaatccactcaaaaggcaatagatggagtcaccaataaggtcaactcgatcattgacaaaatgaacactcagtttgaggccgttggaagggaatttaataacttagaaaggagaatagagaatttaaacaagaagatggaagacggatttctagatgtctggacttataatgctgaacttctggttctcatggaaaatgagagaactctagactttcatgactcaaatgtcaagaacctttacgacaaggtccgactacagcttagggataatgcaaaggagcttggtaacggttgtttcgagttctatcacagatgtgataatgaatgtatggaaagtgtaagaaacggaacgtatgactacccgcagtattcagaagaatcaagattaaaaagagaggaaataagtggagtaaaattggaatcaataggaacttatcaaatactgtcaatttattcaacagtggcgagctccctagcactggcaatcatggtggctggtctatctttatggatgtgctccaatggatcgttacaatgcagaatttgcatttaa

SEQ ID NO: 31741 - RNA, 1701 nt, synthetic construct; identical to SEQ ID NO: 30826
  misc_feature 1..1701: note = hemagglutinin__InfluenzaA__ABI26646
  source 1..1701: mol_type = other RNA

SEQ ID NO: 31742 - RNA, 1701 nt, synthetic construct
  misc_feature 1..1701: note = hemagglutinin__InfluenzaA__ABI30367
  source 1..1701: mol_type = other RNA
atgaaagcaaaactactagtcctgttgtgtgcatttacagctacatatgcagacacaatatgtataggctaccatgcgaacaactcaaccgacactgttgacacagtacttgagaagaacgtgacagtgacacactctgtcaacctacttgaggacagtcacaacggaaaactatgccgactaaaaggaacagccccactacaattgggtaattgcagcgttgccggatggatcttaggaaacccagaatgcgaatcactgttttctaaggaatcatggtcctacattgcagaaacaccaaaccctgagaatggaacatgttacccagggtatttcgccgactatgaggaactgagggagcaattgagctcagtatcatcattcgagagattcgaaatattccccaaggaaagctcatggcccaaccacaccgtaaccaaaggagtgacggcatcatgctcacataatgggaaaagcagtttttacaaaaatttgctatggctgacggaaaagaatggcttgtacccaaatctgagcaagtcctatgtaaacaacaaggagaaagaagtccttgtactatggggtgttcatcacccgtctaacataggggaccaaagggccatctatcatacagaaaatgcttatgtctctgtagtgtcttcacattatagtagaagattcaccccagaaataacaaaaagacccaaagtaagagatcaagaagggagaattaactactactggactctgctggaacccggggacacaataatatttgaggcaaatggaaatctaatagcgccatggtacgctttcgcactgagtagaggctttgggtcaggaatcatcacctcaaacgcatcaatgggtgaatgtgacgctaagtgtcaaacaccccaaggagctataaacagtagtcttcctttccagaatgtacacccagtcacaataggagagtgtcccaagtatgtcaggagtacaaaattaaggatggttacaggactaagaaacatcccatccattcaatctagaggtttgtttggagccattgccggtttcattgaaggggggtggactggaatgatagatggatggtatggttaccatcatcagaatgaacaaggatctggctatgctgcagaccaaaaaagcacacaaaatgccattgatgggattacaaacaaggtgaattctgtaatcgagaaaatgaacactcaattcacagctgtaggcaaagaattcaacaaattagagagaaggatggaaaacttaaataagaaagttgatgatgggtttctggacatttggacatataatgcagagttgttggttctcctggaaaatgaaaggactttggattttcatgactcaaatgtgaagaatctgtatgagaaagtaaaaacccaattgaagaataatgccaaagaaatcgggaacgggtgttttgaattctatcacaagtgtaacaatgaatgcatggaaagtgtgaaaaatggaacttatgactatccaaaatattccgaagaatcaaagttaaacagggaaaaaattgatggagtgaaattggaatcaatgggagtctatcagattctggcgatctactcaactgtcgccagttcactggtgcttttggtctccctgggggcaatcagtttctggatgtgttctaatgggtctttgcagtgtagaatatgcatctga

SEQ ID NO: 31743 - RNA, 1701 nt, synthetic construct
  misc_feature 1..1701: note = hemagglutinin__InfluenzaA__ABI30378
  source 1..1701: mol_type = other RNA
atgaaagcaaaactactggtcctgttatgtgcactttcagctacagatgcagacacaatatgtataggctaccatgcgaacaactcaaccgacactgttgacacagtactcgaaaagaacgtgacagtgacacactctgtcaacctacttgaggacaaccacaacggaaaactatgcaaactaaaaggaatagccccactacaattggggaaatgcagcattgccggatggatcttaggaaacccagaatgcgaatcactgttttctaagaaatcatggtcctacattgcagaaacaccaaactccgagaatggaacatgttacccagggtatttcgccgactatgaggaactgagggaacaattgagttcagtatcatcattcgagagattcgaaatattccccaaggaaagttcatggcccaaacacaacgtaaccaaaggagtaacggcatcatgctcccataaggggaaaagcagtttttacagaaatttgctatggctgacggagaaaaatggctcgtacccaaatctgagcaagtcctatgtgaacaacaaagagaaagaagtccttgtactatggggtgttcatcacccgtctaacatagaggaccaaaagaccatctatcgtaaagaaaatgcttatgtctctgtagtgtcttcacattataacaggagattcaccccagaaatagcaaaaagacccaaagtaagaaatcaagaagggagaattaactactactggactctgctggaacccggggacacaataatatttgaggcaaatggaaatctaatagcgccatggtatgctttcgcattgagtagaggctttgggtcaggaatcatcacctcaaacgcatcgatggatgaatgtgacgcgaagtgtcaaacaccccagggagctataaacagtagtcttccttttcagaatgtacacccagtcacaataggagagtgcccaaagtacgtcaggagtacaaaattaaggatggttacaggactaaggaacatcccatccattcaatccagaggtttgtttggagccattgccggtttcattgaagggggatggactggaatgattgatggatggtatggttatcatcatcagaatgaacagggatctggctatgctgcggatcaaaaaagcacacaaaatgccattaacgggattacaaacaaggtgaactctataatcgagaaaatgaacactcaattcacagctgtgggtaaagaattcaacaaactagaaaaaaggatggaaaacttaaataaaaaagttgatgatgggtttctggacatttggacatataatgcagaattgttggttctactggaaaatgaaaggactttggatttccatgactcaaatgtgaagaacctgtatgagaaagtaaaaagccaattaaagaataatgccaaagaaataggaaacgggtgttttgaattctaccacaagtgtaacaatgaatgcatggaaagtgtaaaaaatgggacttatgactatccaaaatattcagaagaatcaaagttaaacagggaaaaaattgatggagtgaaattggaatcaatgggagtctatcagattctggcgatctactcaactgtcgccagttcactggtgcttttggtctccctgggggcaatcagcttctggatgtgttctaatgggtctttgcagtgcagaatatgcatctga

SEQ ID NO: 31744 - RNA, 1701 nt, synthetic construct
  misc_feature 1..1701: note = hemagglutinin__InfluenzaA__ABI30400
  source 1..1701: mol_type = other RNA
atgaagactatcattgctttgagctacattttatgtctggttttcgctcaaaaacttcccggaaatgacaacagcacggcaacgctgtgcctggggcaccatgcagtgccaaacggaacgctagtgaaaacaatcacgaatgaccaaattgaagtgactaatgctactgagctggttcagagttcctcaacaggtggaatatgcgacagtcctcaccaaatccttgatggagaaaactgcacactaatagatgctctattgggagaccctcattgtgatggcttccaaaataaggaatgggacctttttgttgaacgcagcaaagcctacagcaactgttacccttatgatgtgccggattatgcctcccttaggtcactagttgcctcatccggcacactggagtttaacaatgaaagcttcaattggactggagtcgctcagaatggaacaagctctgcttgcaaaaggagatctaataaaagtttctttagtagattgaattggttgcaccaattaaaatacaaatacccagcactgaacgtgactatgccaaacaatgaaaaatttgacaaattgtacatttggggggttcaccacccgagtacggacagtgaccaaatcagcctatatgctcaagcaccagggagagtcacagtctctaccaaaagaagccaacaaactgtaatcccgaatatcggatctagaccctgggtaaggggtgtctccagcagaataagcatctattggacaatagtaaaaccgggagacatacttttgattaactgcacagggaatctaattgctcctcggggttacttcaaaatacgaagtgggaaaagctcaataatgaggtcagatgcatccattggcaaatgcaattctgaatgcatcactccaaatggaagcattcccaatgacaaaccatttcaaaatgtaaacaggatcacatatggggcctgtcccagatatgttaagcaaaacactctgaaattggcaacagggatgcggaatgtaccagagaaacaaactagaggcatattcggcgcaatcgcgggtttcatagaaaatggttgggagggaatggtggacggttggtacggtttcaggcatcaaaattctgagggcacaggacaagcagcagatctcaaaagcactcaagcagcaatcaaccaaatcaacgggaaactgaataggttaatcgagaaaacgaacgagaaattccatcaaattgaaaaagaattctcagaagtggaagggagaattcaggacctcgagaaatatgttgaggacactaaaatagatctctggtcgtacaacgcggagcttcttgttgccctggagaaccagcatacaattgatctaactgactcagaaatgaacaaactgtttgaaagaacaaagaagcaactgagggaaaatgctgaggatatgggcaatggttgtttcaaaatataccacaaatgtgacaatgcctgcatagggtcaatcagaaatgggacttatgaccatgatgtatacagagacgaagcattaaacaaccggttccagatcaaaggtgttgagctgaagtcaggatacaaagattggatcctatggatttcctttgccatatcatgttttttgctttgtgttgtcttgctgggattcatcatgtgggcctgccaaaaaggcaacattaggtgcaacatttgcatttga

SEQ ID NO: 31745 - RNA, 1701 nt, synthetic construct
  misc_feature 1..1701: note = hemagglutinin__InfluenzaA__ABI30411
  source 1..1701: mol_type = other RNA
atgaagactatcattgctttgagctacattttatgtctggttttcgctcaaaaacttcccggaaatgacaacagcacggcaacgctgtgcctggggcaccatgcagtgccaaacggaacgctagtgaaaacaatcacgaatgaccaaattgaagtgactaatgctactgagctggttcagagttcctcaacaggtggaatatgcgacagtcctcaccaaatccttgatggagaaaactgcacactaatagatgctctattgggagaccctcattgtgatggcttccaaaataaggaatgggacctttttgttgaacgcagcaaagcctacagcaactgttacccttatgatgtgccggattatgcctcccttaggtcactagttgcctcatccggcacactggagtttaacaatgaaagcttcaattggactggagtcgctcagaatggaacaagctctgcttgcaaaaggagatctaataaaagtttctttagtagattgaattggttgcaccaattaaaatacaaatacccagcactgaacgtgactatgccaaacaatgaaaaatttgacaaattgtacatttggggggttcaccacccgagtacggacagtgaccaaatcagcctatatgctcaagcaccagggagagtcacagtctctaccaaaagaagccaacaaactgtaatcccgaatatcggatctagaccctgggtaaggggtgtctccagcagaataagcatctattggacaatagtaaaaccgggagacatacttttgattaactgcacagggaatctaattgctcctcggggttacttcaaaatacgaagtgggaaaagctcaataatgaggtcagatgcatccattggcaaatgcaattctgaatgcatcactccaaatggaagcattcccaatgacaaaccatttcaaaatgtaaacaggatcacatatggggcctgtcccagatatgttaagcaaaacactctgaaattggcaacagggatgcggaatgtaccagagaaacaaactagaggcatattcggcgcaatcgcgggtttcatagaaaatggttgggagggaatggtggacggttggtacggtttcaggcatcaaaattctgagggcacaggacaagcagcagatctcaaaagcactcaagcagcaatcaaccaaatcaacgggaaactgaataggttaatcgagaaaacgaacgagaaattccatcaaattgaaaaagaattctcagaagtggaagggagaattcaggacctcgagaaatatgttgaggacactaaaatagatctctggtcgtacaatgcggagcttcttgttgccctggagaaccagcatacaattgatctaactgactcagaaatggacaaactgtttgaaagaacaaagaagcaactgagggaaaatgctgaggatatgggcaatggttgtttcaaaatataccacaaatgtgacaatgcctgcatagggtcaatcagaaatgggacttatgaccatgatgtatacagagacgaagcattaaacaaccggttccagatcaaaggtgttgagctgaagtcaggatacaaagattggatcctatggatttcctttgccatatcatgttttttgctttgtgttgtcttgctggggttcatcatgtgggcctgccaaaaaggcaacattaggtgcaacatttgcatttga

SEQ ID NO: 31746 - RNA, 1701 nt, synthetic construct; identical to SEQ ID NO: 31095
  misc_feature 1..1701: note = hemagglutinin__InfluenzaA__ABI30422
  source 1..1701: mol_type = other RNA

SEQ ID NO: 31747 - RNA, 1701 nt, synthetic construct; identical to SEQ ID NO: 30826
  misc_feature 1..1701: note = hemagglutinin__InfluenzaA__ABI30433
  source 1..1701: mol_type = other RNA

SEQ ID NO: 31748 - RNA, 1701 nt, synthetic construct; identical to SEQ ID NO: 31095
  misc_feature 1..1701: note = hemagglutinin__InfluenzaA__ABI30444
  source 1..1701: mol_type = other RNA

SEQ ID NO: 31749 - RNA, 1701 nt, synthetic construct; identical to SEQ ID NO: 30826
  misc_feature 1..1701: note = hemagglutinin__InfluenzaA__ABI30455
  source 1..1701: mol_type = other RNA

SEQ ID NO: 31750 - RNA, 1701 nt, synthetic construct; identical to SEQ ID NO: 30826
  misc_feature 1..1701: note = hemagglutinin__InfluenzaA__ABI30466
  source 1..1701: mol_type = other RNA

SEQ ID NO: 31751 - RNA, 1701 nt, synthetic construct; identical to SEQ ID NO: 30826
  misc_feature 1..1701: note = hemagglutinin__InfluenzaA__ABI30477
  source 1..1701: mol_type = other RNA

SEQ ID NO: 31752 - RNA, 1701 nt, synthetic construct
  misc_feature 1..1701: note = hemagglutinin__InfluenzaA__ABI30488
  source 1..1701: mol_type = other RNA
atgaagactatcattgctttgagctacattctatgtctggttttcgctcaaaaacttcccggaaatgacaacagcacggcaacgctgtgccttgggcaccatgcagtaccaaacggaacgatagtaaaaacaatcacgaatgaccaaattgaagttactaatgctactgagctggttcagagttcctcaacaggtggaatatgcgacagtcctcatcagatccttgatggagaaaactgcacactaatagatgctctattgggagaccctcagtgtgatggcttccaaaataagaaatgggacctttttgttgaacgcagcaaagcctacagcaactgttacccttatgatgtgccggattatgcctcccttaggtcactagttgcctcatccggcacactggagtttaacaatgaaagcttcaattggactggagtcactcaaaatggaacaagctctgcttgcaaaaggagatctaataacagtttctttagtagattgaattggttgacccatttaaaattcaaatacccagcattgaacgtgactatgccaaacaatgaaaaatttgacaaattgtacatttggggggttcaccacccgggtacgaacaatgaccaaatcagcctatatgctcaagcatcaggaagaatcacagtctctaccaaaagaagccaacaaactgtaatcccgaatatcggatctagacccagggtaagggatatccccagcagaataagcatctattggacaatagtaaaaccgggagacatacttttgattaacagcacagggaatctaattgctcctcggggttacttcaaaatacgaagtgggaaaagctcaataatgagatcagatgcacccattggcaaatgcaattctgaatgcatcactccaaatggaagcattcccaatgacaaaccatttcaaaatgtaaacaggatcacatatggggcctgtcccagatatgttaagcaaaacactctgaaattggcaacagggatgcgaaatgtaccagagaaacaaactagaggcatatttggcgcaatcgcgggtttcatagaaaatggttgggagggaatggtggatggttggtacggtttcaggcatcaaaattctgagggaataggacaagcagcagatctcaaaagcactcaagcagcaatcaaccaaatcaatgggaagctgaataggttgatcgggaaaaccaacgagaaattccatcagattgaaaaagaattctcagaagtagaagggagaattcaggacctcgagaaatatgttgaggacactaaaatagatctctggtcatacaacgcggagcttcttgttgccctggagaaccaacatacaattgatctaactgactcagaaatgaacaaactgtttgaaagaacaaagaagcaactgagggaaaatgctgaggatatgggcaatggttgtttcaaaatataccacaaatgtgacaatgcctgcatagggtcaatcagaaatggaacttatgaccatgatgtatacagagatgaagcattaaacaaccggttccagatcaaaggtgttgagctgaagtcaggatacaaagattggatcctatggatttcctttgccatatcatgttttttgctttgtgttgctttgttggggttcatcatgtgggcctgccaaaaaggcaacattaggtgcaacatttgcatttga

SEQ ID NO: 31753 - RNA, 1701 nt, synthetic construct; identical to SEQ ID NO: 30826
  misc_feature 1..1701: note = hemagglutinin__InfluenzaA__ABI30499
  source 1..1701: mol_type = other RNA

SEQ ID NO: 31754 - RNA, 1701 nt, synthetic construct
  misc_feature 1..1701: note = hemagglutinin__InfluenzaA__ABI30510
  source 1..1701: mol_type = other RNA
atgaagactatcattgctttgagctacattctatgtctggttttcgctcaaaaacttcccggaaatgacaacagcacggcaacgctgtgccttgggcaccatgcagtaccaaacgggacgatagtgaaaacaatcacgaatgaccaaattgaagtcactaatgctactgagctggttcagagttcctcaacaggtggaatatgcgacagtcctcatcagatccttgatggagaaaactgcacactaatagatgctctattgggagaccctcagtgtgatggcttccaaaataagaaatgggacctttttgttgaacgcagcaaagcctacagcaactgttacccttatgatgtgccggattatgcctcccttaggtcactagttgcctcatccggcacactggagtttaacaatgaaagcttcaattggactggagtcactcaaaatggaacaagctctgcttgcaaaaggagatctaataacagtttctttagtagattgaattggttgacccatttaaaattcaaatacccagcattgaacgtgactatgccaaacaatgaaaaatttgacaaattgtacatttggggggttcaccacccgggtacggacaatgaccaaatcagcctatatgctcaagcatcaggaagaatcacagtctctaccaaaagaagccaacaaactgtaatcccgaatatcggatctagacccagggtaagggatatccccagcagaataagcatctattggacaatagtaaaaccgggagacatacttttgattaacagcacagggaatctaattgctcctcggggttacttcaaaatacgaagtgggaaaagctcaataatgagatcagatgcacccattggcaaatgcaattctgaatgcatcactccaaatggaagcattcccaatgacaaaccatttcaaaatgtaaacaggatcacatatggggcctgtcccagatatgttaagcaaaacactctgaaattggcaacagggatgcgaaatgtaccagagaaacaaactagaggcatatttggcgcaatcgcgggtttcatagaaaatggttgggagggaatggtggatggttggtacggtttcaggcatcaaaattctgagggaataggacaagcagcagatctcaaaagcactcaagcagcaatcaaccaaatcaatgggaagctgaataggttgatcgggaaaaccaacgagaaattccatcagattgaaaaagaattctcagaagtagaagggagaattcaggacctcgagaaatatgttgaggacactaaaatagatctctggtcatacaacgcggagcttcttgttgccctggagaaccaacatacaattgatctaactgactcagaaatgaacaaactgtttgaaagaacaaagaagcaactgagggaaaatgctgaggatatgggcaatggttgtttcaaaatataccacaaatgtgacaatgcctgcatagggtcaatcagaaatggaacttatgaccatgatgtatacagagatgaagcattaaacaaccggttccagatcaaaggtgttgagctgaagtcaggatacaaagattggatcctatggatttcctttgccatatcatgttttttgctttgtgttgctttgttggggttcatcatgtgggcctgccaaaaaggcaacattaggtgcaacatttgcatttga

SEQ ID NO: 31755 - RNA, 1701 nt, synthetic construct
  misc_feature 1..1701: note = hemagglutinin__InfluenzaA__ABI30521
  source 1..1701: mol_type = other RNA
atgaagactatcattgctttgagctacattctatgtctggttttcgctcaaaaacttcccggaaatgacaacagcacggcaacgctgtgccttgggcaccatgcagtaccaaacggaacgatagtgaaaacaatcacgaatgaccaaattgaagttactaatgctactgagctggttcagagttcctcaacaggtggaatatgcgacagtcctcatcagatccttgatggagaaaactgcacactaatagatgctctattgggagaccctcagtgtgatggcttccaaaataagaaatgggacctttttgttgaacgcagcaaagcctacagcaactgttacccttatgatgtgccggattatgcctcccttaggtcactagttgcctcatccggcacactggagtttaacaatgaaagcttcaattggactggagtcactcaaaatggaacaagctctgcttgcaaaaggagatctaataacagtttctttagtagattgaattggttgacccatttaaaattcaaatacccagcattgaacgtgactatgccaaacaatgaaaaatttgacaaattgtacatttggggggttcaccacccgggtacgaacaatgaccaaatcagcctatatgctcaagcatcaggaagaatcacagtctctaccaaaagaagccaacaaactgtaatcccgaatatcggatctagacccagggtaagggatatccccagcagaataagcatctattggacaatagtaaaaccgggagacatacttttgattaacagcacagggaatctaattgctcctcggggttacttcaaaatacgaagtgggaaaagctcaataatgagatcagatgcatccattggcaaatgcaattctgaatgcatcactccaaatggaagcattcccaatgacaaaccatttcaaaatgtaaacaggatcacatatggggcctgtcccagatatgttaagcaaaacactctgaaattggcaacagggatgcgaaatgtaccagagaaacaaactagaggcatatttggcgcaatcgcgggtttcatagaaaatggttgggagggaatggtggatggttggtacggtttcaggcatcaaaattctgagggaataggacaagcagcagatctcaaaagcactcaagcagcaatcaaccaaatcaatgggaagctgaataggttgatcgggaaaaccaacgagaaattccatcagattgaaaaagaattctcagaagtagaagggagaattcaggacctcgagaaatatgttgaggacactaaaatagatctctggtcatacaacgcggagcttcttgttgccctggagaaccaacatacaattgatctaactgactcagaaatgaacaaactgtttgaaagaacaaagaagcaactgagggaaaatgctgaggatatgggcaatggttgtttcaaaatataccacaaatgtgacaatgcctgcatagggtcaatcagaaatggaacttatgaccatgatgtatacagagatgaagcattaaacaaccggttccagatcaaaggtgttgagctgaagtcaggatacaaagattggatcctatggatttcctttgccatatcatgttttttgctttgtgttgctttgttggggttcatcatgtgggcctgccaaaaaggcaacattaggtgcaacatttgcatttga

SEQ ID NO: 31756 - RNA, 1701 nt, synthetic construct; identical to SEQ ID NO: 30824
  misc_feature 1..1701: note = hemagglutinin__InfluenzaA__ABI30532
  source 1..1701: mol_type = other RNA

SEQ ID NO: 31757 - RNA, 1701 nt, synthetic construct; identical to SEQ ID NO: 31701
  misc_feature 1..1701: note = hemagglutinin__InfluenzaA__ABI30543
  source 1..1701: mol_type = other RNA

SEQ ID NO: 31758 - RNA, 1701 nt, synthetic construct; identical to SEQ ID NO: 30824
  misc_feature 1..1701: note = hemagglutinin__InfluenzaA__ABI30554
  source 1..1701: mol_type = other RNA

SEQ ID NO: 31759 - RNA, 1698 nt, synthetic construct
  misc_feature 1..1698: note = hemagglutinin__InfluenzaA__ABI30565
  source 1..1698: mol_type = other RNA
atgaaagtaaaactactggttctgttatgtacatttacagctacatatgcagacacaatatgtataggctaccatgccaacaactcgaccgacactgttgacacagtacttgagaagaatgtgacagtgacacactctgtcaacctacttgaggacagtcacaatggaaaactatgtctactaaaaggaatagccccactacaattgggtaattgcagcgttgccggatggatcttaggaaacccagaatgcgaattactgatttccaaggaatcatggtcctacattgtagaaacaccaaatcctgagaatggaacatgttacccagggtatttcgccgactatgaggagctgagggagcaattgagttcagtatcttcatttgagaggttcgaaatattccccaaagagagctcatggcccaaccacaccgtaaccggagtatcagcatcatgctcccataacgggaaaagcagtttttacaggaatttgctatggctgacggggaagaatggtttgtatccaaacctgagcaagtcctatgcaaacaacaaagagaaagaagtccttgtactgtggggtgttcatcacccgcctaacataggggaccaaagggccctctatcatacagaaaatgcttatgtctctgtagtgtcttcacattatagcagaagattcaccccagaaatagccaaaagacccaaggtgagagatcaggaaggaagaatcaactactactggactctgctggaacccggggatacaataatatttgaggcaaatggaaatctaatagcgccaaggtttgctttcgcactgagtagaggctttggatcaggaatcatcacctcaaatgcaccaatggatgaatgtgatgcgaagtgtcaaacacctcagggagctataaacagcagtcttcctttccagaatgtacacccagtcacaataggagagtgtccaaagtatgtcaggagtgcaaaattaagaatggttacaggactaaggaacatcccatccattcaatccagaggtttgtttggagccattgccggtttcattgaaggggggtggactggaatggtagatggttggtatggttatcaccatcagaatgagcaaggatctgggtatgctgcagatcaaaaaagcacacaaaatgccattaacgggattacaaacaaggtgaattctgtaattgagaaaatgaacactcaattcacagctgtgggcaaagaattcaacaaattggaaagaaggatggaaaacttaaataaaaaagttgatgatgggtttctagacatttggacatataacgcagaattgttggttctactggaaaatgaaaggactttggacttccatgactccaacgtgaagaatctgtatgagaaagtaaaaagccaattaaagaataatgccaaagaaataggaaacgggtgttttgaattctatcacaagtgtaacgatgaatgcatggagagtgtgaaaaatggaacttatgactatccaaaatattccgaagaatcaaagttgaacagggagagaattgatggagtgaaattggaatcaatgggagtctatcagattctggcgatctactcaacagtcgccagttccctggttcttttggtctccctgggggcaatcagcttctggatgtgttccaatgggtctttgcagtgtagaatatgcatctaa

SEQ ID NO: 31760 - RNA, 1701 nt, synthetic construct; identical to SEQ ID NO: 31161
  misc_feature 1..1701: note = hemagglutinin__InfluenzaA__ABI30587
  source 1..1701: mol_type = other RNA

SEQ ID NO: 31761 - RNA, 1701 nt, synthetic construct
  misc_feature 1..1701: note = hemagglutinin__InfluenzaA__ABI30609
  source 1..1701: mol_type = other RNA
atgaagactatcattgctttgagctacattctatgtctggttttcgctcaaaaacttcccggaaatgacaacagcacggcaacgctgtgccttgggcaccatgcagtaccaaacggaacgatagtgaaaacaatcatgaatgaccaaattgaagttactaatgctactgagctggttcagagttcctcaacaggtggaatatgcgacagtcctcatcagatccttgatggagaaaactgcacactaatagatgctctattgggagaccctcagtgtgatggcttccaaaataagaaatgggacctttttgttgaacgcagcaaagcctacagcaactgttacccttatgatgtgccggattatgcctcccttaggtcactagttgcctcatccggcacactggagtttaacaatgaaagcttcaattggactggagtcactcaaaatggaacaagctctgcttgcaaaaggagatctaataacagtttctttagtagattgaattggttgacccacttaaaattcaaatacccagcattgaacgtgactatgccaaacaatgaaaaatttgacaaattgtacatttggggggttcaccacccgggtacggacaatgaccaaatcttcctgtatgctcaagcatcaggaagaatcacagtctctaccaaaagaagccaacaaactgtaatcccgaatatcggatctagacccagagtaaggaatatccccagtagaataagcatatattggacaatagtaaaaccgggagacatacttttgattaacagcacagggaatctaattgctcctaggggttacttcaaaatacgaagtgggaaaagctcaataatgagatcagatgcacccattggcaaatgcaattctgaatgcatcactccaaatggaagcattcccaatgacaaaccatttcaaaatgtaaacaggatcacatatggggcctgtcccagatatgttaagcaaaacactctgaaattggcaacagggatgcgaaatgtaccagagaaacaaactagaggcatatttggcgcaatcgcgggtttcatagaaaatggttgggagggaatggtggatggttggtacggtttcaggcatcaaaattctgagggaacaggacaagcagcagatctcaaaagcactcaagcagcaatcaatcaaatcaatgggaagctgaataggttgatcgggaaaaccaacgagaaattccatcagattgaaaaagaattctcagaagtagaagggagaattcaggacctcgagaaatatgttgaggacactaaaatagatctctggtcatacaacgcggagcttcttgttgccctggagaaccaacatacaattgatctaactgactcagaaatgaacaaactgtttgaaagaacaaagaagcaactgagggaaaatgctgaggatatgggcaatggttgtttcaaaatataccacaaatgtgacaatgcctgcatagggtcaatcagaaatggaacttatgaccatgatgtatacagagatgaagcattaaacaaccggttccagatcaaaggcgttgagctgaagtcaggatacaaagattggatcctatggatttcctttgccatatcatgttttttgctttgtgttgctttgttggggttcatcatgtgggcctgccaaaaaggcaacattaggtgcaacatttgcatttga

SEQ ID NO: 31762 - RNA, 1701 nt, synthetic construct
  misc_feature 1..1701: note = hemagglutinin__InfluenzaA__ABI30620
  source 1..1701: mol_type = other RNA
atgaagactatcattgctttgagctacattctatgtctggttttcgctcaaaagcttcccggaaatgacaacagcacggcaacgctgtgccttgggcaccatgcagtaccaaacggaacgatagtgaaaacaatcacgaatgaccaaattgaagttactaatgctactgagctggttcagagttcctcaacaggtggaatatgcgacagtcctcatcagatccttgatggagaaaactgcacactaatagatgctctattgggagaccctcagtgtgatggcttccaaaataagaaatgggacctttttattgaacgcagcaaagcctacagcaactgttacccttatgatgtgccggattatgcctcccttaggtcactagttgcctcatccggcacactggaatttaacaatgaaagcttcaattggactggagtcactcaaaatggaacaagctctgcttgcaaaaggagatctaataacagtttctttagtagattgaattggttgacccacttaaaattcaaatacccagcattgaacgtgactatgccaaacaatgaaaaatttgacaaattgtacatttggggggttcaccacccgggtacggacaatgaccaaatcagcctatatgctcaagcttcaggaaggatcacagtctctaccaaaagaagccaacaaactgtaatcccgaatatcggatctagacccagggtaagggatatccccagcagaataagcatctattggacaatagtaaaaccgggagacatacttttgattaacagcacagggaatctaattgctcctcggggttacttcaaaatacgaagtgggaaaagctcaataatgagatcagatgcacccattggcaaatgcaattctgaatgcatcactccaaatggaagcattcccaatgacaaaccgtttcaaaatgtaaacaggatcacatatggggcctgtcccagatatgttaagcaaaacactctgaaattggcaacagggatgcgaaatgtaccagagaaacaaactagaggcatatttggcgcaatcgcgggtttcatagaaaatggttgggagggaatggtggatggttggtacggtttcaggcatcaaaattctgagggaataggacaagcagcagatctcaaaagcactcaagcagcaatcaaccaaatcaatgggaagctgaataggttgatcgggaaaaccaacgagaaattccatcagattgaaaaagaattctcagaagtagaagggagaattcaggacctcgagaaatatgttgaggacactaaagtagatctctggtcatacaacgcagagcttcttgttgccctggagaaccaacatacaattgatctaactgactcagaaatgaacaaactgtttgaaagaacaaagaagcaactgagggaaaatgctgaggatatgggcaatggttgtttcaaaatataccacaaatgtgacaatgcctgcatagggtcaatcagaaatggaacttatgaccatgatgtatacagagatgaagcattgaacaaccggttccagatcaaaggtgttgagctgaagtcaggatacaaagattggatcctatggatttcctttgccatatcatgttttttgctttgtgttgctttgttggggttcatcatgtgggcctgccaaaaaggcaacattaggtgcaacatttgcatttga

SEQ ID NO: 31763 - RNA, 1701 nt, synthetic construct; identical to SEQ ID NO: 31137
  misc_feature 1..1701: note = hemagglutinin__InfluenzaA__ABI30733
  source 1..1701: mol_type = other RNA

SEQ ID NO: 31764 - RNA, 1701 nt, synthetic construct
  misc_feature 1..1701: note = hemagglutinin__InfluenzaA__ABI30744
  source 1..1701: mol_type = other RNA
atgaagactatcattgctttgagctacattctatgtctggttttcgctcaaaaacttcccggaaatgacaacagcacggcaacgctgtgccttgggcaccatgcagtaccaaacggaacgatagtgaaaacaatcacgaatgaccaaattgaagttactaatgctactgagctggttcagagttcctcaacaggtggaatatgcgacagtcctcatcagatccttgatggagaaaactgcacactaatagatgctctattgggagaccctcagtgtgatggcttccaaaataagaaatgggacctttttgttgaacgcagcaaagcctacagcaactgttacccttatgatgtgccggattatgcctcccttaggtcactaattgcctcatccggcacactggagtttaacaatgaaagcttcaattggactggagtcactcaaaatggaacaagctctgcttgcaaaaggagatctaatagcagtttctttagtagattgaattggttgacccacttaaaattcaaatacccagcattgaacgtgactatgccaaacaatgaagaatttgacaaattgtacatttggggggttcaccacccgggtacatacaatgaccaaatcagcctatatgctcaagcatcaggaagaatcacagtgtctaccaaaagaagccaacaaactgtaatcccgaatatcgggtctagacccagggtaagggatatccccagcagaataagcatctattggacaatagtaaaaccgggagacatacttttgattaacagcacagggaatctaattgctcctcggggttacttcaaaatacgaagtgggaaaagctcaataatgagatcagatgcacccattggcaaatgcaattctgaatgcatcactccaaatggaagcattcccaatgacaaaccatttcaaaatgtaaacaggatcacatatggggcctgtcccagatatgttaagcaaaacactctgaaattggcaacagggatgcgaaatgtaccagagaaacaaactagaggcatatttggcgcaatcgcgggtttcatagaaaatggttgggagggaatggtggatggttggtacggtttcaggcatcaaaattctgagggaataggacaagcagcagatctcaaaagcactcaagcagcaatcgaccaaatcaatgggaagctgaataggttgatcgggaaaaccaacgagaaattccatcagattgaaaaagaattctcagaagtagaagggagaattcaggacctcgaaaaatatgttgaggacactaaaatagatctctggtcatacaacgcggagcttcttgttgccctggagaaccaacatacaattgatctaactgactcagaaatgaacaaactgtttgaaagaacaaagaagcaactgagggaaaatgctgaggatatgggcaatggttgtttcaaaatataccacaaatgtgacaatgcctgcatagggtcaatcagaaatggaacttatgaccatgatgtatacagagatgaagcattaaacaaccggttccagatcaaaggtgttgagctgaagtcaggatacaaagattggattctatggatttcctttgccatatcatgttttttgctttgtgttgctttgttggggttcatcatgtgggcctgccaaaaaggcaacattaggtgcaacatttgcatttga

SEQ ID NO: 31765 - RNA, 1701 nt, synthetic construct; identical to SEQ ID NO: 31764
  misc_feature 1..1701: note = hemagglutinin__InfluenzaA__ABI30755
  source 1..1701: mol_type = other RNA

SEQ ID NO: 31766 - RNA, 1701 nt, synthetic construct; identical to SEQ ID NO: 31161
  misc_feature 1..1701: note = hemagglutinin__InfluenzaA__ABI30766
  source 1..1701: mol_type = other RNA

SEQ ID NO: 31767 - RNA, 1701 nt, synthetic construct
  misc_feature 1..1701: note = hemagglutinin__InfluenzaA__ABI30777
  source 1..1701: mol_type = other RNA
atgaagactatcattgctttgagctacattctatgtctggttttcgctcaaaaacttcccggaaatgacaacagcacggcaacgctgtgccttgggcaccatgcagtaccaaacggaacgatagtgaaaacaatcacgaatgaccaaattgaagttactaatgctactgagttggttcagagttcctcaacaggtggaatatgcgacagtcctcatcagatccttgatggagaaaactgcacactaatagatgctctattgggagaccctcagtgtgatggcttccaaaataagaaatgggacctttttgttgaacgcagcaaagcctacagcaactgttacccttatgatgtgccggattatgcctcccttaggtcactaattgcctcatccggcacactggagtttaacaatgaaagcttcaattggactggagtcactcaaaatggaacaagctctgcttgcaaaaggagatctaatagcagtttctttagtagattgaattggttgacccacttaaaattcaaatacccagcattgaacgtgactatgccaaacaatgaagaatttgacaaattgtacatttggggggttcaccacccgggtacatacaatgaccaaatcagcctatatgctcaagcatcaggaagaatcacagtctctaccaaaagaagccaacaaactgtaatcccgaatatcgggtctagacccagggtaagggatatccccagcagaataagcatctattggacaatagtaaaaccgggagacatacttttgattaacagcacagggaatctaattgctcctcggggttacttcaaaatacgaagtgggaaaagctcaataatgagatcagatgcacccattggcaaatgcaattctgaatgcatcactccaaatggaagcattcccaatgacaaaccatttcaaaatgtaaacaggatcacatatggggcctgtcccagatatgttaagcaaaacactctgaaattggcaacagggatgcgaaatgtaccagagaaacaaactagaggcatatttggcgcaatcgcgggtttcatagaaaatggttgggagggaatggtggatggttggtacggtttcaggcatcaaaattctgagggaataggacaagcagcagatctcaaaagcactcaagcagcaatcgaccaaatcaatgggaagctgaataggttgatcgggaaaaccaacgagaaattccatcagattgaaaaagaattctcagaagtagaagggagaattcaggacctcgagaaatatgttgaggacactaaaatagatctctggtcatacaacgcggagcttcttgttgccctggagaaccaacatacaattgatctaactgactcagaaatgaacaaactgtttgaaagaacaaagaagcaactgagggaaaatgctgaggatatgggcaatggttgtttcaaaatataccacaaatgtgacaatgcctgcatagggtcaatcagaaatggaacttatgaccatgatgtatacagagatgaagcattaaacaaccggttccagatcaaaggtgttgagctgaagtcaggatacaaagattggatcctatggatttcctttgccatatcatgttttttgctttgtgttgctttgttggggttcatcatgtgggcctgccaaaaaggcaacattaggtgcaacatttgcatttga

SEQ ID NO: 31768 - RNA, 1701 nt, synthetic construct
  misc_feature 1..1701: note = hemagglutinin__InfluenzaA__ABI30788
  source 1..1701: mol_type = other RNA
atgaagactatcattgctttgagctacattctatgtctggttttcgctcaaaaactttccggaaatgacaacagcacggcaacactgtgccttgggcaccatgcagtaccaaacggaacgatagtgaaaacaatcacgaatgaccaaattgaagttactaatgctactgagctggttcagagttcctcaacaggtggaatatgcgacagtcctcatcagatccttgatggagaaaactgcacactaatagatgctctattgggagaccctcagtgtgatggcttccaaaataagaaatgggacctttttgttgaacgcagcaaagcctacagcaactgttacccttatgatgtgccggattatgcctcccttaggtcactaattgcctcatccggcacactggagtttaacaatgaaagcttcaattggactggagtcactcaaaatggaacaagctctgcttgcaaaaggagatctaatagcagtttctttagtagattgaattggttgacccacttaaaattcaaatacccagcattgaacgtgactatgccaaacaatgaagaatttgacaaattgtacatttggggggttcaccacccgggtacatacaatgaccaaatcagcctatatgctcaagcatcaggaagaatcacagtctctaccaaaagaagccaacaaactgtaatcccgaatatcgggtctagacccagggtaagggatatccccagcagaataagcatctattggacaatagtaaaaccgggagacatacttttgattaacagcacagggaatctaattgctcctcggggttacttcaaaatacgaagtgggaaaagctcaataatgagatcagatgcacccattggcaaatgcaattctgaatgcatcactccaaatggaagcattcccaatgacaaaccatttcaaaatgtaaacaggatcacatatggggcctgtcccagatatgtcaagcaaaacactctgaaattggcaacagggatgcgaaatgtaccagagaaacaaactagaggcatatttggcgcaatcgcgggtttcatagaaaatggttgggagggaatggtggatggttggtacggtttcaggcatcaaaattctgagggaataggacaagcagcagatctcaaaagcactcaagcagcaatcgaccaaatcaatgggaagctgaataggttgatcgggaaaaccaacgagaaattccatcagattgaaaaagaattctcagaagtagaagggagaattcaggacctcgagaaatatgttgaggacactaaaatagatctctggtcatacaacgcggagcttcttgttgccctggagaaccaacatacaattgatctaactgactcagaaatgaacaaactgtttgaaagaacaaagaagcaactgagggaaaatgctgaggatatgggcaatggttgtttcaaaatataccacaaatgtgacaatgcctgcatagggtcaatcagaaatggaacttatgaccatgatgtatacagagatgaagcattaaacaaccggttccagatcaaaggtgttgagctgaagtcaggatacaaagattggatcctatggatttcctttgccatatcatgttttttgctttgtgttgctttgttggggttcatcatgtgggcctgccaaaaaggcaacattaggtgcaacatttgcatttga

SEQ ID NO: 31769 - RNA, 1701 nt, synthetic construct; identical to SEQ ID NO: 31137
  misc_feature 1..1701: note = hemagglutinin__InfluenzaA__ABI30799
  source 1..1701: mol_type = other RNA

SEQ ID NO: 31770 - RNA, 1701 nt, synthetic construct
  misc_feature 1..1701: note = hemagglutinin__InfluenzaA__ABI30810
  source 1..1701: mol_type = other RNA
atgaagactatcattgctttgagctacattctatgtctggttttcgctcaaaaacttcccggaaatgacaacagcacggcaacgctgtgccttgggcaccatgcagtaccaaacggaacgatagtgaaaacaatcacgaatgaccaaattgaagttactaatgctactgagctggttcagagttcctcaacaggtggaatatgcgacagtcctcatcagatccttgatggagaaaactgcacactaatagatgctctattgggagaccctcagtgtgatggcttccaaaataagaaatgggacctttttgttgaacgcagcaaagcctacagcaactgttacccttatgatgtgccggattatgcctcccttaggtcactaattgcctcatccggcacactggagtttaacaatgaaagcttcaattggactggagtcactcaaaatggaacaagctctgcttgcaaaaggagatctaatagcagtttctttagtagattgaattggttgacccacttaaaattcaaatacccagcattgaacgtgactatgccaaacaatgaagaatttgacaaattgtacatttggggggttcaccacccgggtacatacaatgaccaaatcagcctatatgctcaagcatcaggaagaatcacagtctctaccaaaagaagccaacaaactgtaatcccgaatatcgggtctagacccagggtaagggatatccccagcagaataagcatctattggacaatagtaaaaccgggagacatacttttgattaacagcacagggaatctaattgctcctcggggttacttcaaaatacgaagtgggaaaagctcaataatgagatcagatgcacccattggcaaatgcaattctgaatgcatcactccaaatggaagcattcccaatgacaaaccatttcaaaatgtaaacaggatcacatatggggcctgtcccagatatgttaagcaaaacactctgaaattggcaacagggatgcgaaatgtaccagagaaacaaactagaggcatatttggcgcaatcgcaggtttcatagaaaatggttgggagggaatggtggatggttggtacggtttcaggcatcaaaattctgagggaataggacaagcagcagatctcaaaagcactcaagcagcaatcgaccaaatcaatgggaagctgaataggttgatcgggaaaaccaacgagaaattccatcagattgaaaaagaattctcagaagtagaagggagaattcaggacctcgagaaatatgttgaggacactaaaatagatctctggtcatacaacgcggagcttcttgttgccctggagaaccaacatacaattgatctaactgactcagaaatgaacaaactgtttgaaagaacaaagaagcaactgagggaaaatgctgaggatatgggcaatggttgtttcaaaatataccacaaatgtgacaatgcctgcatagggtcaatcaaaaatggaacttatgaccatgatgtatacagagatgaagcattaaacaaccggttccagatcaaaggtgttgagctgaagtcaggatacaaagattggatcctatggatttcctttgccatatcatgttttttgctttgtgttgctttgttggggttcatcatgtgggcctgccaaaaaggcaacattaggtgcaacatttgcatttga

SEQ ID NO: 31771 - RNA, 1701 nt, synthetic construct
  misc_feature 1..1701: note = hemagglutinin__InfluenzaA__ABI30821
  source 1..1701: mol_type = other RNA
atgaagactatcattgctttgagctacattctatgtctggttttcgctcaaaaacttcccggaaatgacaacagcacggcaacgctgtgccttgggcaccatgcagtaccaaacggaacgatagtgaaaacaatcacgaatgaccaaattgaagttactaatgctactgagctggttcagagttcctcaacaggtggaatatgcgacagtcctcatcagatccttgatggagaaaactgcacactaatagatgctctattgggagaccctcagtgtgatggcttccaaaataagaaatgggacctttttgttgaacgcagcaaagcctacagcaactgttacccttatgatgtgccggattatgcctcccttaggtcactaattgcctcatccggcacactggagtttaacaatgaaagcttcaattggactggagtcactcaaaatggaacaagctctgcttgcaaaaggagatctaatagcagtttctttagtagattgaattggttgacccacttaaaattcaaatacccagcattgaacgtggctatgccaaacaatgaagaatttgacaaattgtacatttggggggttcaccacccgggtacatacaatgaccaaatcagcctatatgctcaagcatcaggaagaatcacagtctctaccaaaagaagccaacaaactgtaatcccgaatatcgggtctagacccagggtaagggatatccccagcagaataagcatctattggacaatagtaaaaccgggagacatacttttgattaacagcacagggaatctaattgctcctcggggttacttcaaaatacgaagtgggaaaagctcaataatgagatcagatgcacccattggcaaatgcaattctgaatgcatcactccaaatggaagcattcccaatgacaaaccatttcaaaatgtaaacaggatcacatatggggcctgtcccagatatgtcaagcaaaacactctgaaattggcaacagggatgcgaaatgtaccagagaaacaaactagaggcatatttggcgcaatcgcgggtttcatagaaaatggttgggagggaatggtggatggttggtacggtttcaggcatcaaaattctgagggaataggacaagcagcagatctcaaaagcactcaagcagcaatcgaccaaatcaatgggaagctgaataggttgatcgggaaaaccaacgagaaattccatcagattgaaaaagaattctcagaagtagaagggagaattcaggacctcgagaaatatgttgaggacactaaaatagatctctggtcatacaacgcggagcttcttgttgccctggagaaccaacatacaattgatctaactgactcagaaatgaacaaactgtttgaaagaacaaagaagcaactgagggaaaatgctgaggatatgggcaatggttgtttcaaaatataccacaaatgtgacaatgcctgcatagggtcaatcagaaatggaacttatgaccatgatgtatacagagatgaagcattaaacaaccggttccagatcaaaggtgttgagctgaagtcaggatacaaagattggatcctatggatttcctttgccatatcatgttttttgctttgtgttgctttgttggggttcatcatgtgggcctgccaaaaaggcaacattaggtgcaacatttgcatttga

SEQ ID NO: 31772 - RNA, 1701 nt, synthetic construct; identical to SEQ ID NO: 31137
  misc_feature 1..1701: note = hemagglutinin__InfluenzaA__ABI30832
  source 1..1701: mol_type = other RNA

SEQ ID NO: 31773 - RNA, 1701 nt, synthetic construct
  misc_feature 1..1701: note = hemagglutinin__InfluenzaA__ABI30843
  source 1..1701: mol_type = other RNA
atgaagactatcattgctttgagctacattctatgtctggttttcgctcaaaaacttcccggaaatgacaacagcacggcaacgctgtgccttgggcaccatgcagtaccaaacggaacgatagtgaaaacaatcacgaatgaccaaattgaagttactaatgctactgagctggttcagagttcctcaacaggtggaatatgcgacagtcctcatcagatccttgatggagaaaactgcacactaatagatgctctattgggagaccctcagtgtgatggcttccaaaataagaaatgggacctttttgttgaacgcagcaaagcctacagcaactgttacccttatgatgtgccggattatgcctcccttaggtcactaattgcctcatccggcacactggagtttaacaatgaaagcttcaattggactggagtcactcaaaatggaacaagctctgcttgcaaaaggagatctaatagcagtttctttagtagattgaattggttgacccacttaaaattcaaatacccagcattgaacgtgactatgcctaacaatgaagaatttgacaaattgtacatttggggggttcaccacccgggtacatacaatgaccaaatcagcctatatgctcaagcatcaggaagaatcacagtctctaccaaaagaagccaacaaactgtaatcccgaatatcgggtctagacccagggtaagggatatccccagcagaataagcatctattggacaatagtaaaaccgggagacatacttttgattaacagcacagggaatctaattgctcctcggggttacttcaaaatacgaagtgggaaaagctcaataatgagatcagatgcacccattggcaaatgcaattctgaatgcatcactccaaatggaagcattcccaatgacaaaccatttcaaaatgtaaacaggatcacatatggggcctgtcccagatatgttaagcaaaacactctgaaattggcaacagggatgcgaaatgtaccagagaaacaaactagaggcatatttggcgcaatcgcgggtttcatagaaaatggttgggagggaatggtggatggttggtacggtttcaggcatcaaaattctgagggaataggacaagcagcagatctcaaaagcactcaagcagcaatcgaccaaatcaatgggaagctgaataggttgatcgggaaaaccaacgagaaattccatcagattgaaaaagaattctcagaagtagaagggagaattcaggacctcgagaaatatgttgaggacactaaaatagatctctggtcatacaacgcggagcttcttgttgccctggagaaccaacatacaattgatttaactgactcagaaatgaacaaactgtttgaaagaacaaggaagcaactgagggaaaatgctgaggatatgggcaatggttgtttcaaaatataccacaaatgtgacaatgcctgcatagggtcaatcagaaatggaacttatgaccatgatgtatacagagatgaagcattaaacaaccggttccagatcaaaggtgttgagctgaagtcaggatacaaagattggatcctatggatttcctttgccatatcatgttttttgctttgtgttgctttgttggggttcatcatgtgggcctgccaaaaaggcaacattaggtgcaacatttgcatttga

SEQ ID NO: 31774 - RNA, 1701 nt, synthetic construct
  misc_feature 1..1701: note = hemagglutinin__InfluenzaA__ABI30865
  source 1..1701: mol_type = other RNA
atgaagactatcattgctttgagctacattttatgtctggttttcgctcaaaaacttcccggaaatgacaacagcacagcaacgctgtgcctgggacaccatgcagtgccaaacggaacgctagtgaaaacaatcacgaatgatcaaattgaagtgactaatgctactgagctggttcagagttcctcaacaggtagaatatgcgacagtcctcaccgaatccttgatggaaaaaactgcacactgatagatgctctattgggagaccctcattgtgatggcttccaaaataaggaatgggacctttttgttgaacgcagcaaagcttacagcaactgttacccttatgatgtgccggattatgcctcccttaggtcactagttgcctcatcaggcaccctagagtttatcaatgaagacttcaattggactggagtagctcaggatgggaaaagctatgcttgcaaaaggggatctgttaacagtttctttagtagattgaattggttgcacaaattagaatacaaatatccagcgctgaacgtgactatgccaaacaatggcaaatttgacaaattgtacatttggggggttcaccacccgagcacggacagtgaccaaaccagcctatatgttcgagcatcagggagagtcacagtctctaccaaaagaagccaacaaactgtaatcccgaatatcgggtctagaccctgggtaaggggtctgtccagtagaataagcatctattggacaatagtaaaaccgggagacatacttttgattaatagcacagggaatctaattgctcctcggggttacttcaaaatacgaaatgggaaaagctcaataatgaggtcagatgcacccattggcaactgcagttctgaatgcatcactccaaatggaagcattcccaatgacaaaccttttcaaaatgtaaacaggatcacatatggggcctgccccagatatgttaagcaaaacactctgaaattggcaacagggatgcggaatgtaccagagaaacaaactagaggcatattcggcgcaatcgcaggtttcatagaaaatggttgggagggaatggtagacggttggtacggtttcaggcatcaaaattctgagggcacaggacaagcagcagatcttaaaagcactcaagcagcaatcgaccaaatcaacgggaaactgaataggttaatcgagaaaacgaacgagaaattccatcaaatcgaaaaagaattctcagaagtagaagggagaattcaggacctcgagaaatatgttgaagacactaaaatagatctctggtcttacaacgcggagcttcttgttgccctggagaaccaacatacaattgatctaactgactcagaaatgaacaaactgtttgaaaaaacaaggaagcaactgagggaaaatgctgaggacatgggcaatggttgcttcaaaatataccacaaatgtgacaatgcctgcatagggtcaatcagaaatggaacttatgaccatgatgtatacagagacgaagcattaaacaaccggttccagatcaaaggtgttgagctgaagtcaggatacaaagattggatcctatggatttcctttgccatatcatgctttttgctttgtgttgttttgctggggttcattatgtgggcctgccaaaaaggcaacattaggtgcaacatttgcatttga

SEQ ID NO: 31775 - RNA, 1707 nt, synthetic construct
  misc_feature 1..1707: note = hemagglutinin__InfluenzaA__ABI36155
  source 1..1707: mol_type = other RNA
atggagaaaatagtgcttcttcttgcaacagtcagtcttgttaaaagtgatcagatttgcattggttaccatgcaaacaattcaacagagcaggttgacacaataatggaaaagaacgtcactgtcacacatgcccaagacatactggaaaagacacacaacgggaagctctgcgatctagatggagtgaagcctctaattttaagagattgtagtgtagctggatggctcctcgggaacccaatgtgtgacgaattcatcaatgtaccggaatggtcttacatagtggagaaggccaatccagccaatggcctctgttacccagggaatttcaacgactatgaagaactgaaacacctattgagcagaataaatcattttgaaaaacttcagataatccccaaaagttcttggtccgatcatgaagcctcattaggggtgagctcagcatgtccatacctgggaaggtcctccttctttagaaatgtggtatggcttatcaaaaagaacaatacatacccaacaataaagagaagctacaataataccaaccaagaagatcttttggtactgtgggggattcaccatcctaatgatgcagcagagcagacaaggctatatcaaaacccaaccacttatatttccgttgggacatcaacactaaaccagagattggtaccaaaaatagctactagatccaaagtaaatgggcaaagtggaaggatggaattcttctggacaattttaaaaccgaatgatgcaatcaacttcgagagtaatggaaatttcattgctccagaatatgcatacaaaattgtaaagaaaggggactctgcaattatgaaaagtgaattggaatatggtgactgcaacaccaagtgtcaaactccaatgggggcgataaactctagtatgccactccacaacatacaccctctcaccatcggggaatgccccaaatatgtgaagtcaaacagattagtccttgcgactgggctcagaaatagccctcaaagagagagaagaagaaaaaagagaggactatttggagctatagcaggttttatagaagggggatggcagggaatggtagatggttggtatgggtaccaccatagcaatgagcaggggagtgggtacgctgcagacaaagaatccactcaaaaggcaatagatggagtcaccaataaggtcaactcgatcattgacaaaatgaacactcagtttgaggccgttggaagggaatttaataacctagaaaggagaatagagaatttaaacaagaaaatggaagatggattcctagatgtctggacttataatgctgaactactggttctcatggaaaatgagagaactttggactttcatgattcaaatgttaagaacctctatgacaaggtccgattacagcttagggataatgcaaaggagctgggcaatggttgtttcgagttctatcacaaatgtgataatgaatgtatggaaagtataagaaacggaacgtataactacccgcagtattcagaagaagcaagattaaaaagagaggaaataagcggagtaaaactggaatcaataggaatttaccaaatactgtcaatttattcaacagtggcgagttccctagcactggcaatcatgatggctggtctatctttatggatgtgctccaatggatcgttacaatgcagagtttgcatttaa

SEQ ID NO: 31776 - RNA, 1707 nt, synthetic construct
  misc_feature 1..1707: note = hemagglutinin__InfluenzaA__ABI36166
  source 1..1707: mol_type = other RNA
atggagaaaatagtgcttcttcttgcaacagtcagtcttgttaaaagtgatcagatttgcattggttaccatgcaaacaattcaacagagcaggttgacacaataatggaaaagaacgtcactgtcacacatgcccaagacatactggaaaagacacacaacgggaagctctgcgatctagatggagtgaagcctctaattttaagagattgtagtgtagctggatggctcctcgggaacccaatgtgtgacgaattcatcaatgtaccggaatggtcttacatagtggagaaggccaatccagccaatggcctctgttacccagggaatttcaacgactatgaagaactgaaacacctattgagcagaataaatcattttgaaaaacttcagataatccccaaaagttcttggtccgatcatgaagcctcattaggggtgagctcagcatgtccatacctgggaaggtcctccttctttagaaatgtggtatggcttatcaaaaagaacaatacatacccaacaataaagagaagctacaataataccaaccaagaagatcttttggtactgtgggggattcaccatcctaatgatgcagcagagcagacaaggctatatcaaaacccaaccacttatatttccgttgggacatcaacactaaaccagagattggtaccaaaaatagctactagatccaaagtaaatgggcaaagtggaaggatggaattcttctggacaattttaaaaccgaatgatgcaatcaacttcgagagtaatggaaatttcattgctccagaatatgcatacaaaattgtaaagaaaggggactctgcaattatgaaaagtgaattggaatatggtgactgcaacaccaagtgtcaaactccaatgggggcgataaactctagtatgccattccacaacatacaccctctcaccatcggggaatgccccaaatatgtgaagtcaaacagattagtccttgcgactgggctcagaaatagccctcaaagagagagaagaagaaaaaagagaggactatttggagctatagcaggttttatagaagggggatggcagggaatggtagatggttggtatgggtaccaccatagcaatgagcaggggagtgggtacgctgcagacaaagaatccactcaaaaggcaatagatggagtcaccaataaggtcaactcgatcattgacaaaatgaacactcagtttgaggccgttggaagggaatttaataacctagaaaggagaatagagaatttaaacaagaaaatggaagatggattcctagatgtctggacttataatgctgaactactggttctcatggaaaatgagagaactttggactttcatgattcaaatgttaagaacctctatgacaaggtccgattacagcttagggataatgcaaaggagctgggcaatggttgtttcgagttctatcacaaatgtgataatgaatgtatggaaagtataagaaacggaacgtataactacccgcagtattcagaagaagcaagattaaaaagagaggaaataagcggagtaaaactggaatcaataggaatttaccaaatactgtcaatttattcaacagtggcgagttccctagcactggcaatcatgatggctggtctatctttatggatgtgctccaatggatcgttacaatgcagagtttgcatttaa

SEQ ID NO: 31777 - RNA, 1707 nt, synthetic construct; identical to SEQ ID NO: 31776
  misc_feature 1..1707: note = hemagglutinin__InfluenzaA__ABI36177
  source 1..1707: mol_type = other RNA

SEQ ID NO: 31778 - RNA, 1707 nt, synthetic construct
  misc_feature 1..1707: note = hemagglutinin__InfluenzaA__ABI36406
  source 1..1707: mol_type = other RNA
atggagaaaatagtgcttcttcttgcaacagtcagtcttgttaaaagtgatcagatttgcattggttaccatgcaaacaattcaacagagcaggttgacacaataatggaaaagaacgtcactgtcacacatgcccaagacatactggaaaagacacacaacgggaagctctgcgatctagatggagtgaagcctctaattttaagagattgtagtgtagctggatggctcctcgggaacccaatgtgtgacgaattcatcaatgtaccggaatggtcttacatagtggagaaggccaatccagccaatggcctctgttacccagggaatttcaacgactatgaagaactgaaacacctattgagcagaataaatcattttgaaaaacttcagataatccccaaaagttcttggtccgatcatgaagcctcattaggggtgagctcagcatgtccatacctgggaaggtcctccttctttagaaatgtggtatggcttatcaaaaagaacaatacatacccaacaataaagagaagctacaataataccaaccaagaagatcttttggtactgtgggggcttcaccatcctaatgatgcagcagagcagacaaggctatatcaaaacccaaccacttatatttccgttgggacatcaacactaaaccagagattggtaccaaaaatagctactagatccaaagtaaatgggcaaagtggaaggatggaattcttctggacaattttaaaaccgaatgatgcaatcaacttcgagagtaatggaaatttcattgctccagaatatgcatacaaaattgtaaagaaaggggactctgcaattatgaaaagtgaattggaatatggtgactgcaacaccaagtgtcaaactccaatgggggcgataaactctagtatgccattccacaacatacaccctctcaccatcggggaatgccccaaatatgtgaagtcaaacagattagtccttgcgactgggctcagaaatagccctcaaagagagagaagaagaaaaaagagaggactatttggagctatagcaggttttatagaagggggatggcagggaatggtagatggttggtatgggtaccaccatagcaatgagcaggggagtgggtacgctgcagacaaagaatccactcaaaaggcaatagatggagtcaccaataaggtcaactcgatcattgacaaaatgaacactcagtttgaggccgttggaagggaatttaataacctagaaaggagaatagagaatttaaacaagaaaatggaagatggattcctagatgtctggacttataatgctgaactactggttctcatggaaaatgagagaactttggactttcatgattcaaatgttaagaacctctatgacaaggtccgattacagcttagggataatgcaaaggagctgggcaatggttgtttcgagttctatcacaaatgtgataatgaatgtatggaaagtataagaaacggaacgtataactacccgcagtattcagaagaagcaagattaaaaagagaggaaataagcggagtaaaactggaatcaataggaatttaccaaatactgtcaatttattcaacagtggcgagttccctagcactggcaatcatgatggctggtctatctttatggatgtgctccaatggatcgttacaatgcagagtttgcatttaa

SEQ ID NO: 31779 - RNA, 1707 nt, synthetic construct
  misc_feature 1..1707: note = hemagglutinin__InfluenzaA__ABI36450
  source 1..1707: mol_type = other RNA
atggagaaaatagtgcttcttcttgcaatagtcagtcttgttaaaagtgatcagatttgcattggttaccatgcaaacaattcaacagagcaggttgacacaatcatggaaaagaacgttactgttacacatgcccaagacatactgggaaagacacacaacgggaagctctgcgatctagatggagtgaagcctctaattttaagagattgtagtgtagctggatggctcctcgggaacccaatgtgtgacgaattcatcaatgtaccggaatggtcttacatagtggagaaggccaatccaaccaatgacctctgttacccagggagtttcaacgactatgaagaactgaaacacctattgagcagaataaaccattttgagaaaattcaaatcatccccaaaagttcttggtccgatcatgaagcctcatcaggagtgagctcagcatgtccatacctgggaagtccttccttttttagaaatgtggtatggcttatcaaaaagaacagtacatacccaacaataaagacaagctacaataataccaaccaagaagatcttttggtactgtggggaattcaccattctaatgatgcggcagagcagacaaggctatatcaaaacccaaccacctatatttccattgggacatcaacactaaaccagagattggtaccaaaaatagctactagatccaaagtaaacgggcaaagtggaaggatggagttcttctggacaattttaaaacctaatgatgcaatcaacttcgagagtaatggaaatttcattgctccagaatatgcatacaaaattgtcaagaaaggggactcagcaattatgaaaagtgaattggaatatggtaactgcaacaccaagtgtcaaactccaatgggggcaataaactctagtatgccattccacaacatacaccctctcaccatcggggaatgccccaaatatgtgaaatcaaacagattagtccttgcaacagggctcagaaatagccctcaaagagagagcagaagaaaaaagagaggtctatttggagctatagcaggctttatagagggaggatggcagggaatggtagatggttggtatgggtaccaccatagcaatgagcaggggagtgggtacgctgcagacaaagaatccactcaaaaggcaatagatggagtcaccaataaggtcaactcaattattgacaaaatgaacactcagtttgaggccgttggaagggaatttaataacttagaaaggagaatagagaatttaaacaagaagatggaagacgggtttctagatgtttggacttataatgccgaacttctggttctcatggaaaatgagagaactctagactttcatgactcgaatgttaagaacctctacgacaaggtccgactacagcttagggataatgcaaaggagctgggtaacggttgtttcgagttctatcacaaatgtgataatgaatgtatggaaagtataagaaacggaacgtacaactatccgcagtattcagaagaagcaagattaaaaagagaggaaataagtggggtaaaattggaatcaataggaacttaccaaatactgtcaatttattcaacagtggcgagttccctagcactggcaatcatgatagctggtctatctttatggatgtgctccaatggatcgttacaatgcagaatttgcatttaa

SEQ ID NO: 31780 - RNA, 1707 nt, synthetic construct
  misc_feature 1..1707: note = hemagglutinin__InfluenzaA__ABI49396
  source 1..1707: mol_type = other RNA
atggagaaaatagtgcttcttcttgcaatagtcagtcttgttaaaagtgatcagatttgcattggttaccatgcaaacaattcaacagagcaggttgacacaatcatggaaaagaacgttactgttacacatgcccaagacatactgggaaaaacacacaacgggaagctctgcgatctagatggagtgaagcctctaattttaagagattgtagtgtagctggatggctcctcgggaacccaatgtgtgacgaattcatcaatgtaccggaatggtcttacatagtggagaaggccaatccaaccaatgacctctgttacccagggagtttcaacgactatgaagaactgaaacatctattgagcagaataaaccattttgagaaaattcaaatcatccccaaaagttcttggtccgatcatgaagcctcatcaggagtgagctcagcatgtccatacctgggaagtccctccttttttagaaatgtggtatggcttatcaaaaagaacagtacatacccaacaataaagaaaagctacaataataccaaccaagaagatcttttggtactgtggggaattcaccatcctaatgatgcggcagagcagacaaggctatatcaaaacccaaccacctatatttccattgggacatcaacactaaaccagagattggtaccaaaaatagctactagatccaaagtaaacgggcaaagtggaaggatggagttcttctgggcaattttaaaacctaatgatgcaatcaacttcgagagtaatggaaatttcattgctccagaatatgcatacaaaattgtcaagaaaggggactcagcaattatgaaaagtgaattggaatatggtaactgcaacaccaagtgtcaaactccaatgggggcgataaactctagtatgccattccacaacatacaccctctcaccatcggggaatgccccaaatatgtgaaatcaaacagattagtccttgcaacagggctcagaaatagcccacaaagagagagcagaagaaaaaagagaggactatttggagctatagcaggttttatagagggaggatggcagggaatggtagatggctggtatgggtaccaccatagcaatgagcaggggagtgggtacgctgcagacaaagaatccactcaaaaggcaatagatggagtcaccaataaggtcaactcaattattgacaaaatgaacactcagtttgaggctgttggaagggaatttaataacttagaaaggagaatagagaatttaaacaagaagatggaagacgggtttctagatgtttggacttataatgccgaacttctggttctcatggaaaatgagagaactctagactttcatgactcaaatgttaagaacctctacgacaaggtccgactacagcttagggataatgcaaaagagctgggtaacggttgtttcgagttctatcacaaatgtgataatgaatgtatggaaagtataagaaacggaacgtacaactatccgcagtattcagaagaagcaagattaaaaagagaggaaataagtggggtaaaattggaatcaataggaacttaccaaatactgtcaatttattcaacagtagcgagttccctagcactggcaatcatgatagctggtctatctttatggatgtgctccaatggatcgttacaatgcagaatttgcatttaa

SEQ ID NO: 31781 - RNA, 1704 nt, synthetic construct
  misc_feature 1..1704: note = hemagglutinin__InfluenzaA__ABI85000
  source 1..1704: mol_type = other RNA
atgaatactcaaattttggcattcattgcttgtatgctgattggaactaaaggagacaaaatatgtcttgggcaccatgctgtggcaaatgggacaaaagtgaacacactaacagagaggggaattgaagtagtcaatgccacggagacggtggaaactgtaaatattaagaaaatatgcactcaaggaaaaaggccaacagatctgggacaatgtggacttctaggaaccctaataggacctccccaatgcgatcaatttctggagtttgacgctaatttgataattgaacgaagagaaggaaccgatgtgtgctatcccgggaagttcacaaatgaagaatcactgaggcagatccttcgagggtcaggaggaattgataaagagtcaatgggtttcacctatagtggaataagaaccaatggggcgacgagtgcctgcagaagatcaggttcttctttctatgcggagatgaaatggttactgtcgaattcagacaatgcggcatttccccaaatgactaagtcgtataggaatcccaggaacaaaccagctctgataatctggggagtgcatcactctggatcagctactgagcagaccaaactctatggaagtggaaacaagttgataacagtaggaagctcgaaataccagcaatcattcactccaagtccgggagcacggccacaagtgaatggacaatcaggaaggattgattttcattggctactccttgaccccaatgacacagtgaccttcactttcaatggggcattcatagcccctgacagggcaagtttctttagaggagaatcgctaggagtccagagtgatgttcctttggattctggttgtgaaggggattgcttccacagtgggggtacgatagtcagttccctgccattccaaaacatcaaccctagaacagtggggaaatgccctcgatatgtcaaacagacaagcctccttttggctacaggaatgagaaacgtcccagagaaccccaagcaggcctaccagaaacggatgaccagaggcctttttggagcgattgctggattcatagagaatggatgggaaggtctcatcgatggatggtatggtttcagacatcaaaatgcacaaggagaaggaactgcagctgactacaaaagcacccaatctgcaatagatcagatcacaggcaaattgaatcgtctgattgacaaaacaaaccagcagtttgaactgatagacaatgaattcagtgagatagaacaacaaatcgggaatgtcattaactggacacgagactcaatgactgaggtatggtcgtataatgctgagctgttggtggcaatggagaatcagcatacaatagatcttgcagactcagaaatgaacaaactttacgaacgcgtcagaaaacaactaagggaaaatgctgaagaagatggaactggatgctttgagatattccataagtgtgatgatcagtgtatggagagcataaggaacaacacttatgaccatacccaatacaggacagagtcattgcagaatagaatacagatagacccagtgaaattgagtagtggatacaaagacataatcttatggtttagcttcggggcatcatgttttcttcttctagccattgcaatgggattggttttcatttgcataaagaatggaaacatgcggtgcactatttgtatatag

SEQ ID NO: 31782 - RNA, 1701 nt, synthetic construct
  misc_feature 1..1701: note = hemagglutinin__InfluenzaA__ABI92291
  source 1..1701: mol_type = other RNA
atgaagactatcattgctttgagctacattttatgtctggttttcgctcaaaaacttcccggaaatgacaacagcacggcaacgctgtgcctgggacaccatgcagtgccaaacggaacgctagtgaaaacaatcacgaatgaccaaattgaagtgactaatgctactgagctggttcagaattcctcaacaggtaggatatgtgacagtcctcaccgaatccttgatgggaaaaactgcacactgatagatgctctattgggagaccctcattgtgatggcttccaaaataaggaatgggacctttttgttgaacgcagcaaagcttacagcaactgttacccttatgatgtgccggattatgcctcccttaggtcactagttgcctcatccggcaccctggagtttaacaatgaaagcttcaattggactggagtcgctcagaatggaacaagctatgcttgcaaaaggagatctgttaaaagtttctttagtagattgaattggttgcacaaattagaatacaaatatccagcactgaacgtgactatgccaaacaatgataaatttgacaaattgtacatttggggggttcaccacccgagtacggacagtgaccaaaccagcctatatgttcaagcatcagggagagtcacagtctctaccaaaagaagccaacaaactgtaatcccgaatatcggatctagaccctgggtaaggggtgtctccagcagaataagcatctattggacaatagtaaaaccgggagacatacttttgattaacagcacagggaatctaattgctcctcggggttacttcaaaatacgaagtgggaaaagctcaataatgaggtcagatgcacccattggcaactgcaattctgaatgcatcactccaaatggaagcattcccaatgacaaaccatttcaaaatgtaaacaggatcacatatggggcctgtcccagatatgttaagcaaaacactctgaaattggcaacagggatgcggaatgtaccagagaaacaaactagaggcatattcggcgcaatcgcaggtttcatagaaaatggttgggagggaatggtagacggttggtacggtttcaggcatcaaaattctgagggcacaggacaagcagcggatcttaaaagcactcaagcagcaatcaaccaaatcaacgggaaactgaataggttaatcgagaaaacgaacgagaaattccatcaaatcgaaaaagaattctcagaagtagaagggagaattcaggacctcgagaaatatgttgaagacactaaaatagatctctggtcgtacaacgcggagcttcttgttgccctggagaaccaacatacaattgatctaactgactcagaaatgaacaaactgtttgaaagaacaaggaagcaactgagggaaaatgctgaggacatgggcaatggttgcttcagaatataccacaaatgtgacaatgcctgcatagggtcaatcagaaatggaacttatgaccatgatgtatacagagacgaagcattaaacaaccggttccagatcaaaggtgttgagctgaagtcaggatacaaagattggatcctatggatttcctttgccatatcatgttttttgctttgtgttgttttgctggggttcatcatgtgggcctgccaaaaaggcaacattaggtgcaacatttgcatttga

SEQ ID NO: 31783 - RNA, 1701 nt, synthetic construct
  misc_feature 1..1701: note = hemagglutinin__InfluenzaA__ABI92302
  source 1..1701: mol_type = other RNA
atgaaagcaaaactgctggtcctgttatgtgcactttcagctacagatgcagacacaatatgtataggctaccatgcgaacaactcaaccgatactgttgacacagtactcgaaaagaacgtgacagtgacacactctgtcaacctacttgaggacagtcacaacggaaaactatgcagactaaaaggaatagccccactacaattggggaaatgcagcattgccggatggatcttaggaaacccagaatgtgaatcactgttttctaagaaatcatggtcctacattgcagaaacaccaaactccgagaatgggacatgttacccagggtatttcgccgactatgaggaactgagggagcaattgagttcagtatcatcattcgagagattcgaaatattccccaaggaaagttcatggcccaaacacaacgtaaccagaggagtaacggcatcatgctcccataaggggaaaagcagtttttacagaaatttgctatggctgacggagaaaaatggctcgtacccaaatctgagcaagtcctatgtgaacaacaaagagaaagaagtccttgtactatggggtgttcatcacccgtctaacatagaggaccaaaagaccatctatcgtaaagaaaatgcttatgtctctgtagtgtcttcacattataacagaagattcaccccagaaatagcaaaacgacccaaagtaagagatcaagaagggagaattaactactactggactctgctggaacccggggacacaataatatttgaggcaaatggaaatctaatagcgccatggtatgctttcgcactgagtagaggctttgggtcaggaatcatcacctcaaacgcatcaatggatgaatgtgacgcgaagtgtcaaacaccccagggagctataaacagtagtcttcctttccagaatgtacacccagtcacaataggagagtgcccaaaatacgtcaggagtacaaaattaaggatggtcacaggactaaggaacattccatccattcaatccagaggtttgtttggagccattgctggtttcattgaagggggatggactggaatgatagatggatggtatggttatcatcatcagaatgaacagggatccggctatgctgcagatcaaaaaagcacacaaaatgccattaacgggattacaaacaaggtgaactctgttatcgagaaaatgaacattcaattcacagctgtaggtaaagaattcaacaaattagaaaaaaggatggaaaacttaaataaaaaggttgatgatgggtttctggacatttggacatataatgcagaattgttggttctactggaaaatgaaaggactttggattttcatgactcaaatgtgaagaacctgtatgagaaggtaaaaagccaattaaagaataatgccaaagaaataggaaacgggtgttttgaattctaccacaagtgtaacaatgaatgcatggaaagtgtaaaaaatggaacttatgactatccaaaatattcagaggaatcaaagttaaacagggaaaaaattgatggagtgaaattggaatcaatgggagtctatcagattctggcgatctactcaactgtcgccagttcactggtgcttttggtctccctgggggcaatcagcttctggatgtgttctaatgggtctttgcagtgcagaatatgcatctga

SEQ ID NO: 31784 - RNA, 1701 nt, synthetic construct
  misc_feature 1..1701: note = hemagglutinin__InfluenzaA__ABI92313
  source 1..1701: mol_type = other RNA
atgaaagcaaaactactagtcctgttgtgtgcatttacagctacatatgcagacacaatatgtataggctaccatgcgaacaactcaaccgacactgttgacacagtacttgagaagaacgtgacagtgacacactctgtcaacctacttgaggacagtcacaacggaaaactatgccgactaaaaggaacagccccactacaattgggtaattgcagcgttgccggatggatcttaggaaacccagaatgcgaatcactgttttctaaggaatcatggtcctacattgcagaaacaccaaaccctgagaatggaacatgttacccagggtatttcgccgactatgaggaactgagggagcaattgagctcaatatcatcattcgagagattcgaaatattccccaaggaaagctcatggcccaaccacaccgtaaccaaaggagtgacggcatcatgctcccataatgggaaaagcagtttttacaaaaatttgctatggctgacggaaaagaatggcttgtacccaaatctgagcaagtcctatgtaaacaacaaggagaaagaagtccttgtactatggggtgttcatcacccgtctaacataggggaccaaagggccatctatcatacagaaaatgcttatgtctctgtagtgtcttcacattatagcagaagattcaccccagaaataacaaaaagacccaaagtaagagatcaagaagggagaattaactactactggactctgctggaacccggggacacaataatatttgaggcaaatggaaatctaatagcgccatggtacgctttcgcactgagtagaggctttgggtcaggaatcatcacctcaaacgcatcaatgggtgaatgtgacgctaagtgtcaaacaccccaaggagctataaacagtagtcttcctttccagaatgtacacccagtcacaataggagagtgtcccaagtatgtcaggagtacaaaattaaggatggttacaggactaagaaacatcccatccattcaatctagaggtttgtttggagccattgccggtttcattgaaggggggtggactggaatgatagatggatggtatggttatcatcatcagaatgaacaaggatctggctatgctgcagaccaaaaaagcacacaaaatgccattgatgggattacaaacaaggtgaattctgtaatcgagaaaatgaacactcaattcacagctgtaggcaaagaattcaacaaattagagagaaggatggaaaacttaaataagaaagttgatgatggatttctggacatttggacatataatgcagagttgttggttctcctggaaaatgaaaggactttggattttcatgactcaaatgtgaagaatctgtatgagaaagtaaaaaaccaattgaagaataatgccaaagaaatcgggaacgggtgttttgaattctatcacaagtgtaacaatgaatgcatggaaagtgtgaaaaatggaacttatgactatccaaaatattccgaagaatcaaagttaaacagggaaaaaattgatggagtgaaattggaatcaatgggagtctatcatattctggcgatctactcaactgtcgccagttcactggtgcttttggtctccctgggggcaatcagtttctggatgtgttctaatgggtctttgcagtgtagaatatgcatctga

SEQ ID NO: 31785 - RNA, 1701 nt, synthetic construct
  misc_feature 1..1701: note = hemagglutinin__InfluenzaA__ABI92324
  source 1..1701: mol_type = other RNA
atgaagactatcattgctttgagctacattttatgtctggttttcgctcaaaaacttcccggaaatgacaacagcacagcaacgctatgcctgggacaccatgcagtgccaaacggaacgctagtgaaaacaatcacgaatgatcaaattgaagtgactaatgctactgagctggttcagagttcctcaacaggtagaatatgcgacagtcctcaccgaatccttgatggaaaaaactgcacactgatagatgctctattgggagaccctcattgtgatggcttccaaaataaggaatgggacctttttgttgaacgcagcaaagcttacagcaactgttacccttatgatgtgccggattatgcctcccttaggtcactagttgcctcatcaggcaccctggagtttatcaatgaagacttcaattggactggagtcgctcaggatgggaaaagctatgcttgcaaaaggggatctgttaacagtttctttagtagattgaattggttgcacaaattagaatacaaatatccagcgctgaacgtgactatgccaaacaatggcaaatttgacaaattgtacatttggggggttcaccacccgagcacggacagtgaccaaaccagcctatatgttcgagcatcagggaaagtcacagtctctaccaaaagaagccaacaaactgtaatcccgaatatcgggtttagaccctgggtaaggggtctgtccagtagaataagcatctattggacaatagtaaaaccgggagacatacttttgattaatagcacagggaatctaattgctcctcggggttacttcaaaatacgaaatgggaaaagctcaataatgaggtcagatgcacccattggcaactgcagttctgaatgcatcactccaaatggaagcattcccaatgacaaaccttttcaaaatgtaaacaggatcacatatggggcctgccccagatatgttaagcaaaacactctgaagttggcaacagggatgcggaatgtaccagagaaacaaactagaggcatattcggcgcaatcgcaggtttcatagaaaatggttgggagggaatggtagacggttggtacggtttcaggcatcaaaattctgagggcacaggacaagcagcagatcttaaaagcactcaagcagcaatcgaccaaatcaacgggaaactgaataggttaatcgagaaaacgaacgagaaattccatcaaatcgaaaaagaattctcagaagtagaagggagaattcaggacctcgagaaatatgttgaagacactaaaatagatctctggtcttacaacgcggggcttcttgttgccctggagaaccaacatacaattgatctaactgactcagaaatgaacaaactgtttgaaagaacaaggaagcaactgagggaaaatgctgaggacatgggcaatggttgcttcaaaatataccacaaatgtgacaatgcctgcatagggtcaatcagaaatggaacttatgaccatgatgtatacagagacgaagcattaaacaaccggttccagatcaaaggtgttgagctgaagtcaggatacaaagattggatcctatggatttcctttgccatatcatgctttttgctttgtgttgttttgctggggttcatcatgtgggcctgccaaaaaggcaacattaggtgcaacatttgcatttga

SEQ ID NO: 31786 - RNA, 1701 nt, synthetic construct
  misc_feature 1..1701: note = hemagglutinin__InfluenzaA__ABI92335
  source 1..1701: mol_type = other RNA
atgaagactatcattgctttgagctacattttatgcctggttttcgctcaaaaacttcccggaaatgacaacagcacggcaacgctgtgcctggggcaccatgcagtgccaaacggaacgctagtgaaaacaatcacgaatgaccaaattgaagtaactaatgctactgagctggttcagagttcctcaacaagtagaatatgcgacagtcctcaccaaatccttgatggagaaaactgcacactaatagatgctctattgggagaccctcattgtgatggcttccaaaataaggaatgggacctttttgttgaacgcagcaaagcctacagcaactgttacccttatgatgtgccggattatgtctcccttaggtcactagttgcctcatcaggcacgctggagtttaacaatgaaagcttcaattggactggagtcgctcagaatggaacaagctctgcttgcaaaaggagatctgataaaagtttctttagtagattgaattggttgcaccaattaaaatacaaatatccagcactgaacgtgactatgccaaacaatgaaaaatttgacaaattgtacatttggggggttcaccacccgggtacagacagtgaccaaatcagcctatatgctcaagcatcagggagagtcacagtctctaccaaaagaagccaacaaactgtaatcccgaatatcggatctagaccctgggtaaggggtgtctccagcagaataagcatctattggacaatagtaaaaccgggagacatacttttgattaacagcacagggaatctaattgctcctcggggttacttcaaaatacgaagtgggaaaagctcaataatgaggtcagatgcacccattggcaaatgcaattctgaatgcatcactccaaatggaagcattcccaatgacaaaccatttcaaaatgtaaacaggatcacatatggggcctgtcccagatatgttaagcaaaacactctgaaattggcaacagggatgcggaatgtaccagagaaacaaactagaggcatattcggtgcaatcgcgggcttcatagaaaatggttgggagggaatgatggacggttggtacggtttcaggcatcaaaattctgagggcacagggcaagcagcagatcttaaaagcactcaagcagcaatcaaccaaatcaacgggaaactgaataggttaatcgagaaaacgaacgagaaattccatcaaattgaaaaagaattctcagaagtagaagggagaattcaggacctcgagaaatatgttgaggacactaaaatagatctctggtcgtacaatgcggagcttcttgttgccctggagaaccaacatacaattgatctaactgactcagaaatgaacaaactgtttgaaagaacaaagaagcaactgagggaaaatgctgaggatatgggcaatggttgtttcaaaatataccacaaatgtgacaatgcctgcatggggtcaatcagaaatggaacttatgaccatgatgtatacagagacgaagcattgaacaaccggttccagatcaaaggtgttgagctgaagtcaggatacaaagattggatcctatggatttcctttgccatatcatgttttttgctttgtattgttttgatggggttcatcatgtgggcctgccaaaaaggcaacattaggtgcaacatttgcatttga

SEQ ID NO: 31787 - RNA, 1701 nt, synthetic construct
  misc_feature 1..1701: note = hemagglutinin__InfluenzaA__ABI92346
  source 1..1701: mol_type = other RNA
atgaagactatcattgctttgagctacattttatgcctggttttcgctcaaaaacttcccggaaatgacaacagcacggcaacgctgtgtctggggcatcatgcagtgccaaacggaacgctagtgaaaacaatcacgaatgaccaaattgaagtaactaatgctactgagctggttcagagttcctcaacaggtagaatatgcgacagtcctcaccaaatccttgatggagaaaactgcacactaatagatgctctattgggagaccctcattgtgatggcttccaaaataaggaatgggacctttttgttgaacgcagcaaagcctacagcaactgttacccttatgatgtgccggattatgtctcccttaggtcactagttgcctcatcaggcacgctggagtttaacaatgaaagcttcaattggactggagtcgctcagaatggaacaagctctgcttgcaaaaggagatctgataaaagtttctttagtagattgaattggttgcaccaattaaaatacaaatatccagcactgaacgtgactatgccaaacaatgaaaaatttgacaaattgtacatttggggggttcaccacccgggtacagacagtgaccaaatcagcctatatgctcaagcatcggggagagtcacagtctctaccaaaagaagccaacaaactgtaatcccgaatatcggatctagaccctgggtaaggggtgtctccagcagaataagcatctattggacaatagtaaaaccgggagacatacttttgattaacagcacagggaatctaattgctcctcggggttacttcaaaatacgaagtgggaaaagctcaataatgaggtcagatgcacccattggcaaatgcaattctgaatgcatcactccaaatggaagcattcccaatgacaaaccatttcaaaatgtaaacaggatcacatatggggcatgtcccagatatgttaagcaaaacactctgaaattggcaacagggatgcggaatgtgccagagaaacaaactagaggcatattcggtgcaatcgcgggcttcatagaaaatggttgggagggaatgatggacggttggtacggtttcaggcatcaaaattctgagggcacagggcaagcagcagatcttaaaagcactcaagcagcaatcaaccaaatcaacgggaaactgaataggttaatcgagaaaacgaacgagaaattccatcaaattgaaaaagaattctcagaagtagaagggagaattcaggacctcgagaaatatgttgaggacactaaaatagatctctggtcgtacaatgcggagcttcttgttgccctggagaaccaacatacaattgatctaactgactcagaaatgaacaaactgtttgaaagaacaaagaagcaactgagggaaaatgctgaggatatgggcaatggttgtttcaaaatataccacaaatgtgacaatgcctgcatagggtcaatcagaaatggaacttatgaccatgatgtatacagagacgaagcattgaacaaccggttccatatcaaaggtgttgagctgaagtcaggatacaaagattgggtcctatggatttcctttgccatatcatgttttttgctttgtattgttttgctggggttcatcatgtgggcctgccaaaaaggcaacattaggtgcaacatttgcatttga

SEQ ID NO: 31788 - RNA, 1701 nt, synthetic construct
  misc_feature 1..1701: note = hemagglutinin__InfluenzaA__ABI92357
  source 1..1701: mol_type = other RNA
atgaagactatcattgctttgagctacattctatgtctggttttcgctcaaaaacttcccggaaatgacaacagcacggcaacgctgtgccttgggcaccatgcagtaccaaacggaacgatagtgaaaacaatcacgaatgaccaaattgaagttactaatgctactgagctggttcagagttcctcaacaggtggaatatgcgacagtcctcatcagatccttgatggagaaaactgcacactaatagatgctctattgggagaccctcagtgtgatggcttccaaaataagaaatgggacctttttgttgaacgcagcaaagcctacagcaactgttacccttatgatgtgccggattatgcctcccttaggtcactagttgcctcatccggcacactggagtttaacaatgaaagcttcaattggactggagtcactcaaaatggaacaagctctgcttgcaaaaggagatctaataacagtttctttagtagattgaattggttgacccatttaaaattcaaatacccagcattgaacgtgactatgccaaacaatgaaaaatttgacaaattgtacatttggggggttcaccacccgggtacgaacaatgaccaaatcagcctatatgctcaagcatcaggaagaatcacagtctctaccaaaagaagccaacaaactgtaatcccgaatatcggatctagacccagggtaagggatatccccagcagaataagcatctattggacaatagtaaaaccgggagacatacttttgattaacagcacagggaatctaattgctcctcggggttacttcaaaatacgaagtgggaaaagctcaataatgagatcagatgcacccattggcaaatgcaattctgaatgcatcactccaaatggaagcattcccaatgacaaaccatttcaaaatgtaaacaggatcacatatggggcctgtcccagatatgttaagcaaaacactctgaaattggcaacagggatgcgaaatgtaccagagaaacaaactagaggcatatttggcgcaatcgcgggtttcatagaaaatggttgggagggaatggtggatggttggtacggtttcaggcatcaaaattctgagggaataggacaagcagcagatctcaaaagcactcaagcagcaatcaaccaaatcaatgggaagctgaataggttgatcgggaaaaccaacgagaaattccatcagattgaaaaagaattctcagaagtagaagggagaattcaggacctcgagaaatatgttgaggacactaaaatagacctctggtcatacaacgcggagcttcttgttgccctggagaaccaacatacaattgatctaactgactcagaaatgaacaaactgtttgaaagaacaaagaagcaactgagggaaaatgctgaggatatgggcaatggttgtttcaaaatataccacaaatgtgacaatgcctgcatagggtcaatcagaaatggaacttatgaccatgatgtatacagagatgaagcattaaacaaccggttccagatcaaaggtgttgagctgaagtcaggatacaaagattggatcctatggatttcctttgccatatcatgttttttgctttgtgttgctttgttggggttcatcatgtgggcctgccaaaaaggcaacattaggtgcaacatttgcatttga

SEQ ID NO: 31789 - RNA, 1701 nt, synthetic construct; identical to SEQ ID NO: 30826
  misc_feature 1..1701: note = hemagglutinin__InfluenzaA__ABI92368
  source 1..1701: mol_type = other RNA

SEQ ID NO: 31790 - RNA, 1698 nt, synthetic construct
  misc_feature 1..1698: note = hemagglutinin__InfluenzaA__ABI92379
  source 1..1698: mol_type = other RNA
atgaaagtaaaactactggttctgttatgtacatttacagctacatatgcagacacaatatgtataggctaccatgccaacaactcgaccgacactgttgacacagtacttgagaagaatgtgacagtgacacactctgtcaacctacttgaggacagtcacaatggaaaactatgtctactaaaaggaatagccccactacaattgggtaattgcagcgttgccggatggatcttaggaaacccagaatgcgaattactgatttccaaggaatcatggtcctacattgtagaaacaccaaatcctgagaatggaacatgttacccagggtatttcgccgactatgaggagctgagggagcaattgagttcagtatcttcatttgagaggttcgaaatattccccaaagagagctcatggcccaaccacaccgtaaccggagtatcagcatcatgctcccataacgggaaaagcagtttttacaggaatttgctatggctgacggggaagaatggtttgtatccaaacctgagcaagtcctatgcaaacaacaaagagaaagaagtccttgtactgtggggtgttcatcacccgcctaacataggggaccaaagggccctctatcatacagaaaatgcttatgtctctgtagtgtcttcacattacagcagaagattcaccccagaaatagccaaaagacccaaggtgagagatcaggaaggaagaatcaactactactggactctgctggaacccggggatacaataatatttgaggcaaatggaaatctaatagcgccaaggtttgctttcgcactgagtagaggctttggatcaggaatcatcacctcaaatgcaccaatggatgaatgtgatgcgaagtgtcaaacacctcagggagctataaacagcagtcttcctttccagaatgtacacccagtcacaataggagagtgtccaaagtatgtcaggagtgcaaaattaagaatggttacaggactaaggaacatcccatccattcaatccagaggtttgtttggagccattgccggtttcattgaaggggggtggactggaatggtagatggttggtatggttatcaccatcagaatgagcaaggatctgggtatgctgcagatcaaaaaagcacacaaaatgccattaacgggattacaaacaaggtgaattctgtaattgagaaaatgaacactcaattcacagctgtgggcaaagaattcaacaaattggaaagaaggatggaaaacttaaataaaaaagttgatgatgggtttctagacatttggacatataacgcagaattgttggttctactggaaaatgaaaggactttggacttccatgactccaacgtgaagaatctgtatgagaaagtaaaaagccaattaaagaataatgccaaagaaataggaaacgggtgttttgaattctatcacaagtgtaacgatgaatgcatggagagtgtgaaaaatggaacttatgactatccaaaatattccgaagaatcaaagttgaacagggagagaattgatggagtgaaattggaatcaatgggagtctatcagattctggcgatctactcaacagtcgccagttccctggttcttttggtctccctgggggcaatcagcttctggatgtgttccaatgggtctttgcagtgtagaatatgcatctaa

SEQ ID NO: 31791 - RNA, 1701 nt, synthetic construct
  misc_feature 1..1701: note = hemagglutinin__InfluenzaA__ABI92390
  source 1..1701: mol_type = other RNA
atgaagactatcattgcttttagctacattctatgtctggttttcgctcaaaaacttcccggaaatgacaacagcacggcaacgctgtgccttgggcaccatgcagtaccaaacggaacgatagtgaaaacaatcacgaatgaccaaattgaagttactaatgctactgagctggttcagagttcctcaacaggtggaatatgcgacagtcctcatcagatccttgatggagaaaactgcacactaatagatgctctattgggagaccctcagtgtgatggcttccaaaataagaaatgggacctttttgttgaacgcagcaaagcctacagcaactgttacccttatgatgtgccggattatgcctcccttagatcactagttgcctcatccggcacactggagtttaacaatgaaagcttcaattggactggagtcactcaaaatggaacaagctctgcttgcaaaaggagatctaataacagtttctttagtagattgaattggttgacccacttaaaattcaaatacccagcattgaacgtgactatgccaaacaatgaaaaatttgacaaattgtacatttggggggttcaccacccgggtacggacaatgaccaaaccagcctatatgctcaagcatcaggaagaatcacagtctctaccaaaagaagccaacaaactgtaaccccgaatatcggatctagacccagggtaagggatatccccagcagaataagcatctattggacaatagtaaaaccgggagacatacttttgattaacagcacagggaatctaattgctcctcggggttacttcaaaatacgaagtgggaaaagctcaataatgagatcagatgcacccattggcaaatgcaattctgaatgcatcactccaaatggaagcattcccaatgacaaaccatttcaaaatgtaaacaggatcacatatggggcctgtcccagatatgttaagcaaaacaccctgaaattggcaacagggatgcgaaatgtaccagagaaacaaaccagaggcatatttggcgcaatcgcgggtttcatagaaaatggttgggagggaatggtggatggttggtacggtttcaggcatcaaaattctgagggaacaggacaagcagcagatctcaaaagcactcaagcagcaatcaaccaaatcaatgggaagttgaataggttgatcgggaaaaccaacgagaaattccatcagattgaaaaagaattctcagaagtagaagggagaattcaggacctcgagaaatatgttgaggacactaaaatagatctctggtcatacaacgcggagcttcttgttgccctggagaaccaacatacaattgatctaactgactcagaaatgaacaaactgtttgaaagaacaaagaagcaactgagggaaaatgctgaggatatgggcaatggttgtttcaaaatataccacaaatgtgacaatgcctgcatagggtcaatcagaaatggaacttatgaccatgatgtatacagggatgaagcattaaacaaccggttccagatcaaaggtgttgagctgaagtcaggatacaaagattggatcctatggatttcctttgccatatcatgttttttgctttgtgttgctttgttggggttcatcatgtgggcctgccaaaaaggcaacattaggtgcaacatctgcatttga

SEQ ID NO: 31792 - RNA, 1701 nt, synthetic construct
  misc_feature 1..1701: note = hemagglutinin__InfluenzaA__ABI92401
  source 1..1701: mol_type = other RNA
atgaagactatcattgctttgagctacattctatgtctggttttcgctcaaaaacttcccggaaatgacaacagcacggcaacgctgtgccttgggcaccatgcagtaccaaacggaacgatagtgaaaacaatcacgaatgaccaaattgaagttactaatgctactgagctggttcagagttcctcaacaggtggaatatgcgacagtcctcatcagatccttgatggagaaaactgcacactaatagatgctctattgggagaccctcagtgtgatggcttccaaaataagaaatgggacctttttgttgaacgcagcaaagcctacagcaactgttacccttatgatgtgccggattatgcctcccttaggtcactagttgcctcatccggcacactggagtttaacaatgaaagcttcaattggactggagtcactcaaaatggaacaagctctgcttgcaaaaggagatctaataacagtttctttagtagattgaattggttgacccatttaaaattcaaatacccagcattgaacgtgactatgccaaacaatgaaaaatttgacaaattgtacatttggggggttcaccacccgggtacgaacaatgaccaaatcagcctatatgctcaagcatcaggaagaatcacagtctctaccaaaagaagccaacaaactgtaatcccgaatatcggatctagacccagggtaagggatatccccagcagaataagcatctattggacaatagtaaaaccgggagacatacttttgattaacagcacagggaatctaattgctcctcggggttacttcaaaatacgaagtgggaaaagctcaataatgagatcagatgcacccattggcaaatgcaattctgaatgcatcactccaaatggaagcattcccaatgacaaaccatttcaaaatgtaaacaggatcacatatggggcctgtcccagatatgttaagcaaaacactctgaaattggcaacagggatgcgaaatgtaccagagaaacaaactagaggcatatttggcgcaatcgcgggtttcatagaaaatggttgggagggaatggtggatggttggtacggtttcaggcatcaaaattctgagggaataggacaagcagcagatctcaaaagcactcaagcagcaatcaaccaaatcaatgggaagctgaataggttgatcgggaaaaccaacgagaaattccatcagattgaaaaagaattctcagaagtagaagggagaattcaggacctcgagaaatatgttgaggacactaaaatagatctctggtcatacaacgcggagcttcttgttgccctggagaaccaacatacaattgatctaactgactcagaaatgaacaaactgtttgaaagaacaaagaagcaactgagggaaaatgctgaggatatgggcaatggttgtttcaaaatataccacaaatgtgacaatgcctgcatagggtcaatcagaaatggaacttatgaccatgatgtatacagagatgaagcattaaacaaccggttccagatcaaaggtgttgagctgaagtcaggatacaaagattggatcctatggatttcctttgccatatcatgttttttgctttgtgttgctttgttggggttcatcatgtgggcctgccaaaagggcaacattaggtgcaacatttgcatttga

SEQ ID NO: 31793 - RNA, 1701 nt, synthetic construct
  misc_feature 1..1701: note = hemagglutinin__InfluenzaA__ABI92412
  source 1..1701: mol_type = other RNA
atgaagactatcattgctttgagctacattctatgtctggttttcgctcaaaaacttcccggaaatgacaacagcacggcaacgctgtgccttgggcaccatgcagtaccaaacggaacgctagtgaaaacaatcacgaatgaccaaattgaagttactaatgctactgagctggttcagagttcctcaacaggtggaatatgcgacagtcctcatcagatccttgatggagaaaactgcacactaatagatgctctattgggagaccctcagtgtgatggcttccaaaataagaaatgggacctttttgttgaacgcagcaaagcctacagcaactgttacccttatgatgtgccggattatgcctcccttaggtcactaattgcctcatccggcacactggagtttaacaatgaaagcttcaattggactggagtcactcaaaatggaacaagctctgcttgcaaaaggagatctaatagcagtttctttagtagattgaattggttgacccacttaaaattcaaatacccagcattgaacgtgactatgccaaacaatgaagaatttgacaaattgtacatttggggggttcaccacccgggtacatacaatgaccaaatcagcctatatgctcaagcatcaggaagaatcacagtctctaccaaaagaagccaacaaactgtaatcccgaatatcgggtctagacccagggtaagggatatccccagcagaataagcatctattggacaatagtaaaaccgggagacatacttttgattaacagcacagggaatctaattgctcctcggggttacttcaaaatacgaagtgggaaaagctcaataatgagatcagatgcacccattggcaaatgcaattctgaatgcatcactccaaatggaagcattcccaatgacaaaccatttcaaaatataaacaggatcacatatggggcctgtcccagatatgttaagcaaaacactctgaaattggcaacagggatgcgaaatgtaccagagaaacaaactagaggcatatttggcgcaatcgcgggtttcatagaaaatggttgggagggaatggtggatggttggtacggtttcaggcatcaaaattctgagggaataggacaagcagcagatctcaaaagcactcaagcagcaatcgaccaaatcaatgggaagctgaataggttgatcgggaaaaccaacgagaaattccatcagattgaaaaagaattctcagaagtagaagggagaattcaggacctcgagaaatatgttgaggacactaaaatagatctctggtcatacaacgcggagcttcttgttgccctggagaaccaacatacaattgatctaactgactcagaaatgaacaaactgtttgaaagaacaaagaagcaactgagggaaaatgctgaggatatgggcaatggttgtttcaaaatataccacaaatgtgacaatgcctgcatagggtcaatcagaaatggaacttatgaccatgatgtatacagagatgaagcattaaacaaccggttccagatcaaaggtgttgagctgaagtcaggatacaaagattggatcctatggatttcctttgccatatcatgttttttgctttgtgttgctttgttggggttcatcatgtgggcctgccaaaaaggcaacattaggtgcaacatttgcatttga

SEQ ID NO: 31794 - RNA, 1701 nt, synthetic construct
  misc_feature 1..1701: note = hemagglutinin__InfluenzaA__ABI92423
  source 1..1701: mol_type = other RNA
atgaagactatcattgctttgagctacattctatgtctggttttcgctcaaaaacttcccggaaatgacaacagcacggcaacgctgtgccttgggcaccatgcagtaccaaacggaacgatagtgaaaacaatcacgaatgaccaaattgaagttactaatgctactgagctggttcagagttcctcaacaggtggaatatgcgacagtcctcatcagatccttgatggagaaaactgcacactaatagatgctctattgggagaccctcagtgtgatggcttccaaaataagaaatgggacctttttgttgaacgcagcaaagcctacagcaactgttacccttatgatgtgccggattatgcctcccttaggtcactaattgcctcatccggcacactggagtttaacaatgaaagcttcaattggactggagtcactcaaaatggaacaagctctgcttgcaaaaggagatctaatagcagtttctttagtagattgaattggttgacccacttaaaattcaaatacccagcattgaacgtgactatgccaaacaatgaagaatttgacaaattgtacatttggggggttcaccacccgggtacatacaatgaccaaatcagcctatatgctcaagcatcaggaagaatcacagtctctaccaaaagaagccaacaaactgtaatcccgaatatcgggtctagacccagggtaagggatatccccagcagaataagcatctattggacaatagtaaaaccgggagacatacttttgattaacagcacagggaatctaattgctcctcggggttacttcaaaatacgaagtgggaaaagctcaataatgagatcagatgcacccattggcaaatgcaattctgaatgcatcactccaaatggaagcattcccaatgacaaaccatttcaaaatgtaaacaggatcacatatggggcctgtcccagatatgttaagcaaaacactctgaaattggcaacagggatgcgaaatgtaccagataaacaaactagaggcatatttggcgcaatcgcgggtttcatagaaaatggttgggagggaatggtggatggttggtacggtttcaggcatcaaaattctgagggaataggacaagcagcagatctcaaaagcactcaagcagcaatcgaccaaatcaatgggaagctgaataggttgatcgggaaaaccaacgagaaattccatcagattgaaaaagaattctcagaagtagaagggagaattcaggacctcgagaaatatgttgaggacactaaaatagatctctggtcatacaacgcggagcttcttgttgccctggagaaccaacatacaattgatctaactgactcagaaatgaacaaactgtttgaaagaacaaagaagcaactgagggaaaatgctgaggatatgggcaatggttgtttcaaaatataccacaaatgtgacaatgcctgcatagggtcaatcagaaatggaacttatgaccatgatgtatacagagatgaagcattaaacaaccggttccagatcaaaggtgttgagctgaagtcaggatacaaagattggatcctatggatttcctttgccatatcatgttttttgctttgtgttgctttgttggggttcatcatgtgggcctgccaaaaaggcaacattaggtgcaacatttgcatttga

SEQ ID NO: 31795 - RNA, 1701 nt, synthetic construct
  misc_feature 1..1701: note = hemagglutinin__InfluenzaA__ABI92434
  source 1..1701: mol_type = other RNA
atgaagactatcattgctttgagctacattctatgtctggttttcgctcaaaaacttcccggaaatgacaacagcacggcaacgctgtgccttgggcaccatgcagtaccaaacggaacgatagtgaaaacaatcacgaatgaccaaattgaagttactaatgctactgagctggttcagagttcctcaacaggtggaatatgcgacagtcctcatcagatccttgatggagaaaactgcacactaatagatgctctattgggagaccctcagtgtgatggcttccaaaataagaaatgggacctttttgttgaacgcagcaaagcctacagcaactgttacccttatgatgttccggattatgcctcccttaggtcactaattgcctcatccggcacactggagtttaacaatgaaagcttcaattggactggagtcactcaaaatggaacaagctctgcttgcaaaaggagatctaatagcagcttctttagtagattgaattggttgacccacttaaaattcaaatacccagcattgaacgtgactatgccaaacaatgaagaatttgacaaattgtacatttggggggttcaccacccgggtacatacaatgaccaaatcagcctatatgctcaagcatcaggaagaatcacagtctctaccaaaagaagccaacaaactgtaatcccgaatatcgggtctagacccagggtaagggatatccccagcagaataagcatctattggacaatagtaaaaccgggagacatacttttgattaacagcacagggaatctaattgctcctcggggttacttcaaaatacgaagtgggaaaagctcaataatgagatcagatgcacccattggcaaatgcaattctgaatgcatcactccaaatggaagcattcccaatgacaaaccatttcaaaatgtaaacaggatcacatatggggcctgtcccagatatgttaagcaaaacactctgaaattggcaacagggatgcgaaatgtaccagagaaacaaactagaggcatatttggcgcaatcgcgggtttcatagaaaatggttgggagggaatggtggatggttggtacggtttcaggcatcaaaattctgagggaataggacaagcagcagatctcaaaagcactcaagcagcaatcgaccaaatcaatgggaagctgaataggttgatcgggaaaaccaacgagaaattccatcagattgaaaaagaattctcagaagtagaagggagaattcaggacctcgagaaatatgttgaggacactaaaatagatctctggtcatacaacgcggagcttcttgttgccctggagaaccaacatacaattgatctaactgactcagaaatgaacaaactgtttgaaagaacaaagaagcaactgagggaaaatgctgaggatatgggcaatggttgtttcaaaatataccacaaatgtgacaatgcctgcatagggtcaatcagaaatggaacttatgaccatgatgtatacagagatgaagcattaaacaaccggttccagatcaaaggtgttgagctgaagtcaggatacaaagattggatcctatggatttcctttgccatatcatgttttttgctttgtgttgctttgttggggttcatcatgtgggcctgccaaaaaggcaacattaggtgcaacatttgcatttga

SEQ ID NO: 31796 - RNA, 1701 nt, synthetic construct
  misc_feature 1..1701: note = hemagglutinin__InfluenzaA__ABI92445
  source 1..1701: mol_type = other RNA
atgaagactatcattgctttgagctacattctatgtctggttttcactcaaaaacttcccggaaatgacaacagcacggcaacgctgtgccttgggcaccatgcagtaccaaacggaacgatagtgaaaacaatcacgaatgaccaaattgaagttactaatgctactgagctggttcagagttcctcaacagggggaatatgcgacagtcctcatcagatccttgatggagaaaactgcacactaatagatgctctattgggagaccctcagtgtgatggcttccaaaataagaaatgggacctttttgttgaacgcagcaaagcctacagcaactgttacccttatgatgtgccggattatgcctcccttaggtcactaattgcctcatccggcacactggagtttaacaatgaaagcttcaattggactggagtcaatcaaaatggaacaagctctgcttgcaaaaggagatctaatagcagtttctttagtagattgaattggttgacccacttaaaattcaaatacccagcattgaacgtgactatgccaaacaatgaagaatttgacaaattgtacatttggggggttcaccacccgggtacatacaatgaccaaatcagcctatatgctcaagcatcaggaagaatcacagtctctaccaaaagaagccaacaaactgtaatcccgaatatcgggtctagacccagggtaagggatatccccagcagaataagcatctattggacaatagtaaaaccgggagacatacttttgattaacagcacagggaatctaattgctcctcggggttacttcaaaatacgaagtgggaaaagctcaataatgagatcagatgcacccattggcaaatgcaattctgaatgcatcactccaaatggaagcattcccaatgacaaaccatttcaaaatgtaaacaggatcacatatggggcctgtcccagatatgttaagcaaaacactctgaaattggcaacagggatgcgaaatgtaccagagaaacaaactagaggcatatttggcgcaatcgcgggtttcatagaaaatggttgggagggaatggtggatggttggtacggtttcaggcatcaaaattctgagggaataggacaagcagcagatctcaaaagcactcaagcagcaatcgaccaaatcaatgggaagctgaataggttgatcgggaaaaccaacgagaaattccatcagattgaaaaagaattctcagaagtagaagggagaattcaggacctcgagaaatatgttgaggacactaaaatagatctctggtcatacaacgcggagcttcttgttgccctagagaaccaacatacaattgatctaactgactcagaaatgaacaaactgtttgaaagaacaaagaagcaactgagggaaaatgctgaggatatgggcaatggttgtttcaaaatataccacaaatgtgacaatacctgcatagggtcaatcagaaatggaacttatgaccatgatgtatacagagatgaagcattaaacaaccggttccagatcaaaggtgttgagctgaagtcaggatacaaagattggatcctatggatttcctttgccatatcatgttttttgctttgtgttgctttgttggggttcatcatgtgggcctgccaaaaaggcaacattaggtgcaacatttgcatttga

SEQ ID NO: 31797 - RNA, 1701 nt, synthetic construct; identical to SEQ ID NO: 31161
  misc_feature 1..1701: note = hemagglutinin__InfluenzaA__ABI92456
  source 1..1701: mol_type = other RNA

SEQ ID NO: 31798 - RNA, 1701 nt, synthetic construct
  misc_feature 1..1701: note = hemagglutinin__InfluenzaA__ABI92467
  source 1..1701: mol_type = other RNA
atgaagactatcattgctttgagctacattttatgtctggttttcgctcaaaaacttcccggaaatgacaacagcacggcaacgctgtgcctggggcaccatgcagtgccaaacggaacgctagtgaaaacaatcacgaatgaccaaattgaagtgactaatgctactgagctggttcagagttcctcaacaggtggaatatgcgacagtcctcaccaaatccttgatggagaaaactgcacactaatagatgctctattgggagaccctcattgtgatggcttccaaaataaggaatgggacctttttgttgaacgcagcaaagcctacagcaactgttacccttatgatgtgccggattatgcctcccttaggtcactagttgcctcatccggcacactggagtttaacaatgaaagcttcaattggactggagtcgctcagaatggaacaagctctgcttgcaaaaggagatctaataaaagtttctttagtagattgaattggttgcaccaattaaaatacaaatacccagcactgaacgtgactatgccaaacaatgaaaaatttgacaaattgtacatttggggggttcaccacccgagtacggacagtgaccaaatcagcctatatgctcaagcaccagggagagtcacagtctctaccaaaagaagccaacaaactgtaatcccgaatatcggatctagaccctgggtaaggggtgtctccagcagaataagcatctattggacaatagtaaaaccgggagacatacttttgattaactgcacagggaatctaattgctcctcggggttacttcaaaatacgaagtgggaaaagctcaataatgaggtcagatgcatccattggcaaatgcaattctgaatgcatcactccaaatggaagcattcccaatgacaaaccatttcaaaatgtaaacaggatcacatatggggcctgtcccagatatgttaagcaaaacactctgaaattggcaacagggatgcggaatgtaccagagaaacaaactagaggcatattcggcgcaatcgcgggtttcatagaaaatggttgggagggaatggtggacggttggtacggtttcaggcatcaaaattctgagggcacaggacaagcagcagatctcaaaagcactcaagcagcaatcaaccaaatcaacgggaaactgaataggttaatcgagaaaacgaacgagaaattccatcaaattgaaaaagaattctcagaagtggaagggagaattcaggacctcgagaaatatgttgaggacactaaaatagatctctggtcgtacaacgcggagcttcttgttgccctggagaaccagcatacaattgatctaactgactcagaaatggacaaactgtttgaaagaacaaagaagcaactgagggaaaatgctgaggatatgggcaatggttgtttcaaaatataccacaaatgtgacaatgcctgcatagggtcaatcagaaatgggacttatgaccatgatgtatacagagacgaagcattaaacaaccggttccagatcaaaggtgttgagctgaagtcaggatacaaagattggatcctatggatttcctttgccatatcatgttttttgctttgtgttgtcttgctggggttcatcatgtgggcctgccaaaaaggcaacattaggtgcaacatttgcatttga

SEQ ID NO: 31799 - RNA, 1701 nt, synthetic construct; identical to SEQ ID NO: 31154
  misc_feature 1..1701: note = hemagglutinin__InfluenzaA__ABI92478
  source 1..1701: mol_type = other RNA

SEQ ID NO: 31800 - RNA, 1701 nt, synthetic construct; identical to SEQ ID NO: 31798
  misc_feature 1..1701: note = hemagglutinin__InfluenzaA__ABI92489
  source 1..1701: mol_type = other RNA

SEQ ID NO: 31801 - RNA, 1701 nt, synthetic construct
  misc_feature 1..1701: note = hemagglutinin__InfluenzaA__ABI92500
  source 1..1701: mol_type = other RNA
atgaagactatcattgctttgagctacattttatgtctggttttcgctcaaaaacttcccggaaatgacaacagcacggcaacgctgtgcctggggcaccatgcagtgccaaacggaacgctagtgaaaacaatcacgaatgaccaaattgaagtgactaatgctactgagctggttcagagttcctcaacaggtggaatatgcgacagtcctcaccaaatccttgatggagaaaactgcacactaatagatgctctattgggagaccctcattgtgatggcttccaaaataaggaatgggacctttttgttgaacgcagcaaagcctacagcaactgttacccttatgatgtgccggattatgcctcccttaggtcactagttgcctcatccggcacactggagtttaacaatgaaagcttcaattggactggagtcgctcagaatggaacaagctctgcttgcaaaaggagatctaataaaagtttctttagtagattgaattggttgcaccaattaaaatacaaatacccagcactgaacgtgactatgccaaacaatgaaaaatttgacaaattgtacatttggggggttcaccacccgagtacggacagtgaccaaatcagcctatatgctcaagcaccagggagagtcacagtctctaccaaaagaagccaacaaactgtaatcccgaatatcggatctagaccctgggtaaggggtgtctccagcagaataagcatctattggacaatagtaaaaccgggagacatacttttgattaactgcacagggaatctaattgctcctcggggttacttcaaaatacgaagtgggaaaagctcaataatgaggtcagatgcatccattggcaaatgcaattctgaatgcatcactccaaatggaagcattcccaatgacaaaccatttcaaaatgtaaacaggatcacatatggggcctgtcccagatatgttaagcaaaacactctgaaattggcaacagggatgcggaatgtaccagagaaacaaactagaggcatattcggcgcaatcgcgggtttcatagaaaatggttgggagggaatggtggacggttggtacggtttcaggcatcaaaattctgagggcacaggacaagcagcagatctcaaaagcactcaagcagtaatcaaccaaatcaacgggaaactgaataggttaatcgagaaaacgaacgagaaattccatcaaattgaaaaagaattctcagaagtggaagggagaattcaggacctcgagaaatatgttgaggacactaaaatagatctctggtcgtacaacgcggagcttcttgttgccctggagaaccagcatacaattgatctaactgactcagaaatgaacaaactgtttgaaagaacaaagaagcaactgagggaaaatgctgaggatatgggcaatggttgtttcaaaatataccacaaatgtgacaatgcctgcatagggtcaatcagaaatgggacttatgaccatgatgtatacagagacgaagcattaaacaaccggttccagatcaaaggtgttgagctgaagtcaggatacaaagattggatcctatggatttcctttgccatatcatgttttttgctttgtgttgtcttgctggggttcatcatgtgggcctgccaaaaaggcaacattaggtgcaacatttgcatttga

SEQ ID NO: 31802 - RNA, 1701 nt, synthetic construct
  misc_feature 1..1701: note = hemagglutinin__InfluenzaA__ABI92511
  source 1..1701: mol_type = other RNA
atgaagactatcattgctttgagctacattttatgtctggttttcgctcaaaaacttcccggaaatgacaacagcacagcgacgctgtgcctggggcaccatgcagtgccaaacggaacgctagtgaaaacaatcacgaatgaccaaattgaagtgactaatgctactgagctggttcagaattcctcaacaggtataatatgcgacagtcctcaccaaatccttgatggagaaaactgcacactaatagatgctctattgggagaccctcattgtgatggcttccaaaataaggaatgggacctttttgttgaacgcagcaaagcctacagcaactgttacccttatgatgtgccggattatgcctcccttagatcactagttgcctcatccggcacactggagtttaacaatgaaagcttcaattggactggagtcgctcagaatggaacaagctctgcttgcaaaaggagatctgataaaagtttctttagtagattgaattggttgcaccaattaaaatacaaatacccagcattgaacgtgactatgccaaacactgaaaaatttgacaaattgtacatttggggggttcaccacccgagtacggacagcgaccaaatcagcctatatgctcaagcatcagggagagtcacagtctctaccaaaagaagccaacaaactgtaatcccgaatatcggatctagaccctgggtaaggggtgtctccagcagagtaagcatctattggacaatagtaaaaccgggagacatacttttgattaacagcacagggaatctaattgctcctcggggttacttcaaaatacgaagtgggaaaagctcaataatgaggtcagacgcatccattggcaaatgcaattctaaatgcatcactccaaatggaagcattcccaatgacaaaccatttcaaaatgtaaacaggatcacatatggggcctgtcccaggtatgttaagcaaaacactctgaaattggcaacagggatgcggaatgtaccagagaaacaaactagaggcatattcggcgcaatcgcgggtttcatagaaaatggttgggagggaatggtggacggttggtacggtttcagacatcaaaattctgagggcacaggacaagcagcagatcttaaaagcactcaagcagcaatcaaccaaatcaacgggaaactgaataggttaatcgagaaaacgaacgagaaattccatcaaattgaaaaagaattctcagaagtagaagggagaattcaggacctcgagaaatatgttgaggacactaaaatagatctctggtcgtacaacgcggagcttcttgttgccctggagaaccaacatacaattgatctaactgactcagaaatgaacaaactgtttgaaagaacaaagaagcaactgagggaaaatgctgaggatatgggcaatggttgtttcaaaatataccacaaatgtgacaatacctgcataggatcaatcagaaatggaacttatgaccatgatgtatacagagacgaagcattaaacaaccggttccagatcaaaggtgttgagctgaagtcaggatacaaagattggatcctatggatttcctttgccatatcatgttttttgctttgtgttgttttgctggggttcatcatgtgggcctgccaaaaaggcaacattaggtgcaacatttgcatctga

SEQ ID NO: 31803 - RNA, 1701 nt, synthetic construct
  misc_feature 1..1701: note = hemagglutinin__InfluenzaA__ABI92522
  source 1..1701: mol_type = other RNA
atgaagactatcattgctttgagctacattttatgtctggttttcgctcaaaaacttcccggaaatgacaacagcacggcaacgctgtgcctggggcaccatgcagtgccaaacggaacgctagtgaaaacaatcacgaatgaccaaattgaagtgactaatgctactgagctggttcagagttcctcaacaggtagaatatgcgacagtcctcaccaaatccttgatggagaaaactgcacactaatagatgctctattgggagaccctcattgtgatggcttccaaaataaggaatgggacctttttgttgaacgcagcaaagcctacagcaactgttacccttatgatgtgccggattatgtctcccttaggtcactagttgcctcatcaggcacgctggagtttaacaatgaaagcttcaattggactggagtcgctcagaatggaacaagctctgcttgcaaaaggagatctaataaaagtttctttagtagattgaattggttgcaccaattaaaatacaaatatccagcactgaacgtgactatgccaaacaatgaaaaatttgacaaattatacatttggggggttcaccacccgggtacagacagtgaccaaatcagcctatatgctcaagcatcagggagagtcacagtctctaccaaaagaagccaacaaactgtaatcccgaatatcggatctagaccctgggtaaggggtgtctccagcagaataagcatctattggacaatagtaaaaccgggagacatacttttgattaacagcacagggaatctaattgctcctcggggttacttcaaaatacgaagtgggaaaagctcaataatgaagtcagatgcacccattggcaaatgcaattctgaatgcatcactccaaatggaagcattcccaatgacaaaccatttcaaaatgtaaacaggatcacatatggggcctgtcccagatatgttaagcaaaacactctgaaattggcaacagggatgcggaatgtgccagagaaacaaactagaggcatattcggtgcaatcgcgggcttcatagaaaatggttgggagggaatgatggacggttggtacggtttcaggcatcaaaattctgagggcacagggcaagcagcagatcttaaaagcactcaagcagcaatcaaccaaatcaacgggaaactgaataggttaatcgagaaaacgaacgagaaattccatcaaattgaaaaagaattctcagaagtagaagggagaattcaggacctcgagaaatatgttgaggacactaaaatagatctctggtcgtacaatgcggagcttcttgttgccctggagaaccaacatacaattgatctaactgactcagaaatgaacaaactgtttgaaagaacaaagaagcaactgagggaaaatgctgaggatatgggcaatggttgtttcaaaatataccacaaatgtgacaatgcctgcatagggtcaatcagaaatggaacttatgaccatgatgtatacagagacgaagcattgaacaaccggttccagatcaaaggtgttgagctgaagtcaggatacaaagattggatcctatggatttcctttgccatatcatgttttttgctttgtattgttttgctggggttcatcatgtgggcctgccaaaaaggcaacattaggtgcaacatttgcatttga

SEQ ID NO: 31804 - RNA, 1701 nt, synthetic construct
  misc_feature 1..1701: note = hemagglutinin__InfluenzaA__ABI92533
  source 1..1701: mol_type = other RNA
atgaagactatcattgctttgagctacattttatgtctggttttcgctcaaaaacttcccggaaatgacaacagcagggcaacgctgtgcctggggcaccatgcagtgccaaacggaacgctagtgaaaacaatcacgaatgaccaaattgaagtgactaatgctactgagctggttcagagttcctcaacaggtagaatatgcgacagtcctcaccaaatccttgatggagaaaactgcacactaatagatgctctattgggagaccctcattgtgatggcttccaaaataaggaatgggacctttttgttgaacgcagcaaagcctacagcaactgttacccttatgatgtgccggattatgtctcccttaggtcactagttgcctcatcaggcacgctggagtttaacaatgaaagcttcaattggactggagtcgctcagaatggaacaagctctgcttgcaaaaggagatctgataaaagtttctttagtagattgaattggttgcaccaattaaaatacaaatatccagcactgaacgtgactatgccaaacaatgaaaaatttgacaaattgtacatttggggggttcaccacccgggtacagacagtgaccaaatcagcctatatgctcaagcatcagggagagtcacagtctctaccaaaagaagccaacaaactgtaatcccgaatatcggatctagaccctgggtaaggggtgtctccagcagaataagcatctattggacaatagtaaaaccgggagacatacttttgattaacagcacagggaatctaattgctcctcggggttacttcaaaatacgaagtgggaaaagctcaataatgaggtcagatgcacccattggcaaatgcaattctgaatgcatcactccaaatggaagcattcccaatgacaaaccatttcaaaatgtaaacaggatcacatatgggccctgtcccagatatgttaagcaaaacactctgaaattggcaacagggatgcgaaatgtgccagagaaacaaactagaggcatattcggtgcaatcgcgggcttcatagaaaatggttgggagggaatgatggacggttggtacggtttcaggcatcaaaattctgagggcacagggcaagcagcagatcttaaaagcactcaagcagcaatcaaccaaatcaacgggaaactgaataggttaatcgagaaaacgaacgagaaattccatcaaattgaaaaagaattctcagaagtagaagggagaattcaggacctcgagaaatatgttgaggacactaaaatagatctctggtcgtacaatgcggagcttcttgttgccctggagaaccaacatacaattgatctaactgactcagaaatgaacaaactgtttgaaagaacaaagaagcaactgagggaaaatgctgaggatatgggcaatggttgtttcaaaatataccacaaatgtgacaatgcctgcatagggtcaatcagaaatggaacttatgaccatgatgtatacagagacgaagcattgaacaaccggttccagatcaaaggtgttgagctgaagtcaggatacaaagattggatcctatggatttcctttgccatatcatgttttttgctttgtattgttttgctggggttcatcatgtgggcctgccaaaaaggcaacattaggtgcaacatttgcatttga

SEQ ID NO: 31805 - RNA, 1701 nt, synthetic construct; identical to SEQ ID NO: 31804
  misc_feature 1..1701: note = hemagglutinin__InfluenzaA__ABI92544
  source 1..1701: mol_type = other RNA

SEQ ID NO: 31806 - RNA, 1701 nt, synthetic construct
  misc_feature 1..1701: note = hemagglutinin__InfluenzaA__ABI92577
  source 1..1701: mol_type = other RNA
atgaagactatcattgctttgagctacattttatgtctggttttcgctcaaaaacttcccggaaatgacaacagcacggcaacgctgtgcctggggcaccatgcagtgccaaacggaacgctagtgaaaacaatcacgaatgaccaaattgaagtgactaatgctactgagctggttcagagttcctcaacaggtagaatatgcgacagtcctcaccaaatccttgatggagaaaactgcacactaatagatgctctattgggagaccctcattgtgatggcttccaaaataaggaatgggacctttttgttgaacgcagcagagcctacagcaactgttacccttatgatgtgccggattatgtctcccttaggtcactagttgcctcatcaggcacgctggagtttaacaatgaaagcttcaattggactggagtcgctcagaatggaacaagctctgcttgcaaaagaagatctgataaaagtttctttagtagattgaattggttgcaccaattaaaatacaaatatccagcactgaacgtgactatgccaaacaatgaaaaatttgacaaattgtacatttggggggttcaccacccgggtacagacagtgaccaaatcagcctatatgctcaagcatcagggagagtcacagtctctaccaaaagaagccaacaaactgtaatcccgaatatcggatctagaccctgggtaaggggtgtctccagcaaaataagcatctattggacaatagtaaaaccgggagacatacttttgattaacagcacagggaatctaattgctcctcggggttacttcaaaatacgaagtgggaaaagctcaataatgaggtcagatgcacccattggcaaatgcaattctgaatgcatcactccaaatggaagcattcccaatgacaaaccatttcaaaatgtaaacaggatcacatatgggccctgtcccagatatgttaagcaaaacactctgaaattggcaacagggatgcggaatgtgccagagaaacaaactagaggcatattcggtgcaatcgcgggcttcatagaaaatggttgggagggaatgatggacggttggtacggtttcaggcatcaaaattctgagggcacagggcaagcagcagatcttaaaagcactcaagcagcaatcaaccaaatcaacgggaaactgaataggttaattgagaaaacgaacgagaaattccatcaaattgaaaaagaattctcagaagtagaagggagaattcaggacctcgagaaatatgttgaggacactaaaatagatctctggtcgtacaatgcggagcttcttgttgccctggagaaccaacatacaattgatctaactgactcagaaatgaacaaactgtttgaaagaacaaagaagcaactgagggaaaatgctgaggatatgggcaatggttgtttcaaaatataccacaaatgtgacaatgcctgcatagggtcaatcagaaatggaacttatgaccatgatgtatacagagacgaagcattgaacaaccggttccagatcaaaggtgttgagctgaagtcaggatacaaagattggatcctatggatttcctttgccatatcatgttttttgctttgtattgttttgctggggttcatcatgtgggcctgccaaaaaggcaacattaggtgcaacatttgcatttga

SEQ ID NO: 31807 - RNA, 1701 nt, synthetic construct
  misc_feature 1..1701: note = hemagglutinin__InfluenzaA__ABI92588
  source 1..1701: mol_type = other RNA
atgaagactatcattgctttgagctacattttatgtctggttttcgctcaaaaacttcccggaaatgacaacagcacggcaacgctgtgcctggggcaccatgcagtgccaaacggaacgctagtgaaaacaatcacgaatgaccaaattgaagtgactaatgctactgagctggttcagagttcctcaacaggtagaatatgcgacagtcctcaccaaatccttgatggagaaaactgcacactaatagatgctctattgggagaccctcattgtgatggcttccaaaataaggaatgggacctttttgttgaacgcagcagagcctacagcaactgttacccttatgatgtgccggattatgtctcccttaggtcactagttgcctcatcaggcacgctggagtttaacaatgaaagcttcaattggactggagtcgctcagaatggaacaagctctgcttgcaaaagaagatctgataaaagtttctttagtagattgaattggttgcaccaattaaaatacaaatatccagcactgaacgtgactatgccaaacaatgaaaaatttgacaaattgtacatttggggggttcaccacccgggtacagacagtgaccaaatcagcctatatgctcaagcatcagggagagtcacagtctctaccaaaagaagccaacaaactgtaatcccgaatatcggatctagaccctgggtaaggggtgtctccagcagaataagcatctattggacaatagtaaaaccaggagacatacttttgattaacagcacagggaatctaattgctcctcggggttacttcaaaatacgaagtgggaaaagctcaataatgaggtcagatgcacccattggcaaatgcaattctgaatgcatcactccaaatggaagcattcccaatgacaaaccatttcaaaatgtaaacaggatcacatatgggccctgtcccagatatgttaagcaaaacactctgaaattggcaacagggatgcggaatgtgccagagaaacaaactagaggcatattcggtgcaatcgcgggcttcatagaaaatggttgggagggaatgatggacggttggtacggtttcaggcatcaaaattctgagggcacagggcaagcagcagatcttaaaagcactcaagcagcaatcaaccaaatcaacgggaaactgaataggttaatcgagaaaacgaacgagaaattccatcaaattgaaaaagaattctcagaagtagaagggagaattcaggacctcgagaaatatgttgaggacactaaaatagatctctggtcgtacaatgcggagcttcttgttgccctggagaaccaacatacaattgatctaactgactcagaaatgaacaaactgtttgaaagaacaaagaagcaactgagggaaaatgctgaggatatgggcaatggttgtttcaaaatataccacaaatgtgacaatgcctgcatagggtcaatcagaaatggaacttatgaccatgatgtatacagagacgaagcattgaacaaccggttccagatcaaaggtgttgagctgaagtcaggatacaaagattggatcctatggatttcctttgccatatcatgttttttgctttgtattgttttgctggggttcatcatgtgggcctgccaaaaaggcaacattaggtgcaacatttgcatttga

SEQ ID NO: 31808 - RNA, 1701 nt, synthetic construct
  misc_feature 1..1701: note = hemagglutinin__InfluenzaA__ABI92599
  source 1..1701: mol_type = other RNA
atgaagactatcattgctttgagctacattttatgcctggttttcgctcaaaaacttcccggaaatgacaacagcacggcaacgctgtgcctggggcaccatgcagtgccaaacggaacgctagtgaaaacaatcacgaatgaccaaattgaagtaactaatgctactgagctggttcagagttcctcaacaggtagaatatgcaacagtcctcaccaaatccttgatggagaaaactgcacactaatagatgctctattgggagaccctcattgtgatggcttccaaaataaggaatgggacctttttgttgaacgcagcaaagcctacagcaactgttacccttatgatgtgccggattatgtctcccttaggtcactagttgcctcatcaggcacgctggagtttaacaatgaaagcttcaattggactggagtcgctcagaatggaacaagctctgcttgcaaaaggagatctgataaaagtttctttagtagattgaattggttgcaccaattaaaatacaaatatccagcactgaacgtgactatgccaaacaatgaaaaatttgacaaattgtacatttggggggtccaccacccgggtacagacagtgaccaaatcagcctatatgctcaagcatcagggagagtcacagtctctaccaaaagaagccaacaaactgtaatcccgaatatcggatctagaccctgggtaaggggtgtctccagcagaataagcatctattggacaatagtaaaaccgggagacatacttttgattaacagcacagggaatctaattgctcctcggggttacttcaaaatacgaagtgggaaaagctcaataatgaggtcagatgcacccattggcaaatgcaattctgaatgcatcactccaaatggaagcattcccaatgacaaaccatttcaaaatgtaaacaggatcacatatggggcctgtcccagatatgttaagcaaaaaactctgaaattggcaacagggatgcggaatgtgccagagaaacaaactagaggcatattcggtgcaatcgcgggcttcatagaaaatggttgggagggaatgatggacggttggtacggtttcaggcatcaaaattctgagggcacagggcaagcagcagatcttaaaagcactcaagcagcaatcaaccaaatcaacgggaaactgaataggttgattgagaaaacgaacgagaaattccatcaaattgaaaaagaattctcagaagtagaagggagaattcaggacctcgagaaatatgtcgaggacactaaaatagatctctggtcgtacaatgcggagcttcttgttgccctggagaaccaacatacaattgatctaactgactcagaaatgaacaaactgtttgaaagaacaaagaagcaactgagggaaaatgctgaggatatgggcaatggttgtttcaaaatataccacaaatgtgacaatgcctgcatagggtcaatcagaaatggaacttatgaccatgatgtatacagagacgaagcattgaacaaccggttccagatcaaaggtgttgagctgaagtcaggatacaaagattggatcctatggatttcctttgccatatcatgttttttgctttgtattgttttactggggttcatcatgtgggcctgccaaaaaggcaacattaggtgcaacatttgcatttga

SEQ ID NO: 31809 - RNA, 1701 nt, synthetic construct
  misc_feature 1..1701: note = hemagglutinin__InfluenzaA__ABI92610
  source 1..1701: mol_type = other RNA
atgaagactatcattgctttgagctacattttatgcctggttttcgctcaaaaacttcccggaaatgacaacagcacggcaacgctgtgcctggggcatcatgcggtgccaaacggaacgctagtgaaaacaatcacgaatgaccaaattgaagtaactaatgctactgagctggttcagagttcctcaacaggtagaatatgcgacagtcctcatcaaatccttgatggagaaaactgcacactaatagatgctctattgggagaccctcattgtgatggcttccaaaataaggaatgggacctttttgttgaacgcagcaaagcctacagcaactgttacccttatgatgtgccggattatgtctcccttaggtcactagttgcctcatcaggcacgctggagtttaacaatgaaagcttcaattggactggagtcgctcagaatggaacaagctctgcttgcaaaaggagatctgataaaagtttctttagtagattgaattggttgcaccaattaaaatacaaatatccagcactgaacgtgactatgccaaacaatgaaaaatttgacaaattgtacatttggggggttcaccacccgggtacagacagtgaccaaatcagcctatatgctcaagcatcagggagagtcacagtctctaccaaaagaagccaacaaactgtaatcccgaatatcggatctagaccctgggtaaggggtgtctccagcagaataagcatctattggacaatagtaaaaccgggagacatacttttgattaacagcacagggaatctaattgctccacggggttacttcaaaatacgaagtgggaaaagctcaataatgaggtcagatgcacccattggcaaatgcaattctgaatgcatcactccaaatggaagcattcccaatgacaaaccatttcaaaatgtaaacaggatcacatatggggcctgtcccagatatgttaagcaaaacactctgaaattggcaacagggatgcggaatgtgccagagaaacaaactagaggcatattcggtgcaatcgcgggcttcatagaaaatggttgggagggaatgatggacggttggtacggtttcaggcatcaaaattctgagggcacagggcaagcagcagatcttaaaagcactcaagcagcaatcaaccaaattaacgggaaactgaataggttaatcgagaaaacgaacgagaaattccatcaaattgaaaaagaattctcagaagtagaagggagaattcaggacctcgagaaatatgttgaggacactaaaatagatctctggtcgtacaatgcggagcttcttgttgccctggagaaccaacatacaattgatctaactgactcagaaatgaacaaactgtttgaaagaacaaagaagcaactgagggaaaatgctgaggatatgggcaatggttgtttcaaaatataccacaaatgtgacaatgcctgcatagggtcaatcagaaatggaacttatgaccatgatgtatacagagacgaagcattgaacaaccggttccagatcaaaggtgttgagctgaagtcaggatacaaagattggatcctatggatttcctttgccatatcatgttttttgctttgtattgttttgctggggttcatcatgtgggcctgccaaaaaggcaacattaggtgcaacatttgcatttga

SEQ ID NO: 31810 - RNA, 1701 nt, synthetic construct
  misc_feature 1..1701: note = hemagglutinin__InfluenzaA__ABI92621
  source 1..1701: mol_type = other RNA
atgaagactatcattgctttgagctacattttatgtctggttttcgctcaaaaacttcccggaaatgacaacagcatggcaacgctgtgcctggggcaccatgcagtgccaaacggaacgctagtgaaaacaatcacgaatgaccaaattgaagtgactaatgctactgagctggttcagagttcctcaacaggtagaatatgcaacagtcctcaccaaatccttgatggagaaaactgcacactaatagatgctctattgggagaccctcattgtgaaggcttccaaaataaggaatgggacctttttgttgaacgcagcaaagcctacagcaactgttacccttatgatgtgccggattatgtctcccttaggtcactagttgcctcatcaggcacgctggagtttaacaatgaaagcttcaattggactggagtcgctcagaatggaacaagctctgcttgcaaaaggagatctgataaaagtttctttagtagattgaattggttgcaccaattaaaatacaaatatccagcactgaacgtgactatgccaaacaatgaaaaatttgacaaattgtacatttggggggttcaccacccgggtacagacagtgaccaaatcagcctatatgctcaagcatcagggagagtcacagtctctaccaaaagaagccaacaaactgtaatcccgaatatcggatctagaccctgggtaaggggtgtctccagcaaaataagcatctattggacaatagtaaaaccgggagacatacttttgattaacagcacagggaatctaattgctcctcggggttacttcaaaatacgaagtgggaaaagctcaataatgaggtcagatgcacccattgacaaatgcaattctgaatgcatcactccaaatggaagcattcccaatgacaaaccatttcaaaatgtaaacaggatcacatatgggctctgtcccagatatgttaagcaaaacactctgaaattggcaacggggatgcggaatgtgccagagaaacaaactagaggcatattcggtgcaatcgcgggcttcatagaaaatggttgggagggaatgatggacggttggtacggtttcaggcatcaaaattctgagggcacagggcaagcagcagatcttaaaagcactcaagcagcaatcaaccaaatcaacgggaaactgaataggttaatcgaaaaaacgaacgagaaattccatcaaattgaaaaagaattctcagaagtagaagggagaattcaggacctcgagaaatatgttgaggacactaaaatagatctctggtcgtacaatgcggagcttcttgttgccctggagaaccaacatacaattgatctaactgactcagaaatgaacaaactgtttgaaagaacaaagaagcaactgagggaaaatgctgaggatatgggcaatggttgtttcaaaatataccacaaatgtgacaatgcctgcatagggtcaatcagaaatggaacttatgaccatgatgtatacagagacgaagcattgaacaaccggttccagatcaaaggtgttgagctgaagtcaggatacaaagattggatcctatggatttcctttgccatatcatgttttttgctttgtattgttttgctggggttcatcatgtgggcctgccaaaaaggcaacattaggtgcaacatttgcatttga

SEQ ID NO: 31811 - RNA, 1701 nt, synthetic construct
  misc_feature 1..1701: note = hemagglutinin__InfluenzaA__ABI92632
  source 1..1701: mol_type = other RNA
atgaagactatcattgctttgagctacattttatgcctggttttcgctcaaaaacttcccggaaatgacaacagcacggcaacgctgtgtctggggcatcatgcagtgccaaacggaacgctagtgaaaacaatcacgaatgaccaaattgaagtaactaatgctactgagctggttcagagttcctcaacaggtagaatatgcgacagtcctcaccaaatccttgatggagaaaactgcacactaatagatgctctattgggagaccctcattgtgatggcttccaaaataaggaatgggacctttttgttgaacgcagcaaagcctacagcaactgttacccttatgatgtgccggattatgtctcccttaggtcactagttgcctcatcaggcacgctggagtttaacaatgaaagcttcaattggactggagtcgctcagaatggaacaagctctgcttgcaaaaggagatctgataaaagtttctttagtagattgaattggttgcaccaattaaaatacaaatatccagcactgaacgtgactatgccaaacaatgaaaaatttgacaaattgtacatttggggggttcaccacccgggtacagacagtgaccaaatcagcctatatgctcaagcatcagggagagtcacagtctctaccaaaagaagccaacaaactgtaatcccgaatatcggatctagaccctgggtaaggggtgtctccagcagaataagcatctattggacaatagtaaaaccgggagacatacttttgattaacagcacagggaatctaattgctcctcggggttacttcaaaatacgaagtgggaaaagctcaataatgaggtcagatgcacccattggcaaatgcaattctgaatgcatcactccaaatggaagcattcccaatgacaaaccatttcaaaatgtaaacaggatcacatatggggcctgtcccagatatgttaagcaaaacactctgaaattggcaacagggatgcggaatgtgccagagaaacaaactagaggcatattcggtgcaatcgcgggcttcatagaaaatggttgggagggaatgatggacggttggtacggtttcaggcatcaaaattctgagggcacagggcaagcagcagatcttaaaagcactcaagcagcaatcaaccaaatcaacgggaaactgaataggttaatcgagaaaacgaacgagaaattccatcaaattgaaaaagaattctcagaagtagaagggagaattcaggacctcgagaaatatgttgaggacactaaaatagatctctggtcgtacaatgcggagcttcttgttgccctggagaaccaacatacaattgatctaactgactcagaaatgaacaaactgtttgaaagaacaaagaagcaactgagggaaaatgctgaggatatgggcaatggttgtttcaaaatataccacaaatgtgacaatgcctgcatagggtcaatcagaaatggaacttatgaccatgatgtatacagagacgaagcattgaacaaccggttccagatcaaaggtgttgagctgaagtcaggatacaaagattgggtcctatggatttcctttgccatatcatgttttttgctttgtattgttttgctggggttcatcatgtgggcctgccaaaaaggcaacattaggtgcaacatttgcatttga

SEQ ID NO: 31812 - RNA, 1701 nt, synthetic construct
  misc_feature 1..1701: note = hemagglutinin__InfluenzaA__ABI92643
  source 1..1701: mol_type = other RNA
atgaagactatcattgctttgagctacattttatgtctggttttcgctcaaaaacttcccggaaatgacaacagcacggcaacgctgtgccttgggcaccatgcagtaccaaacggaacgatagtgaaaacaatcacgaatgaccaaattgaagttactaatgctactgagctggtacagagttcctcaacaggtggaatatgcgacagtcctcatcagatccttgatggagaaaactgcacactaatagatgctctattgggagaccctcagtgtgatggcttccaaaataagaaatgggacctttttgttgaacgcagcaaagcctacagcaactgttacccttatgatgtgccggattatgcctcccttaggtcactagttgcctcatccggcacactggagtttaacaatgaaagcttcgattggactggagtcactcagaatggaacaagctctgcttgcaaaaggagatctaataaaagtttctttagtagattgaattggttgacccacttaaaatacaaatacccagcattaaacgtgactataccaaacaatgaaaaatttgacaaattgtacatttggggggttcaccacccgggtacggacagtgaccaaatcagcctatatgctcaagcatcaggaagaatcacagtctctaccaaaagaagccaacaaactgtaatcccgaatatcggatctagaccaagggtaagggatgtctccagccgaataagcatctattggacaatagtaaaaccgggagacatacttttgattaacagcacagggaatctaattgctcctcggggttacttcaaaatacgaagtgggaaaagctcaataatgagatcagatgcacccattggcaaatgcaattctgaatgcatcactccaaatggaagcattcccaatgacaaaccatttcaaaatgtaaacaggatcacatatggggcctgtcccagatatgttaagcaaaacactctgaaattggcaacaggaatgcgaaatgtaccagagaaacaaactagaggcatatttggcgcaatcgcgggtttcatagaaaatggttgggagggaatggtggacggttggtacggtttcaggcatcaaaattctgagggcacaggacaagcagcagatctcaaaagcactcaagcagcaatcaaccaaatcaatgggaaactgaataggttaatcgggaaaacaaacgagaaattccatcagattgaaaaagaattctcagaagtagaagggagaattcaggacctcgagaaatatgttgaggacactaaaatagatctctggtcatacaacgcggagcttcttgttgccctggagaaccaacatacaattgatctaactgactcagaaatgaacaaactgtttgaaagaacaaagaggcaactgagggaaaatgctgaggatatgggcaatggttgtttcaaaatataccacaaatgtgacaatgcctgcatagggtcaatcagaaatggaacttatgaccatgatgtgtacagagatgaagcattaaacaaccggttccagatcaaaggtgttgagctgaagtcaggatacaaagattggatcctatggatttcctttgccatatcatgttttttgctttgtgttgctttgttggggttcatcatgtgggcctgccaaaaaggcaacattaggtgcaacatttgcatttga

SEQ ID NO: 31813 - RNA, 1701 nt, synthetic construct
  misc_feature 1..1701: note = hemagglutinin__InfluenzaA__ABI92665
  source 1..1701: mol_type = other RNA
atgaagactatcattgctttgagctacattttatgtctggttttcgctcaaaaacttcccggaaatgacaacagcacggcaacgctgtgccttgggcaccatgcagtaccaaacggaacgatagtgaaaacaatcacgaatgaccaaattgaagttactaatgctactgagctggtacagagttcctcaacaggtggaatatgcgacagtcctcatcagatccttgatggagaaaactgcacactaatagatgctctattgggagaccctcagtgtgatggcttccaaaataagaaatgggacctttttgttgaacgcagcaaagcctacagcaactgttacccttatgatgtgccggattatgcctcccttaggtcactagttgcctcatccggcacactggagtttaacaatgaaagcttcgattggactggagtcactcagaatggaacaagctctgcttgcaaaaggggatctaataaaagtttctttagtagattgaattggttgacccacttaaaatacaaatacccagcattgaacgtgactatgccaaacaatgaaaaatttgacaaattgtacatttggggggttcaccacccgggtacggacagtgaccaaatcagcctatatgctcaagcatcaggaagaatcacagtctctaccaaaagaagccaacaaactgtaatcccgaatatcggatctagaccaagggtaagggatgtctccagccgaataagcatctattggacaatagtaaaaccgggagacatacttttgattaacagcacagggaatctaattgctcctcggggttacttcaaaatacgaagtgggaaaagctcaataatgagatcagatgcacccattggcaaatgcaattctgaatgcatcactccaaatggaagcattcccaatgacaaaccatttcaaaatgtaaacaggatcacatatggggcctgtcccagatatgttaagcaaaacactctgaaattggcaacaggaatgcgaaatgtaccagagaaacaaactagaggcatatttggcgcaatcgcgggtttcatagaaaatggttgggagggaatggtggacggttggtacggtttcaggcatcaaaattctgagggcacaggacaagcagcagatctcaaaagcactcaagcagcaatcaaccaaatcaatgggaaactgaataggttaatcgggaaaacaaacgagaaattccatcagattgaaaaagaattctcagaagtagaagggagaattcaggacctcgagaaatatgttgaggacactaaaatagatctctggtcatacaacgcggagcttcttgttgccctggagaaccaacatacaattgatctaactgactcagaaatgaacaaactgtttgaaagaacaaagaggcaactgagggaaaatgctgaggatatgggcaatggttgtttcaaaatataccacaaatgtgacaatgcctgcatagggtcaatcagaaatggaacttatgaccatgatgtgtacagaaatgaagcattaaacaaccggttccagatcaaaggtgttgagctgaagtcaggatacaaagattggatcctatggatttcctttgccatatcatgttttttgctttgtgttgctttgttggggttcatcatgtgggcctgccaaaaaggcaacattaggtgcaacatttgcatttga

SEQ ID NO: 31814 - RNA, 1701 nt, synthetic construct
  misc_feature 1..1701: note = hemagglutinin__InfluenzaA__ABI92676
  source 1..1701: mol_type = other RNA
atgaagactatcattgctttgagctacattctatgtctggtttttgctcaaaaacttcccggaaatgacaacagcacggcaacgctgtgccttgggcaccatgcagtaccaaacggaacgatagtgaaaacaatcacaaatgaccaaattgaagttactaatgctactgagctggttcagagttcctcaacaggtggaatatgcgacagtcctcatcagatccttgatggagaaaactgcacactaatagatgctctattgggagaccctcagtgtgatggcttccaaaataagaaatgggacctttttgttgaacgcagcaaagcctacagcaactgttacccttatgatgtgccggatcatgcctcccttaggtcactagttgcctcatccggcacactggagtttaacaatgaaagcttcgattggactggagtcactcagaatggaacaagctctgcttgcaaaaggagatctaataaaagtttctttagtagattgaattggttgacccacttaaaatacaaatacccagcattgaacgtgactatgccaaacaatgaaaaatttgacaaattgtacatttggggggttcaccacccgggtacggacagtgaccaaatcagcctatatgctcaagcatcaggaagaatcacagtctctaccaaaagaagccaacaaactgtaatcccgaatatcggatctagacccagggtaagggatgtctccagccgaataagcatctattggacaatagtaaaaccgggagacatacttttgattaacagcacagggaatctaattgctcctcggggttacttcaaaatacgaaatgggaaaagctcaataatgagatcagatgcacccattggcaaatgcaattctgaatgcatcactccaaatggaagcattcccaatgacaaaccatttcaaaatgtaaacaggatcacatatggggcctgtcccagatatgttaagcaaaacactctgaaattggcaacagggatgcgaaatgtaccagagaaacaaactagaggcatatttggcgcaatcgcgggtttcatagaaaatggttgggagggaatggtggacggttggtacggtttcaggcatcaaaattctgagggcacaggacaagcagcagatctcaaaagcactcaagcagcaatcaaccaaatcaatgggaaactgaataggttaatcgggaaaacaaacgagaaattccatcagattgaaaaagaattctcagaagtagaagggagaattcaggacctcgagaaatatgttgaggacactaaaatagatctctggtcatacaacgcggagcttcttgttgccctggagaaccaacatacaattgatctaactgactcagaaatgaacaaactgtttgaaagaacaaagaagcaactgagggaaaatgctgaggatatgggcaatggttgtttcaaaatataccacaaatgtgacaatgcctgcatagggtcaatcagaaatggaacttatgaccatgatgtgtacagagatgaagcattaaacaaccggttccagatcaaaggtgttgagctgaagtcaggatataaagattggatcctatggatttcctttgccatatcatgttttttgctttgtgttgctttgctggggttcatcatgtgggcctgccaaaaaggcaacattaggtgcaacatttgcatttga

SEQ ID NO: 31815 - RNA, 1701 nt, synthetic construct
  misc_feature 1..1701: note = hemagglutinin__InfluenzaA__ABI92687
  source 1..1701: mol_type = other RNA
atgaagactatcattgctttgagctacattttatgtctggttttcgctcaaaaacttcccggaaatgacaacagcacggcaacgctgtgccttgggcaccatgcagtaccaaacggaacgatagtgaaaacaatcacgaatgaccaaattgaagttactaatgctactgagctggtacagagttcctcaacaggtggaatatgcgacagtcctcatcagatccttgatggagaaaactgcacactaatagatgctctattgggagaccctcagtgtgatggcttccaaaataagaaatgggacctttttgttgaacgcagcaaagcctacagcaactgttacccttatgatgtgccggattatgcctcccttaggtcactagttgcctcatccggcacactggagtttaacaatgaaagcttcgattggactggagtcactcagaatggaacaagctctgcttgcaaaaggggatctaataaaagtttctttagtagattgaattggttgacccacttaaaatacaaatacccagcattgaacgtgactatgccaaacaatgaaaaatttgacaaattgtacatttggggggttcaccacccgggtacggacagtgaccaaatcagcctatatgctcaagcatcaggaagaatcacagtctctaccaaaagaagccaacaaactgtaatcccgaatatcggatctagaccaagggtaagggatgtctccagccgaataagcatctattggacaatagtaaaaccgggagacatacttttgattaacagcacagggaatctaattgctcctcggggttacttcaaaatacgaagtgggaaaagctcaataatgagatcagatgcacccattggcaaatgcaattctgaatgcatcactccaaatggaagcattcccaatgacaaaccatttcaaaatgtaaacaggatcacatatggggcctgtcccagatatgttaagcaaaacactctgaaattggcaacaggaatgcgaaatgtaccagagaaacaaactagaggcatatttggcgcaatcgcgggtttcatagaaaatggttgggagggaatggtggacggttggtacggtttcaggcatcaaaattctgagggcacaggacaagcagcagatctcaaaagcactcaagcagcaatcaaccaaatcaatgggaaactgaataggttaatcgggaaaacaaacgagaaattccatcagattgaaaaagaattctcagaagtagaagggagaattcaggacctcgagaaatatgttgaggacactaaaatagatctctggtcatacaacgcggagcttcttgttgccctggagaaccaacatacaattgatctaactgactcagaaatgaacaaactgtttgaaagaacaaagaggcaactgagggaaaatgctgaggatatgggcaatggttgtttcaaaatataccacaaatgtgacaatgcctgcatagggtcaatcagaaatggaacttatgaccatgatgtgtacagagatgaagcattaaacaaccggttccagatcaaaggtgttgagctgaagtcaggatacaaagattggatcctatggatttcctttgccatatcatgttttttgctttgtgttgctttgttggggttcatcatgtgggcctgccaaaaaggcaacattaggtgcaacatttgcatttga

SEQ ID NO: 31816 - RNA, 1701 nt, synthetic construct; identical to SEQ ID NO: 31815
  misc_feature 1..1701: note = hemagglutinin__InfluenzaA__ABI92698
  source 1..1701: mol_type = other RNA

SEQ ID NO: 31817 - RNA, 1701 nt, synthetic construct
  misc_feature 1..1701: note = hemagglutinin__InfluenzaA__ABI92709
  source 1..1701: mol_type = other RNA
atgaagactatcattgctttgagctacattctatgtctggttttcgctcaaaaacttcccggaaatgacaacagcacggcaacgctgtgccttgggcaccatgcagtaccaaacggaacgatagtgaaaacaatcacaaatgaccaaattgaagttactaatgctactgagctggttcagagttcctcaacaggtggaatatgcgacagtcctcatcagatccttgatggagaaaactgcacactaatagatgctctattgggagaccctcagtgtgatggcttccaaaataagaaatgggacctttttgttgaacgcagcaaagcctacagcaactgttacccttatgatgtgccggatcatgcctcccttaggtcactagttgcctcatccggcacactggagtttaacaatgaaagcttcgattggactggagtcactcagaatggaacaagctctgcttgcaaaaggagatctaataaaagtttctttagtagattgaattggttgacccacttaaaatacaaatacccagcattgaacgtgactatgccaaacaatgaaaaatttgacaaattgtacatttggggggttcaccacccgggtacggacagtgaccaaatcagcctatatgctcaagcatcaggaagaatcacagtctctaccaaaagaagccaacaaactgtaatcccgaatatcggatctcgacccagggtaagggatgtctccagccgaataagcatctattggacaatagtaaaaccgggagacatacttttgattaacagcacagggaatctaattgctcctcggggttacttcaaaatacgaagtgggaaaagctcaataatgagatcagatgcacccattggcaaatgcaattctgaatgcatcactccaaatggaagcattcccaatgacaaaccatttcaaaatgtaaacaggatcacatatggggcctgtcccagatatgttaagcaaaacactctgaaattggcaacagggatgcgaaatgtaccagagaaacaaactagaggcatatttggcgcaatcgcgggtttcatagaaaatggttgggagggaatggtggacggttggtacggtttcaggcatcaaaattctgagggcacaggacaagcagcagatctcaaaagcactcaagcagcaatcaaccaaatcaatgggaaactgaataggttaatcgggaaaacaaacgagaaattccatcagattgaaaaagaattctcagaagtagaagggagaattcaggacctcgagaaatatgttgaggacactaaaatagatctctggtcatacaacgcggagcttcttgttgccctggagaaccaacatacaattgatctaactgattcagaaatgaacaaactgtttgaaagaacaaagaagcaactgagggaaaatgctgaggatatgggcaatggttgtttcaaaatataccacaaatgtgacaatgcctgcatagggtcaatcagaaatggaacttatgaccatgatgtgtacagagatgaagcattaaacaaccggttccagatcaaaggtgttgagctgaagtcaggatataaagattggatcctatggatttcctttgccatatcatgttttttgctttgtgttgctttgttggggttcatcatgtgggcctgccaaaaaggcaacattaggtgcaacatttgcatttga

SEQ ID NO: 31818 - RNA, 1701 nt, synthetic construct
  misc_feature 1..1701: note = hemagglutinin__InfluenzaA__ABI92720
  source 1..1701: mol_type = other RNA
atgaagactatcattgctttgagctacattctatgtctggttttcgctcaaaaacttcccggaaatgacaacagcacggcaacgctgtgccttgggcaccatgcagtaccaaacggaacgatagtgaaaacaatcacaaatgaccaaattgaagttactaatgctactgagctggttcagagttcctcaacaggtggaatatgcgacagtcctcatcagatccttgatggagaaaactgcacactaatagatgctctattgggagaccctcagtgtgatggcttccaaaataagaaatgggacctttttgttgaacgcagcaaagcctacagcaactgttacccttatgatgtgccggatcatgcctcccttaggtcactagttgcctcatccggcacactggagtttaacaatgaaagcttcgattggactggagtcactcagaatggaacaagctctgcttgcaaaaggagatctaataaaagtttctttagtagattgaattggttgacccacttaaaatacaaatacccagcattgaacgtgactatgccaaacaatgaaaaatttgacaaattgtacatttggggggttcaccacccgggtacggaaagtgaccaaatcagcctatatgctcaagcatcaggaagaatcacagtctctaccaaaagaagccaacaaactgtaatcccgaatatcggatctagacccagggtaagggatgtctccagccgaataagcatctattggacaatagtaaaaccgggagacatacttttgattaacagcacagggaatctaattgctcctcggggttacttcaaaatacgaagtgggaaaagctcaataatgagatcagatgcacccattggcaaatgcaattctgaatgcatcactccaaatggaagcattcccaatgacaaaccatttcaaaatgtaaacaggatcacatatggggcctgtcccagatatgttaagcaaaacactctgaaattggcaacagggatgcgaaatgtaccagagaaacaaactagaggcatatttggcgcaatcgcgggtttcatagaaaatggttgggagggaatggtggacggttggtacggtttcaggcatcaaaattctgagggcacaggacaagcagcagatctcaaaagcactcaagcagcaatcaaccaaatcaatgggaaactgaataggttaatcgggaaaacaaacgagaaattccatcagattgaaaaagaattctcagaagtagaagggagaattcaggacctcgagaaatatgttgaggacactaaaatagatctctggtcatacaacgcggagcttcttgttgccctggagaaccaacatacaattgatctaactgactcagaaatgaacaaactgtttgaaagaacaaagaagcaactgagggaaaatgctgaggacatgggcaatggttgtttcaaaatataccacaaatgtgacaatgcctgcatagggtcaatcagaaatggaacttatgaccatgatgtgtacagagatgaagcattaaacaaccgattccagatcaaaggtgttgagctgaagtcaggatataaagattggatcctatggatttcctttgccatatcatgttttttgctttgtgttgctttgttggggttcatcatgtgggcctgccaaaaaggcaacattaggtgcaacatttgcatttga

SEQ ID NO: 31819 - RNA, 1701 nt, synthetic construct
  misc_feature 1..1701: note = hemagglutinin__InfluenzaA__ABI92731
  source 1..1701: mol_type = other RNA
atgaagactatcattgctttgagctacattttatgtctggttttcgctcaaaaacttcccggaaatgacaacagcacggcaacgctgtgccttgggcaccatgcagtaccaaacggaacgatagtgaaaacaatcacgaatgaccaaattgaagttactaatgctactgagctggtacagagttcctcaacaggtggaatatgcgacagtcctcatcagatccttgatggagaaaactgcacactaatagatgctctattgggagaccctcagtgtgatggcttccaaaataagaaatgggacctttttgttgaacgcagcaaagcctacagcaactgttacccttatgatgtgccggattatgcctcccttaggtcactagttgcctcatccggcacactggagtttaacaatgaaagcttcgattggactggagtcactcagaatggaacaagctctgcttgcaaaaggagatctaataaaagtttctttagtagattgaattggttgacccacttaaaatacaaatacccagcattgaacgtgactatgccaaacaatgaaaaatttgacaaattgtacatttggggggttcaccacccgggtacggacagtgaccaaatcagcctatatgctcaagcatcaggaagaatcacagtctctaccaaaagaagccaacaaactgtaatcccgaatatcggatctagaccaagggtaagggatgtctccagccgaataagcatctattggacaatagtaaaaccgggagacatacttttgattaacagcacagggaatctaattgctcctcggggttacttcaaaatacgaagtgggaaaagctcaataatgagatcagatgcacccattggcaaatgcaattctgaatgcatcactccaaatggaagcattcccaatgacaaaccatttcaaaatgtaaacaggatcacatatggggcctgtcccagatatgttaagcaaaacactctgaaattggcaacaggaatgcgaaatgtaccagagaaacaaactagaggcatatttggcgcaatcgcgggtttcatagaaaatggttgggagggaatggtggacggttggtacggtttcaggcatcaaaattctgagggcacaggacaagcagcagatctcaaaagcactcaagcagcaatcaaccaaatcaatgggaaactgaataggttaatcgggaaaacaaacgagaaattccatcagattgaaaaagaattctcagaagtagaagggagaattcaggacctcgagaaatatgttgaggacactaaaatagatctctggtcatacaacgcggagcttcttgttgccctggagaaccaacatacaattgatctaactgactcagaaatgaacaaactgtttgaaagaacaaagaggcaactgagggaaaatgctgaggatatgggcaatggttgtttcaaaatataccacaaatgtgacaatgcctgcatagggtcaatcagaaatggaacttatgaccatgatgtgtacagagatgaagcattaaacaaccggttccagatcaaaggtgttgagctgaagtcaggatacaaagattggatcctatggatttcctttgccatatcatgttttttgctttgtgttgctttgttggggttcatcatgtgggcctgccaaaaaggcaacattaggtgcaacatttgcatttga

SEQ ID NO: 31820 - RNA, 1701 nt, synthetic construct
  misc_feature 1..1701: note = hemagglutinin__InfluenzaA__ABI92742
  source 1..1701: mol_type = other RNA
atgaagactatcattgctttgagctacattctatgtctggttttttctcaaaaacttcccggaaatgacaacagcacggcaacgctgtgccttgggcaccatgcagtaccaaacggaacgatagtgaaaacaatcacaaatgaccaaattgaagttactaatgctactgagctggttcagagttcctcaacaggtggaatatgcgacagtcctcatcagatccttgatggagaaaactgcacactaatagatgctctattgggagaccctcagtgtgatggcttccaaaataagaaatgggacctttttgttgaacgcagcaaagcctacagcaactgttacccttatgatgtgccggatcatgcctcccttaggtcactagttgcctcatccggcacactggagtttaacaatgaaagcttcgattggactggagtcactcagaatggaacaagctctgcttgcaaaaggagatctaataaaagtttctttagtagattgaattggttgacccacttaaaatacaaatacccagcattgaacgtgactatgccaaacaatgaaaaatttgacaaattgtacatttggggggttcaccacccgggtacggacagtgaccaaatcagcctatatgctcaagcatcaggaagaatcacagtctctaccaaaagaagccaacaaactgtaatcccgaatatcggatctagacccagggtaagggatgtctccagccgaataagcatctattggacaatagtaaaaccgggagacatacttttgattaacagcacagggaatctaattgctcctcggggttacttcaaaatacgaagtgggaaaagctcaataatgagatcagatgcacccattggcaaatgcaattctgaatgcatcactccaaatggaagcattcccaatgacaaaccatttcaaaatgtaaacaggatcacatatggggcctgtcccagatatgttaagcaaaacactctgaaattggcaacagggatgcgaaatgtaccagagaaacaaactagaggcatatttggcgcaatcgcgggtttcatagaaaatggttgggagggaatggtggacggttggtacggtttcaggcatcaaaattctgagggcacaggacaagcagcagatctcaaaagcactcaagcagcaatcaaccaaatcaatgggaaactgaataggttaatcgggaaaacaaacgagaaattccatcagattgaaaaagaattctcagaagtagaagggagaattcaggacctcgagaaatatgttgaggacactaaaatagatctctggtcatacaacgcggagcttcttgttgccctggagaaccaacatacaattgatctaactgactcagaaatgaacaaactgtttgaaagaacaaagaagcaactgagggaaaatgctgaggatatgggcaatggttgtttcaaaatataccacaaatgtgacaatgcctgcatagggtcaatcagaaatggaacttatgaccatgatgtgtacagagatgaagcattaaacaaccggttccagatcaaaggtgttgagctgaagtcaggatataaagattggatcctatggatttcctttgccatatcatgttttttgctttgtgttgctttgttggggttcatcatgtgggcctgccaaaaaggcaacattaggtgcaacatttgcatttga

SEQ ID NO: 31821 - RNA, 1701 nt, synthetic construct
  misc_feature 1..1701: note = hemagglutinin__InfluenzaA__ABI92753
  source 1..1701: mol_type = other RNA
atgaagactatcattgctttgagctacattttatgtctggttttcgctcaaaaacttcccggaaatgacaacagcacggcaacgctgtgccttgggcaccatgcagtaccaaacggaacgatagtgaaaacaatcacgaatgaccaaattgaagttactaatgctactgagctggtacagagttcctcaacaggtggaatatgcgacagtcctcatcagatccttgatggagaaaactgcacactaatagatgctctattgggagaccctcagtgtgatggcttccaaaataagaaatgggacctttttgttgaacgcagcaaagcctacagcaactgttacccttatgatgtgccggattatgcctaccttaggtcactagttgcctcatccggcacactggagtttaacaatgaaagcttcgattggactggagtcactcagaatggaacaagctctgcttgcaaaaggagatctaataaaagtttctttagtagattgaattggttgacccacttaaaatacaaatacccagcattgaacgtgactatgccaaacaatgaaaaatttgacaaattgtacatttggggggttcaccacccgggtacggacagtgaccaaatcagcctatatgctcaagcatcaggaagaatcacagtctctaccaaaagaagccaacaaactgtaatcccgaatatcggatctagaccaagggtaagggatgtctccagccgaataagcatctattggacaatagtaaaaccgggagacatacttttgattaacagcacagggaatctaattgctcctcggggttacttcaaaatacgaagtgggaaaagctcaataatgagatcagatgcacccattggcaaatgcaattctgaatgcatcactccaaatggaagcattcccaatgacaaaccatttcaaaatgtaaacaggatcacatatggggcctgtcccagatatgttaagcaaaacactctgaaattggcaacaggaatgcgaaatgtaccagagaaacaaactagaggcatatttggcgcaatcgcgggtttcatagaaaatggttgggagggaatggtggacggttggtacggtttcaggcatcaaaattctgagggcacaggacaagcagcagatctcaaaagcactcaagcagcaatcaaccaaatcaatgggaaactgaataggttaatcgggaaaacaaacgagaaattccatcagattgaaaaagaattctcagaagtagaagggagaattcaggacctcgagaaatatgttgaggacactaaaatagatctctggtcatacaacgcggagcttcttgttgccctggagaaccaacatacaattgatctaactgactcagaaatgaacaaactgtttgaaagaacaaagaggcaactgagggaaaatgctgaggatatgggcaatggttgtttcaaaatataccacaaatgtgacaatgcctgcatagggtcaatcagaaatggaacttatgaccatgatgtgtacagagatgaagcattaaacaaccggttccagatcaaaggtgttgagctgaagtcaggatacaaagattggatcctatggatttcctttgccatatcatgttttttgctttgtgttgctttgttggggttcatcatgtgggcctgccaaaaaggcaacattaggtgcaacatttgcatttga

SEQ ID NO: 31822 - RNA, 1701 nt, synthetic construct
  misc_feature 1..1701: note = hemagglutinin__InfluenzaA__ABI92764
  source 1..1701: mol_type = other RNA
atgaagactatcattgctttgagctacattttgtgtctggttttcgctcaaaaacttcccggaaatgacaacagcacggcaacgctgtgccttgggcaccatgcagtaccaaacggaacgatagtgaaaacaatcacgaatgaccaaattgaagttactaatgctactgagctggtacagagttcctcaacaggtgaaatatgcgacagtcctcatcagatccttgatggagaaaactgcacactaatagatgctctattgggagaccctcagtgtgatggcttccaaaataagaaatgggacctttttgttgaacgcagcaaagcctacagcaactgttacccttatgatgtgccggattatgcctcccttaggtcactagttgcctcatccggcacactggagtttaacaatgaaagcttcgattggactggagtcactcagaatggaacaagctctgcttgcaaaaggggatctaataaaagtttctttagtagattgaattggttgacccacttaaaatacaaatacccagcattgaacgtgactatgccaaacaatgaaaaatttgacaaattgtacatttggggggttcaccatccgggtacggacagtgaccaaatcagcctatatgctcaagcatcaggaagaatcacagtctctaccaaaagaagccaacaaactgtaatcccgaatatcggatctagaccaagggtaagggatgtctccagccgaataagcatctattggacaatagtaaaaccgggagacatacttttgattaacagcacagggaatctaattgctcctcggggttacttcaaaatacgaagtgggaaaagctcaataatgagatcagatgcacccattggcaaatgcaattctgaatgcatcactccaaatggaagcattcccaatgacaaaccatttcaaaatgtaaacaggatcacatatggggcctgtcccagatatgttaagcaaaacactctgaaattggcaacaggaatgcgaaatgtaccagagaaacaaactagaggcatatttggcgcaatcgcgggtttcatagaaaatggttgggagggaatggtggacggttggtacggtttcaggcatcaaaattctgagggcacaggacaagcagcagatctcaaaagcactcaagcagcaatcaaccaaatcaatgggaaactgaataggttaatcgggaaaacaaacgagaaattccatcagattgaaaaagaattctcagaagtagaagggagaattcaggacctcgagaaatatgttgaggacactaaaatagatctctggtcatacaacgcggagcttcttgttgccctggagaaccaacatacaattgatctaactgactcagaaatgaacaaactgtttgaaagaacaaagaggcaactgagggaaaatgctgaggatatgggcaatggttgtttcaaaatataccacaaatgtgacaatgcctgcatagggtcaatcagaaatggaacttatgaccatgatgtgtacagagatgaagcattaaacaaccggttccagatcaaaggtgttgagctgaagtcaggatacaaagattggatcctatggatttcctttgccatatcatgttttttgctttgtgttgctttgttggggttcatcatgtgggcctgccaaaaaggcaacattaggtgcaacatttgcatttga

SEQ ID NO: 31823 - RNA, 1701 nt, synthetic construct; identical to SEQ ID NO: 31815
  misc_feature 1..1701: note = hemagglutinin__InfluenzaA__ABI92775
  source 1..1701: mol_type = other RNA

SEQ ID NO: 31824 - RNA, 1701 nt, synthetic construct
  misc_feature 1..1701: note = hemagglutinin__InfluenzaA__ABI92786
  source 1..1701: mol_type = other RNA
atgaagactatcattgctttgagctacattctatgtctggttttcgctcaaaaacttcccggaaatgacaacagcacggcaacgctgtgcctcgggcaccatgcagtaccaaacggaacgatagtgaaaacaatcacgaatgaccaaattgaagttactaatgctactgagctggttcagagttcctcaacaggtggaatatgcgacagtcctcatcagatccttgatggagaaaactgcacactaatagatgctctattgggagaccctcagtgtgatggcttccaaaataagaaatgggacctttttgttgaacgcagcaaagcctacagcaactgttacccttatgatgtgccggattatgcctcccttaggtcactagttgcctcatccggcacactggagtttaacaatgaaagcttcaattggactggagtcactcaaaatggaacaagctctgcttgcaaaaggagatctaataacagtttctttagtagattgaattggttgacccatttaaaattcaaatacccagcattgaacgtgactatgccaaacaatgaaaaatttgacaaattgtacatttggggggttcaccacccgggtacggacaatgaccaaatcagcctatatgctcaagcatcaggaagaatcacagtctctaccaaaagaagccaacaaactgtaatcccgaatatcggatctagacccagggtaagggatatccccagcagaataagcatctattggacaatagtaaaaccgggagacatacttttgattaacagcacagggaatctaattgctcctcggggttacttcaaaatacgaagtgggaaaagctcaataatgagatcagatgcacccattggcaaatgcaattctgaatgcatcactccaaatggaagcattcccaatgacaaaccatttcaaaatgtaaacaggatcacatatggggcctgtcccagatatgttaagcaaaacactctgaaattggcaacagggatgcgaaatgtaccagagaaacaaactagaggcatatttggcgcaatcgcgggtttcatagaaaatggttgggagggaatggtggatggttggtacggtttcaggcatcaaaattctgagggaataggacaagcagcagatctcaaaagcactcaagcagcaatcaaccaaatcaatgggaagctgaataggttgatcgggaaaaccaacgagaaattccatcagattgaaaaagaattctcagaagtagaagggagaattcaggacctcgagaaatatgttgaggacactaaaatagatctctggtcatacaacgcggagcttcttgttgccctggagaaccaacatacaattgatctaactgactcagaaatgaacaaactgtttgaaagaacaaagaagcaactgagggaaaatgctgaggatatgggcaatggttgtttcaaaatataccacaaatgtgacaatgcctgcatagggtcaatcagaaatggaacttatgaccatgatgtatacagagatgaagcattaaacaaccggttccagatcaaaggtgttgagctgaagtcaggatacaaagattggatcctatggatttcctttgccatatcatgttttttgctttgtgttgctttgttggggttcatcatgtgggcctgccaaaaaggcaacattaggtgcaacatttgcatttga

SEQ ID NO: 31825 - RNA, 1701 nt, synthetic construct
  misc_feature 1..1701: note = hemagglutinin__InfluenzaA__ABI92797
  source 1..1701: mol_type = other RNA
atgaagactatcattgctttgagctacattctatgtctggttttcgctcaaaaacttcccggaaatgacaacagcacggcaacgctgtgccttgggcaccatgcagtaccaaacggaacgatagtgaaaacaatcacgaatgaccaaattgaagttactaatgctactgagctggttcagagttcctcaacaggtggaatatgcgacagtcctcatcagatccttgatggagaaaactgcacactaatagatgctctattgggagacccccagtgtgatggcttccaaaataagaaatgggacctttttgttgaacgcagcaaagcctacagcaactgttacccttatgatgtgccggattatgcctcccttaggtcactagttgcctcatccggcacactggagtttaacaatgaaagcttcaattggactggagtcactcaaaatggaacaagctctgcttgcaaaaggagatctaataacagtttctttagtagattgaattggttgacccatttaaaattcaaatacccagcattgaacgtgactatgccaaacaatgaaaaatttgacaaattgtacatttggggggttcaccacccgggtacggacaatgaccaaatcagcctatatgctcaagcatcaggaagaatcacagtctctaccaaaagaagccaacaaactgtaatctcgaatatcggatctagacccagggtaagggatatccccagcagaataagcatctattggacaatagtaaaaccgggagacatacttttgattaacagcacagggaatctaattgctcctcggggttacttcaaaatacgaagtgggaaaagctcaataatgagatcagatgcacccattggcaaatgcaattctgaatgcatcactccaaatggaagcattcccaatgacaaaccatttcaaaatgtaaacaggatcacatatggggcctgtcccagatatgttaagcaaaacactctgaaattggcaacagggatgcgaaatgtaccagagaaacaaactagaggcatatttggcgcaatcgcgggtttcatagaaaatggttgggagggaatggtggatggttggtacggtttcaggcatcaaaattctgagggaataggacaagcagcagatctcaaaagcactcaagcagcaatcaaccaaatcaatgggaagctgaataggttgatcgggaaaaccaacgagaaattccatcagattgaaaaagaattctcagaagtagaagggagaattcaggacctcgagaaatatgttgaggacactaaaatagatctctggtcatacaacgcggagcttcttgttgccctggagaaccaacatacaattgatctaactgactcagaaatgaacaaactgtttgaaagaacaaagaagcaactgagggaaaatgctgaggatatgggcaatggttgtttcaaaatataccacaaatgtgacaatgcctgcatagggtcaatcagaaatggaacttatgaccatgatgtatacagagatgaagcattaaacaaccggttccagatcaaaggtgttgagctgaagtcaggatacaaagattggatcctatggatttcctttgccatatcatgttttttgctttgtgttgctttgttggggttcatcatgtgggcctgccaaaaaggcaacattaggtgcaacatttgcatttga

SEQ ID NO: 31826 - RNA, 1701 nt, synthetic construct; identical to SEQ ID NO: 31824
  misc_feature 1..1701: note = hemagglutinin__InfluenzaA__ABI92808
  source 1..1701: mol_type = other RNA

SEQ ID NO: 31827 - RNA, 1701 nt, synthetic construct
  misc_feature 1..1701: note = hemagglutinin__InfluenzaA__ABI92819
  source 1..1701: mol_type = other RNA
atgaagactatcattgctttgagctacattctatgtctggttttcgctcaaaaacttcccggaaatgacaacagcacggcaacgctgtgccttgggcaccatgcagtaccaaacggaacgatagtgaaaacaatcacgaatgaccaaattgaagttactaatgctactgagctggttcagagttcctcaacaggtggaatatgcgacagtcctcatcagatccttgatggagaaaactgcacactaatagatgctctattgggagacccccagtgtgatggcttccaaaataagaaatgggacctttttgttgaacgcagcaaagcctacagcaactgttacccttatgatgtgccggattatgcctcccttaggtcactagttgcctcatccggcacactggagtttaacaatgaaagcttcaattggactggagtcactcaaaatggaacaagctctgcttgcaaaaggagatctaataacagtttctttagtagattgaattggttgacccatttaaaattcaaatacccagcattgaacgtgactatgccaaacaatgaaaaatttgacaaattgtacatttggggggttcaccacccgggtacggacaatgaccaaatcagcctatatgctcaagcatcaggaagaatcacagtctctaccaaaagaagccaacaaactgtaatcccgaatatcggatctagacccagggtaagggatatccccagcagaataagcatctattggacaatagtaaaaccgggagacatacttttgattaacagcacagggaatctaattgctcctcggggttacttcaaaatacgaagtgggaaaagctcaataatgagatcagatgcacccattggcaaatgcaattctgaatgcatcactccaaatggaagcattcccaatgacaaaccatttcaaaatgtaaacaggatcacatatggggcctgtcccagatatgttaagcaaaacactctgaaattggcaacagggatgcgaaatgtaccagagaaacaaactagaggcatatttggcgcaatcgcgggtttcatagaaaatggttgggagggaatggtggatggttggtacggtttcaggcatcaaaattctgagggaataggacaagcagcagatctcaaaagcactcaagcagcaatcaaccaaatcaatgggaagctgaataggttgatcgggaaaaccaacgagaaattccatcagattgaaaaagaattctcagaagtagaagggagaattcaggacctcgagaaatatgttgaggacactaaaatagatctctggtcatacaacgcggagcttcttgttgccctggagaaccaacatacaattgatctaactgactcagaaatgaacaaactgtttgaaagaacaaagaagcaactgagggaaaatgctgaggatatgggcaatggttgtttcaaaatataccacaaatgtgacaatgcctgcatagggtcaatcagaaatggaacttatgaccatgatgtatacagagatgaagcattaaacaaccggttccagatcaaaggtgttgagctgaagtcaggatacaaagattggatcctatggatttcctttgccatatcatgttttttgctttgtgttgctttgttggggttcatcatgtgggcctgccaaaaaggcaacattaggtgcaacatttgcatttga

SEQ ID NO: 31828 - RNA, 1701 nt, synthetic construct; identical to SEQ ID NO: 31824
  misc_feature 1..1701: note = hemagglutinin__InfluenzaA__ABI92841
  source 1..1701: mol_type = other RNA

SEQ ID NO: 31829 - RNA, 1701 nt, synthetic construct
  misc_feature 1..1701: note = hemagglutinin__InfluenzaA__ABI92852
  source 1..1701: mol_type = other RNA
atgaagactatcattgctttgagctacattctatgtctggttttcgctcaaaaacttcccggaaatgacaacagcacggcaacgctgtgccttgggcaccatgcagtaccaaacggaacgatagtgaaaacaatcacgaatgaccaaattgaagttactaatgctactgagctggttcagagttcctcaacaggtggaatatgcgacagtcctcatcagatccttgatggagaaaactgcacactaatagatgctctattgggagaccctcagtgtgatggcttccaaaataagaaatgggacctttttgttgaacgcagcaaagcctacagcaactgttacccttatgatgtgccggattatgcctcccttaggtcactagttgcctcatccggcacactggagtttaacaatgaaagcttcaattggactggagtcactcaaaatggaacaagctctgcttgcaaaaggagatctaataacagtttctttagtagattgaattggttgacccatttaaaattcaaatacccagcattgaacgtgactatgccaaacaatgaaaaatttgacaaattgtacatttggggggttcaccacccgggtacggacaatgaccaaatcagcctatatgctcaagcatcaggaagaatcacagtctctaccaaaagaagccaacaaactgtaatcccgaatatcggatatagacccagggtaagggatatccccagcagaataagcatctattggacaatagtaaaaccgggagacatacttttgattaacagcacagggaatctaattgctcctcggggttacttcaaaatacgaagtgggaaaagctcaataatgagatcagatgcacccattggcaaatgcaattctgaatgcatcactccaaatggaagcattcccaatgacaaaccatttcaaaatgtaaacaggatcacatatggggcctgtcccagatatgttaagcaaaacactctgaaattggcaacagggatgcgaaatgtaccagagaaacaaactagaggcatatttggcgcaatcgcgggtttcatagaaaatggttgggagggaatggtggatggttggtacggtttcaggcatcaaaattctgagggaataggacaagcagcagatctcaaaagcactcaagcagcaatcaaccaaatcaatgggaagctgaataggttgatcgggaaaaccaacgagaaattccatcagattgaaaaagaattctcagaagtagaagggagaattcaggacctcgagaaatatgttgaggacactaaaatagatctctggtcatacaacgcggagcttcttgttgccctggagaaccaacatacaattgatctaactgactcagaaatgaacaaactgtttgaaagaacaaagaagcaactgagggaaaatgctgaggatatgggcaatggttgtttcaaaatataccacaaatgtgacaatgcctgcatagggtcaatcagaaatggaacttatgaccatgatgtatacagagatgaagcattaaacaaccggttccagatcaaaggtgttgagctgaagtcaggatacaaagattggatcctatggatttcctttgccatatcatgttttttgctttgtgttgctttgttggggttcatcatgtgggcctgccaaaaaggcaacattaggtgcaacatttgcatttga

SEQ ID NO: 31830 - RNA, 1701 nt, synthetic construct
  misc_feature 1..1701: note = hemagglutinin__InfluenzaA__ABI92863
  source 1..1701: mol_type = other RNA
atgaagactatcattgctttgagctacatcctatgtctggttttcgctcaaaaacttcccggaaatgacaacagcacggcaacgctgtgccttgggcaccatgcagtaccaaacggaacgatagtgaaaacaatcacgaatgaccaaattgaagttactaatgctactgagctggttcagagttcctcaacaggtggaatatgcgacagtcctcatcagatccttgatggagaaaactgcacactaatagatgctctattgggagaccctcagtgtgatggcttccaaaataaaaaatgggacctttttgttgaacgcagcaaagcccacagcaactgttacccttatgatgtgccggattatgcctcccttaggtcactaattgcctcatccggcacactggagtttaacaatgaaagcttcaattggactggagtcactcagaatggaacaagctctgcttgcaaaaggagatctaatcaaagtttctttagtagattgaattggttgacccatttaaaattcaaatacccagcattgaacgtgactatgccaaacaatgaaaaatttgacaaattgtacatttggggggttcaccacccgggtacggacagtgaccaaatcagcctatatgctcaagcaccaggaagaatcacagtctctaccaaaagaagccaacaaactgtaatcccgaatatcggatctagacccagggtaagggatatctccagcagaataagcatctattggacaatagtaaaaccgggagacatacttttgattaacagcacagggaatctaattgctcctcggggttacttcaaaatacgaagtgggaaaagctcaataatgaaatcagatgcacccattggcagatgcaattctgaatgcatcactccaaatggaagcattcccaatgacaaaccatttcaaaatgtaaacaggatcacatatggggcctgtcccagatatgttaagcaaaacactctgaaattggcaacagggatgcgaaatgtaccagagaaacaaactagaggcatatttggcgcaattgcgggtttcatagaaaatggttgggagggaatggtggacggttggtacggtttcaggcatcagaattctgagggcacaggacaagcagcagatctcaaaagcactcaagcagcaatcaaccaaatcaatgggaaactgaataggttaatcgggaaaacaaacgagaaattccatcagattgaaaaagaattctcagaagtagaagggagaattcaggacctcgagaaatatgttgaggacactaaaatagatctctggtcatacaacgcggagcttcttgttgccctggagaaccaacatacaattgatctaactgactcagaaatgaacaaactgtttgaaagaacaaagaagcaactgagggaaaatgctgaggatatgggcaatggttgtttcaaaatataccacaaatgtgacaatgcctgcatagggtcaatcagaaatggaacttatgaccatgatgtatacagagatgaagcattaaacaaccggttccagatcaaaggtgttgagctgaagtcaggatacaaagattggatcctatggatttcctttgccatatcatgtcttttgctttgtgttgctttgttggggttcatcatgtgggcctgccaaaaaggcaacattaggtgcaacatttgcatttga

SEQ ID NO: 31831 - RNA, 1701 nt, synthetic construct; identical to SEQ ID NO: 31824
  misc_feature 1..1701: note = hemagglutinin__InfluenzaA__ABI92874
  source 1..1701: mol_type = other RNA

SEQ ID NO: 31832 - RNA, 1701 nt, synthetic construct; identical to SEQ ID NO: 31824
  misc_feature 1..1701: note = hemagglutinin__InfluenzaA__ABI92885
  source 1..1701: mol_type = other RNA

SEQ ID NO: 31833 - RNA, 1701 nt, synthetic construct
  misc_feature 1..1701: note = hemagglutinin__InfluenzaA__ABI92907
  source 1..1701: mol_type = other RNA
atgaagactatcattgctttgagctacattctatgtctggttttcgctcaaaaacttcccggaaatgacaacagcacggcaacgctgtgccttgggcaccatgcagtaccaaacggaacgatagtgaaaacaatcacgaatgaccaaattgaagttactaatgctactgagctggttcagagttcctcaacaggtggaatatgcgacagtccttatcagatccttgatggagaaaactgcacactaatagatgctctattgggagaccctcagtgtgatggcttccaaaataagaaatgggacctttttgttgaacgcagcaaagcctacagcaactgttacccttatgatgtgccggattatgtctcccttaggtcactagttgcctcatccggcacactggagtttaacaatgaaagcttcaattggactggagtcactcaaaatggaacaagctctgcttgcaaaaggagatctaataacagtttctttagtagattgaattggttgacccatttaaaattcaaatacccagcattgaacgtgactatgccaaacaatgaaaaatttgacaaattgtacatttggggggttcaccacccgggtacggacaatgaccaaatcagcctatatgctcaagcatcaggaagaatcacagtctctaccaaaagaagccaacaaactgtaatcccgaatatcggatctagacccagggtaagggatatccccagcagaataagcatctattggacaatagtaaaaccgggagacatacttttgattaacagcacagggaatctaattgctcctcggggttacttcaaaatacgaagtgggaaaagctcaataatgagatcagatgcacccattggcaaatgcaattctgaatgcatcactccaaatggaagcattcccaatgacaaaccatttcaaaatgtaaacaggatcacatatggggcctgtcccagatatgttaagcaaaacactctgaaattggcaacagggatgcgaaatgtaccagagaaacaaactagaggcatatttggcgcaatcgcgggtttcatagaaaatggttgggagggaatggtggatggttggtacggtttcaggcatcaaaattctgagggaataggacaagcagcagatctcaaaagcactcaagcagcaatcaaccaaatcaatgggaagctgaataggttgatcgggaaaaccaacgagaaattccatcagattgaaaaagaattctcagaagtagaagggagaattcaggacctcgagaaatatgttgaggacactaaaatagatctctggtcatacaacgcggagcttcttgttgccctggagaaccaacatacaattgatctaactgactcagaaatgaacaaactgtttgaaagaacaaagaagcaactgagggaaaatgctgaggatatgggcaatggttgtttcaaaatataccacaaatgtgacaatgcctgcatagggtcaatcagaaatggaacttatgaccatgatgtatacagagatgaggcattaaacaaccggttccagatcaaaggtgttgagctgaagtcaggatacaaagattggatcctatggatttcctttgccatatcatgttttttgctttgtgttgctttgttggggttcatcatgtgggcctgccaaaaaggcaacattaggtgcaacatttgcatttga

SEQ ID NO: 31834 - RNA, 1701 nt, synthetic construct; identical to SEQ ID NO: 30822
  misc_feature 1..1701: note = hemagglutinin__InfluenzaA__ABI92918
  source 1..1701: mol_type = other RNA

SEQ ID NO: 31835 - RNA, 1701 nt, synthetic construct
  misc_feature 1..1701: note = hemagglutinin__InfluenzaA__ABI92929
  source 1..1701: mol_type = other RNA
atgaagactatcattgctttgagctacattctatgtctggttttcgctcaaaaacttcccggaaatgacaacagcacggcaacgctgtgccttgggcaccatgcagtaccaaacggaacgatagtgaaaacaatcacgaatgaccaaattgaagttactaatgctactgagctggttcagagttcctcaacaggtggaatatgcgacagtccttatcagatccttgatggagaaaactgcacactaatagatgctctattgggagaccctcagtgtgatggcttccaaaataagaaatgggacctttttgttgaacgcagcaaagcctacagcaactgttacccttatgatgtgccggattatgtctcccttaggtcactagttgcctcatccggcacactggagtttaacaatgaaagcttcaattggactggagtcactcaaaatggaacaagctctgcttgcaaaaggagatctaataacagtttctttagtagattgaattggttgacccatttaaaattcaaatacccagcattgaacgtgactatgccaaacaatgaaaaatttgacaaattgtacatttggggggttcaccacccgggtacggacaatgaccaaatcagcctatatgctcaagcatcaggaagaatcacagtctctaccaaaagaagccaacaaactgtaatcccgaatatcggatctagacccagggtaagggatatccccagcagaataagcatctattggacaatagtaaaaccgggagacatacttttgattaacagcacagggaatctaattgctcctcggggttacttcaaaatacgaagtgggaaaagctcaataatgagatcagatgcacccattggcaaatgcaattctgaatgcatcactccaaatggaagcattcccaatgacaaaccatttcaaaatgtaaacaggatcacatatggggcctgtcccagatatgttaagcaaaacactctgaaattggcaacagggatgcgaaatgtaccagagaaacaaactagaggcatatttggcgcaatcgcgggtttcatagaaaatggttgggagggaatggtggatggttggtacggtttcaggcatcaaaattctgagggaataggacaagcagcagatctcaaaagcactcaagcagcaatcaaccaaatcaatgggaagctgaataggttgatcgggaaaaccaacgagaaattccatcagattgaaaaagaattctcagaagtagaagggagaattcaggacctcgagaaatatgttgaggacactaaaatagatctctggtcatacaacgcggagcttcttgttgccctggagaaccaacatacaattgatctaactgactcagaaatgaacaaactgtttgaaagaacaaagaagcaactgagggaaaatgctgaggatatgggcaatggttgtttcaaaatataccacaaatgtgacaatgcctgcatagggtcaatcagaaatggaacttatgaccatgatgtatacagagatgaagcattaaacaaccggttccagatcaaaggtgttgagctgaagtcaggatacaaagattggatcctatggatttcctttgccatatcatgttttttgctttgtgttgctttgttggggttcatcatgtgggcctgccaaaaaggcaacattaggtgcaacatttgcatttga

SEQ ID NO: 31836 - RNA, 1701 nt, synthetic construct
  misc_feature 1..1701: note = hemagglutinin__InfluenzaA__ABI92940
  source 1..1701: mol_type = other RNA
atgaagactatcattgcttttaactacattctatgtctggttttcgctcaaaaacttcccggaaatgacaacagcacggcaacgctgtgccttgggcaccatgcagtaccaaacggaacgatagtgaaaacaatcacgaatgaccaaattgaagttactaatgctactgagctggttcagagttcctcaacaggtggaatatgcgacagtcctcatcagatccttgatggagaaaactgcacactaatagatgctctattgggagaccctcagtgtgatggcttccaaaataagaaatgggacctttttgttgaacgcagcaaagcctacagcaactgttacccttatgatgtgccggattatgcctcccttaggtcactagttgcctcatccggcacactggagtttaacaatgaaatcttcaattggactggagtcactcaaaatggaacaagctctgcttgcaaaaggagatctaataacagtttctttagtagattgaattggttgacccacttaaaattcaaatacccagcattgaacgtgactatgccaaacaatgaaaaatttgacaaattgtacatttggggggttcaccacccgggtacggacaatgaccaaatcagcctatatgctcaagcatcaggaagaatcacagtctctaccaaaagaagccaacaaactgtaatcccgaatatcggatctagacccagggtaagggatatccccagcagaataagcatctattggacaatagtaaaaccgggagacatacttttgattaacagcacagggaatctaattgctcctcggggttacttcaaaatacgaagtgggaaaagctcaataatgagatcagatgcacccattggcaaatgcaattctgaatgcatcactccaaatggaagcattcccaatgacaaaccatttcaaaatgtaaacaggatcacatatggggcctgtcccagatatgttaagcaaaacactctgaaattggcaacagggatgcgaaatgtaccagagaaacaaactagaggcatatttggcgcaatcgcgggtttcatagaaaatggttgggagggaatggtggatggttggtacggtttcaggcaccaaaattctgagggaacaggacaagcagcagatctcaaaagcactcaagcagcaatcaaccaaatcaatgggaagctgaataggttgatcgggaaaaccaacgagaaattccatcagattgaaaaagaattctcagaagtagaagggagaattcaggacctcgagaaatatgttgaggacactaaaatagatctctggtcatacaacgcggagcttcttgttgccctggagaaccaacatacaattgatctaactgactcagaaatgaacaaactgtttgaaagaacaaagaagcaactgagggaaaatgctgaggatatgggcaatggttgtttcaaaatataccacaaatgtgacaatgcctgcatagggtcaatcagaaatggaacttatgaccatgatgtatacagggatgaagcattaaacaaccggttccagatcaaaggtgttgagctgaagtcaggatacaaagattggatcctatggatttcctttgccatatcatgttttttgctttgtgttgctttgttggggttcatcatgtgggcctgccaaaaaggcaacattaggtgcaacatttgcatttga

SEQ ID NO: 31837 - RNA, 1701 nt, synthetic construct
  misc_feature 1..1701: note = hemagglutinin__InfluenzaA__ABI92951
  source 1..1701: mol_type = other RNA
atgaagactatcattgctttgagctacattctatgtctggttttcgctcaaaaacttcccggaaatgacaacagcacggcaacgctgtgccttgggcaccatgcagtaccaaacggaacgatagtgaaaacaatcacgaatgaccaaattgaagttactaatgctactgagctggttcagagttcctcaacaggtggaatatgcgacagtcctcatcagatccttgatggagaaaactgcacactaatagatgctctattgggagaccctcagtgtgatggcttccaaaataagaaatgggacctttttgttgaacgcagcaaagcctacagcaactgttacccttatgatgtgccggattatgcctcccttaggtcactaattgcctcatccggcacactggagtttaacaatgaaagcttcaattggactggagtcactcaaaatggaacaagctctgcttgcaaaaggagatctaatagcagtttctttagtagattgaattggttgacccacttaaaattcaaatacccagcattgaacgtgactatgccaaacaatgaagaatttgacaaattgtacatttggggggttcaccacccgggtacatacaatgaccaaatcagcctatatgctcaagcatcaggaagaatcacagtctctaccaaaagaagccaacaaactgtaatcccgaatatcgggtctagacccagggtaagggatatccccagcagaataagcatctattggacaatagtaaaaccgggagacatacttttgattaacagcacagggaatctaattgctcctcggggttacttcaaaatacgaagtgggaaaagctcaataatgagatcagatgcacccattggcaaatgcaattctgaatgcatcactccaaatggaagcattcccaatgacaaaccatttcaaaatgtaaacaggatcacatatggggcctgtcccagatatgttaagcaaaacactctgaaattggcaacagggatgcgaaatgtaccagagaaacaaactagaggcatatttggcgcaatcgcgggtttcatagaaaatggttgggagggaatggtggatggttggtacggtttcaggcatcaaaattctgagggaataggacaagcagcagatctcaaaagcactcaagcagcaatcgaccaaatcaatgggaagctgaataggttgatcgggaaaaccaacgagaaattccatcagattgaaaaagagttctcagaagtagaagggagaattcaggacctcgagaaatatgttgaggacactaaaatagatctctggtcatacaacgcggagcttcttgttgccctggagaaccaacatacaattgatctaactgactcagaaatgaacaaactgtttgaaagaacaaagaagcaactgagggaaaatgctgaggatatgggcaatggttgtttcaaaatataccacaaatgtgacaattcctgcatagggtcaatcagaaatggaacttatgaccatgatgtatacagagatgaagcattaaacaaccggttccagatcaaaggtgttgagctgaagtcaggatacaaagattggatcctatggatttcctttgccatatcatgttttttgctttgtgttgctttgttggggttcatcatgtgggcctgccaaaaaggcaacattaggtgcaacatttgcatttga

SEQ ID NO: 31838 - RNA, 1701 nt, synthetic construct
  misc_feature 1..1701: note = hemagglutinin__InfluenzaA__ABI92962
  source 1..1701: mol_type = other RNA
atgaagactatcattgctttgagctacattctatgtctggttttcgctcaaaaacttcccggaaatgacaacagcacggcaacgctgtgccttgggcaccatgcagtaccaaacggaacgatagtgaaaacaatcacgaatgaccaaattgaagttactaatgctactgagctggttcagagttcctcaacaggtggaatatgcgacagtcctcatcagatccttgatggagaaaactgcacactaatagatgctctattgggagaccctcagtgtgatggcttccaaaataagaaatgggacctttttgttgaacgcaacaaagcctacagcaactgttacccttatgatgtgccggattatgcctcccttaggtcactaattgcctcatccggcacactggagtttaacaatgaaagcttcaattggactggagtcactcaaaatggaacaagctctgcttgcaaaaggagatctaatagcagtttctttagtagattgaattggttgacccacttaaaattcaaatacccagcattgaacgtgactatgccaaacaatgaagaatttgacaaattgtacatttggggggttcaccacccgggtacatacaatgaccaaatcagcctatatgctcaagcatcaggaagaatcacagtctctaccaaaagaagccaacaaactgtaatcccgaatatcgggtctagacccagggtaagggatatccccagcagaataagcatctattggacaatagtaaaaccgggagacatacttttgattaacagcacagggaatctaattgctcctcggggttacttcaaaatacgaagtgggaaaagctcaataatgagatcagatgcacccattggcaaatgcaattctgaatgcatcactccaaatggaagcattcccaatgacaaaccatttcaaaatgtaaacaggatcacatatggggcctgtcccagatatgttaagcaaaacactctgaaattggcaacagggatgcgaaatgtaccagaaaaacaaactagaggcatatttggcgcaatcgcgggtttcatagaaaatggttgggagggaatggtggatggttggtacggtttcaggcatcaaaattctgagggaataggacaagcagcagatctcaaaagcactcaagcagcaatcgaccaaatcaatgggaagctgaataggttgatcgggaaaaccaacgagaaattccatcagattgaaaaagaattctcagaagtagaagggagaattcaggacctcgagaaatatgttgaggacactaaaatagatctctggtcatacaacgcggagcttcttgttgccctggagaaccaacatacaattgatctaactgactcagaaatgaacaaactgtttgaaagaacaaagaagcaactgagggaaaatgctgaggatatgggcaatggttgtttcaaaatataccacaaatgtgacaatgcctgcatagggtcaatcagaaatggaacttatgaccatgatgtatacagagatgaagcattaaacaaccggttccagatcaaaggtgttgagctgaagtcaggatacaaagattggatcctatggatttcctttgccatatcatgttttttgctttgtgttgctttgttggggttcatcatgtgggcctgccaaaaaggcaacattaggtgcaacatttgcatttga

SEQ ID NO: 31839 - RNA, 1701 nt, synthetic construct
  misc_feature 1..1701: note = hemagglutinin__InfluenzaA__ABI92973
  source 1..1701: mol_type = other RNA
atgaagactatcattgctttgagctacattctatgtctggttttcgctcaaaaacttcccggaaatgacaacagcacggcaacgctgtgccttgggcaccatgcagtaccaaacggaacgatagtgaaaacaatcacgaatgaccaaattgaagttactaatgctactgagctggttcagagttcctcaacaggtggaatatgcgacagtcctcatcagatccttgatggggaaaactgcacactaatagatgctctattgggagaccctcagtgtgatggcttccaaaataagaaatgggacctttttgttgaacgcagcaaagcctacagcaactgttacccttatgatgtgccggattatgcctcccttaggtcactaattgcctcatccggcacactggagtttaacaatgaaagcttcaattggactggagtcactcaaaatggaacaagctctgcttgcaaaaggagatctaatagcagtttctttagtagattgaattggttgacccacttaaaattcaaatacccagcattgaacgtgactatgccaaacaatgaagaatttgacaaattgtacatttggggggttcaccacccgggtacatacaatgaccaaatcagcctatatgctcaagcatcaggaagaatcacagtctctaccaaaagaagccaacaaactgtaatcccgaatatcgggtctagacccagggtaagggatatccccagcagaataagcatctattggacaatagtaaaaccgggagacatacttttgattaacagcacagggaatctaattgctcctcggggttacttcaaaatacgaagtgggaaaagctcaataatgagatcagatgcacccattggcaaatgcaattctgaatgcatcactccaaatggaagcattcccaatgacaaaccatttcaaaatgtaaacaggatcacatatggggcctgtcccagatatgttaagcaaaacactctgaaattggcaacagggatgcgaaatgtaccagagaaacaaactagaggcatatttggcgcaatcgcgggtttcatagaaaatggttgggagggaatggtggatggttggtacggtttcaggcatcaaaattctgagggaataggacaagcagcagatctcaaaagcactcaagcagcaatcgaccaaatcaatgggaagctgaataggttgatcgggaaaaccaacgagaaattccatcagattgaaaaagagttctcagaagtagaagggagaattcaggacctcgagaaatatgttgaggacactaaaatagatctctggtcatacaacgcggagcttcttgttgccctggagaaccaacatacaattgatctaactgactcagaaatgaacaaactgtttgaaagaacaaagaagcaactgagggaaaatgctgaggatatgggcaatggttgtttcaaaatataccacaaatgtgacaatgcctgcatagggtcaatcagaaatggaacttatgaccatgatgtatacagagatgaagcattaaacaaccggttccagatcaaaggtgttgagctgaagtcaggatacaaagattggatcctatggatttcctttgccatatcatgttttttgctttgtgttgctttgttggggttcatcatgtgggcctgccaaaaaggcaacattaggtgcaacatttgcatttga

SEQ ID NO: 31840 - RNA, 1701 nt, synthetic construct
  misc_feature 1..1701: note = hemagglutinin__InfluenzaA__ABI92984
  source 1..1701: mol_type = other RNA
atgaagactatcattgctttgagctacattctatgtctggttttcgctcaaaaacttcccggaaatgacaacagcacggcaacgctgtgccttgggcaccatgcagtaccaaacggaacgatagtgaaaacaatcacgaatgaccaaattgaagttactaatgctactgagctggttcagagttcctcaacaggtggaatatgcgacagtcctcatcagatccttgatggagaaaactgcacactaatagatgctctattgggagaccctcagtgtgatggcttccaaaacaagaaatgggacctttttgttgaacgcagcaaagcctacagcaactgttacccttatgatgtgccggattatgcctcccttaggtcactaattgcctcatccggcacactggagtttaacaatgaaagcttcaattggactggagtcactcaaaatggaacaagctctgcttgcaaaaggagatctaatagcagtttctttagtagattgaattggttgacccacttaaaattcaaatacccagcattgaacgtgactatgccaaacaatgaagaatttgacaaattgtacatttggggggttcaccacccgggtacatacaatgaccaaatcagcctatatgctcaagcatcaggaagaatcacagtctctaccaaaagaagccaacaaactgtaatcccgaatatcgggtctagacccagggtaagggatatccccagcagaataagcatctattggacaatagtaaaaccgggagacatacttttgattaacagcacagggaatctaattgctcctcggggttacttcaaaatacgaagtgggaaaagctcaataatgagatcagatgcacccattggcaaatgcaattctgaatgcatcactccaaatggaagcattcccaatgacaaaccatttcaaaatgtaaacaggatcacatatggggcctgtcccagatatgttaagcaaaacactctgaaattggcaacagggatgcgaaatgtaccagagaaacaaactagaggcatatttggcgcaatcgcgggtttcatagaaaatggttgggagggaatggtggatggttggtacggtttcaggcatcaaaattctgagggaataggacaagcagcagatctcaaaagcactcaagcagcaatcgaccaaatcaatgggaagctgaataggttgatcgggaaaaccaacgagaaattccatcagattgaaaaagagttctcagaagtagaagggagaattcaggacctcgagaaatatgttgaggacactaaaatagatctctggtcatacaacgcggagcttcttgttgccctggagaaccaacatacaattgatctaactgactcagaaatgaacaaactgtttgaaagaacaaagaagcaactgagggaaaatgctgaggatatgggcaatggttgtttcaaaatataccacaaatgtgacaatgcctgcatagggtcaatcagaaatggaacttatgaccatgatgtatacagagatgaagcattaaacaaccggttccagatcaaaggtgttgagctgaagtcaggatacaaagattggatcctatggatttcctttgccatatcatgttttttgctttgtgttgctttgttggggttcatcatgtgggcctgccaaaaaggcaacattaggtgcaacatttgcatttga

SEQ ID NO: 31841 - RNA, 1701 nt, synthetic construct
  misc_feature 1..1701: note = hemagglutinin__InfluenzaA__ABI92995
  source 1..1701: mol_type = other RNA
atgaagactatcattgctttgagctacattctatgtctggttttcgctcaaaaacttcccggaaatgacaacagcacggcaacgctgtgccttgggcaccatgcagtaccaaacggaacgatagtgaaaacaatcacgaatgaccaaattgaagttactaatgctactgagctggttcagagttcctcaacaggtggaatatgcgacagtcctcatcagatccttgatggagaaaactgcacactaatagatgctctattgggagaccctcagtgtgatggcttccaaaataagaaatgggacctttttgttgaacgcagcaaagcctacagcaactgttacccttatgatgtgccggattatgcctcccttaggtcactaattgcctcatccggcacactggagtttaacaatgaaagcttcaattggactggagtcactcaaaatggaacaagctctgcttgcaaaaggagatctaatagcagtttctttagtagattgaattggttgacccacttaaaattcaaatacccagcattgaacgtgactatgccaaacaatgaagaatttgacaaattgtacatttggggggttcaccacccgggtacatacaatgaccaaatcagcctatatgctcaagcatcaggaagaatcacagtctctaccaaaagaagccaacaaactgtaatcccgaatatcgggtctagacccaggataagggatatccccagcagaataagcatctattggacaatagtaaaaccgggagacatacttttgattaacagcacagggaatctaattgctcctcggggttacttcaaaatacgaagtgggaaaagctcaataatgagatcagatgcacccattggcaaatgcaattctgaatgcatcactccaaatggaagcattcccaatgacaaaccatttcaaaatgtaaacaggatcacatatggggcctgtcccaaatatgttaagcaaaacactctgaaattggcaacagggatgcgaaatgtaccagagaaacaaactagaggcatatttggcgcaatcgcgggtttcatagaaaatggttgggagggaatggtggatggttggtacggtttcaggcatcaaaattctgagggaataggacaagcagcagatctcaaaagcactcaagcagcaatcgaccaaatcaatgggaagctgaataggttgatcgggaaaaccaacgagaaattccatcagattgaaaaagagttctcagaagtagaagggagaattcaggacctcgagaaatatgttgaggacactaaaatagatctctggtcatacaacgcggagcttcttgttgccctggagaaccaacatacaattgatctaactgactcagaaatgaacaaactgtttgaaagaacaaagaagcaactgagggaaaatgctgaggatatgggcaatggttgtttcaaaatataccacaaatgtgacaatgcctgcatagggtcaatcagaaatggaacttatgaccatgatgtatacagagatgaagcattaaacaaccggttccagatcaaaggtgttgagctgaagtcaggatacaaagattggatcctatggatttcctttgccatatcatgttttttgctttgtgttgctttgttggggttcatcatgtgggcctgccaaaaaggcaacattaggtgcaacatttgcatttga

SEQ ID NO: 31842 - RNA, 1701 nt, synthetic construct
  misc_feature 1..1701: note = hemagglutinin__InfluenzaA__ABI93006
  source 1..1701: mol_type = other RNA
atgaagactatcattgctttgagctacattctatgtctggttttcgctcaaaaacttcccggaaatgacaacagcacggcaacgctgtgccttgggcaccatgcagtaccaaacggaacgatagtgaaaacaatcacgaatgaccaaattgaagttactaatgctactgagctggttcagagttcctcaacaggtggaatatgcgacagtcctcatcagatccttgatggagaaaactgcacactaatagatgctctattgggagaccctcagtgtgatggcttccaaaataagaaatgggacctttttgttgaacgcagcaaagcctacagcaactgttacccttatgatgtgccggattatgcctcccttaggtcactaattgcctcatccggcacactggagtttaacaatgaaagcttcaattggactggagtcactcaaaatggaacaagctctgcttgcaaaaggagatctaatagcagtttctttagtagattgaattggttgacccacttaaaattcaaatacccagcattgaacgtgactatgccaaacaatgaagaatttgacaaattgtacatttggggggttcaccacccgggtacatacaatgaccaaatcagcctatatgctcaagcatcaggaagaatcacagtctctaccaaaagaagccaacaaactgtaatcccgaatatcggatctagacccagggtaagggatatccccagcagaataagcatctattggacaatagtaaaaccgggagacatacttttgattaacagcacagggaatctaattgctcctcggggttacttcaaaatacgaagtgggaaaagctcaataatgagatcagatgcacccattggcaaatgcaattctgaatgcatcactccaaatggaagcattcccaatgacaaaccatttcaaaatgtaaacaggatcacatatggggcctgtcccagatatgttaagcaaaacactctgaaattggcaacagggatgcgaaatgtaccagagaaacaaactagaggcatatttggcgcaatcgcgggtttcatagaaaatggttgggagggaatggtggatggttggtacggtttcaggcatcaaaattctgagggaataggacaagcagcagatctcaaaagcactcaagcagcaatcgaccaaatcaatgggaagctgaataggttgatcgggaaaaccaacgagaaattccatcagattgaaaaagaattctcagaagtagaagggagaattcaggacctcgagaaatatgttgaggacactaaaatagatctctggtcatacaacgcggagcttcttgttgccctggagaaccaacatacaattgatctaactgactcagaaatgaacaaactgtttgaaagaacaaagaagcaactgagggaaaatgctgaggatatgggcaatggttgtttcaaaatataccacaaatgtgacaatgcctgcatagggtcaatcagaaatggaacttatgaccatgatgtatacagagatgaagcattaaacaaccggttccagatcaaaggtgttgagctgaagtcaggatacaaagattggatcctatggatttcctttgccatatcatgttttttgctttgtgttgctttgttggggttcatcatgtgggcctgccaaaaaggcaacattaggtgcaacatttgcatttga

SEQ ID NO: 31843 - RNA, 1701 nt, synthetic construct
  misc_feature 1..1701: note = hemagglutinin__InfluenzaA__ABI93017
  source 1..1701: mol_type = other RNA
atgaagactatcattgctttgagctacattctatgtctggttttcgctcaaaaacttcccggaaatgacaacagcacggcaacgctgtgccttgggcaccatgcagtaccaaacggaacgatagtgaaaacaatcacgaatgaccaaattgaagttactaatgctactgagctggttcagagttcctcaacaggtggaatatgcgacagtcctcatcagatccttgatggagaaaactgcacactaatagatgctctattgggagaccctcagtgtgatggcttccaaaataagaaatgggacctttttgttgaacgcagcaaagcctacagcaactgttacccttatgatgtgccggattatgcctcccttaggtcactaattgcctcatccggcacactggagtttaacaatgaaagcttcaattggactggagtcactcaaaatggaacaagctctgcttgcaaaaggagatctaatagcagtttctttagtagattgaattggttgacccacttaaaattcaaatacccagcattgaacgtgactatgccaaacaatgaagaatttgacaaattgtacatttggggggttcaccacccgggtacatacaatgaccaaatcagcctatatgctcaagcatcaggaagaatcacagtctctaccaaaagaagccaacaaactgtaatcccgaatatcgggtctagacccagggtaagggatatccccagcagaataagcatctattggacaatagtaaaaccgggagacatacttttgattaacagcacagggaatctaattgctcctcggggttacttcaaaatacgaagtgggaaaagctcaataatgagatcagatgcacccattggcaaatgcaattctgaatgcatcactccaaatggaagcattcccaatgacaaaccatttcaaaatgtaaacaggatcacatatggggcctgtcccagatatgttaagcaaaacactctgaaattggcaacagggatgcgaaatgtaccagagaaacaaactagaggcatatttggcgcaatcgcgggtttcatagaaaatggttgggagggaatggtggatggttggtacggtttcaggcatcaaaattctgagggaataggacaagcagcagatctcaaaagcactcaagcagcaatcgaccaaatcaatgggaagctgaataggttgatcgggaaaaccaacgagaaattccatcagattgaaaaagagttctcagaagtagaagggagaattcaggacctcgagaaatatgttgaggacactaaaatagatctctggtcatacaacgcggagcttcttgttgccctggagaaccaacatacaattgatctaactgactcagaaatgaacaaactgtttgaaagaacaaagaagcaactgagggaaaatgctgaggatatgggcaatggttgtttcaaaatataccacaaatgtgacaatgcctgcatagggtcaatcagaaatggaacttatgaccatgatgtatacagagatgaagcattaaacaaccggttccagatcaaaggtgttgagctgaagtcaggatacaaagattggatcctatggatttcctttgccatatcatgttttttgctttgtgttgctttgttggggttcatcatgtgggcctgccaaaaaggcaacattaggtgcaacatttgcatttga

SEQ ID NO: 31844 - RNA, 1698 nt, synthetic construct; identical to SEQ ID NO: 31736
  misc_feature 1..1698: note = hemagglutinin__InfluenzaA__ABI93028
  source 1..1698: mol_type = other RNA

SEQ ID NO: 31845 - RNA, 1701 nt, synthetic construct; identical to SEQ ID NO: 31470
  misc_feature 1..1701: note = hemagglutinin__InfluenzaA__ABI93039
  source 1..1701: mol_type = other RNA

SEQ ID NO: 31846 - RNA, 1701 nt, synthetic construct
  misc_feature 1..1701: note = hemagglutinin__InfluenzaA__ABI93061
  source 1..1701: mol_type = other RNA
atgaagactatcattgctttgagctacattttatgtctggttttcgctcaaaaacttcccggaaatgacaacagcacggcaacgctgtgcctggggcaccatgcagtgccaaacggaacgctagtgaaaacaatcacgaatgaccaaattgaagtgactaatgctactgagctggttcagagttcctcaacaggtagaatatgcgacagtcctcaccaaatccttgatggagaaaactgcacactaatagatgctctattgggagaccctcattgtgatggcttccaaaataaggaatgggacctttttgttgaacgcagcaaagcctacagcaactgttacccttatgatgtgccggattatgcctcccttaggtcactagttgcctcatccggcacactggagtttaacaatgaaagcttcaattggactggagtcgctcagaatggaacaagctctgcttgcaaaaggagatctaataaaagtttctttagtagattgaattggttgcaccaattaaaatacaaatacccagcactgaacgtgactatgccaaacaatgaaaaatttgacaaattgtacatttggggggttcaccacccgagtacagacagtgaccaaatcagcctatatgctcaagcatcagggagagtcacagtctctaccaaaagaagccaacaaactgtaatcccgaatatcggatctagaccctgggtaaggggtgtctccagcagaataagcatctattggacaatagtaaaaccgggagacatacttttgattaacagcacagggaatctaattgctcctcggggttacttcaaaatacgaagtgggaaaagctcaataatgaggtcagatgcatccattggcaaatgcaattctgaatgcatcactccaaatggaagcattcccaatgacaaaccatttcaaaatgtaaacaggatcacatatggggcctgtcccagatatgttaagcaaaacactctgaaattggcaacagggatgcggaatgtaccagagaaacaaactagaggcatattcggcgcaatcgcgggtttcatagaaaatggttgggagggaatggtggacggttggtacggtttcaggcatcaaaattctgagggcacaggacaagcagcagatcttaaaagcactcaagcagcaatcaaccaaatcaacgggaaactgaataggttaatcgagaaaacgaacgagaaattccatcaaattgaaaaagaattctcagaagtagaagggagaattcaggacctcgagaaatatgttgaggacactaaaatagatctctggtcgtacaacgcggagcttcttgttgccctggagaaccaacatacaattgatctaactgactcagaaatgaacaaactgtttgaaagaacaaagaagcaactgagggaaaatgctgaggatatgggcaatggttgtttcaaaatataccacaaatgtgacaatgcctgcatagggtcaatcagaaatggaacttatgaccatgatgtatacagagacgaagcattaaacaaccggttccagatcaaaggtgttgagctgaagtcaggatacaaagattggatcctatggatttcctttgccatatcatgttttttgctttgtgttgttttgctggggttcatcatgtgggcctgccaaaaaggcaacattaggtgcaacatttgcatttga

SEQ ID NO: 31847 - RNA, 1701 nt, synthetic construct; identical to SEQ ID NO: 31154
  misc_feature 1..1701: note = hemagglutinin__InfluenzaA__ABI93072
  source 1..1701: mol_type = other RNA

SEQ ID NO: 31848 - RNA, 1701 nt, synthetic construct; identical to SEQ ID NO: 31154
  misc_feature 1..1701: note = hemagglutinin__InfluenzaA__ABI93083
  source 1..1701: mol_type = other RNA

SEQ ID NO: 31849 - RNA, 1701 nt, synthetic construct; identical to SEQ ID NO: 31154
  misc_feature 1..1701: note = hemagglutinin__InfluenzaA__ABI93094
  source 1..1701: mol_type = other RNA

SEQ ID NO: 31850 - RNA, 1701 nt, synthetic construct
  misc_feature 1..1701: note = hemagglutinin__InfluenzaA__ABI93105
  source 1..1701: mol_type = other RNA
atgaagactatcattgctttgagctacattttatgtctggttttcgctcaaaaacttcccggaaatgacaacagcacggcaacgctgtgcctggggcaccatgcagtgccaaacggaacgctagtgaaaacaatcacgaatgaccaaattgaagtgactaatgctactgagctggttcagagttcctcaacaggtggaatatgcgacagtcctcaccaaatccttgatggagaaaactgcacactaatagatgctctattgggagaccctcattgtgatggcttccaaaataaggaatgggacctttttgttgaacgcagcaaagcctacagcaactgttacccttatgatgtgccggattatgcctcccttaggtcactagttgcctcatccggcacactggagtttaacaatgaaagcttcaattggactggagtcgctcagaatggaacaagctctgcttgcaaaaggagatctaataaaagtttctttagtagattgaattggttgcaccaattaaaatacaaatacccagcactgaacgtgactatgccaaacaatgaaaaatttgacaaattgtacatttggggggttcaccacccgagtacggacagcgaccaaatcagcctatatgctcaagcaccagggagagtcacagtctctaccaaaagaagccaacaaactgtaatcccgaatatcggatctagaccctgggtaaggggtgtctccagcagaataagcatctattggacaatagtaaaaccaggagacatacttttgattaactgcacagggaatctaattgctcctcggggttacttcaaaatacgaagtgggaaaagctcaataatgaggtcagatgcatccattggcaaatgcaattctgaatgcatcactccaaatggaagcattcccaatgacaaaccatttcaaaatgtaaacaggatcacatatggggcctgtcccagatatgttaagcaaaacactctgaaattggcaacagggatgcggaatgtaccagagaaacaaactagaggcatattcggcgcaatcgcgggtttcatagaaaatggttgggagggaatggtggacggttggtacggtttcaggcatcaaaattctgagggcacaggacaagcagcagatctcaaaagcactcaagcagcaatcaaccaaatcaacgggaaactgaataggttaatcgagaaaacgaacgagaaattccatcaaattgaaaaagaattctcagaagtggaagggagaattcaggacctcgagaaatatgttgaggacactaaaatagatctctggtcgtacaacgcggagcttcttgttgccctggagaaccagcatacaattgatctaactgactcagaaatgaacaaactgtttgaaagaacaaagaagcaactgagggaaaatgctgaggatatgggcaatggttgtttcaaaatataccacaaatgtgacaatgcctgcatagggtcaatcagaaatgggacttatgaccatgatgtatacagagacgaagcattaaacaaccggttccagatcaaaggtgttgagctgaagtcaggatacaaagattggatcctatggatttcctttgccatatcatgttttttgctttgtgttgtcttgctggggttcatcatgtgggcctgccaaaaaggcaacattaggtgcaacatttgcatttga

SEQ ID NO: 31851 - RNA, 1701 nt, synthetic construct
  misc_feature 1..1701: note = hemagglutinin__InfluenzaA__ABI93116
  source 1..1701: mol_type = other RNA
atgaagactatcattgctttgagctacattttatgtctggttttcgctcaaaaacttcccggaaatgacaacagcacggcaacgctgtgcctggggcaccatgcagtgccaaacggaacgctagtgaaaacaatcacgaatgaccaaattgaagtgactaatgctactgagctggttcagagttcctcaacaggtggaatatgcgacagtcctcaccaaatccttgatggagaaaactgcacactaatagatgctctattgggagaccctcattgtgatggcttccaaaataaggaatgggacctttttgttgaacgcagcaaagcctacagcaactgttacccttatgatgtgccggattatgcctcccttaggtcactagttgcctcatccggcacactggagtttaacaatgaaagcttcaattggactggagtcgctcagaatggaacaagctctgcttgcaaaaggagatctaataaaagtttctttagtagattgaattggttgcaccaattaaaatacaaatacccagcactgaacgtgactatgccaaacaatgaaaaatttgacaaattgtacatttggggggttcaccacccgagtacggacagtgaccaaatcagcctatatgctcaagcaccagggagagtcacagtctctaccaaaagaagccaacaaactgtaatcccgaatatcggatctagaccctgggtaaggggtgtctccagcagaataagcatctattggacaatagtaaaaccgggagacatacttttgattaactgcacagggaatctaattgctcctcggggttacttcaaaatgcgaagtgggaaaagctcaataatgaggtcagatgcatccattggcaaatgcaattctgaatgcatcactccaaatggaagcattcccaatgacaaaccatttcaaaatgtaaacaggatcacatatggggcctgtcccagatatgttaagcaaaacactctgaaattggcaacagggatgcggaatgtaccagagaaacaaactagaggcatattcggcgcaatcgcgggtttcatagaaaatggttgggagggaatggtggacggttggtacggtttcaggcatcaaaattctgagggcacaggacaagcagcagatctcaaaagcactcaagcagcaatcaaccaaatcaacgggaaactgaataggttaatcgagaaaacgaacgagaaattccatcaaattgaaaaagaattctcagaagtggaagggagaattcaggacctcgagaaatatgttgaggacactaaaatagatctctggtcgtacaacgcggagcttcttgttgccctggagaaccagcatacaattgatctaactgactcagaaatgaacaaactgtttgaaagaacaaagaagcaactgagggaaaatgctgaggatatgggcaatggttgtttcaaaatataccacaaatgtgacaatgcctgcatagggtcaatcagaaatgggacttatgaccatggtgtatacagagacgaagcattaaacaaccggttccagatcaaaggtgttgagctgaagtcaggatacaaagattggatcctatggatttcctttgccatatcatgttttttgctttgtgttgtcttgctggggttcatcatgtgggcctgccaaaaaggcaacattaggtgcaacatttgcatttga

SEQ ID NO: 31852 - RNA, 1689 nt, synthetic construct
  misc_feature 1..1689: note = hemagglutinin__InfluenzaA__ABI94581
  source 1..1689: mol_type = other RNA
atgaacactcaaatcctggtattcgctctggtggcgagcattccgacaaatgcagacaagatctgccttgggcatcatgccgtgtcaaacgggactaaagtaaacacattaactgagagaggagtggaagtcgttaatgcaactgaaacggtggaacgaacaaacgttcccaggatctgctcaaaagggaaaaggacagttgacctcggtcaatgtggacttctgggaacaatcactgggccaccccaatgtgaccaattcctagaattttcggccgacttaattattgagaggcgagaaggaagtgatgtctgttatcctgggaaattcgtgaatgaagaagctctgaggcaaattctcagagagtcaggcggaattgacaaggagacaatgggattcacctacagcggaataagaactaatggaacaaccagtgcatgtaggagatcaggatcttcattctatgcagagatgaaatggctcctgtcaaacacagacaatgctgctttcccgcaaatgactaagtcatacaagaacacaaggaaagacccagctctgataatatgggggatccaccattccggatcaactacagaacagaccaagctatatgggagtggaaacaaactgataacagttgggagttctaattaccaacagtcctttgtaccgagtccaggagcgagaccacaagtgaatggccaatctggaagaattgactttcattggctgatactaaaccctaatgacacggtcactttcagtttcaatggggccttcatagctccagaccgtgcaagctttctgagagggaagtccatgggaattcagagtgaagtacaggttgatgccaattgtgaaggagattgctatcatagtggagggacaataataagtaatttgccctttcagaacataaatagcagggcagtaggaaaatgtccgagatatgttaagcaagagagtctgctgttggcaacaggaatgaagaatgttcccgaaatcccaaagaggaggaggagaggcctatttggtgctatagcgggtttcattgaaaatggatgggaaggtttgattgatgggtggtatggcttcaggcatcaaaatgcacaaggggagggaactgctgcagattacaaaagcacccaatcagcaattgatcaaataacagggaaattaaatcggcttatagaaaaaactaaccaacagtttgagttaatagacaacgaattcactgaggttgaaaagcaaattggcaatgtgataaactggaccagagattccatgacagaagtgtggtcctataacgctgaactcttagtagcaatggagaatcagcacacaattgatctggccgactcagaaatgaacaaactgtacgaacgagtgaagagacaactgagagagaatgccgaagaagatggcactggttgcttcgaaatatttcacaagtgtgatgacgactgcatggccagtattagaaacaacacctatgatcacagcaagtacagggaagaagcaatacaaaatagaatacagattgacccagtcaaactaagcagcggctacaaagatgtgatactttggtttagcttcggggcatcatgtttcatacttctggccattgcaatgggccttgtcttcatatgtgtgaagaatggaaacatgcggtgcactatttgtatataa

SEQ ID NO: 31853 - RNA, 1701 nt, synthetic construct
  misc_feature 1..1701: note = hemagglutinin__InfluenzaA__ABI95228
  source 1..1701: mol_type = other RNA
atgaagactatcattgctttgagctacattttatgtctggttttcgctcaaaaacttcccgtaaatgacaacagcacggcaacgctgtgcctgggacaccatgcagtgccaaacggaacgctagtgaaaacaatcacgaatgaccacattgaagtgactaatgctactgagctggttcagagttccccaacaggtagaatatgcgacagtcctcaccaaatccttgatggagaaaactgcacactaatagatgctctattgggagaccctcattgtgatggcttccaaaataaggaatgggacctttttgttgaacgcagcacagcctacagcaactgttacccttatgatgtgccggattatgcctcccttaggtcactagttgcctcatccggcacactggagtttaacaatgaaagcttcaattggactggagtcgctcagaatggaacaagctctgcttgcaaaaggagatctattaaaagtttctttagtagattgaattggttgcaccaattaaaatacaaatatccagcactgaacgtgactatgccaaacaatgaaaaatttgacaaattgtacatttggggggttcaccacccgagtacggacagtgaccaaatcagcctatatgctcaagcatcagggagagtcacagtctctaccaaaagaagccaacaaactgtaatcccgaatatcggatctagaccctgggtaaggggtgtctccagcagaataagcatctattggacaatagtaaaaccgggagacatacttttgattaacagcacagggaatctaattgctcctcggggttacttcaaaatacgaagtgggaaaagctcaataatgaggtcaaatgcacccattggcaaatgcaattctgaatgcatcactccaaatggaagcattcccaatgacaaaccatttcaaaatgtaaacaggatcacatatggggcctgtcccagatatgttaagcaaaacactctgaaattggcaacagggatgcggaatgtaccagagaaacaaactagaggcatattcggcgcaattgcgggtttcatagaaaatggttgggaaggaatggtggacggttggtacggtttcaggcatcaaaattctgagggcacaggacaagcagcagatcttaaaagcactcaagctgcaatcaaccaaatcaacgggaaactgaataggttaatcgagaaaacaaacgagaaattccatcaaattgaaaaagaattctcagaagtagaagggagaattcaggacctcgagaaatatgttgaggacactaaaatagatctctggtcgtacaacgcggagcttcttgttgccctggagaaccaacatacaattgatctaactgactcagaaatgaacaaactgtttgaaagaacaaggaagcaactgagggaaaatgctgaggatatgggcaatggttgtttcaaaatataccacaaatgtgacaatgcctgcatagggtcaatcagaaatggaacttatgaccatgatgtatacagagacgaagcattaaacaaccggttccagatcaaaggtgttgagctgaagtcaggatacaaagattggatcctatggatttcctttgccatatcatgttttttgctttgtgttgttttgctggggttcatcatgtgggcctgccaaaaaggcaacattaggtgcaacatttgcatttga

SEQ ID NO: 31854 - RNA, 1701 nt, synthetic construct
  misc_feature 1..1701: note = hemagglutinin__InfluenzaA__ABI95239
  source 1..1701: mol_type = other RNA
atgaagactatcattgctttgagctacattctatgtctggttttcgctcaaaaacttcccggaaatgacaacagcacggcaacgctgtgccttgggcaccatgcagtaccaaacggaacgatagtgaaaacaatcacgaatgaccaaattgaagttactaatgctactgagctggttcagagttcctcaacaggtggaatatgcgacagtcctcatcagatccttgatggagaaaactgcacactaatagatgctctattgggagaccctcagtgtgatggcttccaaaataagaaatgggacctttttgttgaacgcagcaaagcctacagcaactgttacccttatgatgtgccggattatgcctcccttaggtcactagttgcctcatccggcacactggagtttaacaatgaaagcttcaattggactggagtcactcaaaatggaacaagctctgcttgcaaaaggagatctaataacagtttctttagtagattgaattggttgacccacttaaaattcaaatacccagcattgaacgtgactatgccaaacaatgaaaaatttgacaaattgtacatttggggggttcaccacccgggtacggacaatgaccaaatcagcctatatgctcaagcatcaggaagaatcacagtctctaccaaaagaagccaacaaactgtaatcccgaatatcggatctagacccagggtaagggatatccccagcagaataagcatctattggacaatagtaaaaccgggagacatacttttgattaacagcacagggaatctaattgctcctcggggttacttcaaaatacgaagtgggaaaagctcaataatgagatcagatgcacccattggcaaatgcaattctgaatgcatcactccaaatggaagcattcccaatgacaaaccatttcaaaatgtaaacaggatcacatatggggcctgtcccagatatgttaagcaaaacactctgaaattggcaacagggatgcgaaatgtaccagagaaacaaactagaggcatatttggcgcaatcgcgggtttcatagaaaatggttgggagggaatggtgaatggttggtacggtttcaggcatcaaaattctgagggaataggacaagcagcagatctcaaaagcactcaagcagcaatcaaccaaatcaatgggaagctgaataggttgatcggaaaaaccaacgagaaattccatcagattgaaaaagaattctcagaagtagaagggagaattcaggacctcgagaaatatgttgaggacactaaaatagatctctggtcatacaacgcggagcttcttgttgccctggagaaccaacatacaattgatctaactgactcagaaatgaacaaactgtttgaaagaacaaagaagcaactgagggaaaatgctgaggatatgggcaatggttgtttcaaaatataccacaaatgtgacaatgcctgcatagggtcaatcagaaatggaacttatgaccatgatgtatacagagatgaagcattaaacaaccggttccagatcaaaggtgttgagctgaagtcaggatacaaagattggatcctatggatttcctttgccatatcatgttttttgctttgtgttgctttgttggggttcatcatgtgggcctgccaaaaaggcaacattaggtgcaacatttgcatttga

SEQ ID NO: 31855 - RNA, 1698 nt, synthetic construct
  misc_feature 1..1698: note = hemagglutinin__InfluenzaA__ABI95250
  source 1..1698: mol_type = other RNA
atgaaagcaaaactactagtcctgttatgtacatttacagctacatatgcagacacaatatgtgtaggctaccatgccaacaactcaaccgacactgttgacacagtacttgagaagaatgtgacagtgacacactctgtcaacctacttgaggacagtcacaatggaaaactatgtctactaaaaggaatagccccactacaattgggtaattgcagcgttgccggatggatcttaggaaacccagaatgcgaatcactgatttctaaggaatcatggtcctacattgtagagacaccaaaccctgagaatggaacatgttacccagggtatttcgccgactatgaggaactgagggagcaattgagttcagtatcttcatttgagagattcgaaatattccccaaagaaagctcatggcccaaccacaccgtaaccggagtatcggcatcatgctcccataatgggaaaagcagtttttacagaaatttgctatggctgacggagaagaatggcttgtacccaaatctgagcaagtcctatgtaaacaacaaagagaaagaagtccttgtactatggggtgttcatcacccgtctaacataggggaccaaagggccatctatcatacagaaaatgcttatgtctctgtagtgtcttcacattatagcagaagattcaccccagaaatagcaaaaagacccaaagtaagaggtcaggaaggaagaatcaactactactggactctgctggaacccggggacacaataatatttgaggcaaatggaaatctaatagcgccatggtatgctttcgcactgagtagaggctttgggtcaggaatcatcacctcaaatgcgccaatgaatgaatgtgatgcaaagtgtcaaacacctcagggagctataaacagtagtcttcctttccagaatgtacacccagtcacaataggagagtgtccaaagtatgtcaggagtgcaaaattaaggatggttacaggactaaggaacatcccatccattcaatccagaggtttgtttggagccattgccggtttcattgaaggggggtggactggaatgatagatgggtggtatggttatcatcatcagaatgagcaaggatctggctatgctgcagatcaaaaaagcacacaaaatgccattaacgggattacaaacaaggtgaattctgtaattgagaaaatgaacactcaattcacagctgtgggcaaagaattcaacaaattagaaagaaggatggaaaacttaaataaaaaagttgatgatggatttctagacatttggacatataatgcagaattgttggttctactggaaaatgaaaggactttggatttccatgactcaaatgtgaagaatctgtatgagaaagtaaaaagccaattaaagaataatgccaaagaaataggaaacgggtgttttgaattctatcacaagtgtaacaatgaatgcatggaaagtgtgaaaaatggaacttatgactatccaaaatattccgaagaatcaaagttaaacagggagaaaattgatggagtgaaattggaatcaatgggagtctatcagattctggcgatctactcaactgtcgccagttcactggttcttttggtctccctgggggcaatcagcttctggatgtgttccaatgggtctttgcagtgtagaatatgcatctga

SEQ ID NO: 31856 - RNA, 1698 nt, synthetic construct
  misc_feature 1..1698: note = hemagglutinin__InfluenzaA__ABI95261
  source 1..1698: mol_type = other RNA
atgaaagcaaaactactagtcctgttatgtacatttacagctacatatgcagacacaatatgtataggctaccatgccaacaactcaaccgacactgttgacacagtacttgagaagaatgtgacagtgacacactctgtcaacctacttgaggacagtcacaatggaaaactatgtctactaaaaggaatagccccactacaattgggtaattgcagcgttgccggatggatcttaggaaacccagaatgcgaatcactgatttctaaggaatcatggtcctacattgtagagacaccaaaccctgagaatggaacatgttacccagggtatttcgccgactatgaggaactgagggagcaattgagttcagtatcttcatttgagaggttcgaaatattccccaaagaaagctcatggcccaaccacaccgtaaccggagtatcggcatcatgctcccataatgggaaaagcagtttttacagaaatttgctatggctgacggagaagaatggcttgtacccaaatctgagcaagtcctatgtaaacaacaaggagaaagaagtccttgtactatggggtgttcatcacccgtctaacataggggtccaaagggccatctatcatacagaaaatgcttatgtctctgtagtgtcttcacattatagcagaagattcaccccagaaatagcaaaaagacccaaagtaagagatcaggaaggaagaatcaactactactggactctgctggaacccggggacacaataatatttgaggcaaatggaaatctaatagcgccatggtatgctttcgcactgagtagaggctttgagtcaggaatcatcacctcaaatgcaccaatgaatgaatgtgatgcaaagtgtcaaacacctcagggagctataaacagtagtcttcctttccagaatgtacacccagtcacaataggagagtgtccaaagtatgtcaggagtgcaaaattaaggatggttacaggactaaggaacatcccatccattcaatccagaggtttgtttggagccattgccggtttcattgaaggggggtggactggaatgatagatgggtggtatggttatcatcatcagaatgagcaaggatctggctatgctgcagatcaaaaaagcacacaaaatgccattaacgggattacaaacaaggtgaattctgtaattgagaaaatgaacactcaattcacagctgtgggcaaagaattcaacaaattagaaagaaggatggaaaacttaaataaaaaagttgatgatggatttctagacatttggacatataatgcagaattgttggttctactggaaaatgaaaggactttggatttccatgactcaaatgtgaagaatctgtatgagaaagtaaaaagccaattaaagaataatgccaaagaaataggaaacgggtgttttgaattctatcacaagtgtaacaatgaatgcatggaaagtgtgaaaaatggaacttatgactatccaaaatattccgaagaatcaaagttaaacagggagaaaattgatggagtgaaattggaatcaatgggagtctatcagattctggcgatctactcaactgtcgccagttcactggttcttttagtctccctgggggcaatcagcttctggatgtgttccaatgggtctttgcagtgtagaatatgcatctga

SEQ ID NO: 31857 - RNA, 1698 nt, synthetic construct; identical to SEQ ID NO: 31736
  misc_feature 1..1698: note = hemagglutinin__InfluenzaA__ABI95272
  source 1..1698: mol_type = other RNA

SEQ ID NO: 31858 - RNA, 1698 nt, synthetic construct; identical to SEQ ID NO: 31736
  misc_feature 1..1698: note = hemagglutinin__InfluenzaA__ABI95283
  source 1..1698: mol_type = other RNA

SEQ ID NO: 31859 - RNA, 1698 nt, synthetic construct
  misc_feature 1..1698: note = hemagglutinin__InfluenzaA__ABI95294
  source 1..1698: mol_type = other RNA
atgaaagcaaaactactggtcctgttatgtacatttacagctacatacgcagacacaatatgtataggctaccatgccaacaactcaaccgacactgttgacacagtacttgagaagaatgtgacagtgacacactctgtcaacctacttgaggacagtcacaatggaaaactatgtctactaaaaggaatagccccactacaattgggtaattgcagcgttgccggatggatcttaggaaacccagaatgcgaattactgatttccaaggaatcatggtcctacattgtagaaacaccaaatcccgagaatggaacatgttacccagggtatttcgccgactatgaggaactgagggagcaattgagttcagtatcttcatttgagagattcgaaatattccccaaaggaagctcatggcccaaccacaccgtaaccggagtatcagcatcatgctcccataatgggaaaagcagtttttacagaaatttgctatggctgacggggaagaatggtttgtacccaaacctgagcatgtcctatgtaaacaacaaagagaaagaagtccttgtgctatggggtgttcatcacccacctaacataggggaccaaagggccctctaccatacagaaaatgcttatgtctctgtagtgtcttcacattatagcagaagattcaccccagaaatagccaaaagacccaaagtaagagatcaggaaggaagaatcaactactactggactctgctggaacccggggacacaataatatttgaggcaaatggaaatctaatagcgccatggtatgctttcgcactgagtagaggctttggatcaggaatcatcacctcaaatgcaccaatggatgaatgtgatgcaaagtgtcaaacacctcagggagctataaacagtagtcttcctttccagaatgtacacccagttacaataggagagtgtccaaagtatgtcaggagtgcaaaattaaggatggttacaggactaaggaacatcccatccattcaatccagaggtttgtttggagccattgccggtttcattgaaggggggtggactggaatggtagatgggtggtatggttatcatcaccagaatgagcaaggatctggctatgctgcagatcaaaaaagcacacaaaatgccattaacgggattacaaacaaggtgaattctgtaattgagaaaatgaacactcaattcacagctgtgggcaaagaattcaacaaattagaaagaaggatggaaaacttaaataaaaaagttgatgatgggtttctagacatttggacatataatgcagaattgttggttctactggaaaatgaaaggactttggatttccatgactccaatgtgaagaatctgtatgagaaagtaaaaagccaattaaagaataatgccaaagaaataggaaacgggtgttttgaattctatcacaagtgtaacaatgaatgcatggaaagtgtgaaaaatggaacttatgactatccaaaatattccgaagaatcaaagttaaacagggagaaaattgatggagtaaaattggaatcaatgggagtctatcagattctggcgatctactcaactgtcgccagttccctggttcttttggtctccctgggggcaatcagcttctggatgtgttccaatgggtctttgcagtgtagaatatgcatctga

SEQ ID NO: 31860 - RNA, 1698 nt, synthetic construct
  misc_feature 1..1698: note = hemagglutinin__InfluenzaA__ABI96104
  source 1..1698: mol_type = other RNA
atgaaagtaaaactactgatcctgttatgtacatttacagctacatatgcagacacaatatgtataggctaccatgccaacaactcaaccgacactgttgacacagtacttgagaagaatgtgacagtgacacactctgtcaacctacttgaggacagtcacaatggaaaactgtgcctactaaaaggaatagcccccctacaattgggtaattgcagcgttgccggatggatcttaggaaacccagaatgcgaattactgatttccaaggaatcatggtcctacattgtagaaacaccaaatcctgagaatggagcatgttacccagggtatttcgccgactatgaggagctaagggagcaattgagttcagtatcttcatttgagagattcgaaatattccccaaagaaagctcatggcccaaccacaccgtaaccggagtatcagcatcatgctcccataatgggaaaagcagtttttacagaaatttgctatggctgacggggaagaatggtttgtacccaaacctgatcaagtcctatgcaaacaacaaagagaaagaagtccttatactatggggtgttcatcacccgcctaacataggggaccaaaggaccctctatcacacagaaaatgcttatgtctctgtagtgtcttcacattatagcagaagattcaccccagaaataaccaaaaggcccaaagtaagagatcaggaaggaagaatcaactactactggactctgctggaacccggggatacaataatatttgaggcaaatggaaatctaatagcgccatggtatgctttcgcactgagtagaggctttggatcaggaatcatcacctcaaatgcaccaatggatgaatgtgatgcgaagtgtcaaacacctcagggagctataaacagcagtcttcctttccagaatgtacacccagtcacaataggagagtgtccaaagtatgtcaggagtgcaaaattaaggatggttacaggactaaggaacatcccatccattcaatccagaggtttgtttggagccattgccggtttcattgaaggggggtggactggaatggtagatgggtggtatggttatcatcatcagaatgagcaaggatctggctatgctgcagatcaaaaaagcacacaaaatgccattaacgggattacaaacaaggtgaattctgtaattgagaaaatgaacactcaattcacagctgtgggcaaagaattcaacaaattggaaagaaggatggaaaacttaaataaaaaggttgatgatgggtttctagacatttggacatataatgcagaattgttggttctactggaaaatgaaaggactttggatttccacgactccaatgtgaagaatctgtacgagaaagtaaaaagccaattaaagaataatgccaaagaaataggaaatgggtgttttgaattctatcacaagtgtaacaatgaatgcatggagagtgtgaaaaatggaacttatgactatccaaaatattccgaagaatcaaagttaaacagggaaaaaattgatggagtgaaattggactcaatgggggtctatcagattctggcgatctactcaactgtcgctagttccctggttcttttggtctccctgggggcaatcagcttctggatgtgttccaatgggtctttgcagtgtagaatatgcatctga

SEQ ID NO: 31861 - RNA, 1701 nt, synthetic construct
  misc_feature 1..1701: note = hemagglutinin__InfluenzaA__ABJ09107
  source 1..1701: mol_type = other RNA
atgaagactatcattgctttgagctacattttatgtctggttttcgctcaaaaacttcccggaaatgacaacagcacggcaacgctgtgcctggggcaccatgcagtgccaaacggaacgctagtgaaaacaatcacgaatgaccaaattgaagtgactaatgctactgagctggttcagagttcctcaacaggtggaatatgcgacagtcctcaccaaatccttgatggagaaaactgcacactaatagatgctctattgggagaccctcattgtgatggcttccaaaataaggaatgggacctttttgttgaacgcagcaaagcctacagcaactgttacccttatgatgtgccggattatgcctcccttaggtcactagttgcctcatccggcacactggagtttaacaatgaaagcttcaattggactggagtcgctcagaatggaacaagctctgcttgcaaaaggagatctaataaaagtttctttagtagattgaattggttgcaccaattaaaatacaaatacccagcactgaacgtgactatgccaaacaatgaaaaatttgacaaattgtacatttggggggttcaccacccgagtacggacagtgaccaaatcagcctatatgctcaagcaccagggagagtcacagtctctaccaaaagaagccaacaaactgtaatcccgaatatcggatctagaccctgggtaaggggtgtctccagcagaataagcatctattggacaatagtaaaaccgggagacatacttttgattaactgcacagggaatctaattgctcctcggggttacttcaaaatacgaagtgggaaaagctcaataatgaggtcagatgcatccattggcaaatgcaattctgaatgcatcactccaaatggaagcattcccaatgacaaaccatttcaaaatgtaaacaggatcacatatggggcctgtcccagatatgttaagcaaaacactctgaaattggcaacagggatgcggaatgtaccagagaaacaaactagaggcatattcggcgcaatcgcgggtttcatagaaaatggttgggagggaatggtggacggttggtacggtttcaggcatcaaaattctgagggcacaggacaagcagcagatctcaaaagcactcaagcagcaatcaaccaaatcaacgggaaactgaataggttaatcgagaaaacgaacgagaaattccatcaaattgaaaaagaattctcagaagtggaagggagaattcaggacctcgagaaatatgttgaggacactaaaatagatctctggtcatacaacgcggagcttcttgttgccctggagaaccagcatacaattgatctaactgactcagaaatgaacaaactgtttgaaagaacaaagaagcaactgagggaaaatgctgaggatatgggcaatggttgtttcaaaatataccacaaatgtgacaatgcctgcatagggtcaatcagaaatgggacttatgaccatgatgtatacagagacgaagcattaaacaaccggttccagatcaaaggtgttgagctgaagtcaggatacaaagattggatcctatggatttcctttgccatatcatgttttttgctttgtgttgtcttgctggggttcatcatgtgggcctgccaaaaaggcaacattaggtgcaacatttgcatttga

SEQ ID NO: 31862 - RNA, 1701 nt, synthetic construct
  misc_feature 1..1701: note = hemagglutinin__InfluenzaA__ABJ09140
  source 1..1701: mol_type = other RNA
atgaagactatcattgctttgagctacattttatgtctggttttcgctcaaaaacttcccggaaatgacaacagcacagcaacgctgtgcctgggacaccatgcggtgccaaacggaacgctagtgaaaacaatcacgaatgatcaaattgaagtgactaatgctactgagctggttcagagttcctcaacaggtagaatatgcgacagtcctcaccgaatccttgatggaaaaaactgcacactgatagatgctctattgggagaccctcattgtgatggcttccaaaataaggaatgggacctttttgttgaacgcagcaaagcttacagcaactgttacccttatgatgtgccggattatgcctcccttaggtcactagttgcctcatcaggcaccctggagtttatcaatgaagacttcaattggactggagtcgctcaggatgggaaaagctattcttgcaaaaggggatctgttaacagtttctttagtagattgaattggttgcacaaattagaatacaaatatccagcgctgaacgtgactatgccaaacaatggcaaatttgacaaattgtacatttggggggttcaccacccgagcacggacagtgaccaaaccagcctatatgttcgagcatcagggagagtcacagtctctaccaaaagaagccaacaaactgtaatcccgaatatcgggtttagaccctgggtaaggggtctgtccagtagaataagcatctattggacaatagtaaaaccgggagacatacttttgattaatagcacagggaatctaattgctcctcggggttacttcaaaatacggaatgggaaaagctcaataatgaggtcagatgcacccattggcaactgcagttctgaatgcatcactccaaatggaagcattcccaatgacaaaccttttcaaaatgtaaacaggatcacatatggggcctgccccagatatgttaagcaaaacactctgaagttggcaacagggatgcggaatgtaccagagaaacaaactagaggcatattcggcgcaatcgcaggtttcatagaaaatggttgggagggaatggtagacggttggtacggtttcaggcatcaaaattctgagggcacaggacaagcagcagatcttaaaagcactcaagcagcaatcgaccaaatcaacgggaaactgaataggttaatcgagaaaacgaacgagaaattccatcaaatcgaaaaagaattctcagaagtagaagggagaattcaggacctcgagaaatatgttgaagacactaaaatagatctctggtcttacaacgcggggcttcttgttgccctggagaaccaacatacaattgatctaactgactcagaaatgaacaaactgtttgaaagaacaaggaagcaactgagggaaaatgctgaggacatgggcaatggttgcttcaaaatataccacaaatgtgacaatgcctgcatagggtcaatcagaaatggaacttatgaccatgatgtatacagagacgaagcattaaacaaccggttccagatcaaaggtgttgagctgaagtcaggatacaaagattggatcctatggatttcctttgccatatcatgctttttgctttgtgttgttttgctggggttcatcatgtgggcctgccaaaaaggcaacattaggtgcaacatttgcatttga

SEQ ID NO: 31863 - RNA, 1698 nt, synthetic construct
  misc_feature 1..1698: note = hemagglutinin__InfluenzaA__ABJ09151
  source 1..1698: mol_type = other RNA
atgaaagcaaaactactggtcctgttatgtacatttacagctacatacgcagacacaatatgtataggctaccatgccaacaactcaaccgacactgttgacacagtacttgagaagaatgtgacagtgacacactctgtcaacctacttgaggacagtcacaatggaaaactatgtctactaaaaggaatagccccactacaattgggtaattgcagcgttgccggatggatcttaggaaacccagaatgcgaattactgatttccaaggaatcatggtcctacattgtagaaacaccaaatcccgagaatggaacatgttacccagggtatttcgccgactatgaggaactgagggagcaattgagttcagtatcttcatttgagagattcgaaatattccccaaaggaagctcatggcccaaccacaccgtgaccggagtatcagcatcatgctcccataatgggaaaagcagtttttacagaaatttgctatggctgacggggaagaatggtttgtacccaaacctgagcatgtcctatgtaaacaacaaagggaaagaagtccttgtgctatggggtgttcatcacccacctaacataggggaccaaagggccctctaccatacagaaaatgcttatgtctctgtagtgtcttcacattatagcagaagattcaccccagaaatagccaaaagacccaaagtaagagatcaggaaggaagaatcaactactactggactctgctggaacccggggacacaataatatttgaggcaaatggaaatctaatagcgccatggtatgctttcgcactgagtagaggctttggatcaggaatcatcacctcaaatgcaccaatgggtgaatgtgatgcgaagtgtcaaacacctcagggagctataaacagtagtcttcctttccagaatgtacacccagttacaataggagagtgtccaaagtatgtcaggagtgcaaaattaaggatggttacaggactaaggaacatcccatccattcaatccagaggtttgtttggagccattgccggtttcattgaaggggggtggactggaatggtagatgggtggtatggttatcatcatcagaatgagcaaggatctggctatgctgcagatcaaaaaagcacacaaaatgccattaacgggattacaaacaaggtgaattctgtaattgagaaaatgaacactcaattcacagctgtgggcaaagaattcaacaaattagaaagaaggatggaaaacttaaataaaaaagttgatgatgggtttctagacatttggacatataatgcagaattgttggttctactggaaaatgaaaggactttggatttccatgactccaatgtgaagaatctgtatgagaaagtaaaaagccaattaaagaataatgccaaagaaataggaaacgggtgttttgaattctatcacaagtgtaacaatgaatgcatggaaagtgtgaaaaatggaacttatgactatccaaaatattccaaagaatcaaagttaaacagggagaaaattgatggagtaaaattggaatcaatgggagtctatcagattctggcgatctactcaactgtcgccagttccctggttcttttggtctccctgggggcaatcagcttctggatgtgttccaatgggtctttgcagtgtagaatatgcatctga

SEQ ID NO: 31864 - RNA, 1701 nt, synthetic construct
  misc_feature 1..1701: note = hemagglutinin__InfluenzaA__ABJ09162
  source 1..1701: mol_type = other RNA
atgaagactatcattgctttgagctacattctatgtctggttttcgctcaaaaacttcccggaaatgacaacagcacggcaacgctgtgccttgggcaccatgcagtaccaaacggaacgatagtgaaaacaatcacgaatgaccaaattgaagttactaatgctactgagctggttcagagttcctcaacaggtggaatatgcgacagtcctcatcagatccttgatggagaaaactgcacactaatagatgctctattgggagaccctcagtgtgatggcttccaaaataagaaatgggacctttttgttgaacgcagcaaagcctacagcaactgttacccttatgatgtgccggattatgcctcccttaggtcactagttgcctcatccggcacactggagtttaacaatgaaagcttcaattggactggagtcactcaaaatggaacaagctctgcttgcaaaaggagatctaataacagtttctttagtagattgaattggttgacccatttaaaattcaaatacccagcattgaacgtgactatgccaaacaatgaaaaatttgacaaattgtacatttggggggttcaccacccgggtacgaacaatgaccaaatcagcctatatgctcaagcatcaggaagaatcacagtctctaccaaaagaagccaacaaactgtaatcccgaatatcggatctagacccagggtaagggatatccccagcagaataagcatctattggacaatagtaaaaccgggagacatacttttgattaacagcacagggaatctaattgctcctcggggttacttcaaaatacgaagtgggaaaagctcaataatgagatcagatgcacccattggcaaatgcaattctgaatgcatcactccaaatggaagcattcccaatgacaaaccatttcaaaatgtaaacaggatcacatatggggcctgtcccagatatgttaagcaaaacactctgaaattggcaacagggatgcgaaatgtaccagagaaacaaactagaggcatatttggcgcaatcgcgggtttcatagaaaatggttgggagggaatggtggatggttggtacggtttcagacatcaaaattctgagggaataggacaagcagcagatctcaaaagcactcaagcagcaatcaaccaaatcaatgggaagctgaataggttgatcgggaaaaccaacgagaaattccatcagattgaaaaagaattctcagaagtagaagggagaattcaggacctcgagaaatatgttgaggacactaaaatagatctctggtcatacaacgcggagattcttgttgccctggagaaccaacatacaattgatctaactgactcagaaatgaacaaactgtttgaaagaacaaagaagcaactgagggaaaatgctgaggatatgggcaatggttgtttcaaaatataccacaaatgtgacaatgcctgcatagggtcaatcagaaatggaacttatgaccatgatgtatacagagatgaagcattaaacaaccggttccagatcaaaggtgttgagctgaagtcaggatacaaagattggatcctatggatttcctttgccatatcatgttttttgctttgtgttgctttgttggggttcatcatgtgggcctgccaaaaaggcaacattaggtgcaacatttgcatttga

SEQ ID NO: 31865 - RNA, 1701 nt, synthetic construct
  misc_feature 1..1701: note = hemagglutinin__InfluenzaA__ABJ09173
  source 1..1701: mol_type = other RNA
atgaagactatcattgctttgagctacattctatgtctggttttcgctcaaaaacttcccggaaatgacaacagcacggcaacgctatgccttgggcaccatgcagtaccaaacggaacgatagtgaaaacaatcacgaatgaccaaattgaagttactaatgctactgagctggttcagagttcctcaacaggtggaatatgcgacagtcctcatcagatccttgatggagaaaactgcacactaatagatgctctattgggagaccctcagtgtgatggcttccaaaataagaaatgggacctttttgttgaacgcagcaaagcctacagcaactgttacccttatgatgtgccggattatgcctcccttaggtcactagttgcctcatccggcacactggagtttaacaatgaaagcttcaattggactggagtcactcaaaatggaacaagctctgcttgcaaaaggagatctaataacagtttctttagtagattgaattggttgacccatttaaaattcaaatacccagcattgaacgtgactatgccaaacaatgaaaaatttgacaaattgtacatttggggggttcaccacccgggtacggacaatgaccaaatcagcctatatgctcaagcatcaggaagaatcacagtctctaccaaaagaagccaacaaactgtaatcccgaatatcggatctagacccagggtaagggatatccccagcagaataagcatctattggacaatagtgaaaccgggagacatacttttgattaacagcacagggaatctaattgctcctcggggttacttcaaaatacgaagtgggaaaagctcaataatgagatcagatgcacccattggcaaatgcaattctgaatgcatcactccaaatggaagcattcccaatgacaaaccatttcaaaatgtaaacaggatcacatatggggcctgtcccagatatgttaagcaaaacactctgaaattggcaacagggatgcgaaatgtaccagagaaacaaactagaggcatatttggcgcaatcgcgggtttcatagaaaatggttgggagggaatggtggatggttggtacggtttcaggcatcaaaattctgagggaataggacaagcagcagatctcaaaagcactcaagcagcaatcaaccaaatcaatgggaagctgaataggttgatcgggaaaaccaacgagaaattccatcagattgaaaaagaattctcagaagtagaagggagaattcaggacctcgagaaatatgttgaggacactaaaatagatctctggtcatacaacgcggagcttcttgttgccctggagaaccaacatacaattgatctaactgactcagaaatgaacaaactgtttgaaagaacaaagaagcaactgagggaaaatgctgaggatatgggcaatggttgtttcaaaatataccacaaatgtgacaatgcctgcatagggtcaatcagaaatggaacttatgaccatgatgtatacagagatgaagcattaaacaaccggttccagatcaaaggtgttgagctgaagtcaggatacaaagattggatcctatggatttcctttgccatatcatgttttttgctttgtgttgctttgttggggttcatcatgtgggcctgccaaaaaggcaacattaggtgcaacatttgcatttga

SEQ ID NO: 31866 - RNA, 1698 nt, synthetic construct
  misc_feature 1..1698: note = hemagglutinin__InfluenzaA__ABJ09184
  source 1..1698: mol_type = other RNA
atgaaagtaaaactactggttctgttatgtacatttacagctacatatgcagacacaatatgtataggctaccatgccaacaactcaaccgacactgttgacacagtacttgagaagaatgtgacagtgacacactctgtcaacctacttgaggacagtcacaatggaaaactatgtctactaaaaggaatagccccattacaattgggtaattgcagcgttgccggatggatcttaggaaacccagaatgcgaattactgatttccaaggaatcatggtcctacattgtagaaacaccaaatcctgagaatggaacatgttacccagggtatttcgccgactatgaggaactgagggagcaattgagttcagtatcttcatttgagaggttcgaaatattccccaaagagagctcatggcccaaccacaccgtaaccggagtatcagcatcatgctcccataacgggaaaagcagtttttacagaaatttgctatggctgacggggaagaatggtttgtacccaaacctgagcaagtcttatgcaaacaacaaagaaaaagaagtccttgtactatggggtgttcatcacccgcctaacataggggaccaaagggctctctatcatacagaaaatgcttatgtctctgtagtgtcttcacattatagcagaagattcaccccagaaatagccaaaagacccaaggtgagagatcaggaaggaagaatcaactactactggacactgctggaagccggggatacaataatatttgaggcaaatggaaatctaatagcgccaaggtttgctttcgcactgagtagaggctttggatcaggaatcatcacctcaaatgcaccaatggatgaatgtgatgcaaagtgtcaaacacctcaaggagctataaacagcagtcttcctttccagaatgtacacccagtcacaataggggagtgtccaaagtatgtcaggagtgcaaaattaaggatggctacaggactaaggaacatcccatccattcaatccagaggtttgtttggagccattgccggtttcattgaaggggggtggactggaatggtagatggttggtatggttatcatcatcagaatgagcaaggatctgggtatgctgcagatcaaaaaagcacacaaaatgccattaacgggattacaaacaaggtgaattctgtaattgaaaaaatgaacactcaattcacagctgtgggcaaagaattcagcaaattggagagaaggatggaaaacttaaataaaaaagttgatgatgggtttctagacatttggacatataatgcagaattgttggttctactggaaaatgaaaggactttggatttccacgactccaacgtgaagaatctgtatgagaaagtgaaaagccaattaaagaataatgccaaagaaataggaaacgggtgttttgaattctatcacaaatgtaacgatgaatgcatggagagtgtgaaaaatggaacttatgactatccaaaatattccgaagaatcaaagttaaacagggagaaaattgatggagtgaaattggaatcaatgggagtctatcagattctggcgatctactcaacagtcgccagttccctggttcttttggtctccctgggggcaatcagcttctggatgtgttccaatgggtctttgcagtgtagaatatgcatctaa

SEQ ID NO: 31867 - RNA, 1701 nt, synthetic construct; identical to SEQ ID NO: 31161
  misc_feature 1..1701: note = hemagglutinin__InfluenzaA__ABJ09195
  source 1..1701: mol_type = other RNA

SEQ ID NO: 31868 - RNA, 1701 nt, synthetic construct; identical to SEQ ID NO: 31137
  misc_feature 1..1701: note = hemagglutinin__InfluenzaA__ABJ09206
  source 1..1701: mol_type = other RNA

SEQ ID NO: 31869 - RNA, 1701 nt, synthetic construct
  misc_feature 1..1701: note = hemagglutinin__InfluenzaA__ABJ09217
  source 1..1701: mol_type = other RNA
atgaagactatcattgctttgagctacattttatgtctggttttcgctcaaaaacttcccggaaatgacaacagcacagcaacgctgtgcctgggacaccatgcagtgccaaacggaacgctagtgaaaacaatcacgaatgatcaaattgaagtgactaatgctaccgagctggttcagagttcctcaacaggtagaatatgcgacagtcctcaccgaatccttgatggaaaaaactgcacactgatagatgctctattgggagaccctcattgtgatggcttccaaaataaggaatgggacctttttgttgaacgcagcaaagcttacagcaactgttacccttatgatgtgccggattatgcctcccttaggtcactagttgcctcatcaggcaccctagagtttatcaatgaagacttcaattggactggagtagctcaggatgggaaaagctatgcttgcaaaaggggatctgttaacagtttctttagtagattgaattggttgcacaaattagaatacaaatatccagcgctgaacgtgactatgccaaacaatggcaaatttgacaaattgtacatttggggggttcaccacccgagcacggacagtgaccaaaccagcctatatgttcgagcatcagggagagtcacagtctctaccaaaagaagccaacaaactgtaatcccgaatatcgggtctagaccctgggtaaggggtctgtccagtagaataagcatctattggacaatagtaaaaccgggagacatacttttgattaatagcacagggaatctaattgctcctcggggttacttcaaaatacgaaatgggaaaagctcaataatgaggtcagatgcacccattggcaactgcagttctgaatgcatcactccaaatggaagcattcccaatgacaaaccttttcaaaatgtaaacaggatcacatatggggcctgccccagatatgttaagcaaaacactctgaaattggcaacagggatgcggaatgtaccagagaaacaaactagaggcatattcggcgcaatcgcaggtttcatagaaaatggttgggagggaatggtagacggttggtacggtttcaggcatcaaaattctgagggcacaggacaagcagcagatcttaaaagcactcaagcagcaatcgaccaaatcaacgggaaactgaataggttaatcgagaaaacgaacgagaaattccatcaaatcgaaaaagaattctcagaagtagaagggagaattcaggacctcgagaaatatgttgaagacactaaaatagatctctggtcttacaacgcggagcttcttgttgccctggagaaccaacatacaattgatctaactgactcagaaatgaacaaactgtttgaaaaaacaaggaagcaactgagggaaaatgctgaggacatgggcaatggttgcttcaaaatataccacaaatgtgacaatgcctgcatagggtcaatcagaaatggaacttatgaccatgatgtatacagagacgaagcattaaacaaccggttccagatcaaaggtgttgagctgaagtcaggatacaaagattggatcctatggatttcctttgccatatcatgctttttgctttgtgttgttttgctggggttcatcatgtgggcctgccaaaaaggcaacattaggtgcaacatttgcatttga

SEQ ID NO: 31870 - RNA, 1701 nt, synthetic construct
  misc_feature 1..1701: note = hemagglutinin__InfluenzaA__ABJ09228
  source 1..1701: mol_type = other RNA
atgaagactatcattgctttgagctacattttatgtctggttttcgctcaaaaacttcccggaaatgacaacagcacggcaacgctgtgcctggggcaccatgcagtgccaaacggaacgctagtgaaaacaatcacgaatgaccaaattgaagtgaccaatgctactgagctggttcagagttcctcaacaggtggaatatgcgacagtcctcaccaaatccttgatggagaaaactgcacactaatagatgctctattgggagaccctcattgtgatggcttccaaaataaggaatgggacctttttgttgaacgcagcaaagcctacagcaactgttacccttatgatgtgccggattatgcctcccttaggtcactagttgcctcatccggcacactggagtttaacaatgaaagcttcaattggactggagtcgctcagaatggaacaagctctgcttgcaaaaggagatctaataaaagtttctttagtagattgaattggttgcaccaattaaaatacaaatacccagcactgaacgtgactatgccaaacaatgaaaaatttgacaaattgtacatttggggggttcaccacccgagtacggacagtgaccaaatcagcctatatgctcaagcaccagggagagtcacagtctctaccaaaagaagccaacaaactgtaatcccgaatatcggatctagaccctgggtaaggggtgtctccagcagaataagcatctattggacaatagtaaaaccgggagacatacttttgattaactgcacagggaatctaattgctcctcggggttacttcaaaatacgaagtgggaaaagctcaataatgaggtcagatgcatccattggcaaatgcaattctgaatgcatcactccaaatggaagcattcccaatgacaaaccatttcaaaatgtaaacaggatcacatatggggcctgtcccagatatgttaagcaaaacactctgaaattggcaacagggatgcggaatgtaccagagaaacaaactagaggcatattcggagcaatcgcgggtttcatagaaaatggttgggagggaatggtggacggttggtacggtttcaggcatcaaaattctgagggcacaggacaagcagcagatctcaaaagcactcaagcagcaatcaaccaaatcaacgggaaactgaataggttaatcgagaaaacgaacgagaaattccatcaaattgaaaaagaattctcagaagtggaagggagaattcaggacctcgagaaatatgttgaggacactaaaatagatctctggtcatacaacgcggagcttcttgttgctctggagaaccagcatacaattgatctaactgactcagaaatgaacaaactatttgaaagaacaaagaagcaactgagggaaaatgctgaggatatgggcaatggttgtttcaaaatataccacaaatgtgacaatgcctgcatagggtcaatcagaaatgggacttatgaccatgatgtatacagagacgaagcattaaacaaccggttccagatcaaaggtgttgagctgaagtcaggatacaaagattggatcctatggatttcctttgccatatcatgttttttgctttgtgttgtcttgctggggttcatcatgtgggcctgccaaaaaggcaacattaggtgcaacatttgcatttga

SEQ ID NO: 31871 - RNA, 1701 nt, synthetic construct
  misc_feature 1..1701: note = hemagglutinin__InfluenzaA__ABJ09239
  source 1..1701: mol_type = other RNA
atgaagactatcattgctttgagctacattttatgtctggttttcgctcaaaaacttcccggaaatgacaacagcacggcaacgctgtgcctggggcaccatgcagtgccaaacggaacgctagtgaaaacaatcacgaatgaccaaattgaagtgactaatgctactgagctggttcagagttcctcaacaggtggaatatgcgacagtcctcaccaaatcctagatggagaaaactgcacactaatagatgctctattgggagaccctcattgtgatggcttccaaaataaggaatgggacctttttgttgaacgcagcaaagcctacagcaactgttacccttatgatgtgccggattatgcctcccttaggtcactagttgcctcatccggcacaatggagtttaacaatgaaagcttcaattggactggagtcgctcagaatggaacaagctctgcttgcaaaaggagatctaataaaagtttctttagtagattgaattggttgcaccaattaaaatacaaatacccagcactgaacgtgactatgccaaacaatgaaaaatttgacaaattgtacatttggggggttcaccacccgagtacggacagtgaccaaatcagcctatatgctcaagcaccagggagagtcacagtctctaccaaaagaagccaacaaactgtaatcccgaatatcggatctagaccctgggtaaggggtgtctccagcagaataagcatctattggacaatagtaaaaccgggagacatacttttgattaactgcacagggaatctaattgctcctcggggttacttcaaaatacgaagtgggaaaagctcaataatgaggtcagatgcatccattggcaaatgcaattctgaatgcatcactccgaatggaagcattcccaatgacaaaccatttcaaaatgtaaacaggatcacatatggggcctgtcccagatatgttaagcaaaacactctgaaattggcaacagggatgcggaatgtaccagagaaacaaactagaggcatattcggcgcaatcgcgggtttcatagaaaatggttgggagggaatggtggacggttggtacggtttcaggcatcaaaattctgagggcacaggacaagcagcagatctcaaaagcactcaagcagcaatcaaccaaatcaacgggaaactgaataggttaatcgagaaaacgaacgagaaattccatcaaattgaaaaagaattctcagaagtggaagggagaattcaggacctcgagaaatatgttgaggacactaaaatagatctctggtcgtacaacgcggagcttcttgttgccctggagaaccagcatacaattgatctaactgactcagaaatgaacaaactgtttgaaagaacaaaaaagcaactgagggaaaatgctgaggatatgggcaatggttgtttcaaaatataccacaaatgtgacaatgcctgcatagggtcaatcagaaatgggacttatgaccatgatgtatacagagacgaagcattaaacaaccggttccagatcaaaggtgttgagctgaagtcaggatacaaagattggatcctatggatttcctttgccatatcatgttttttgctttgtgttgtcttgctggggttcatcatgtgggcctgccaaaaaggcaacattaggtgcaacatttgcatttga

SEQ ID NO: 31872 - RNA, 1701 nt, synthetic construct
  misc_feature 1..1701: note = hemagglutinin__InfluenzaA__ABJ09250
  source 1..1701: mol_type = other RNA
atgaagactatcattgctttgagctacattttatgtctggttttcgctcaaaaacttcccggaaatgacaacagcacggcaacgctgtgcctggggcaccatgcagtgccaaacggaacgctagtgaaaacaatcacgaatgaccaaattgaagtgactaatgctactgagctggttcagagttcctcaacaggtagaatatgcgacagtcctcaccaaatccttgatggagaaaactgcacactaatagatgctctattgggagaccctcattgtgatggcttccaaaataaggaatgggacctttttgttgaacgcagcaaagcctacagcaactgttacccttatgatgtgccggattatgcctcccttaggtcactagttgcctcatccggcacactggagtttaacaatgaaagcttcaattggactggagtcgctcagaatggaacaagctctgcttgcaaaaggagatctaataaaagtttctttagtagattgaattggttgcaccaattaaaatacaaatatccagcactgaacgtgactatgccaaacaatgaaaaatttgacaaattgtacatttgggggattcaccacccgagtacggacagtgaccaaatcagcctatatgctcaagcatcagggagagtcacagtctctaccaaaagaagccaacaaactgtaatcccgaatatcggatctagaccctgggtaaggggtgtctccagcagaataagcatctattggacaatagtaaaaccgggagacatacttttgattaacagcacagggaatctaattgctcctcggggttacttcaaaatacgaagtgggaaaagctcaataatgaggtcagatgcacccattggcaaatgcaattctgaatgcatcactccaaatggaagcattcccaatgacaaaccatttcaaaatgtaaacaggatcacatatggggcctgtcccagatatgttaagcaaaacactctgaaattggcaacagggatgcggaatgtaccagagaaacaaactagaggcatattcggcgcaatcgcgggtttcatagaaaatggttgggagggaatggtggacggttggtacggtttcaggcatcaaaattctgagggcacaggacaagcagcagatcttaaaagcactcaagcagcaatcaaccaaatcaacgggaaactgaataggttaatcgagaaaacgaacgagaaattccatcaaattgaaaaagaattctcagaagtagaagggagaattcaggacctcgagaaatatgttgaggacactaaaatagatctctggtcgtacaacgcggagcttcttgttgccctggagaaccaacatacaattgatctaactgactcagaaatgaacaaactgtttgaaagaacaaagaagcaactgagggaaaatgctgaggatatgggcaatggttgtttcaaaatataccacaaatgtgacaatgcctgcatagggtcaatcagaaatgaaacttatgaccatgatgtatacagagacgaagcattaaacaaccggttccagatcaaaggtgttgagctgaagtcaggatacaaagattggatcctatggatttcctttgccatatcatgttttttgctttgtgttgttttgctggggttcatcatgtgggcctgccaaaaaggcaacattaggtgcaacatttgcatttga

SEQ ID NO: 31873 - RNA, 1701 nt, synthetic construct
  misc_feature 1..1701: note = hemagglutinin__InfluenzaA__ABJ09261
  source 1..1701: mol_type = other RNA
atgaagactatcattgctttgagctacattttatgtctggttttcgctcaaaaacttcccggaaatgacaacagcacggcaacactgtgcctgggacaccatgcagtgccaaacggaacgctagtgaaaacaatcacgaatgaccaaattgaagtgactaatgctactgagctggttcagagttcctcaacaggtaaaatatgcgacagtcctcaccaaatccttgatggagaaaactgcacactaatagatgctctattgggagaccctcattgtgatggcttccaaaataaggaatgggacctttttgttgaacgcagcaaagcctacagcaactgttacccttatgatgtgccggattatgcctcccttaggtcactagttgcctcatccggcacactggagtttaacaatgaaagcttcaattggactggagtcgctcagaatggaacaagctctgcttgcaaaaggagatctattaaaagtttctttagtagattgaattggttgcaccaattaaaatacaaatatccagcactgaacgtgactatgccaaacaatgaaaaatttgacaaattgtacatttggggggttcatcacccgagtacggacagtgaccaaaccagcctatatgctcaagcatcagggagagtcacagtctctaccaaaagaagccaacaaactgtaatcccgaatatcggatctagaccctgggtaaggggtgtctcaagcagaataagcatctattggacaatagtaaaaccgggagacatacttttgattaacagcacagggaatctaattgctcctcggggttacttcaaaatacgaagtgggaaaagctcaataatgaggtcagatgcacccattggcaaatgcaattctgaatgcatcactccaaatggaagcattcccaatgacaaaccatttcaaaatgtaaacaggatcacatatggggcctgtcccagatatgttaagcaaaacactctgaaattggcaacagggatgcggaatgtaccagagaaacaaactagaggaatattcggcgcaatcgcgggtttcatagaaaatggttgggagggaatggtggacggttggtacggtttcaggcatcaaaattctgagggcacaggacaagcagcagatctcaaaagcactcaagcagcaatcaaccaaatcaacggaaaactgaataggttaatcgagaaaacaaacgagaaataccatcaaattgaaaaagaattctcagaagtagaagggagaattcaggacctcgagaaatatgttgaggacactaaaatagatctctggtcgtacaacgcggagcttcttgttgccctggagaaccaacatacaattgatctaactgactcagaaatgaacaaactgtttgaaagaacaaggaagcaactgagggaaaatgctgaggatatgggcaatggttgtttcaaaatataccacaaatgtgacaatgcctgcatagggtcaatcagaaatggaacttatgaccatgatgtatacagagacgaagcattaaacaaccggttccagatcaaaggtgttgagctgaagtcaggatacaaagattggatcctatggatttcctttgccatatcatgttttttgctttgtgttgttttgctggggttcatcatgtgggcctgccaaaaaggcaacattaggtgcaacatttgcatttga

SEQ ID NO: 31874 - RNA, 1701 nt, synthetic construct
  misc_feature 1..1701: note = hemagglutinin__InfluenzaA__ABJ09272
  source 1..1701: mol_type = other RNA
atgaagactatcattgctttgagctacattttatgtctggttttcgctcaaaaacttcccggaaatgacaacagcacggcaacgctgtgcctgggacaccatgcagtgccaaacggaacgctagtgaaaacaatcacgaatgaccaaattgaagtgactaatgctactgagctggttcagagttcctcaacaggtagaatatgcaacagtcctcaccaaatccttgatggagaaaactgcacactaatagatgctctattgggagaccctcattgtgatggcttccaaaataaggaatgggacctttttgttgaacgcagaaaagcctacagcaactgttacccttatgatgtgccggattatgcctcccttaggtcactagttgcctcatctggcacactggagtttaacaatgaaagcttcaactggactggagtcgctcagaatggaacaagctctgcttgcaaaaggagatctattaaaagtttctttagtagattgaattggttgcaccaattaaaatacaaatatccagcactgaacgtgactatgccaaacaatgaaaaatttgacaaattgtacatttggggggttcaccacccgagtacggacagtgaccaaatcagcctgtatgctcaagcatcagggagagtcacagtctctaccaaaagaagccaacaaactgtaatcccgaatatcggatctagaccctgggtaaggggtgtctccagcagaataagcatctattggacaatagtaaaaccgggagacatacttttgattaacagcacagggaatctaattgctcctcggggttacttcaaaatacgaagtgggaaaagctcaataatgaggtcagatgcacccattggcaaatgcaattctgaatgcatcactccaaatggaagcattcccaatgacaaaccatttcaaaatgtaaacaggatcacatatggggcctgtcccagatatgttaagcaaaacactctgaaattggcaacagggatgcggaatgtaccagagaaacaaactagaggcatattcggcgcaatcgcgggtttcatagaaaatggttgggagggaatggtggacggttggtacggtttcaggcatcaaaattctgagggcacaggacaagcagcagatcttaaaagcactcaagcagcaatcaaccaaatcaacgggaaactgaataggttaatcgagaaaacgaacgagaaattccatcaaattgaaaaagaattctcagaagtagaagggagaattcaggacctcgagaaagatgttgaggacactaaaatagatctctggtcgtacaacgcggagcttcttgttgccctggagaaccaacatacaattgatctaactgactcagaaatgaacaaactgtttgaaagaacaaagaagcaactgagggaaaatgctgaggatatgggcaatggttgtttcaaaatataccacaaatgtgacaatgcctgcatagggtcaatcagaaatggaacttatgaccatgatgtatacagagacgaagcattaaacaaccggttccagatcaaaggtgttgagctgaagtcaggatacaaagattggatcctatggatttcctttgccatatcatgttttttgctttgtgttgttttgctggggttcatcatgtgggcctgccaaaaaggcaacattaggtgcaacatttgcatttga

SEQ ID NO: 31875 - RNA, 1701 nt, synthetic construct
  misc_feature 1..1701: note = hemagglutinin__InfluenzaA__ABJ09294
  source 1..1701: mol_type = other RNA
atgaagactatcattgctttgagctacattttatgtctggttttcgctcaaaaacttcccgtaaatgacaacagcacggcaacgctgtgcctgggacaccatgcagtgccaaacggaacgctagtgaaaacaatcacgaatgaccacattgaagtgactaatgctactgagctggttcagagttcctcaacaggtagaatatgcgacagtcctcaccaaatccttgatggagaaaactgcacactaatagatgctctattgggagaccctcattgtgatggcttccaaaataaggaatgggacctttttgttgaacgcagcacagcctacagcaactgttacccttatgatgtgccggattatgcctcccttaggtcactagttgcctcatccggcacactggagtttaacaatgaaagcttcaattggactggagtcgctcagaatggaacaagctctgcttgcaaaaggagatctattaaaagtttctttagtagattgaattggttgcaccaattaaaatacaaatatccagcactgaacgtgactatgccaaacaatgaaaaatttgacaaattgtacatttggggggttcaccacccgagtacggacagtgaccaaatcagcctatatgctcaagcatcagggagagtcacagtctctaccaaaagaagccaacaaactgtaatcccgaatatcggatctagaccctgggtaaggggtgtctccagcagaataagcatctattggacaatagtaaaaccgggagacatacttttgattaacagcacagggaatctaattgctcctcggggttacttcaaaatacgaagtgggaaaagctcaataatgaggtcaaatgcacccattggcaaatgcaattctgaatgcatcactccaaatggaagcattcccaatgacaaaccatttcaaaatgtaaacaggatcacatatggggcctgtcccagatatgttaagcaaaacactctgaaattggcaacagggatgcggaatgtaccagagaaacaaactagaggcatattcggcgcaatcgcgggtttcatagaaaatggttgggagggaatggtggacggttggtacggtttcaggcatcaaaattctgagggcacaggacaagcagcagatcttaaaagcactcaagcagcaatcaaccaaatcaacgggaaactgaataggttaatcgagaaaacaaacgagaaattccatcaaattgaaaaagaattctcagaagtagaagggagaattcaggacctcgagaaatatgttgaggacactaaaatagatctctggtcgtacaacgcggagcttcttgttgccctggagaaccaacatacaattgatctaactgactcagaaatgaacaaactgtttgaaagaacaaggaagcaactgagggaaaatgctgaggatatgggcaatggttgtttcaaaatataccacaaatgtgacaatgcctgcatagggtcaatcagaaatggaacttatgaccatgatgtatacagagacgaagcattaaacaaccggttccagatcaaaggtgttgagctgaagtcaggatacaaagattggatcctatggatttcctttgccatatcatgttttttgctttgtgttgttttgcttgggttcatcatgtgggcctgccaaaaaggcaacattaggtgcaacatttgcatttga

SEQ ID NO: 31876 - RNA, 1701 nt, synthetic construct
  misc_feature 1..1701: note = hemagglutinin__InfluenzaA__ABJ09305
  source 1..1701: mol_type = other RNA
atgaagactatcattgctttgagctacattttatgtctggttttcgctcaaaaacttcccggaaatgacaacagcacggcaacgctgtgcctggggcaccatgcagtgccaaacggaacgctagtgaaaacaataacgaatgaccaaattgaagtgactaatgctactgagctggttcagagttcctcaacaggtagaatatgcgacagtcctcaccaaatccttgatggagaaaactgcacactaatagatgctctattgggagaccctcattgtgatggcttccaaaataaggaatgggacctttttgttgaacgcagcaaagcctacagcaactgttacccttatgatgtgccggattatgcctcccttaggtcactagttgcctcatccggcacactggagtttaacaatgaaagcttcaattggactggagtcgctcagaatggaacaagctctgcttgcaaaaggagatctaataaaagtttctttagtagattgaattggttgcaccaattaaaatacaaatatccagcactgaacgtgactatgccaaacaatgaaaaatttgacaaattgtacatttggggggttcaccacccgagtacggacagtgaccaaatcagcctatatgctcaagcatcagggagagtcacagtctctaccaaaagaagccaacaaactgtaatcccgaatatcggatctagaccctgggtaaggggtgtctccagcagaataagcatctattggacaatagtaaaaccgggagacatacttttgattaacagcacagggaatctaattgctcctcggggttacttcaaaatacgaagtgggaaaagctcaataatgaggtcagatgcacccattggcaaatgcaattctgaatgcatcactccaaatggaagcattcccaatgacaaaccatttcaaaatgtaaacaggatcacatatggggcctgtcccagatatgttaagcaaaacactctgaaattggcaacagggatgcggaatgtaccagagaaacaaactagaggcatattcggcgcaatcgcgggtttcatagaaaatggttgggagggaatggtggacggttggtacggtttcaggcatcaaaattctgagggcacaggacaagcagcagatcttaaaagcactcaagcagcaatcaaccaaatcaacgggaaactgaataggttaatcgagaaaacgaacgagaaattccatcaaattgaaaaagaattctcagaagtagaagggagaattcaggacctcgagaaatatgttgaggacactaaaatagatctctggtcgtacaacgcggagcttcttgttgccctggagaaccaacatacaattgatctaactgactcagaaatgaacaaactgtttgaaagaacaaagaagcaactgagggaaaatgctgaggatatgggcaatggttgtttcaaaatataccacaaatgtgacaatgcctgcatagggtcaatcagaaatgaaacttatgaccatgatgtatacagagacgaagcattaaacaaccggttccagatcaaaggtgttgagctgaagtcaggatacaaagattggatcctatggatttcctttgccatatcatgttttttgctttgtgttgttttgctggggttcatcatgtgggcctgccaaaaaggcaacattaggtgcaacatttgcatttga

SEQ ID NO: 31877 - RNA, 1701 nt, synthetic construct
  misc_feature 1..1701: note = hemagglutinin__InfluenzaA__ABJ09316
  source 1..1701: mol_type = other RNA
atgaagactatcattgctttgagctacattttatgtctggttttcgctcaaaaacttcccggaaatgacaacagcacggcaacgctgtgcctggggcaccatgcagtgccaaacggaacgctagtgaaaacaatcacgaatgaccaaattgaagtgactaatgctactgagctggttcagagttcctcaacaggtagaatatgcgacagtcctcaccaaatccttgatggagaaaactgcacactaatagatgctctattgggagaccctcattgtgatggcttccaaaataaggaatgggacctttttgttgaacgcagcaaagcctacagcaactgttacccttatgatgtgccggattatgcctcccttaggtcactagttgcctcatccggcacactggagtttaacaatgaaagcttcaattggactggagtcgctcagaatggaacaagctctgcttgcaaaaggagatctaataaaagtttctttagtagattgaattggttgcaccaattaaaatacaaatacccagcactgaacgtgactatgccaaacaatgaaaaatttgacaaattgtacatttggggggttcaccacccgagtacagacagtgaccaaatcagcctatatgctcaagcatcagggagagtcacagtctctaccaaaagaagccaacaaactgtaatcccgaatatcggatctagacactgggtaaggggtgtctccagcagaataagcatctattggacaatagtaaaaccgggagacatacttttgattaacagcacagggaatctaattgctcctcggggttacttcaaaatacgaagtgggaaaagctcaataatgaggtcagatgcatccattggcaaatgcaattctgaatgcatcactccaaatggaagcattcccaatgacaaaccatttcaaaatgtaaacaggatcacatatggggcctgtcccagatatgttaagcaaaacactctgaaattggcaacagggatgcggaatgtaccagagaaacaaactagaggcatattcggcgcaatcgcgggtttcatagaaaatggttgggagggaatggtggacggttggtacggtttcaggcatcaaaattctgagggcacaggacaagcagcagatcttaaaagcactcaagcagcaatcaaccaaatcaacgggaaactgaataggttaatcgagaaaacgaacgagaaattccatcaaattgaaaaagaattctcagaagtagaagggagaattcaggacctcgagaaatatgttgaggacactaaaatagatctctggtcgtacaacgcggagcttcttgttgccctggagaaccaacatacaattgatctaactgactcagaaatgaacaaactgtttgaaagaacaaagaagcaactgagggaaaatgctgaggatatgggcaatggttgtttcaaaatataccacaaatgtgacaatgcctgcatagggtcaatcagaaatggaacttatgaccatgatgtatacagagacgaagcattaaacaaccggttccagatcaaaggtgttgagctgaagtcaggatacaaagattggatcctatggatttcctttgccatatcatgttttttgctttgtgttgttttgctggggttcatcatgtgggcctgccaaaaaggcaacattaggtgcaacatttgcatttga

SEQ ID NO: 31878 - RNA, 1701 nt, synthetic construct
  misc_feature 1..1701: note = hemagglutinin__InfluenzaA__ABJ09338
  source 1..1701: mol_type = other RNA
atgaagactatcattgctttgagctacattttatgtctggttttcgctcaaaaacttcccggaaatgacaacagcacggcaacgctgtgcctggggcaccatgcagtgccaaacggaacgctagtgaaaacaatcacgaatgaccaaattgaagtgactaatgctactgagctggttcagagttcctcaacaggtggaatatgcgacagtcctcaccaaatccttgatggagaaaactgcacactaatagatgctctattgggagaccctcattgtgatggcttccaaaataaggaatgggacctttttgttgaacgcagcaaagcctacagcaactgttacccttatgatgtgccggattatgcctcccttaggtcactagttgcctcatccggcacactggagtttaacaatgaaagcttcaattggactggagtcgctcagaatggaacaagctctgcttgcaaaaggagatctaataaaagtttctttagtagattgaattggttgcaccaattaaaatacaaatacccagcactgaacgtgactatgccaaacaatgaaaaatttgacaaattgtacatttggggggttcaccacccgagtacggacagtgaccaaatcagcctatatgctcaagcaccagggagagtcacagtctctaccaaaagaagccaacaaactgtaatcccgaatatcggatctagaccctgggtaaggggtgtctccagcagaataagcatctattggacaatagtaaaaccgggagacatacttttgattaactgcacagggaatctaattgctcctcggggttacttcaaaatacgaagtgggaaaagctcaataatgaggtcagatgcatccattggcaaatgcaattctgaatgcatcactccaaatggaagcattcccaatgacaaaccatttcaaaatgtaaacaggatcacatatggggcctgtcccagatatgttaagcaaaacactctgaaattggcaacagggatgcggaatgtaccagagaaacaaactagaggcatattcggcgcaatcgcgggtttcatagaaaatggttgggagggaatggtggacggttggtacggtttcaggcatcaaaattctgagggcacaggacaagcagcagatctcaaaagcactcaagcagcaatcaaccaaatcaacgggaaactgaataggttaatcgagaaaacgaacgagaaattccatcaaattgaaaaagaattctcagaagtggaagggagaattcaggacctcgagaaatatgttgaggacactaaaatagatctctggtcgtacaacgcggagcttcttgttgccctggagaaccagcatacaattgatctaactgactccgaaatgaacaaactgtttgaaagaacaaagaagcaactgagggaaaatgctgaggatatgggcaatggttgtttcaaaatataccacaaatgtgacaatgcctgcatagggtcaatcagaaatgggacttatgaccatgatgtatacagagacgaagcattaaacaaccggttccagatcaaaggtgttgagctgaagtcaggatacaaagattggatcctatggatttcctttgccatatcatgttttttgctttgtgttgtcttgctggggttcatcatgtgggcctgccaaaaaggcaacattaggtgcaacatttgcatttga

SEQ ID NO: 31879 - RNA, 1701 nt, synthetic construct
  misc_feature 1..1701: note = hemagglutinin__InfluenzaA__ABJ09349
  source 1..1701: mol_type = other RNA
atgaagactatcattgctttgagctacattttatgtctggttttcgctcaaaaacttcccggaaatgacaacagcacggcaacgctgtgcctggggcaccatgcagtgccaaacggaacgctagtgaaaacaatcacgaatgaccaaattgaagtgactaatgctactgagctgattcagagttcctcaacaggtggaatatgcgacagtcctcaccaaatccttgatggagaaaactgcacactaatagatgctctattgggagaccctcattgtgatggcttccaaaataaggaatgggacctttttgttgaacgcagcaaagcctacagcaactgttacccttatgatgtgccggattatgcctcccttaggtcactagttgcctcatccggcacactggagtttaacaatgaaagcttcaattggactggagtcgctcagaatggaacaagctctgcttgcaaaaggagatctaataaaagtttctttagtagattgaattggttgcaccaattaaaatacaaatacccagcactgaacgtgactatgccaaacaatgaaaaatttgacaaattgtacatttggggagttcaccacccgagtacggacagtgaccaaatcagcctatatgctcaagcaccagggagagtcacagtctctaccaaaagaagccaacaaactgtaatcccgaatatcggatctagaccctgggtaaggggtgtctccagcagaataagcatctattggacaatagtaaaaccgggagacatacttttgattaactgcacagggaatctaattgctcctcggggttacttcaaaatacgaagtgggaaaagctcaataatgaggtcagatgcatccattggcaaatgcaattctgaatgcatcactccaaatggaagcattcccaatgacaaaccatttcaaaatgtaaacaggatcacatatggggcctgtcccagatatgttaagcaaaacactctgaaattggcaacagggatgcggaatgtaccagagaaacaaactagaggcatattcggcgcaatcgcgggtttcatagaaaatggttgggagggaatggtggacggttggtacggtttcaggcatcaaaattctgagggcacaggacaagcagcagatctcaaaagcactcaagcagcaatcaaccaaatcaacgggaaactgaataggttaatcgagaaaacgaacgagaaattccatcaaattgaaaaagaattctcagaagtggaagggagaattcaggacctcgagaaatatgttgaggacactaaaatagatctctggtcgtacaacgcggagcttcttgttgccctggagaaccagcatacaattgatctaactgactcagaaatgaacaaactgtttgaaagaacaaagaagcaactgagggaaaatgctgaggatatgggcaatggttgtttcaaaatataccacaaatgtgacaatgcctgcatagggtcaatcagaaatgggacttatgaccatgatgtatacagagacgaagcattaaacaaccggttccagatcaaaggtgttgagctgaagtcaggatacaaagattggatcctatggatttcctttgccatatcatgttttttgctttgtgttgtcttgctggggttcatcatgtgggcctgccaaaaaggcaacattaggtgcaacatttgcatttga

SEQ ID NO: 31880 - RNA, 1701 nt, synthetic construct
  misc_feature 1..1701: note = hemagglutinin__InfluenzaA__ABJ09360
  source 1..1701: mol_type = other RNA
atgaagactatcattgctttgagctacattttatgtctggttttcgctcaaaaacttcccggaaatgacaacagcacggcaacgctgtgcctggggcaccatgcagtgccaaacggaacgctagtgaaaacaatcacgaatgatcaaattgaagtgactaatgctactgagctggttcagagttcctcaacaggtggaatatgcgacagtcctcaccaaatccttgatggagaaaactgcacactaatagatgctctattgggagaccctcattgtgatggcttccaaaataaggaatgggacctttttgttgaacgcagcaaagcctacagcaactgttacccttatgatgtgccggattatgcctcccttaggtcactagttgcctcatccggcacactggagtttaacaatgaaagcttcaattggactggagtcgctcagaatggaacaagctctgcttgcaaaaggagatctaataaaagtttctttagtagattgaattggttgcaccaattaaaatacaaatacccagcactgaacgtgactatgccaaacaatgaaaaatttgacaaattgtacatttggggggttcaccacccgagtacggacagtgaccaaatcagcctatatgctcaagcaccagggagagtcacagtctctaccaaaagaagccaacaaactgtaatcccgaatatcggatctagaccctgggtaaggggtgtctccagcagaataagcatctattggacaatagtaaaaccgggagacatacttttgattaactgcacagggaatctaattgctcctcggggttacttcaaaatacgaagtgggaaaagctcaataatgaggtcagatgcatccattggcaaatgcaattctgaatgcatcactccaaatggaagcattcccaatgacaaaccatttcaaaatgtaaacaggatcacatatggggcctgtcccagatatgttaagcaaaacactctgaaattggcaacagggatgcggaatgtaccagagaaacaaactagaggcatattcggcgcaatcgcgggtttcatagaaaatggttgggagggaatggtggacggttggtacggtttcaggcatcaaaattctgagggcacaggacaagcagcagatctcaaaagcactcaagcagcaatcaaccaaatcaacgggaaactgaataggttaatcgagaaaacgaacgagaaattccatcaaattgaaaaagaattctcagaagtggaagggagaattcaggacctcgagaaatatgttgaggacactaaaatagatctctggtcgtacaacgcggagcttcttgttgccctggagaaccagcatacaattgatctaactgactcagaaatgaacaaactgtttgaaagaacaaagaagcaactgagggaaaatgctgaggatatgggcaatggttgtttcaaaatataccacaaatgtgacaatgcctgcatagggtcaatcagaaatgggacttatgaccatgatgtatacagagacgaagcattaaacaaccggttccagatcaaaggtgttgagctgaagtcaggatacaaagattggatcctatggatttcctttgccatatcatgttttttgctttgtgttgtcttgctggggttcatcatgtgggcctgccaaaaaggcaacattaggtgcaacatttgcatttga

SEQ ID NO: 31881 - RNA, 1701 nt, synthetic construct
  misc_feature 1..1701: note = hemagglutinin__InfluenzaA__ABJ09371
  source 1..1701: mol_type = other RNA
atgaagactatcattgctttgagctacattctatgtctggttttcgctcaaaaacttcccggaaatgacaacagcacggcaacgctgtgccttgggcaccatgcagtaccaaacggaacgatagtgaaaacaatcacgaatgaccaaattgaagttactaatgctactgagctggttcagagttcctcaacaggtggaatatgcgacagtcctcatcagatccttgatggagaaaactgcacactaatagatgctctattgggagaccctcagtgtgatggcttccaaaataagaaatgggacctttttgttgaacgcagcaaagcctacagcaactgttacccttatgatgtgccggattatgcctcccttaggtcactaattgcctcatccggcacactggagtttaacaatgaaagcttcaattggactggagtcactcaaaatggaacaagctctgcttgcaaaaggagatctaatagcagtttctttagtagattgaattggttgacccacttaaaattcaaatacccagcattgaacgtgactatgccaaacaatgaagaatttgacaaattgtacatttggggggttcaccacccgggtacatacaatgaccaaatcagcctatatgctcaagcatcaggaagaatcacagtctctaccaaaagaagccaacaaactgtaatcccgaatatcgggtctagactcagggtaagggatatccccagcagaataagcatctattggacaatagtaaaaccgggagacatacttttgattaacagcacagggaatctaattgctcctcggggttacttcaaaatacgaagtgggaaaagctcaataatgagatcagatgcacccattggcaaatgcaattctgaatgcatcactccaaatggaagcattcccaatgacaaaccatttcaaaatgtaaacaggatcacatatggggcctgtcccagatatgttaagcaaaacactctgaaattggcaacagggatgcgaaatgtaccagagaaacaaactagaggcatatttggcgcaatcgcgggtttcatagaaaatggttgggagggaatggtggatggttggtacggtttcaggcatcaaaattctgagggaataggacaagcagcagatctcaaaagcactcaagcagcaatcgaccaaatcaatgggaagctgaataggttgatcgggaaaaccaacgagaaattccatcagattgaaaaagaattctcagaagtagaagggagaattcaggacctcgagaaatatgttgaggacactaaaatagatctctggtcatacaacgcggagcttcttgttgccctagagaaccaacatacaattgatctaactgactcagaaatgaacaaactgtttgaaagaacaaagaagcaactgagggaaaatgctgaggatatgggcaatggttgtttcaaaatataccacaaatgtgacaatgcctgcatagggtcaatcagaaatggaacttatgaccatgatgtatacagagatgaagcattaaacaaccggttccagatcaaaggtgttgagctgaagtcaggatacaaagattggatcctatggatttcctttgccatatcatgttttttgctttgtgttgctttgttggggttcatcatgtgggcctgccaaaaaggcaacattaggtgcaacatttgcatttga

SEQ ID NO: 31882 - RNA, 1701 nt, synthetic construct; identical to SEQ ID NO: 31137
  misc_feature 1..1701: note = hemagglutinin__InfluenzaA__ABJ09382
  source 1..1701: mol_type = other RNA

SEQ ID NO: 31883 - RNA, 1701 nt, synthetic construct
  misc_feature 1..1701: note = hemagglutinin__InfluenzaA__ABJ16587
  source 1..1701: mol_type = other RNA
atgaagactatcattgctttgagctacatttcatgtctggttttcgctcaaaaacttcccggaaatgacaacagcacggcaacgctgtgcctgggacaccatgcagtgccaaacggaacgctagtgaaaacaatcacgaatgaccaaattgaagtgactaatgctactgagctggttcagagttcctcaacaggtagaatatgcgacagtcctcaccaaatccttgatggagaaaactgcacactgatagatgctctattgggagacccacattgtgatggcttccaaaataaggaatgggacctttttgttgaacgcagcaaagcctacagcaactgttacccttatgatgtgccggattatgcctcccttaggtcactagttgcctcatccggcaccctggagtttaacaatgaaagcttcaattggactggagtcgctcagaatggaacaagctctgcttgcaaaaggagatctattaaaagtttctttagtagattgaattggttgcaccaattaaaatacagatatccagcactgaacgtgactatgccaaacaatgacaaatttgacaaattgtacatttggggggttcaccacccgagtacggacagtgaccaaaccagcctatatgcccaagcatcagggagagtcacagtctctaccaaaagaagccaacaaactgtaatcccaaatatcggatccagaccctgggtaaggggtgtctccagcagaataagcatctattggacaatagtaaaaccgggagacatacttttgattaacagcacagggaatctaattgctcctcggggttacttcaaaatacgaagtgggaaaagctcaataatgaggtcagatgcacccattggcaaatgcaattctgaatgcatcactccaaatggaagcattcccaatgacaaaccatttcaaaatgtaaacaggatcacatatggggcctgtcccagatatgttaagcaaaacactctgaaattggcaacagggatgcggaatgtaccagagaaacaaactagaggcatattcggcgcaatcgcgggtttcatagaaaatggttgggagggaatgatggacggttggtacggtttcaggcatcaaaattctgagggcacaggacaagcagcagatcttaaaagcactcaagcagcaatcaaccaaatcaacgggaaactgaataggttaatcgagaaaacgaacgagaaattccatcaaattgaaaaagaattctcagaagtagaagggagaattcaggacctcgagaaatatgttgaggacactaaaatagatctctggtcgtacaacgcggagcttcttgttgccctggagaaccaacatacaattgatctaactgactcagaaatgaacaaactgtttgaaagaacaaggaagcaactgagagaaaatgctgaggatatgggcaatggttgtttcaaaatataccacaaatgtgacaatgcctgcatagggtcaatcagaaatggaacttatgaccatgatgtatacagagacgaagcattaaacaaccggttccagatcaaaggtgttgagctgaagtcaggatacaaagattggatcctatggatttcctttgccatatcatgttttttgctttgtgttgttttgctggggttcattatgtgggcctgccaaaaaggcaacattaggtgcaacatttgcatttga

SEQ ID NO: 31884 - RNA, 1701 nt, synthetic construct
  misc_feature 1..1701: note = hemagglutinin__InfluenzaA__ABJ16598
  source 1..1701: mol_type = other RNA
atgaagactatcattgctttgagctacattttatgtctggttttcgctcaaaaacttcccggaaatgacaacagcacggcaacgctgtgcctgggacaccatgcagtgccaaacggaacgctagtgaaaacaatcacgaatgaccaaattgaagtgactaatgctactgagctggttcagagttcctcaacaggtagaatatgcaacagtcctcaccaaatccttgatggagaaaactgcacactaatagatgctctattgggagaccctcattgtgatggcttccaaaataaggaatgggacctttttgttgaacgcagcaaagcctacagcaactgttacccttatgatgtgccggattatgcctcccttaggtcactagttgcctcatctggcacactggagtttaacaatgaaagcttcaactggactggagtcgctcagaatggaacaagctctgcttgcaaaaggagatctattaaaagtttctttagtagattgaattggttgcaccaattaaaatacaaatatccagcactgaacgtgactatgccaaacaatgaaaaatttgacaaattgtacatttggggggttcaccacccgagtacggacagtgaccaaatcagcctgtatgctcaagcatcagggagagtcacagtctctaccaaaagaagccaacaaactgtaatcccaaatatcggatctagaccctgggtaaggggtgtctccagcagaataagcatctattggacaatagtaaaaccgggagacatacttttgattaacagcacagggaatctaattgctcctcggggttacttcaaaatacgaagtgggaaaagctcaataatgaggtcagatgcacccattggcaaatgcaattctgaatgcatcactccaaatggaagcattcccaatgacaaaccatttcaaaatgtaaacaggatcacatatggggcctgtcccagatatgttaagcaaaacactctgaaattggcaacagggatgcggaatgtaccagagaaacaaactagaggcatattcggcgcaatcgcgggtttcatagaaaatggttgggagggaatggtggacggttggtacggtttcaggcatcaaaattctgagggcacaggacaagcagcagatcttaaaagcactcaagcagcaatcaaccaaatcaacgggaaactgaataggttaatcgagaaaacgaacgagaaattccatcaaattgaaaaagaattctcagaagtagaagggagaattcaggacctcgagaaatatgttgaggacactaaaatagatctctggtcgtacaacgcggagcttcttgttgccctggagaaccaacatacaattgatctaactgactcagaaatgaacaaactgtttgaaagaacaaagaagcaactgagggaaaatgctgaggatatgggcaatggttgtttcaaaatataccacaaatgtgacaatgcctgcatagggtcaatcagaaatggaacttatgaccatgatgtatacagagacgaagcattaaacaaccggttccagatcaaaggtgttgagctgaagtcaggatacaaagattggatcctatggatttcctttgccatatcatgttttttgctttgtgttgttttgctggggttcatcatgtgggcctgccaaaaaggcaacattaggtgcaacatttgcatttga

SEQ ID NO: 31885 - RNA, 1701 nt, synthetic construct
  misc_feature 1..1701: note = hemagglutinin__InfluenzaA__ABJ16620
  source 1..1701: mol_type = other RNA
atgaagactatcattgctttgagctacattttatgtctggttttcgctcaaaaacttcccggaaatgacaacagcacggcaacgctgtgcctgggacaccatgcagtgccaaacggaacgctagtgaaaacaatcacgaatgaccaaattgaagtgactaatgctactgagctggttcagagttcctcaacaggtagaatatgcaacagtcctcaccaaatccttgatggagaaaactgcacactaatagatgctctattgggagaccctcattgtgatggcttccaaaataaggaatgggacctttttgttgaacgcaacaaagcctacagcaactgttacccttatgatgtgccggattatgcctcccttaggtcactagttgcctcatctggcacactggagtttaacaatgaaagcttcaactggactggagtcgctcagaatggaacaagctctgcttgcaaaaggagatctattaaaagtttctttagtagattgaattggttgcaccaattaaaatacaaatatccagcactgaacgtgactatgccaaacaatgaaaaatttgacaaattgtacatttggggggttcaccacccgagtacggacagtgaccaaatcagcctgtatgctcaagcatcagggagagtcacagtctctaccaaaagaagccaacaaactgtaatcccgaatatcggatctagaccctgggtaaggggtgtctccagcagaataagcatctattggacaatagtaaaaccgggagacatacttttgattaacagcacagggaatctaattgctcctcggggttacttcaaaatacgaagtgggaaaagctcaataatgaggtcagatgcacccattggcaaatgcaattctgaatgcatcactccaaatggaagcattcccaatgacaaaccatttcaaaatgtaaacaggatcacatatggggcctgtcccagatatgttaagcaaaacactctgaaattggcaacagggatgcggaatgtaccagagaaacaaactagaggcatattcggcgcaatcgcgggtttcatagaaaatggttgggagggaatggtggacggttggtacggtttcaggcatcaaaattctgagggcacaggacaagcagcagatcttaaaagcactcaagcagcaatcaaccaaatcaacgggaaactgaataggttaatcgagaaaacgaacaagaaattccatcaaattgaaaaagaattctcagaagtagaagggagaattcaggacctcgagaaatatgttgaggacactaaaatagatctctggtcgtacaacgcggagcttcttgttgccctggagaaccaacatacaattgatctaactgactcagaaatgaacaaactgtttgaaagaacaaagaagcaactgagggaaaatgctgaggatatgggcaatggttgtttcaaaatataccacaaatgtgacaatgcctgcatagggtcaatcagaaatggaacttatgaccatgatgtatacagagacgaagcattaaacaaccggttccagatcaaaggtgttgagctgaagtcaggatacaaagattggatcctatggatttcctttgccatatcatgttttttgctttgtgtcgttttgctggggttcatcatgtgggcctgccaaaaaggcaacattaggtgcaacatttgcatttga

SEQ ID NO: 31886 - RNA, 1701 nt, synthetic construct
  misc_feature 1..1701: note = hemagglutinin__InfluenzaA__ABJ16631
  source 1..1701: mol_type = other RNA
atgaagactatcattgctttgagctacatcctatgtctggttttcgctcaaaaacttcccggaaatgacaacagcacggcaacgctgtgccttgggcaccatgcagtaccaaacggaacgatagtgaaaacaatcacgaatgaccaaattgaagttactaatgctactgagctggttcagagttcctcaacaggtggaatatgcgacagtcctcatcagatccttgatggagaaaactgcacactaatagatgctctattgggagaccctcagtgtgatggcttccaaaataagaaatgggacctttttgttgaacgcagcaaagcctacagcaactgttacccttatgatgtgccggattatgcctcccttaggtcactaattgcctcatccggcacactggagtttaacaatgaaagcttcaattggactggagtcactcaaaatggaacaagctctgcttgcaaaaggagatctaatagcagtttctttagtagattgaattggttgacccacttaaaattcaaatacccagcattgaacgtgactatgccaaacaatgaagaatttgacaaattgtacatttggggggttcaccacccgggtacatacaatgaccaaatcagcctatatgctcaagcatcaggaagaatcacagtctctaccaaaagaagccaacaaactgtaatcccgaatatcgggtctagacccagggtaagggatatccccagcagaataagcatctattggacaatagtaaaaccgggagacatacttttgattaacagcacagggaatctaattgctcctcggggttacttcaaaatacgaagtgggaaaagctcaataatgagatcagatgcacccattggcaaatgcaattctgaatgcatcactccaaatggaagcattcccaatgacaaaccatttcaaaatgtaaacaggatcacatatggggcctgtcccagatatgttaagcaaaacactctgaaattggcaacagggatgcgaaatgtaccagagaaacaaactagaggcatatttggcgcaatcgcgggtttcatagaaaatggttgggagggaatggtggatggttggtacggtttcaggcatcaaaattctgagggaataggacaagcagcagatctcaaaagcactcaagcagcaatcgaccaaatcaatgggaagctgaataggttgatcgggaaaaccaacgagaaattccatcagattgaaaaagaattctcagaagtagaagggagaattcaggacctcgagaaatatgttgaggacactaaaatagatctctggtcatacaacgcggagcttcttgttgccctggagaaccaacatacaattgatctaactgactcagaaatgaacaaactgtttgaaaaaacaaagaagcaactgagggaaaatgctgaggatatgggcaatggttgtttcaaaatataccacaaatgtgacaatgcttgcatagggtcaatcagaaatggaacttatgaccatgatgtatacagagatgaagcattaaacaaccggttccagatcaaaggtgttgagctgaagtcaggatacaaagattggatcctatggatttcctttgccatatcatgttttttgctttgtgttgctttgttggggttcatcatgtgggcctgccaaaaaggcaacattaggtgcaacatttgcatttga

SEQ ID NO: 31887 - RNA, 1698 nt, synthetic construct
  misc_feature 1..1698: note = hemagglutinin__InfluenzaA__ABJ16664
  source 1..1698: mol_type = other RNA
atgaaagtaaaactactggttctgttatgtacatttacagctacatatgcagacacaatatgtataggctaccatgccaacaactcgaccgacactgttgacacagtacttgagaagaatgtgacagtgacacactctgtcaacctacttgaggacagtcacaatggaaaactatgtctgctaaaaggaatagccccactacaattgggtaactgcagcgttgccggatggatcttaggaaacccagaatgcgaattactgatttccaaggaatcatggtcctacattgtagaaacaccaaatcctgagaatggaacatgttacccagggcatttcgccgactatgaggagctgagggagcaattgagttcagtatcttcatttgagaggttcgaaatattccccaaagagagctcatggcccaaccacaccgtaaccggagtatcagcatcatgctcccataacgggaaaagcagtttttacagaaatttgctatggctgacggggaagaatggtttgtatccaaacctgagcaagtcctatgcaaacaacaaagagaaagaagtccttgtactgtggggtgttcatcacccgcctaacataggggaccaaagggccctctatcatacagaaaatgcttatgtctctgtagtgtcttcacattatagcagaagattcaccccagaaatagccaaaagacccaaggtgagagatcaggaaggaagaatcaactactactggactctgctggaacccggggatacaataatatttgaggcaaatggaaatctaatagcgccaaggtttgctttcgcactgagtagaggctttggatcaggaatcatcacctcaaatgcaccaatggatgaatgtgatgcgaagtgtcaaacacctcagggagctataaacagcagtcttcctttccagaatgtacacccagtcacaataggagagtgtccaaagtatgtcaggagtgcaaaattaagaatggttacaggactaaggaacatcccatccattcaatccagaggtttgtttggagccattgccggtttcattgaaggggggtggactggaatggtagatggttggtatggttatcaccatcagaatgagcaaggatctgggtatgctgcagatcaaaaaagcacacaaaatgccattaacgggattacaaacaaggtgaattctgtaattgagaaaatgaacactcaattcacagctgtgggcaaagaattcaacaaattggaaagaaggatggaaaacttaaataaaaaagttgatgatgggtttctagacatttggacatataacgcagaattgttggttctactggaaaatgaaaggactttggacttccatgactccaacgtgaagaatctgtatgagaaagtaaaaagccaattaaagaataatgccaaagaaataggaaacgggtgttttgaattctatcacaagtgtaacgatgaatgcatggagagtgtgaaaaatggaacttatgactatccaaaatattccgaagaatcaaagttaaacagggagagaattgatggagtgaaattggaatcaatgggagtctatcagattctggcgatctactcaacagtcgccagttccctggttcttttggtctccctgggggcaatcagcttctggatgtgttccaatgggtctttgcagtgtagaatatgcatctaa

SEQ ID NO: 31888 - RNA, 1698 nt, synthetic construct
  misc_feature 1..1698: note = hemagglutinin__InfluenzaA__ABJ16675
  source 1..1698: mol_type = other RNA
atgaaagtaaaactactggttctgttatgtacatttacagctacatatgcagacacaatatgtataggctaccatgccaacaactcgaccgacactgttgacacagtacttgagaagaatgtgacagtgacacactctgtcaacctacttgaggacagtcacaatggaaaactatgtctactaaaaggaatagccccactacaattgggtaattgcagcgttgccggatggatcttaggaaacccagaatgcgaattactgatttccaaggaatcatggtcctacattgtagaaacaccaaatcctgagaatggaacatgttacccagggtatttcgccgactatgaggagctgagggagcaattgagttcagtatcttcatttgagaggttcgaaatattccccaaagagagctcatggcccaaccacaccgtaaccggagtatcagcatcatgctcccataacgggaaaagcagtttttacagaaatttgctatggctgacggggaagaatggtttgtatccaaacctgagcaagtcctatgcaaacaacaaagagaaagaagtccttgtactgtggggtgttcatcacccgcctaacataggggaccaaagggccctctatcatacagaaaatgcttatgtctctgtagtgtcttcacattatagcagaagattcaccccagaaatagccaaaagacccaaggtgagagatcaggaaggaagaatcaactactactggactctgctggaacccggggatacaataatatttgaggcaaatggaaatctaatagcgccaaggtttgctttcgcactgagtagaggctttggatcaggaatcatcacctcaaatgcaccaatggatgaatgtgatgcgaagtgtcaaacacctcagggagctataaacagcagtcttcctttccagaatgtacacccagtcacaataggagagtgtccaaagtatgtcaggagtgcaaaattaagaatggttacaggactaaggaacatcccatccattcaatccagaggtttgtttggagccattgccggtttcattgaaggggggtggactggaatggtagatggttggtatggttatcaccatcagaatgagcaaggatctgggtatgctgcagatcaaaaaagcacacaaaatgccattaacgggattacaaacaaggtgaattctgtaattgagaaaatgaacactcaattcacagctgtgggcaaagaattcaacaaattggaaagaaggatggaaaacttaaataaaaaagttgatgatgggtttctagacatttggacatataacgcagaattgttggttctactggaaaatgaaaggactttggacttccatgactccaacgtgaagaatctgtatgagaaagtaaaaagccaattaaagaataatgccaaagaaataggaaacgggtgttttgaattctatcacaagtgtaacgatgaatgcatggagagtgtgaaaaatggaacttatgactatccaaaatattccgaagaatcaaagttgaacagggagagaattgatggagtgaaattggaatcaatgggagtctatcagattctggcgatctactcaacagtcgccagttccctggttcttttggtctccctgggggcaatcagcttctggatgtgttccaatgggtctttgcagtgtagaatatgcatctaa

SEQ ID NO: 31889 - RNA, 1698 nt, synthetic construct
  misc_feature 1..1698: note = hemagglutinin__InfluenzaA__ABJ16686
  source 1..1698: mol_type = other RNA
atgaaagtaaaactactggttctgttatgtacatttacagctacatatgcagacacaatatgtataggctaccatgccaacaactcaaccgacactgttgacacagtacttgagaagaatgtgacagtgacacactctgtcaacctacttgaggacagtcacaatggaaaactatgtctactaaaaggaatagccccattacaattgggtaattgcagcgttgccggatggatcttaggaaacccagaatgcgaattactgatttccaaggaatcatggtcctacattgtagaaacaccaaatcctgagaatggaacatgttacccagggtatttcgccgactatgaggaactgagggagcaattgagttcagtatcttcatttgagaggttcgaaatattccccaaagagagctcatggcccaaccacaccgtaaccggagtatcagcatcatgctcccataacgggaaaagcagtttttacagaaatttgctatggctgacggggaagaatggtttgtacccaaacctgagcaagtcctatgcaaacaacaaagagaaagaagtccttgtactatggggtgttcatcacccgcctaacataggggaccaaagggccctctatcatacagaaaatgcttatgtctctgtagtgtcttcacattatagcagaagattcaccccagaaatagccaaaagacccaaggtgagagatcaggaaggaagaatcaactactactggactctgctggaacccggggatacaataatatttgaggcaaatggaaatctaatagcgccaaggtttgctttcgcactgagtagaggctttggatcaggaatcatcacctcaaatgcaccaatggatgaatgtgatgcgaagtgtcaaacacctcaaggagctataaacagcagtcttcctttccagaatgtacacccagtcacaataggggagtgtccaaagtatgtcaggagtgcaaaattaaggatggctacaggactaaggaacatcccatccattcaatccagaggtttgtttggagccattgccggtttcattgaaggggggtggactggaatggtagatggttggtatggttatcatcatcagaatgagcaaggatctgggtatgctgcagatcaaaaaagcacacaaaatgccattaacgggattacaaacaaggtgaattctgtaattgagaaaatgaacactcaattcacagctgtgggcaaagaattcagcaaattggagagaaggatggaaaacttaaataaaaaagttgatgatgggtttctagacatttggacatataatgcagaattgttggttctactggaaaatgaaagaactttggatttccatgactccaacgtgaagaatctgtatgagaaagtgaaaagccaattaaagaataatgccaaagaaataggaaacgggtgttttgaattctatcacaaatgtaacgatgaatgcatggagagtgtgaaaaatggaacttatgactatccaaaatattccgaagaatcaaagttaaacagggagaaaattgatggagtgaaattggaatcaatgggagtctatcagattctggcgatctactcaacagtcgccagttccctggttcttttggtctccctgggggcaatcagcttctggatgtgttccaatgggtctttgcagtgtagaatatgcatctaa

SEQ ID NO: 31890 - RNA, 1701 nt, synthetic construct
  misc_feature 1..1701: note = hemagglutinin__InfluenzaA__ABJ16697
  source 1..1701: mol_type = other RNA
atgaagactatcattgctttgagctacattttatgtctggttttcgctcaaaaacttcccggaaatgacaacagcacggcaacgctgtgcctggggcaccatgcagtgccaaacggaacgctagtgaaaacaatcacgaatgaccaaattgaagtgactaatgctactgagctggttcagagttcctcaacaggtggaatatgcgacagtcctcaccaaatccttgatggagaaaactgcacactaatagatgctctattgggagaccctcattgtgatggcttccaaaataaggaatgggacctttttgttgaacgcagcaaagcctacagcaactgttacccttatgatgtgccggattatgcctcccttaggtcactagttgcctcatccggcacactggagtttaacaatgaaagcttcaattggactggagtcgctcagaatggaacaagctctgcttgcaaaaggagatctaataaaagtttctttagtagattgaattggttgcaccaattaaaatacaaatacccagcactgaacgtgactatgccaaacaatgaaaaatttgacaaattgtacatttggggggttcaccacccgagtacggacagtgaccaaatcagcctatatgctcaagcaccagggagagtcacagtctctaccaaaagaagccaacaaactgtaatcccgaatatcggatctagaccctgggtaaggggtgtctccagcagaataagcatctattggacaatagtaaaaccgggagacatacttttgattaactgcacagggaatctaattgctcctcggggttacttcaaaatacgaagtgggaaaagctcaataatgaggtcagatgcatccattggcaaatgcaattctgaatgcatcactccaaatggaagcattcccaatgacaaaccatttcaaaatgtaaacaggatcacatatggggcctgtcccagatatgttaagcaaaacactctgaaattggcaacagggatgcggaatgtaccagagaaacaaactagaggcatattcggcgcaatcgcgggtttcatagaaaatggttgggagggaatggtggacggttggtacggtttcaggcatcaaaattctgagggcacaggacaagcagcagatctcaaaagcactcaagcagcaatcaaccaaatcaacgggaaactgaataggttaatcgagaaaacgaacgagaaattccatcaaattgaaaaagaattctcagaagtggaagggagaattcaggacctcgagaaatatgttgaggacactaaaatagatctctggtcgtacaacgcggagcttcttgttgccctggagaaccagcatacaattgatctaactgactcagaaatgaacaaactgtttgaaagaacaaagaagcaactgagggaaaatgctgaggatatgggcaatggttgtttcaaaatataccacaaatgtgacaatgcctgcatagggtcaatcagaaatgggacttatgaccatgatgtatacagagacgaagcattaaacaaccggttccagatcaaaggtgttgagctgaagtcaggatacaaagattggatcctatggatttcctttgccatatcatgttttttgctttgtgctgtcttgctggggttcatcatgtgggcctgccaaaaaggcaacattagatgcaacatttgcatttga

SEQ ID NO: 31891 - RNA, 1701 nt, synthetic construct
  misc_feature 1..1701: note = hemagglutinin__InfluenzaA__ABJ16730
  source 1..1701: mol_type = other RNA
atgaaagcaaaactactagttctgttgtgtgcatttacagctacatatgcagacacaatatgtataggctaccatgcgaacaactcaactgacactgttgacacagtacttgagaagaacgtgacagtgacacactctgtcaacctacttgaggacagtcacaacggaaaactatgccgactaaaaggaacagccccactacaattgggtaattgcagcattgccggatggatcttaggaaatccagaatgcgaatcactgttttctaaggaatcatggtcttacattgcagaaacaccaaaccctaaaaatggaacatgttacccagggtatttcgccgactatgaggaactgagggagcaattgagctcagtatcatcattcgagagatttgaaatattccccaaggatagctcatggcccaaccacactgtaaccaaaggagtgacggcatcatgctcccataatgggaaaagcagcttttacaaaaatttgctatggctgacggagaagaatggcttgtacccaaatctgagcaagtcctatgtaaacaaaaagggaaaagaagtccttgtgctatggggtgttcatcacccgtctaacatgggggaccaacgggccatctatcataaagaaaatgcttatgtttctgtgttgtcttcacattatagcagaagattcaccccagaaatagcaagaagaccaaaagtaagagatcaagaagggagaattaactactactggactctgctggaacccggggacacaataatatttgaggcaaatggaaatctaatagcgccgtggtacgctttcgcactgagtagaggctttgggtcaggaatcatcatctcaaacgcatcaatgggtgaatgtgacgctaagtgtcaaacaccccaaggagctataaacagtagtctccccttccagaatgtacacccagtcacaataggagagtgtccaaagtatgtcaggagtacaaaattaaggatggttacaggactaaggaacgtcccatccattcaatccagaggtttgtttggagccattgccggtttcattgaaggagggtggactggaatgatagatggatggtatggttatcatcatcaaaatgaacaaggatctggctatgctgcggaccaaaaaagcacacaaaatgccattaatgggattacaaacaaggtgaattctataatcgagaaaatgaacactcaattcacagctgtaggcaaagaattcaacaaattagaaagaaggatggaaaacttaaataagaaagttgatgatggatttctggacatttggacatataatgcagaattgttagttctcctggaaaatgaaaggactttggattttcatgactcaaatgtgaagaacctgtatgagaaagtgaaaaaccaattgaagaataatgccaaagaaatagggaacgggtgttttgaattctatcacaagtgtaacaatgaatgcatggaaagtgtgaaaaatggaacttatgactatccaaaatattccaaagaatcaaagttaaacagggaaaaaattgatggagtgaaattggaatcaatgggagtctatcagattctggcgatctactcaactgtcgccagttcgctggtgcttttggtctccctgggggcaatcagcttctggatgtgttctaatgggtctttgcagtgtagaatatgcatctga

SEQ ID NO: 31892 - RNA, 1701 nt, synthetic construct
  misc_feature 1..1701: note = hemagglutinin__InfluenzaA__ABJ16741
  source 1..1701: mol_type = other RNA
atgaagactatcattgctttgagctacattttatgtctggttttcgctcaaaaacttcccggaaatgacaacagcacggcaacgctgtgcctggggcaccatgcagtgccaaacggaacgctagtgaaaacaatcacaaatgaccaaattgaagtgactaatgctactgagctggttcagagttcctcaacaggtggaatatgcgacagtcctcaccaaatccttgatggagaaaactgcacactaatagatgctctattgggagaccctcattgtgatggcttccaaaataaggaatgggacctttttgttgaacgcagcaaagcctacagcaactgttacccttatgatgtgccggattatgcctcccttaggtcactagttgcctcatccggcacactggagtttaacaatgaaagcttcaattggactggagtcgctcagaatggaacaagctctgcttgcaaaaggagatctaataaaggtttctttagtagattgaattggttgcaccaattaaaatacaaatacccagcactgaacgtgactatgccaaacaatgaaaaatttgacaaattgtacatttggggggttcaccacccgagtacggacagtgaccaaatcagcctatatgctcaagcaccagggagagtcacagtctctaccaaaagaagccaacaaactgtaatcccgaatatcggatctagaccctgggtaaggggtgtctccagcataataagcatctattggacaatagtaaaaccgggagacatacttttgattaactgcacagggaatctaattgctcctcggggttacttcaaaatacgaagtgggaaaagctcaataatgaggtcagatgcatccattggcaaatgcaattctgaatgcatcactccaaatggaagcattcccaatgacaaaccatttcaaaatgtaaacaggatcacatatggggcctgtcccagatatgttaagcaaaacactctgaaattggcaacagggatgcggaatgtaccagagaaacaaactagaggcatattcggcgcaatcgcgggtttcatagaaaatggttgggagggaatggtggacggttggtacggtttcaggcatcaaaattctgagggcacaggacaagcagcagatctcaaaagcactcaagcagcaatcaaccaaatcaacgggaaactgaataggttaatcgggaaaacgaacgagaaattccatcaaattgaaaaagaattctcagaagtggaagggagaattcaggacctcgagaaatatgttgaggacactaaaatagatctctggtcgtacaacgcggagcttcttgttgccctggagaaccagcatacaattgatctaactgactcagaaatgaacaaactgtttgaaagaacaaagaagcaactgagggaaaatgctgaggatatgggcaatggttgtttcaaaatataccacaaatgtgacaatgcctgcatagggtcaatcagaaatgggacttatgaccatgatgtatacagagacgaagcattaaacaaccggttccagatcaaaggtgttgagctgaagtcaggatacaaagattggatcctatggatttcctttgccatatcatgttttttgctttgtgttgtcttgctggggttcatcatgtgggcctgccaaaaaggcaacattaggtgcaacatttgcatttga

SEQ ID NO: 31893 - RNA, 1701 nt, synthetic construct
  misc_feature 1..1701: note = hemagglutinin__InfluenzaA__ABJ16752
  source 1..1701: mol_type = other RNA
atgaagactatcattgctttgagctacattttatgtctggttttcgctcaaaaacttcccggaaatgacaacagcacggcaacgctgtgcctggggcaccatgcagtgccaaacggaacgctagtgaaaacaatcacgaatgaccaaattgaagtgactaatgctactgagctggttcagagttcctcaacaggtggaatatgcgacagtcctcaccaaatccttgatggagaaaactgcacactaatagatgctctattgggagaccctcattgtgatggcttccaaaataaggaatgggacctttttgttgaacgcagcaaagcctacagcaactgttacccttatgatgtgccggattatgcctcccttaggtcactagttgcctcatccggcacactggagtttaacaatgaaagcttcaattggactggagtcgctcagaatggaacaagctctgcttgcaaaaggagatctaataaaagtttctttagtagattgaattggttgcaccaattaaaatacaaatacccagcactgaacgtgactatgccaaacaatgaaaaatttgacaaattgtacatttggggggttcaccacccgagtacggacagtgaccaaatcagcctatatgctcaagcaccagggagagtcacagtctctaccaaaagaagccaacaaactgtaatcccgaatatcggatctagaccctgggtaaggggtgtctccagcggaataagcatctattggacaatagtaaaaccgggagacatacttttgattaactgcacagggaatctaattgctcctcggggttacttcaaaatacgaagtgggaaaagctcaataatgaggtcagatgcatccattggcaaatgcaattctgaatgcatcactccaaatggaagcattcccaatgacaaaccatttcaaaatgtaaacaggatcacatatggggcctgtcccagatatgttaagcaaaacactctgaaattggcaacagggatgcggaatgtaccagagaaacaaactagaggcatattcggcgcaatcgcgggtttcatagaaaatggttgggagggaatggtggacggttggtacggtttcaggcatcaaaattctgagggcacaggacaagcagcagatctcaaaagcactcaagcagcaatcaaccaaatcaacgggaaactgaataggttaatcgagaaaacgaacgagaaattccatcaaattgaaaaagaattctcagaagtggaagggagaattcaggacctcgagaaatatgttgaggacactaaaatagatctctggtcgtacaacgcggagcttcttgttgccctggagaaccagcatacaattgatctaactgactcagaaatgaacaaactgtttgaaagaacaaagaagcaactgagggaaaatgctgaggatatgggcaatggttgtttcaaaatataccacaaatgtgacaatgcctgcatagggtcaatcagaaatgggacttatgaccatgatgtatacagagacgaagcattaaacaaccggttccagatcaaaggtgttgagctgaagtcaggatacaaagattggatcctatggatttcctttgccatatcatgttttttgctttgtgttgtcttgctggggttcatcatgtgggcctgccaaaaaggcaacattaggtgcaacatttgcatttga

SEQ ID NO: 31894 - RNA, 1701 nt, synthetic construct
  misc_feature 1..1701: note = hemagglutinin__InfluenzaA__ABJ16763
  source 1..1701: mol_type = other RNA
atgaagactatcattgctttgagctacattttatgtctggttttcgctcaaaaacttcccggaaatgacaacagcacggcaacgctgtgcctggggcaccatgcagtgccaaacggaacgctagtgaaaacaatcacgaatgaccaaattgaagtgactaatgctactgagctggttcagagttcctcaacaggtggaatatgcgacagtcctcaccaaatccttgatggagaaaactgcacactaatagatgctctattgggagaccctcattgtgatggcttccaaaataaggaatgggacctttttgttgaacgcagcaaagcctacagcaactgttacccttatgatgtgccggattatgcctcccttaggtcactagttgcctcatccggcacactggagtttaacaatgaaagcttcaattggactggagtcgctcagaatggaacaagctctgcttgcaaaaggagatctaataaaagtttctttagtagattgaattggttgcaccaattaaaatacaaatacccagcactgaacgtgactatgccaaacaatgaaaaatttgacaaattgtacatttggggggttcaccacccgagtacggacagtgaccaaatcagcctatatgctcaagcaccagggagagtcacagtctctaccaaaagaagccaacaaactgtaatcccgaatatcggatctagacactgggtaaggggtgtctccagcagaataagcatctattggacaatagtaaaaccgggagacatacttttgattaactgcacagggaatctaattgctcctcggggttacttcaaaatacgaagtgggaaaagctcaataatgaggtcagatgcatccattggcaaatgcaattctgaatgcatcactccaaatggaagcattcccaatgacaaaccatttcaaaatgtaaacaggatcacatatggggcctgtcccagatatgttaagcaaaacactctgaaattggcaacagggatgcggaatgtaccagagaaacaaactagaggcatattcggcgcaatcgcgggtttcatagaaaatggttgggagggaatggtggacggttggtacggtttcaggcatcaaaattctgagggcacaggacaagcagcagatctcaaaagcactcaagcagcaatcaaccaaatcaacgggaaactgaataggttaatcgagaaaacgaacgagaaattccatcaaattgaaaaagaattctcagaagtggaagggagaattcaggacctcgagaaatatgttgaggacactaaaatagatctctggtcgtacaacgcggagcttcttgttgccctggagaaccagcatacaattgatctaactgactcagaaatgaacaaactgtttgaaagaacaaagaagcaactgagggaaaatgctgaggatatgggcaatggttgtttcaaaatataccacaaatgtgacaatgcctgcatagggtcaatcagaaatgggacttatgaccatgatgtatacagagacgaagcattaaacaaccggttccagatcaaaggtgttgagctgaagtcaggatacaaagattggatcctatggatttcctttgccatatcatgttttttgctttgtgttgtcttgctggggttcatcatgtgggcctgccaaaaaggcaacattaggtgcaacatttgcatttga

SEQ ID NO: 31895 - RNA, 1701 nt, synthetic construct
  misc_feature 1..1701: note = hemagglutinin__InfluenzaA__ABJ16774
  source 1..1701: mol_type = other RNA
atgaagactatcattgctttgagctacattttatgtctggttttcgctcaaaaacttcccgtaaatgacaacagcacggcaacgctgtgcctgggacaccatgcagtgccaaacggaacgctagtgaaaacaatcacgaatgaccacattgaagtgactaatgctactgagctggttcagagttccccaacaggtagaatatgcgacagtcctcaccaaatccttgatggagaaaactgcacactaatagatgctctattgggagaccctcattgtgatggcttccaaaataaggaatgggacctttttgttgaacgcagcacagcctacagcaactgttacccttatgatgtgccggattatgcctcccttaggtcactagttgcctcatccggcacactggagtttaacaatgaaagcttcaattggactggagtcgctcagaatggaacaagctctgcttgcaaaaggagatctattaaaagtttctttagtagattgaattggttgcaccaattaaaatacaaatatccagcactgaacgtgactatgccaaacaatgaaaaatttgacaaattgtacatttggggggttcaccacccgagtacggacagtgaccaaatcagcctatatgctcaagcatcagggagagtcacagtctctaccaaaagaagccaacaaactgtaatcccgaatatcggatctggaccctgggtaaggggtgtctccagcagaataagcatctattggacaatagtaaaaccgggagacatacttttgattaacagcacagggaatctaattgctcctcggggttacttcaaaatacgaaatgggaaaagctcaataatgaggtcaaatacacccattggcaaatgcaattctgaatgcatcactccaaatggaagcattcccaatgacaaaccatttcaaaatgtaaacaggatcacatatggggcctgtcccagatatgttaagcaaaacactctgaaattggcaacagggatgcggaatgtaccagagaaacaaactagaggcatattcggcgcaattgcgggtttcatagaaaatggttgggaaggaatggtggacggttggtacggtttcaggcatcaaaattctgagggcacaggacaagcagcagatcttaaaagcactcaagctgcaatcaaccaaatcaacgggaaactgaataggttaatcgagaaaacaaacgagaaattccatcaaattgaaaaagaattctcagaagtagaagggagaattcaggacctcgagaaatatgttgaagacactaaaatagatctctggtcgtacaacgcggagcttcttgttgccctggagaaccaacatacaattgatctaactgactcagaaatgaacaaactgtttgaaagaacaaggaagcaactgagggaaaatgctgaggatatgggcaatggttgtttcaaaatataccacaaatgtgacaatgcctgcatagggtcaatcagaaatggaacttatgaccatgatgtatacagagacgaagcattaaacaaccggttccagatcaaaggtgttgagctgaagtcaggatacaaagattggatcctatggatttcctttgccatatcatgttttttgctttgtgttgttttgctggggttcatcatgtgggcctgccaaaaaggcaacattaggtgcaacatttgcatttga

SEQ ID NO: 31896 - RNA, 1701 nt, synthetic construct
  misc_feature 1..1701: note = hemagglutinin__InfluenzaA__ABJ16785
  source 1..1701: mol_type = other RNA
atgaagactatcattgctttgagctacattttatgtctggttttcgctcaaaaacttcccggaaatgacaacagcacggcaacgctgtgcctggggcaccatgcagtgccaaacggaacgctagtgaaaacaatcacgaatgaccaaattgaagtgactaatgctactgagctggttcagagttcctcaacaggtggaatatgcgacagtcctcaccaaatccttgatggagaaaactgcacactaatagatgctctattgggagaccctcattgtgatggcttccaaaataaggaatgggacctttttgttgaacgcagcaaagcctacagcaactgttacccttatgatgtgccggattatgcctcccttaggtcactagttgcctcatccggcacactggagtttaacaatgaaagcttcaattggactggagtcgctcagaatggaacaagctatgcttgcaaaaggagatctaataaaagtttctttagtagattgaattggttgcaccaattaaaatacaaatacccagcactgaacgtgactatgccaaacaatgaaaaatttgacaaattgtacatttggggggttcaccacccgagtacggacagtgaccaaatcagcctatatgctcaagcaccagggagagtcacagtctctaccaaaagaagccaacaaactgtaatcccgaatatcggatctagaccctgggtaaggggtgtctccagcagaataagcatctattggacaatagtaaaaccgggagacatacttttgattaactgcacagggaatctaattgctcctcggggttacttcaaaatacgaagtgggaaaagctcaataatgaggtcagatgcatccattggcaaatgcaattctgaatgcatcactccaaatggaagcattcccaatgacaaaccatttcaaaatgtaaacaggatcacatatggggcctgtcccagatatgttaagcaaaacactctgaaattggcaacagggatgcggaatgtaccagagaaacaaactagaggcatattcggcgcaatcgcgggtttcatagaaaatggttgggagggaatggtggacggttggtacggtttcaggcatcaaaattctgagggcacaggacaagcagcagatctcaaaagcactcaagcagcaatcaaccaaatcaacgggaaactgaataggttaatcgagaaaacgaacgagaaattccatcaaattgaaaaagaattctcagaagtggaagggagaattcaggacctcgagaaatatgttgaggacactaaaatagatctctggtcgtacaacgcggagcttcttgttgccctggagaaccagcatacaattgatctaactgactcagaaatgaacaaactgtttgaaagaacaaagaagcaactgagggaaaatgctgaggatatgggcaatggttgtttcaaaatataccacaaatgtgacaatgcctgcatagggtcaatcagaaatgggacttatgaccatgatgtatacagagacgaagcattaaacaaccggttccagatcaaaggtgttgagctgaagtcaggatacaaagattggatcctatggatttcctttgccatatcatgttttttgctttgtgttgtcttgctggggttcatcatgtgggcctgccaaaaaggcaacattaggtgcaacatttgcatttga

SEQ ID NO: 31897 - RNA, 1701 nt, synthetic construct
  misc_feature 1..1701: note = hemagglutinin__InfluenzaA__ABJ53438
  source 1..1701: mol_type = other RNA
atgaaagcaaaactactagtcctgttgtgtgcatttacagctacatatgcagacacaatatgtataggctaccatgcgaacaactcaaccgacactgttgacacagtacttgagaagaacgtgacagtgacacactctgtcaacctacttgaggacagtcacaacggaaaactatgccgactaaaaggaacagccccactacaattgggtaattgcagcgttgccggatggatcttaggaaacccagaatgcgaatcactgttttctaaggaatcatggtcctacattgcagaaacaccaaaccctgagaatggaacatgttacccagggtatttcgccgactatgaggaactgagggagcaattgagctcagtatcatcattcgagagattcgaaatattccccaaggaaagctcatggcccaaccacacagtaaccaaaggagtaacggcatcatgctcccataatgggaaaagcagtttttacaaaaatttgctatggctgacggaaaagaatggcttgtacccaaatctgagcaagtcctatgtaaacaacaaggagaaagaagtccttgtactatggggtgttcatcacccgtctaacataggggaccaaagggccatctatcatacagaaaatgcttatgtctctgtggtgtcttcacattatagcagaagattcaccccagaaatagcaaaaagacccaaagtaagagatcaagaagggagaattaactactactggactctgctggaacccggggacacaataatatttgaggcaaatggaaatctaatagcgccatggtacgctttcgcattgagtagaggctttgggtcaggaatcatcacctcaaacgcatcaatgggtgactgtgacgctaagtgtcaaacaccccaaggagctataaacagtagtcttcctttccagaatgtacacccagtcacaataggagagtgtcccaagtatgtcaggagtacaaaattaaggatggttacaggactaagaaacatcccatccattcaatctagaggtttgtttggagccattgccggtttcattgaaggggggtggactggaatgatagatggatggtatggttatcatcatcagaatgaacaaggatctggctatgctgcagacaaaaaaagcacacaaaatgccattgatgggattacaaacaaggtgaattctgtaatcgagaaaatgaacactcaattcacagctgtaggcaaagaattcaacaaattagagagaaggatggaaaacttaaataagaaagttgatgatggatttctggacatttggacatataatgcagagttgttggttctcctggaaaatgaaaggactttggattttcatgactcaaatgtgaagaatctgtatgagaaagtaaaaaaccaattgaagaataatgccaaagaaatcgggaacgggtgttttgaattctatcacaagtgtaacaatgaatgcatggaaagtgtgaaaaatggaacttatgactatccaaaatattccgaagaatcaaagttaaaaagggaaaaaattgatggagtgaaattggaatcaatgggagtctatcagattctggcgatctactcaactgtcgccagttcactggtgcttttggtctccctgggggcaatcagtttctggatgtgttctaatgggtctttgcagtgtagaatatgcatctga

SEQ ID NO: 31898 - RNA, 1698 nt, synthetic construct; identical to SEQ ID NO: 31246
  misc_feature 1..1698: note = hemagglutinin__InfluenzaA__ABJ53449
  source 1..1698: mol_type = other RNA

SEQ ID NO: 31899 - RNA, 1701 nt, synthetic construct
  misc_feature 1..1701: note = hemagglutinin__InfluenzaA__ABJ53471
  source 1..1701: mol_type = other RNA
atgaagactatcattgctttgagctacattctatgtctggttttcgctcaaaaaattcccggaaatgacaacagcacggcaacgctgtgccttgggcaccatgcagtaccaaacggaacgatagtgaaaacaatcacgaatgaccaaattgaagttactaatgctactgagctggttcagagttcctcaacaggtggaatatgcgacagtcctcatcagatccttgatggagaaaactgcacactaatagatgctctattgggagaccctcagtgtgatggcttccaaaataagaaatgggacctttttgttgaacgcagcaaagcctacagcaactgttacccttatgatgtgccggattatgcctcccttaggtcactagttgcctcatccggcacactggagtttaacaatgaaagcttcaattggactggagtcactcaaaatggaacaagctctgcttgcaaaaggggatctaataacagtttctttagtagattgaattggttgacccacttaaaattcaaatacccagcattgaacgtgactatgccaaacaatgaaaaatttgacaaattgtacatttggggggttcaccacccgggtacggacaatgaccaaatcttcctgtatgctcaagcatcaggaagaatcacagtctctaccaaaagaagccaacaaactgtaatcccgaatatcggatctagacccagagtaaggaatatccccagcagaataagcatctattggacaatagtaaaaccgggagacatacttctgattaacagcacagggaatctaattgctcctaggggttacttcaaaatacgaagtgggaaaagctcaataatgagatcagatgcacccattggcaaatgcaattctgaatgcatcactccaaatggaagcattcccaatgacaaaccatttcaaaatgtaaacaggatcacatatggggcctgtcccagatatgttaagcaaaacactctgaaattggcaacagggatgcgaaatgtaccagagaaacaaactagaggcatatttggcgcaatcgcgggtttcatagaaaatggttgggagggaatggtggatggttggtacggtttcaggcatcaaaattctgagggaataggacaagcagcagatctcaaaagcactcaagcagcaatcaatcaaatcaatgggaagctgaataggttgatcgggaaaaccaacgagaaattccatcagattgaaaaagaattctcagaagtagaagggagaattcaggacctcgagaaatatgttgaggacactaaaatagatctctggtcatacaacgcggagcttcttgttgccctggagaaccaacatacaattgatctaactgactcagaaatgaacaaactgtttgaaagaacaaagaagcaactgagggaaaatgctgaggatatgggcaatggttgtttcaaaatataccacaaatgtgacaatgcctgcataggatcaatcagaaatggaacttatgaccatgatgtgtacagagatgaagcattaaacaaccggttccagatcaaaggcgttgagctgaagtcaggatacaaagattggatcctatggatttcctttgccatatcatgttttttgctttgtgttgctttgttggggttcatcatgtgggcctgccaaaaaggcaacattaggtgcaacatttgcatttga

SEQ ID NO: 31900 - RNA, 1701 nt, synthetic construct
  misc_feature 1..1701: note = hemagglutinin__InfluenzaA__ABJ53482
  source 1..1701: mol_type = other RNA
atgaagactatcattgctttgagctacattctatgtctggttttcgctcaaaaacttcccggaaatgacaacagcacggcaacgctgtgcctcgggcaccatgcagtaccaaacggaacgatagtgagaacaatcacgaatgaccaaattgaagttactaatgctactgagctggttcagagttcctcaacaggtgaaatatgcgacagccctcatcagatccttgatggagaaaactgcacactaatagatgctctattgggagaccctcagtgtgatggcttccaaaataagaaatgggacctttttgttgaacgcagcaaagcctacagcaactgttacccttatgatgtgccggattatgcctcccttaggtcactagttgcctcatccggcacactggagtttaacaatgagagcttcaattggactggagtcactcaaaatggaacaagctctgcttgcaaaaggagatctaataacagtttctttagtagattgaattggttgacccacttaaaattcaaatacccagcattgaacgtgactatgccaaacaatgaaaaatttgacaaattgtacatttggggggttcaccacccgggtacggacaatgaccaaatcttcctgtatgctcaagcatcaggaagaatcacagtctctaccaaaaggagccaacaaactgtaatcccgaatatcggatctagacccagagtaaggaatatccccagcagaataagcatctattggacaatagtaaaaccgggagacatacttttgattaacagcacagggaatctaattgctcctaggggttacttcaaaatacgaagtgggaaaagctcaataatgagatcagatgcacccattggcaaatgcaattctgaatgcatcactccaaatggaagcattcccaatgacaaaccatttcaaaatgtaaacaggatcacatatggggcctgtcccagatatgttaagcaaaacactctgaaattggcaacagggatgcgaaatgtaccagagaaacaaactagaggcatatttggcgcaatcgcgggtttcatagaaaatggttgggagggaatggtggatggttggtacggtttcaggcatcaaaattctgagggaataggacaagcagcagatctcaaaagcactcaagcagcaatcaatcaaatcaatgggaagctgaataggttgatcgggaaaaccaacgagaaattccatcagattgaaaaagaattctcagaagtagaagggagaattcaggacctcgagaaatatgttgaggacactaaaatagatctctggtcatacaacgcggagcttcttgttgccctggagaaccaacatacaattgatctaactgactcagaaatgaacaaactgtttgaaagaacaaagaagcaactgagggaaaatgctgaggatatgggcaatggttgtttcaaaatataccacaaatgtgacaatgcctgcataggatcaatcagaaatggaacttatgaccatgatgtatacagagatgaagcattaaacaaccggttccagatcaaaggcgttgagctgaagtcaggatacaaagattggatcctatggatttcctttgccatatcatgttttttgctttgtgttgctttgttggggttcatcatgtgggcctgccaaaaaggcaacattaggtgcaacatttgcatttga

SEQ ID NO: 31901 - RNA, 1698 nt, synthetic construct; identical to SEQ ID NO: 31736
  misc_feature 1..1698: note = hemagglutinin__InfluenzaA__ABJ53493
  source 1..1698: mol_type = other RNA

SEQ ID NO: 31902 - RNA, 1698 nt, synthetic construct
  misc_feature 1..1698: note = hemagglutinin__InfluenzaA__ABJ53504
  source 1..1698: mol_type = other RNA
atgaaagcaaaactactagtcctgttatgtacatttacagctacatatgcagacacaatatgtataggctaccatgccaacaactcaaccgacactgttgacacagtacttgagaagaatgtgacagtgacacactctgtcaacctacttgaggacagtcacaatggaaaactatgtctactaaaaggaatagccccactacaattgggtaattgcagcgttgccggatggatcttaggaaacccagaatgcgaatcactgatttctaaggaatcatggtcctacattgtagagacaccaaaccctgagaatggaacatgttacccagggtatttcgccgactatgaggaactgagggagcaattgagttcagtatcttcatttgagaggttcgaaatattccccaaagaaagctcatggcccaaccacaccgtaaccggagtatcggcatcatgctcccataatgggaaaagcagtttttacagaaatttgctatggctgacggagaagaatggcttgtacccaaatctgagcaagtcctatgtaaacaacaaggagaaagaagtccttgtactatggggtgttcatcacccgtctaacataggggtccaaagggccatctatcatacagaaaatgcttatgtctctgtagtgtcttcacattatagcagaagattcaccccagaaatagcaaaaagacccaaagtaagagatcaggaaggaagaatcaactactactggactctgctggaacccggggacacaataatatttgaggcaaatggaaatctaatagcgccatggtatgctttcgcactgagtagaggctttgagtcaggaatcatcacctcaaatgcaccaatgaatgaatgtgatgcaaagtgtcaaacacctctgggagctataaacagtagtcttcctttccagaatgtacacccagtcacaataggagagtgtccaaagtatgtcaggagtgcaaaattaaggatggttacaggactaaggaacatcccatccattcaatccagaggtttgtttggagccattgccggtttcattgaaggggggtggactggaatgatagatgggtggtatggttatcatcatcagaatgagcaaggatctggctatgctgcagatcaaaaaagcacacaaaatgccattaacgggattacaaacaaggtgaattctgtaattgagaaaatgaacactcaattcacagctgtgggcaaagaattcaacaaattagaaagaaggatggaaaacttaaataaaaaagttgatgatggatttctagacatttggacatataatgcagaattgttggttctactggaaaatgaaaggactttggatttccatgactcaaatgtgaagaatctgtatgagaaagtaaaaagccaattaaagaataatgccaaagaaataggaaacgggtgttttgaattctatcacaagtgtaacaatgaatgcatggaaagtgtgaaaaatggaacttatgactatccaaaatattccgaagaatcaaagttaaacagggagaaaattgatggagtgaaattggaatcaatgggagtctatcagattctggcgatctactcaactgtcgccagttcactggttcttttagtctccctgggggcaatcagcttctggatgtgttccaatgggtctttgcagtgtagaatatgcatctga

SEQ ID NO: 31903 - RNA, 1701 nt, synthetic construct
  misc_feature 1..1701: note = hemagglutinin__InfluenzaA__ABJ53515
  source 1..1701: mol_type = other RNA
atgaaagcaaaactactagttctgttgtgtgcatttacagctacatatgcagacacaatatgtataggctaccatgcgaacaactcaactgacactgttgacacagtacttgagaagaacgtgacagtgacacactctgtcaacctacttgaggacagtcacaacggaaaactatgccgactaaaaggaacagccccactacaattgggtaattgcagcattgccggatggatcttaggaaatccagaatgcgaatcactgttttctaaggaatcatggtcttacattgcagaaacaccaaaccctaaaaatggaacatgttacccagggtatttcgccgactatgaggaactgagggagcaattgagctcagtatcatcattcgagagatttgaaatattccccaaggatagctcatggcccaaccacactgtaaccaaaggagtgacggcatcatgctcccataatgggaaaagcagcttttacaaaaatttgctatggctgacggagaagaatggcttgtacccaaatctgagcaagtcctatgtaaacaaaaagggaaaagaagtccttgtgctatggggtgttcatcacccgtctaacatgggggaccaacgggccatctatcataaagaaaatgcttatgtttctgtgttgtcttcacattatagcagaagattcaccccagaaatagcaagaagacccaaagtaagagatcaagaagggagaattaactactactggactctgctggaacccggggacacaataatatttgaggcaaatggaaatctaatagcgccgtggtacgctttcgcactgagtagaggctttgggtcaggaatcatcatctcaaacgcatcaatgggtgaatgtgacgctaagtgtcaaacaccccaaggagctataaacagtagtctccccttccagaatgtacacccagtcacaataggagagtgtccaaagtatgtcaggagtacaaaattaaggatggttacaggactaaggaacgtcccatccattcaatccagaggtttgtttggagccattgccggtttcattgaaggagggtggactggaatgatagatggatggtatggttatcatcatcaaaatgaacaaggatctggctatgctgcggaccaaaaaagcacacaaaatgccattaatgggattacaaacaaggtgaattctataatcgagaaaatgaacacacaattcacagctgtaggcaaagaattcaacaaattagaaagaaggatggaaaacttaaataagaaagttgatgatggatttctggacatttggacatataatgcagaattgttagttctcctggaaaatgaaaggactttggattttcatgactcaaatgtgaagaacctgtatgagaaagtgaaaaaccaattgaagaataatgccaaagaaatagggaacgggtgttttgaattctatcacaagtgtaacaatgaatgcatggaaagtgtgaaaaatggaacttatgactatccaaaatattccaaagaatcaaagttaaacagggaaaaaattgatggagtgaaattggaatcaatgggagtctatcagattctggcgatctactcaactgtcgccagttcgctggtgcttttggtctccctgggggcaatcagcttctggatgtgttctaatgggtctttgcagtgtagaatatgcatctga

SEQ ID NO: 31904 - RNA, 1701 nt, synthetic construct
  misc_feature 1..1701: note = hemagglutinin__InfluenzaA__ABK39962
  source 1..1701: mol_type = other RNA
atgaagactatcattgctttgagctacattttatgcctggttttcgctcaaaaacttcccggaaatgacaacagcacggcaacgctgtgcctggggcaccatgcagtgccaaacggaacgctagtgaaaacaatcacgaatgaccaaattgaagtaactaatgctactgagctggttcagagttcctcaacaggtagaatatgcgacagtcctcaccaaatccttgatggagaaaactgcacactaatagatgctctattgggagaccctcattgtgatggcttccaaaataaggaatgggacctttttgttgaacgcagcaaagcctacagcaactgttacccttatgatgtgccggattatgtctcccttaggtcactagttgcctcatcaggcacgctggagtttaacaatgaaagcttcaattggactggagtcgctcagaatggaacaagctctgcttgcaaaaggagatctgataaaagtttctttagtagattgaattggttgcaccaattaaaatacaaatatccagcactgaacgtgactatgccaaacaatgaaaaatttgacaaattgtacatttggggggtccaccacccgggtacagacagtgaccaaatcagcctatatgctcaagcatcagggagagtcacagtctctaccaaaagaagccaacaaactgtaatcccgaatatcggatctagaccctgggtaaggggtgtctccagcagaataagcatctattggacaatagtaaaaccgggagacatacttttgattaacagcacagggaatctaattgctcctcggggttacttcaaaatacgaagtgggaaaagctcaataatgaggtcagatgcacccattggcaaatgcaattctgaatgcatcactccaaatggaagcattcccaatgacaaaccatttcaaaatgtaaacaggatcacatatggggcctgtcccagatatgttaagcaaaaaactctgaaattggcaacagggatgcggaatgtgccagagaaacaaactagaggcatattcggtgcaatcgcgggcttcatagaaaatggttgggagggaatgatggacggttggtacggtttcaggcatcaaaattctgagggcacagggcaagcagcagatcttaaaagcactcaagcagcaatcaaccaaatcaacgggaaactgaataggttgattgagaaaacgaacgagaaattccatcaaattgaaaaagaattctcagaagtagaagggagaattcaggacctcgagaaatatgtcgaggacactaaaatagatctctggtcgtacaatgcggagcttcttgttgccctggagaaccaacatacaattgatctaactgactcagaaatgaacaaactgtttgaaagaacaaagaagcaactgagggaaaatgctgaggatatgggcaatggttgtttcaaaatataccacaaatgtgacaatgcctgcatagggtcaatcagaaatggaacttatgaccatgatgtatacagagacgaagcattgaacaaccggttccagatcaaaggtgttgagctgaagtcaggatacaaagattggatcctatggatttcctttgccatatcatgttttttgctttgtattgttttactggggttcatcatgtgggcctgccaaaaaggcaacattaggtgcaacatttgcatttga

SEQ ID NO: 31905 - RNA, 1701 nt, synthetic construct
  misc_feature 1..1701: note = hemagglutinin__InfluenzaA__ABK39973
  source 1..1701: mol_type = other RNA
atgaagactatcattgctttgagctacattctatgtctggttttcgctcaaaaacttcccggaaatgacaacagcacggcaacgctgtgccttgggcaccatgcagtaccaaacggaacgatagtgaaaacaatcacgaatgaccaaattgaagttactaatgctactgagctggttcagagttcctcaacaggtggaatatgcgacagtcctcatcagatccttgatggagaaaactgcacactaatagatgctctattgggagaccctcagtgtgatggcttccaaaataagaaatgggacctttttgttgaacgcagcaaagcctacagcaactgttacccttatgatgtgccggattatgcctcccttaggtcactagttgcctcatccggcacactggagtttaacaatgaaagcttcaattggactggagtcactcaaaatggaacaagctctgcttgcaaaaggagatctaataacagtttctttagtagattgaattggttgacccacttaaaattcaaatacccagcattgaacgtgactatgccaaacaatgaaaaatttgacaaattgtacatttggggggttcaccacccgggtacggacaatgaccaaatcttcctgtatgctcaagcatcaggaagaatcacagtctctaccaaaagaagccaacaaactgtaatcccgaatatcggatctagacccagagtaaggaatatccccagcagaataagcatctattggacaatagtaaaaccgggagacatacttttgattaacagcacagggaatctaattgctcctaggggttacttcaaaatacgaagtgggaaaagctcaataatgagatcagatgcacccattggcaaatgcaattctgaatgcatcactccaaatggaagcattcccaatgacaaaccatttcaaaatgtaaacaggatcacatatggggcctgtcccagatatgttaagcaaaacactctgaaattggcaacagggatgcgaaatgtaccagagaaacaaactagaggcatatttggcgcaatcgcgggtttcatagaaaatggttgggagggaatggtggatggttggtacggtttcaggcatcaaaattctgagggaataggacaagcagcagatctcaaaagcactcaagcagcaatcaatcaaatcaatgggaagctgaataggttgatcgggaaaaccaacgagaaattccatcagattgaaaaagaattctcagaagtagaagggagaattcaggacctcgagaaatatgttgaggacactaaaatagatctctggtcatacaacgcggagcttcttgttgccctggagaaccaacatacaattgatctaactgactcagaaatgaacaaactgtttgaaagaacaaagaagcaactgagggaaaatgctgaggatatgggcaatggttgtttcaaaatatatcacaaatgtgacaatgcctgcataggatcaatcagaaatggaacttatgaccatgatgtatacagagatgaagcattaaacaaccggttccagatcaaaggcgttgagctgaagtcaggatacaaagattggatcctatggatttcctttgccatatcatgttttttgctttgtgttgctttgttggggttcatcatgtgggcctgccaaaaaggcaacattaggtgcaacatttgcatttga

SEQ ID NO: 31906 - RNA, 1701 nt, synthetic construct
  misc_feature 1..1701: note = hemagglutinin__InfluenzaA__ABK39984
  source 1..1701: mol_type = other RNA
atgaagactatcattgctttgagctacattctatgtctggttttcgctcaaaaacttcccggaaatgacaacagcagggcaacgctgtgccttgggcaccatgcagtaccaaacggaacgatagtgaaaacaatcacgaatgaccaaattgaagttactaatgctactgagctggttcagagttcctcaacaggtggaatatgcgacagtcctcatcagatccttgatggagaaaactgcacactaatagatgctctattgggagaccctcagtgtgatggcttccaaaataagaaatgggacctttttgttgaacgcagcaaagcctacagcaactgttacccttatgatgtgccggattatgcctcccttaggtcactagttgcctcatccggcacactggagtttaacaatgaaagcttcaattggactggagtcactcaaaatggaacaagctctgcttgcaaaaggagatctaataacagtttctttagtagattgaattggttgacccacttaaaattcaaatacccagcattgaacgtgactatgccaaacaatgaaaaatttgacaaattgtacatttggggggttcaccacccgggtacggacaatgaccaaatcttcctgtatgctcaagcatcaggaagaatcacagtctctaccaaaagaagccaacaaactgtaatcccgaatatcggatctagacccagagtaaggaatatccccagcagaataagcatctattggacaatagtaaaaccgggagacatacttttgattaacagcacagggaatctaattgctcctaggggttacttcaaaatacgaagtgggaaaagctcaataatgagatcagatgcacctattggcaaatgcaactctgaatgcatcactccaaatggaagcattcccaatgacaaaccatttcaaaatgtaaacaggatcacatatggggcctgtcccagatatgttaagcaaaacactctgaaattggcaacagggatgcgaaatgtaccagagaaacaaactagaggcatatttggcgcaatcgcgggtttcatagaaaatggttgggagggaatggtggatggttggtacggtttcaggcatcaaaattctgagggaataggacaagcagcagatctcaaaagcactcaagcagcaatcgatcaaatcaatgggaagctgaataggttgatcgggaaaaccaacgagaaattccatcagattgaaaaagaattctcagaagtagaagggagaattcaggacctcgagaaatatgttgaggacactaaaatagatctctggtcatacaacgcggagcttcttgttgccctggagaaccaacatacaattgatctaactgactcagaaatgaacaaactgtttgaaagaacaaagaagcaactgagggaaaatgctgaggatatgggcaatggttgtttcaaaatataccacaaatgtgacaatgcctgcataggatcaatcagaaatggaacttatgaccatgatgtatacagagatgaagcattaaacaaccggttccagatcaagggcgttgagctgaagtcaggatacaaagattggatcctatggatttcctttgccatatcatgttttttgctttgtgttgctttgttggggttcatcatgtgggcctgccaaaaaggcaacattaggtgcaacatttgcatttga

SEQ ID NO: 31907 - RNA, 1698 nt, synthetic construct
  misc_feature 1..1698: note = hemagglutinin__InfluenzaA__ABK39995
  source 1..1698: mol_type = other RNA
atgaaagtaaaactactgatcctgttatgtacatttacagctacatatgcagacacaatatgtataggctaccatgccaacaactcaaccgacactgttgacacagtacttgagaagaatgtgacagtgacacactctgtcaacctacttgaggacagtcacaatggaaaactgtgcctactaaaaggaatagcccccctacaattgggtaattgcagcgttgccggatggatcttaggaaacccagaatgcgaattactgatttccaaggaatcatggtcctacattgtagaaacaccaaatcctgagaatggagcatgttacccagggtatttcgccgactatgaggagctaagggagcaattgagttcagtatattcatttgagagattcgaaatattccccaaagaaagctcatggcccaaccacaccgtaaccggagtatcagcatcatgctcccataatgggaaaagcagtttttacagaaatttgctatggctgacggggaagaatggtttgtacccaaacctgagcaagtcctatgcaaacaacaaagagaaagaagtccttatactatggggtgttcatcacccgcctaacatagggaaccaaaggaccctctatcacacagaaaatgcttatgtctctgtagtgtcttcacattatagcagaagattcaccccagaaataaccaaaaggcccaaagtaagagatcaggaaggaagaatcaactactactggactctgctggaacccggggatacaataatatttgaggcaaatggaaatctaatagcgccatggtatgctttcgcactgagtagaggctttggatcaggaatcatcacctcaaatgcaccaatggatgaatgtgatgcgaagtgtcaaacacctcagggagctataaacagcagtcttcctttccagaatgtacacccagtcacaataggagagtgtccaaagtatgtcaggagtgcaaaattaaggatggttacaggactaaggaacatcccatccattcaatccagaggtttgtttggagccattgccggtttcattgaaggggggtggactggaatggtagatgggtggtatggttatcatcatcagaatgagcaaggatctggctatgctgcagatcaaaaaagcacacaaaatgccattaacgggattacaaacaaggtgaattctgtaattgagaaaatgaacactcaattcacagctgtgggcaaagaattcaacaaattggaaagaaggatggaaaacttaaataaaaaggttgatgatgggtttctagacatttggacatataatgcagaattgttggttctactggaaaatgaaaggactttggatttccacgactccaatgtgaagaatctgtacgagaaagtaaaaagccaattaaagaataatgccaaagaaataggaaatgggtgttttgaattctatcacaagtgtaacaatgaatgcatggagagtgtgaaaaatggaacttatgactatccaaaatattccgaagaatcaaagttaaacagggaaaaaattgatggagtgaaattggactcaatgggggtctatcagattctggcgatctactcaactgtcgccagttccctggttcttttggtctccctgggggcaatcagcttctggatgtgttccaatgggtctttgcagtgtagaatatgcatctga

SEQ ID NO: 31908 - RNA, 1701 nt, synthetic construct
  misc_feature 1..1701: note = hemagglutinin__InfluenzaA__ABK40017
  source 1..1701: mol_type = other RNA
atgaagactatcattgctttgagctacattctatgtctggttttcgctcaaaaacttcccggaaatgacaacagcacggcaacgctgtgccttgggcaccatgcagtaccaaacggaacgatagtgaaaacaatcacgaatgaccaaattgaagttactaatgctactgagctggttcagagttcctcaacaggtggaatatgcgacagtcctcatcagatccttgatggagaaaactgcacactaatagatgctctattgggagaccctcagtgtgatggcttccaaaataagaaatgggacctttttgttgaacgcagcaaagcctacagcaactgttacccttatgatgtgccggattatgcctcccttaggtcactagttgcctcatccggcacactggagtttaacaatgaaagcttcaattggactggagtcactcaaaatggaacaagctctgcttgcaaaaggagatctaataacagtttctttagtagattgaattggttgacccacttaaaattcaaatacccagcattgaacgtgactatgccaaacaataaaaaatttgacaaactgtacatttggggggttcaccacccgggtacggacaatgaccaaatcagcctatatgctcaagcatcaggaagaatcacagtctctaccaaaagaagccaacaaactgtaatcccgaatatcggatctagacccagggtaagggatatccccagcagaataagcatctattggacaatagtaaaaccgggagacatacttttgattaacagcacagggaatctaattgctcctcggggttacttcaaaatacgaagtgggaaaagctcaataatgagatcagatgcacccattggcaaatgcaattctgaatgcatcactccaaatggaagcattcccaatgacaaaccatttcaaaatgtaaacaggatcacatatggggcctgtcccagatatgttaagcaaaacactctgaaattggcaacagggatgcgaaatgtaccagagaaacaaactagaggcatatttggcgcaatcgcgggtttcatagaaaatggttgggagggaatggtggatggttggtacggtttcaggcatcaaaattctgagggaataggacaagcagcagatctcaaaagcactcaagcagcaatcaaccaaatcaatgggaagctgaataggttgatcgggaaaaccaacgagaaattccatcagattgaaaaagaattctcagaagtagaagggagaattcaggacctcgagaaatatgttgaggacactaaaatagatctctggtcatacaacgcggagcttcttgttgccctggagaaccaacatacaattgatctaactgactcagaaatgaacaaactgtttgaaagaacaaagaagcaactgagggaaaatgctgaggatatgggcaatggttgtttcaaaatataccacaaatgtgacaatgcctgcatagggtcaatcagaaatggaacttatgaccatgatgtatacagagatgaagcattaaacaaccggttccagatcaaaggtgttgagctgaagtcaggatacaaagattggatcctatggatttcctttgccatatcatgttttttgctttgtgttgctttgttggggttcatcatgtgggcctgccaaaaaggcaacattaggtgcaacatttgcatttga

SEQ ID NO: 31909 - RNA, 1701 nt, synthetic construct
  misc_feature 1..1701: note = hemagglutinin__InfluenzaA__ABK40028
  source 1..1701: mol_type = other RNA
atgaaagcaaaactactagttctgttgtgtgcatttacagctacatatgcagacacaatatgtataggctaccatgcgaacaactcaactgacactgttgacacagtacttgagaagaacgtgacagtgacacactctgtcaacctacttgaggacagtcacaacggaaaactatgccgactaaaaggaacagccccactacaattgggtaattgcagcattgccggatggatcttaggaaatccagaatgcgaatcactgttttctaaggaatcatggtcttacattgcagaaacaccaaaccctaaaaatggaacatgttacccagggtatttcgccgactatgaggaactgagggagcaattgagctcagtatcatcattcgagagatttgaaatattccccaaggatagctcatggcccaaccacactgtaaccaaaggagtgacggcatcatgctcccataatgggaaaagcagcttttacaaaaatttgctatggctgacggagaagaatggcttgtacccaaatctgagcaagtcctatgtaaacaaaaagggaaaagaagtccttgtgctatggggtgttcatcacccgtctaacatgggggaccaacgggccatctatcataaagaaaatgcttatgttactgtgttgtcttcacattatagcagaagattcaccccagaaatagcaagaagaccaaaagtaagagatcaagaagggagaattaactactactggactctgctggaacccggggacacaataatatttgaggcaaatggaaatctaatagcgccgtggtacgctttcgcactgagtagaggctttgggtcaggaatcatcatctcaaacgcatcaatgggtgaatgtgacgctaagtgtcaaacaccccaaggagctataaacagtagtctccccttccagaatgtacacccagtcacaataggagagtgtccaaagtatgtcaggagtacaaaattaaggatggttacaggactaaggaacgtcccatccattcaatccagaggtttgtttggagccattgccggtttcattgaaggagggtggactggaatgatagatggatggtatggttatcatcatcaaaatgaacaaggatctggctatgctgcggaccaaaaaagcacacaaaatgccattaatgggattacaaacaaggtgaattctataatcgagaaaatgaacactcaattcacagctgtaggcaaagaattcaacaaattagaaagaaggatggaaaacttaaataagaaagttgatgatggatttctggacatttggacatataatgcagaattgttagttctcctggaaaatgaaaggactttggattttcatgactcaaatgtgaagaacctgtatgagaaagtgaaaaaccaattgaagaataatgccaaagaaatagggaacgggtgttttgaattctatcacaagtgtaacaatgaatgcatggaaagtgtgaaaaatggaacttatgactatccaaaatattccaaagaatcaaagttaaacagggaaaaaattgatggagtgaaattggaatcaatgggagtctatcagattctggcgatctactcaactgtcgccagttcgctggtgcttttggtctccctgggggcaatcagcttctggatgtgttctaatgggtctttgcagtgtagaatatgcatctga

SEQ ID NO: 31910 - RNA, 1701 nt, synthetic construct
  misc_feature 1..1701: note = hemagglutinin__InfluenzaA__ABK40039
  source 1..1701: mol_type = other RNA
atgaaagcaaaactactagttctgttgtgtgcatttacagctacatatgcagacacaatatgtataggctaccatgcgaacaactcaactgacactgttgacacagtacttgagaagaacgtgacagtgacacactctgtcaacctacttgaggacagtcacaacggaaaactatgccgactaaaaggaacagccccactacaattgggtaattgcagcattgccggatggatcttaggaaatccagaatgcgaatcactgttttctaaggaatcatggtcttacattgcagaaacaccaaaccctaaaaatggaacatgttacccagggtatttcgccgactatgaggaactgagggagcaattgagctcagtatcatcattcgagagatttgaaatattccccaaggatagctcatggcccaaccacactgtaaccaaaggagtgacggcatcatgctcccataatgggaaaagcagcttttacaaaaatttgctatggctgacggagaagaatggcttgtacccaaatctgagcaagtcctatgtaaacaaaaagggaaaagaagtccttgtgctatggggtgttcatcacccgtctaacatgggggaccaacgggccatctatcataaagaaaatgcttatgtttctgtgttgtcttcacattatagcagaagattcaccccagaaatagcaagaagacccaaagtaagagatcaagaagggagaattaactactactggactctgctggaacccggggacacaataatatttgaggcaaatggaaatctaatagcgccgtggtacgctttcgcactgagtagaggctttgggtcaggaatcatcatctcaaacgcatcaatgggtgaatgtgacgctaagtgtcaaacaccccaaggagctataaacagtagtctccccttccagaatgtacacccagtcacaataggagagtgtccaaagtatgtcaggagtacaaaattaaggatggttacaggactaaggaacgtcccatccattcaatccagaggtttgtttggagccattgccggtttcattgaaggagggtggactggaatgatagatggatggtatggttatcatcatcaaaatgaacaaggatctggctatgctgcggaccaaaaaagcacacaaaatgccattaatgggattacaaacaaggtgaattctataatcgagaaaatgaacactcaattcacagctgtaggcaaagaattcaacaaattagaaagaaggatggaaaacttaaataagaaagttgatgatggatttctggacatttggacatataatgcagaattgttagttctcctggaaaatgaaaggactttggattttcatgactcaaatgtgaagaacctgtatgagaaagtgaaaaaccaattgaagaataatgccaaagaaatagggaacgggtgttttgaattctatcacaagtgtaacaatgaatgcatggaaagtgtgaaaaatggaacttatgactatccaaaatattccaaagaatcaaagttaaacagggaaaaaattgatggagtgaaattggaatcaatgggagtctatcagattctggcgatctactcaactgtcgccagttcgctggtgcttttggtctccctgggggcaatcagcttctggatgtgttctaatgggtctttgcagtgtagaatatgcatctga

SEQ ID NO: 31911 - RNA, 1701 nt, synthetic construct; identical to SEQ ID NO: 31891
  misc_feature 1..1701: note = hemagglutinin__InfluenzaA__ABK40050
  source 1..1701: mol_type = other RNA

SEQ ID NO: 31912 - RNA, 1701 nt, synthetic construct; identical to SEQ ID NO: 31154
  misc_feature 1..1701: note = hemagglutinin__InfluenzaA__ABK40061
  source 1..1701: mol_type = other RNA

SEQ ID NO: 31913 - RNA, 1701 nt, synthetic construct; identical to SEQ ID NO: 31154
  misc_feature 1..1701: note = hemagglutinin__InfluenzaA__ABK40075
  source 1..1701: mol_type = other RNA

SEQ ID NO: 31914 - RNA, 1701 nt, synthetic construct; identical to SEQ ID NO: 31425
  misc_feature 1..1701: note = hemagglutinin__InfluenzaA__ABK40510
  source 1..1701: mol_type = other RNA

SEQ ID NO: 31915 - RNA, 1701 nt, synthetic construct; identical to SEQ ID NO: 31425
  misc_feature 1..1701: note = hemagglutinin__InfluenzaA__ABK40534
  source 1..1701: mol_type = other RNA

SEQ ID NO: 31916 - RNA, 1701 nt, synthetic construct
  misc_feature 1..1701: note = hemagglutinin__InfluenzaA__ABK40546
  source 1..1701: mol_type = other RNA
atgaaagcaaaactactggtcctgttatgtgcactttcagctacagatgcagacacaatatgtataggctaccatgcgaacaactcaaccgacactgttgacacagtactcgaaaagaacgtgacagtgacacactctgtcaacctacttgaggacaatcacaacggaaaactatgcaaactaaaaggaatagccccactacaattggggaaatgcagcattgccggatggatcttaggaaacccagaatgcgaatcactgttttctaataaatcatggtcctacattgcagaaacaccaaactccgagaatggaacatgttacccagggtatttcgccgactatgaggaactgagggaacaattgagttcagtatcatcattcgagagattcgaaatattccccaaggaaagttcatggcccaaacacaacgtaaccaaaggagtaacggcatcatgctcccataaggggaaaagcagtttttacagaaatttgctatggctgacggagaaaaatggctcgtacccaaatctgagcaagtcctatgtgaacaacaaagagaaagaagtccttgtactatggggtgttcatcacccgtctaacatagaggaccaaaagaccatctatcgtaaagaaaatgcttatgtctctgtagtgtcttcacattataacaggagattcaccccagaaatagcaaaaagacccaaagtaagaaatcaagaagggagaattaactactactggactctgctggaacccggggacacaataatatttgaggcaaatggaaatctaatagcgccatggtatgctttcgcattgagtagaggctttgggtcaggaatcatcacctcaaacgcatcgatggatgaatgtgacgcgaagtgtcaaacaccccagggagctataaacagtagtcttccttttcagaatgtacacccagtcacaataggagagtgcccaaagtacgtcaggagtacaaaattaaggatggttacaggactaaggaacatcccatccattcaatccagaggtttgtttggagccattgccggtttcattgaagggggatggactggaatgattgatggatggtatggttatcatcatcagaatgaacagggatctggctatgctgcggatcaaaaaagcacacaaaatgccattaacgggattacaaacaaggtgaactctataatcgagaaaatgaacactcaattcacagctgtgggtaaagaattcaacaaactagaaaaaaggatggaaaacttaaataaaaaagttgatgatggatttctggacatttggacatataatgcagaattgttggttctactggaaaatgaaaggactttggatttccatgactcaaatgtgaagaacctgtatgagaaagtaaaaagccaattaaagaataatgccaaagaaataggaaacgggtgttttgaattctaccacaagtgtaacaatgaatgcatggaaagtgtaaaaaatgggacttatgactatccaaaatattcagaagaatcaaagttaaacagggaaaaaattgatggagtgaaattggaatcaatgggagtctatcagattctggcgatctactcaactgtcgccagttcactggtgcttttggtctccctgggggcaatcagcttctggatgtgttctaatgggtctttgcagtgcagaatatgcatctga

SEQ ID NO: 31917 - RNA, 1701 nt, synthetic construct; identical to SEQ ID NO: 31425
  misc_feature 1..1701: note = hemagglutinin__InfluenzaA__ABK40557
  source 1..1701: mol_type = other RNA

SEQ ID NO: 31918 - RNA, 1701 nt, synthetic construct; identical to SEQ ID NO: 31425
  misc_feature 1..1701: note = hemagglutinin__InfluenzaA__ABK40568
  source 1..1701: mol_type = other RNA

SEQ ID NO: 31919 - RNA, 1701 nt, synthetic construct
  misc_feature 1..1701: note = hemagglutinin__InfluenzaA__ABK40579
  source 1..1701: mol_type = other RNA
atgaaagcaaaactactggtcctgttatgtgcactttcagctacagatgcagacacaatatgtataggctaccatgcgaacaactcaaccgacactgttgacacagtactcgaaaagaacgtgacagtgacacactctgtcaacctacttgaggacaatcacaacggaaaactatgcaaactaaaaggaatagccccactacaattggggaaatgcagcattgccggatggatcttaggaaacccagaatgcgaatcactgttttctaagaaatcatggtcctacattgcagaaacaccaaactccgagaatggaacatgttacccagggtatttcgccgactatgaggaactgagggaacaattgagttcagtatcatcattcgagagattcgaaatattccccaaggaaagttcatggcccaaacacaacgtaaccaaaggagtaacggcatcatgctcccataaggggaaaagcagtttttacagaaatttgctatggctgacggagaaaaatggctcgtacccaaatctgagcaagtcctatgtgaacaacaaagagaaagaagtccttgtactatggggtgttcatcacccgtctaacatagaggaccaaaagaccatctatcgtaaagaaaatgcttatgtctctgtagtgtcttcacattataacaggagattcaccccagaaatagcaaaaagacccaaagtaagaaatcaagaagggagaattaactactactggactctgctggaacccggggacacaataatatttgaggcaaatggaaatctaatagcgccatggtatgctttcgcattgagtagaggctttgggtcaggaatcatcacctcaaacgcatcgatggatgaatgtgacgcgaagtgtcaaacaccccagggagctataaacagtagtcttccttttcagaatgtacacccagtcacaataggagagtgcccaaagtacgtcaggagtacaaaattaaggatggttacaggactaaggaacatcccatccattcaatccagaggtttgtttggagccattgccggtttcattgaagggggatggactgggatgattgatggatggtatggttatcatcatcagaatgaacagggatctggctatgctgcggatcaaaaaagcacacaaaatgccattaacgggattacaaacaaggtgaactctataatcgagaaaatgaacactcaattcacagctgtgggtaaagaattcaacaaactagaaaaaaggatggaaaacttaaataaaaaagttgatgatggatttctggacatttggacatataatgcagaattgttggttctactggaaaatgaaaggactttggatttccatgactcaaatgtgaagaacctgtatgagaaagtaaaaagccaattaaagaataatgccaaagaaataggaaacgggtgttttgaattctaccacaagtgtaacaatgaatgcatggaaagtgtaaaaaatgggacttatgactatccaaaatattcagaagaatcaaagttaaacagggaaaaaattgatggagtgaaattggaatcaatgggagtctatcagattctggcgatctactcaactgtcgccagttcactggtgcttttggtctccctgggggcaatcagcttctggatgtgttctaatgggtctttgcagtgcagaatatgcatctga

SEQ ID NO: 31920 - RNA, 1701 nt, synthetic construct
  misc_feature 1..1701: note = hemagglutinin__InfluenzaA__ABK40590
  source 1..1701: mol_type = other RNA
atgaaagcaaaactactggtcctgttatgtgcactttcagctacagatgcagacacaatatgtataggctaccatgcgaacaactcaaccgacactgttgacacagtactcgaaaagaacgtgacagtgacacactctgtcaacctacttgaggacaatcacaacggaaaactatgcaaactaaaaggaatagccccactacaattggggaaatgcagcattgccggatggatcttaggaaacccagaatgcgaatcactgttttctaagaaatcatggtcctacattgcagaaacaccaaactccgagaatggaacatgttacccagggtatttcgccgactatgaggaactgagggaacaattgagttcagtatcatcattcgagagattcgaaatattccccaaggaaagttcatggcccaaacacaacgtaaccaaaggagtaacggcatcatgctcccataaggggaaaagcagtttttacagaaatttgctatggctgacggagaaaaatggctcgtacccaaatctgagcaagtcctatgtgaacaacaaagagaaagaagtcctcgtactatggggtgttcatcacccgtctaacatagaggaccaaaagaccatctatcgtaaagaaaatgcttatgtctctgtagtgtcttcacattataacaggagattcaccccagaaatagcaaaaagacccaaagtaagaaatcaagaagggagaattaactactactggactctgctggaacccggggacacaataatatttgaggcaaatggaaatctaatagcgccatggtatgctttcgcattgagtagaggctttgggtcaggaatcatcacctcaaacgcatcgatggatgaatgtgacgcgaagtgtcaaacaccccagggagctataaacagtagtcttccttttcagaatgtacacccagtcacaataggagagtgcccaaagtacgtcaggagtacaaaattaaggatggttacaggactaaggaacatcccatccattcaatccagaggtttgtttggagccattgccggtttcattgaagggggatggactggaatgattgatggatggtatggttatcatcatcagaatgaacagggatctggctatgctgcggatcaaaaaagcacacaaaatgccattaacgggattacaaacaaggtgaactctataatcgagaaaatgaacactcaattcacagctgtgggtaaagaattcaacaaactagaaaaaaggatggaaaacttaaataaaaaagttgatgatggatttctggacatttggacatataatgcagaattgttggttctactggaaaatgaaaggactttggatttccatgactcaaatgtgaagaacctgtatgagaaagtaaaaaaccaattaaagaataatgccaaagaaataggaaacgggtgttttgaattctaccacaagtgtaacaatgaatgcatggaaagtgtaaaaaatgggacttatgactatccaaaatattcagaagaatcaaagttaaacagggaaaaaattgatggagtgaaattggaatcaatgggagtctatcagattctggcgatctactcaactgtcgccagttcactggtgcttttggtctccctgggggcaatcagcttctggatgtgttctaatgggtctttgcagtgcagaatatgcatctga

SEQ ID NO: 31921 - RNA, 1701 nt, synthetic construct
  misc_feature 1..1701: note = hemagglutinin__InfluenzaA__ABK40601
  source 1..1701: mol_type = other RNA
atgaaagcaaaactactggtcctgttatgtgcactttcagctacagatgcagacacaatatgtataggctaccatgcgaacaactcaaccgacactgttgacacagtactcgaaaagaacgtgacagtgacacactctgtcaacctacttgaggacaatcacaacggaaaactatgcaaactaaaaggaatagccccactacaattggggaaatgcagcattgccggatggatcttaggaaacccagaatgcgaatcactgttttctaagaaatcgtggtcctacattgcagaaacaccaaactccgagaatggaacatgttacccagggtatttcgcagactatgaggaactgagggaacaattgagttcagtatcatcattcgagagattcgaaatattccccaaggaaagttcatggcccaaacacaacgtaaccaaaggagtaacggcatcatgctcccataaggggaaaagcagtttttacagaaatttgctatggctgacggagaaaaatggctcgtacccaaatctgagcaagtcctatgtgaacaacaaagagaaagaagtccttgtactatggggtgttcatcacccgtctaacatagaggaccaaaagaccatctatcgtaaagaaaatgcttatgtctctgtagtgtcttcacattataacaggagattcaccccagaaatagcaaaaagacccaaagtaagaaatcaagaagggagaattaactactactggactctgctggaacccggggacacaataatatttgaggcaaatggaaatctaatagcgccatggtatgctttcgcattgagtagaggctttgggtcaggaatcatcacctcaaacgcatcgatggatgaatgtgacgcgaagtgtcaaacaccccagggagctataaacagtagtcttccttttcagaatgtacacccagtcacaataggagagtgcccaaagtacgtcaggagtacaaaattaaggatggttacaggactaaggaacatcccatccattcaatccagaggtttgtttggagccattgccggtttcattgaagggggatggactggaatgattgatggatggtatggttatcatcatcagaatgaacagggatctggctatgctgcggatcaaaaaagcacacaaaatgccattaacgggattacaaacaaggtgaactctataatcgagaaaatgaacactcaattcacagctgtgggtaaagaattcaacaaactagaaaaaaggatggaaaacttaaataaaaaagttgatgatggatttctggacatttggacatataatgcagaattgttggttctactggaaaatgaaaggactttggatttccatgactcaaatgtgaagaacctgtatgagaaagtaaaaagccaattaaagaataatgccaaagaaataggaaacgggtgttttgaattctaccacaagtgtaacaatgaatgcatggaaagtgtaaaaaatgggacttatgactatccaaaatattcagaagaatcaaagttaaacagggaaaaaattgatggagtgaaattggaatcaatgggagtctatcagattctggcgatctactcaactgtcgccagttcactggtgcttttggtctccctgggggcaatcagcttctggatgtgttctaatgggtctttgcagtgcagaatatgcatctga

SEQ ID NO: 31922 - RNA, 1701 nt, synthetic construct; identical to SEQ ID NO: 31154
  misc_feature 1..1701: note = hemagglutinin__InfluenzaA__ABK40612
  source 1..1701: mol_type = other RNA

SEQ ID NO: 31923 - RNA, 1701 nt, synthetic construct
  misc_feature 1..1701: note = hemagglutinin__InfluenzaA__ABK40623
  source 1..1701: mol_type = other RNA
atgaagactatcattgctttgagctacattttatgtctggttttcgctcaaaaacttcccgtaaatgacaacagcacggcaacgctgtgcctgggacaccatgcagtgccaaacggaacgctagtgaaaacaatcacgaatgaccacattgaagtgactaatgctactgagctggttcagagttcctcaacgggtagaatatgcgacagtcctcaccaaatccttgatggagaaaactgcacactaatagatgctctattgggagaccctcattgtgatggcttccaaaataaggaatgggacctttttgttgaacgcagcacagcctacagcaactgttacccttatgatgtgccggattatgcctcccttaggtcactagttgcctcatccggcacactggagtttaacaatgaaagcttcaattggactggagtcgctcagaatggaacaagctctgcttgcaaaaggagatctattaaaagtttctttagtagattgaattggttgcaccaattaaaatacaaatatccagcactgaacgtgactatgccaaacaatgaaaaatttgacaaattgtacatttggggggttcaccacccgagtacggacagtgaccaaatcagcctatatgctcaagcatcagggagagtcacagtctctaccaaaagaagccaacaaactgtaatcccgaatatcggatctagaccctgggtaaggggtgtctccagcagaataagcatctattggacaatagtaaaaccgggagacatacttttgattaacagcacagggaatctaattgctcctcggggttactttaaaatacgaagtggaaaaagctcaataatgaggtcaaatgcacccattggcaaatgcaattctgaatgcatcactccaaatggaagcattcccaatgacaaaccatttcaaaatgtaaacaggatcgcatatggggcctgtcccagatatgttaagcaaaacactctgaaattggcaacagggatgcggaatgtaccagagaaacaaactagaggcatattcggcgcaatcgcgggtttcatagaaaatggttgggaggggatggtggacggttggtacggtttcaggcatctaaattctgagggcacaggacaagcagcagatcttaaaagcactcaagcagcaatcaaccaaatcaacgggaaactgaataggttaatcgagaaaacaaacgagaaattccatcaaattgaaaaagaattctcagaagtagaagggagaattcaggacctcgagaaatatgttaaggacactaaaatagatctctggtcgtacaacgcggagcttcttgttgccctggagaaccaacatacaattgatctaactgactcagaaatgaacaaactgtttgaaagaacaaggaagcaactgagggaaaatgctgaggatgtgggcaatggttgtttcaaaatataccacaaatgtgacaatgcctgcatagggtcaatcagaaatggaacttatgaccatgatgtatacagagacgaagcattaaacaaccggttccagatcaaaggtgttgagctgaagtcaggatacaaagattggatcctatggatttcctttgccatatcatgttttttgctttgtgttgttttgctggggttcatcatgtgggcctgccaaaaaggcaacattaggtgcaacatttgcatttga

SEQ ID NO: 31924 - RNA, 1701 nt, synthetic construct
  misc_feature 1..1701: note = hemagglutinin__InfluenzaA__ABK40645
  source 1..1701: mol_type = other RNA
atgaagactatcattgctttgagctacattttatgtctggttttcgctcaaaaacttcccggaaatgacaacagcacagcaacgctgtgcctgggacaccatgcagtgccaaacggaacgctagtgaaaacaatcacgaatgatcaaattgaagtgactaatgctactgagctggttcagagttccccaacaggtagaatatgcgacagtcctcaccgaatccttgatggaaagaactgcacactgatagatgctctattgggagaccctcattgtgatggcttccaaaataaggaatgggacctttttgttgaacgcagcaaagcttacagcaactgttacccttatgatgtgccggattatgcctcccttaggtcactagttgcctcatcaggcaccctggagtttaccaacgaaaacttcaattggactggagtcgctcaggatgggaaaagctatgcttgcaaaaggggatctgttaacagtttctttagtagattgaattggttgcacaaattagaatacaaatatccagcgctgaacgtgactatgccaaacaatggcaaatttgacaaattgtacatttggggggttcaccacccgagcacggacagtgaccaaaccagcctatatgtccgagcatcagggaaagtcacagtctctaccaaaagaagccaacaaactgtaatcccggatatcgggtatagaccatgggtaaggggtctgtccagtagaataagcatctattggacaatagtaaaaccgggagacatacttttgattaatagcacagggaatctaattgctcctcggggttacttcaaaatacgaaatgggaaaagctcaataatgaggtcagatgcacccattggcaactgcagttctgaatgcatcactccaaatggaagcattcccaatgacaaaccttttcaaaatgtaaacaggatcacatatggggcctgccccagatatgttaagcaaaacactctgaaattggcaacagggatgcggaatgtaccagagaaacaaactagaggcatattcggcgcaatcgcaggtttcatagaaaatggttgggagggaatggtagacggttggtacggtttcaggcatcagaattctgagggcacaggacaagctgcagatcttaaaagcactcaagcagcaatcgaccaaatcaacgggaaactgaataggttagtcgagaaaacgaacgagaaattccatcaaatcgaaaaagaattctcagaagtagaagggagaattcaggacctcgagaaatatgttgaagacactaaaatagatctctggtcttacaatgcggagcttcttgttgctctggagaaccaacatacaattgatctaactgactcagaaatgaacaaactatttgaaagaacaaggaagcaactgagggaaaatgctgaggacatgggcaatggttgtttcaaaatataccacaaatgtgacaatgcctgcatagggtcaatcagaaatggaacttatgaccatgatgtatacagagacgaagcattaaacaaccggttccaaatcaaaggtgttgagctgaagtcaggatacaaagattggatcctatggatttcctttgccatatcatgctttttgctttgtgttgttttgcttgggttcatcatgtgggcctgccaaaaaggcaacattaggtgcaacatttgcatttga

SEQ ID NO: 31925 - RNA, 1701 nt, synthetic construct
  misc_feature 1..1701: note = hemagglutinin__InfluenzaA__ABK40656
  source 1..1701: mol_type = other RNA
atgaagactatcattgctttgagctacattttatgtctggttttcgctcaaaaacttcccggaaatgacaacagcacagcaacgctgtgcctgggacaccatgcagtgccaaacggaacgctagtgaaaacaatcacgaatgatcaaattgaagtgactaatgctactgagctggttcagagttccccaacaggtagaatatgcgacagtcctcaccgaatccttgatggaaagaactgcacactgatagatgctctattgggagaccctcattgtgatggcttccaaaataaggaatgggacctttttgttgaacgcagcaaagcttacagcaactgttacccttatgatgtgccggattatgcctcccttaggtcactagttgcctcatcaggcaccctggagtttaccaacgaaaacttcaattggactggagtcgctcaggatgggaaaagctattcttgcaaaaggggatctgttaacagtttctttagtagattgaattggttgcacaaattagaatacaaatatccagcgctgaacgtgactatgccaaacaatggcaaatttgacaaattgtacatttggggggttcaccacccgagcacggacagtgaccaaaccagcctatatgtccgagcatcagggaaagtcacagtctctaccaaaagaagccaacaaactgtaatcccggatatcgggtatagaccatgggtaaggggtctgtccagtagaataagcatctattggacaatagtaaaaccgggagacatacttttgattaatagcacagggaatctaattgctcctcggggttacttcaaaatacgaaatgggaaaagctcaataatgaggtcagatgcacccattggcaactgcagttctgaatgcatcactccaaatggaagcattcccaatgacaaaccttttcaaaatgtaaacaggatcacatatgggacctgccccagatatgttaagcaaaacacactgaaattggcaacagggatgcggaatgtaccagagaaacaaactagaggcatattcggcgcaatcgcaggtttcatagaaaatggttgggagggaatggtagacggttggtacggtttcaggcatcagaattctgagggcacaggacaagctgcagatcttaaaagcactcaagcagcaatcgaccaaatcaacgggaaactgaataggttagtcgagaaaacgaacgagaaattccatcaaatcgaaaaagaattctcagaagtagaagggagaattcaggacctcgagaaatatgttgaagacactaaaatagatctctggtcttacaatgcggagcttcttgttgctctggagaatcaacatacaattgatctaactgactcagaaatgaacaaactatttgaaagaacaaggaagcaactgagggaaaatgctgaggacatgggcaatggttgtttcaaaatataccacaaatgtgacaatgcctgcatagggtcaatcagaaatggaacttatgaccatgatgtatacagagacgaagcattaaacaaccggttccagatcaaaggtgttgagctgaagtcaggatacaaagattggatcctatggatttcctttgccatatcatgctttttgctttgtgttgttttgcttgggttcatcatgtgggcctgccaaaaaggcaacattaggtgcaacatttgcatttga

SEQ ID NO: 31926 - RNA, 1701 nt, synthetic construct
  misc_feature 1..1701: note = hemagglutinin__InfluenzaA__ABK40667
  source 1..1701: mol_type = other RNA
atgaagactatcattgctttgagctacattttatgtctggttttcgctcaaaaacttcccggaaatgacaacagcacagcaacgctgtgcctgggacaccatgcagtgccaaacggaacgctagtgaaaacaatcacgaatgatcaaattgaagtgactaatgctactgagctggttcagagttcctcaacaggtagaatatgcgacagtcctcaccgaatccttgatggaaaaaactgcacactgatagatgctctattgggagaccctcattgtgatggcttccaaaataaggaatgggacctttttgttgaacgcagcaaagcttacagcaactgttacccttatgatgtgccggattatgcctcccttaggtcactagttgcctcatcaggcaccctggagtttaccaatgaaggcttcaattggactggagtcgctcaggatgggaaaagctatgcttgcaaaagaggatctgttaacagtttctttagtagattgaattggttgcacaaattagaatacaaatatccagcactgaacgtgactatgccaaacaatgacaaatttgacaaattgtacatttggggggttcaccacccgagcacagacagtgaccaaaccagcctatatgttcaagcatcagggagagtcacagtctctaccaaaagaagccaacaaactgtaatcccgaatatcgggtctagaccctgggtaaggggtatctccagtagaataagcatctattggacaatagtaaaaccgggagacatacttttgattaacagcacagggaatctaattgctcctcgaggttacttcaaattacgaaatgggaaaagctcaataatgagatcagatgcacccattgacaactgcaattctgaatgcatcactccaaatggaagcattcccaatgacaaaccttttcaaaatgtgaacaggatcacatatggggcctgtcccagatatgttaagcaaaacactctgaagttggcaacagggatgcggaatgtaccagagaaacaaactagaggcatattcggcgcaatcgcaggtttcatagaaaatggttgggagggaatggtagacggttggtacggtttcaggcatcaaaattctgagggcacaggacaagcagcagatcttaaaagcactcaagcagcaatcgaccaaatcaacgggaaactgaatagattaaccgagaaaacgaacgagaaattccatcaaatcgaaaaagaattctcagaagtagaagggagaattcaggacctcgagaaatatgttgaagacactaaaatagatctctggtcttacaacgcggagcttcttgttgccctggagaaccaacatacaattgatctaactgactcagaaatgaacaaactgtttgaaagaacaaggaagcaactgagggaaaatgctgaggacatgggcaatggttgcttcaaaatataccacaaatgtgacaatgcctgcatagggtcaatcagaaatggaacttataaccatgatgtatacagagacgaagcattaaacaaccggttccagatcaaaggtgttgagctgaagtcaggttacaaagattggatcctatggatttcctttgccatatcatgctttttgctttgtgttgttttgctggggttcatcatgtgggcctgccaaaaaggcaacattaggtgcaacatttgcatttga

SEQ ID NO: 31927 - RNA, 1701 nt, synthetic construct; identical to SEQ ID NO: 31570
  misc_feature 1..1701: note = hemagglutinin__InfluenzaA__ABK40678
  source 1..1701: mol_type = other RNA

SEQ ID NO: 31928 - RNA, 1698 nt, synthetic construct
  misc_feature 1..1698: note = hemagglutinin__InfluenzaA__ABK40689
  source 1..1698: mol_type = other RNA
atgaaagtaaaactactggttctgttatgtacatttacagctacatatgcagacacaatatgtataggctaccatgccaacaactcaaccgacactgttgacacagtacttgagaagaatgtgacagtgacacactctgtcaacctacttgaggacagtcacaatggaaaactatgtctactaaaaggaatagccccattacaattgggtaattgcagcgttgccggatggatcttaggaaacccagaatgcgaattactgatttccaaggaatcatggtcctacattgtagaaacaccaaatcctgagaatggaacatgttacccagggtatttcgccgactatgaggaactgagggagcaattgagttcagtatcttcatttgagaggttcgaaatattccccaaagagagctcatggcccaaccacaccgtaaccggagtatcagcatcatgctcccataacgggaaaagcagtttttacagaaatttgctatggctgacggggaagaatggtttgtacccaaacctgagcaagtcttatgcaaacaacaaagaaaaagaagtccttgtactatggggtgttcatcacccgcctaacatagggaaccaaagggctctctatcatacagaaaatgcttatgtctctgtagtgtcttcacattatagcagaagattcaccccagaaatagccaaaagacccaaggtgagagatcaggaaggaagaatcaactactactggacactgctggaacccggggatacaataatatttgaggcaaatggaaatctaatagcgccaaggtttgctttcgcactgagtagaggctttggatcaggaatcatcacctcaaatgcaccaatggatgaatgtgatgcaaagtgtcaaacacctcaaggagctataaacagcagtcttcctttccagaatgtacacccagtcacaataggggagtgtccaaagtatgtcaggagtgcaaaattaaggatggctacaggactaaggaacatcccatccattcaatccagaggtttgtttggagccattgccggtttcattgaaggggggtggactggaatggtagatggttggtatggttatcatcatcagaatgagcaaggatctgggtatgctgcagatcaaaaaagcacacaaaatgccattaacgggattacaaacaaggtgaattctgtaattgaaaaaatgaacactcaattcacagctgtgggcaaagaattcagcaaattggagagaaggatggaaaacttaaataaaaaagttgatgatgggtttctagacatttggacatataatgcagaattgttggttctactggaaaatgaaaggactttggatttccacgactccaacgtgaagaatctgtatgagaaagtgaaaagccaattaaagaataatgccaaagaaataggaaacgggtgttttgaattctatcacaaatgtaacgatgaatgcatggagagtgtgaaaaatggaacttatgactatccaaaatattccgaagaatcaaagttaaacagggagaaaattgatggagtgaaattggaatcaatgggagtctatcagattctggcgatctactcaacagtcgccagttccctggttcttttggtctccctgggggcaatcagcttctggatgtgttccaatgggtctttgcagtgtagaatatgcatctaa

SEQ ID NO: 31929 - RNA, 1701 nt, synthetic construct; identical to SEQ ID NO: 31154
  misc_feature 1..1701: note = hemagglutinin__InfluenzaA__ABK40700
  source 1..1701: mol_type = other RNA

SEQ ID NO: 31930 - RNA, 1701 nt, synthetic construct
  misc_feature 1..1701: note = hemagglutinin__InfluenzaA__ABK40711
  source 1..1701: mol_type = other RNA
atgaagactatcattgctttgagctacattttatgtctggttttcgctcaaaaacttcccggaaatgacaacagcacggcaacgctgtgcctggggcaccatgcagtgccaaacggaacgctagtgaaaacaatcacgaatgaccaaattgaagtgaccaatgctactgagctggttcagagttcctcaacaggtggaatatgcgacagtcctcaccaaatccttgatggagaaaactgcacactaatagatgctctattgggagaccctcattgtgatggcttccaaaataaggaatgggacctttttgttgaacgcagcaaagcctacagcaactgttacccttatgatgtgccggattatgcctcccttaggtcactagttgcctcatccggcacactggagtttaacaatgaaagcttcaattggactggagtcgctcagaatggaacaagctctgcttgcaaaaggagatctaataaaagtttctttagtagattgaattggttgcaccaattaaaatacaaatacccagcactgaacgtgactatgccaaacaatgaaaaatttgacaaattgtacatttggggggttcaccacccgagtacggacagtgaccaaatcagcctatatgctcaagcaccagggagagtcacagtctctaccaaaagaagccaacaaactgtaatcccgaatatcggatctagaccctgggtaaggggtgtctccagcagaataagcatctattggacaatagtaaaaccgggagacatacttttgattaactgcacagggaatctaattgctcctcggggttacttcaaaatacgaagtgggaaaagctcaataatgaggtcagatgcatccattggcaaatgcaattctgaatgcatcactccaaatggaagcattcccaatgacaaaccatttcaaaatgtaaacaggatcacatatggggcctgtcccagatatgttaagcaaaacactctgaaattggcaacagggatgcggaatgtaccagagaaacaaactagaggcatattcggcgcaatcgcgggtttcatagaaaatggttgggagggaatggtggacggttggtacggtttcaggcatcaaaattctgaaggcacaggacaagcagcagatctcaaaagcactcaagcagcaatcaaccaaatcaacgggaaactgaataggttaatcgagaaaacgaacgagaaattccatcaaattgaaaaagaattctcagaagtggaagggagaattcaggacctcgagaaatatgttgaggacactaaaatagatctctggtcgtacaacgcggagcttcttgttgctctggagaaccagcatacaattgatctaactgactcagaaatgaacaaactatttgaaagaacaaagaagcaactgagggaaaatgctgaggatatgggcaatggttgtttcaaaatataccacaaatgtgacaatgcctgcatagggtcaatcagaaatgggacttatgaccatgatgtatacagagacgaagcattaaacaaccggttccagatcaaaggtgttgagctgaagtcaggatacaaagattggatcctatggatttcctttgccatatcatgttttttgctttgtgttgtcttgctggggttcatcatgtgggcctgccaaaaaggcaacattaggtgcaacatttgcatttga

SEQ ID NO: 31931 - RNA, 1701 nt, synthetic construct
  misc_feature 1..1701: note = hemagglutinin__InfluenzaA__ABK40722
  source 1..1701: mol_type = other RNA
atgaagactatcattgctttgagctacattttatgtctggttttcgctcaaaaacttcccggaaatgacaacagcacggcaacgctgtgcctggggcaccatgcagtgccaaacggaacgctagtgaaaacaatcacgaatgaccaaattgaagtgactaatgctactgagctggttcagagttcctcaacaggtggaatatgcgacagtcctcaccaaatccttgatggagaaaactgcacactaatagatgctctattgggagaccctcattgtgatggcttccaaaataaggaatgggacctttttgttgaacgcagcaaagcctacagcaactgttacccttatgatgtgccggattatgcctcccttaggtcactagttgcctcatccggcacactggagtttaacaatgaaagcttcaattggactggagtcgctcagaatggaacaagctctgcttgcaaaaggagatctaataaaagtttctttagtagattgaattggttgcaccaattaaaatacaaatacccagcactgaacgtgactatgccaaacaatgaaaaatttgacaaattgtacatttggggggttcaccacccgagtacggacaatgaccaaatcagcctatatgctcaagcaccagggagagtcacagtctctaccaaaagaagccaacaaactgtaatcccgaatatcggatctagaccctgggtaaggggtgtctccagcagaataagcatctattggacaatagtaaaaccgggagacatacttttgattaactgcacagggaatctaattgctcctcggggttacttcaaaatacgaagtgggaaaagctcaataatgaggtcagatgcatccattggcaaatgcaattctgaatgcatcactccaaatggaagcattcccaatgacaaaccatttcaaaatgtaaacaggatcacatatggggcctgtcccagatatgttaagcaaaacactctgaaattggcaacagggatgcggaatgtaccagagaaacaaactagaggcatattcggcgcaatcgcgggtttcatagaaaatggttgggagggaatggtggacggttggtacggtttcaggcatcaaaattctgagggcacaggacaagcagcagatctcaaaagcactcaagcagcaatcaaccaaatcaacgggaaactgaataggttaatcgagaaaacgaacgagaaattccatcaaattgaaaaagaattctcagaagtggaagggagaattcaggacctcgagaaatatgttgaggacactaaaatagatctctggtcgtacaacgcggagcttcttgttgccctggagaaccagcatacaattgatctaactgactcagaaatgaacaaactgtttgaaagaacaaagaagcaactgagggaaaatgctgaggatatgggcaatggttgtttcaaaatataccacaaatgtgacaatgcctgcatagggtcaatcagaaatgggacttatgaccatgatgtatacagagacgaagcattaaacaaccggttccagatcaaaggtgttgagctgaagtcaggatacaaagattggatcctatggatttcctttgccatatcatgttttttgctttgtgttgtcttgctggggttcatcatgtgggcctgccaaaaaggcaacattaggtgcaacatttgcatttga

SEQ ID NO: 31932 - RNA, 1701 nt, synthetic construct
  misc_feature 1..1701: note = hemagglutinin__InfluenzaA__ABK40733
  source 1..1701: mol_type = other RNA
atgaagactatcattgctttgagctacattttatgtctggttttcgctcaaaaacttcccggaaatgacaacagcacggcaacgctgtgcctggggcaccatgcagtgccaaacggaacgctagtgaaaacaatcacgaatgaccaaattgaagtgaccaatgctactgagctggttcagagttcctcaacaggtggaatatgcgacagtcctcaccaaatccttgatggagaaaactgcacactaatagatgctctattgggagaccctcattgtgatggcttccaaaataaggaatgggacctttttgttgaacgcagcaaagcctacagcaactgttacccttatgatgtgccggattatgcctcccttaggtcactagttgcctcatccggcacactggagtttaacaatgaaagcttcaattggactggagtcgctcagaatggaacaagctctgcttgcaaaaggagatctaataaaagtttctttagtagattgaattggttgcaccaattaaaatacaaatacccagcactgaacgtgactatgccaaacaatgaaaaatttgacaaattgtacatttggggggttcaccacccgagtacggacagtgaccaaatcagcctatatgctcaagcaccagggagagtcacagtctctaccaaaagaagccaacaaactgtaatcccgaatatcggatctagaccctgggtaaggggtgtctccagcagaataagcatctattggacaatagtaaaaccgggagacatacttttgattaactgcacagggaatctaattgctcctcggggttacttcaaaatacgaagtgggaaaagctcaataatgaggtcagatgcatccattggcaaatgcaattctgaatgcatcactccaaatggaagcattcccaatgacaaaccatttcaaaatgtaaacaggatcacatatggggcctgtcccagatatgttaagcaaaacactctgaaattggcaacagggatgcggaatgtaccagagaaacaaactagaggcatattcggagcaatcgcgggtttcatagaaaatggttgggagggaatggtggacggttggtacggtttcaggcatcaaaattctgagggcacaggacaagcagcagatctcaaaagcactcaagcagcaatcaaccaaatcaacgggaaactgaataggttaatcgagaaaacgaacgagaaattccatcaaattgaaaaagaattctcagaagtggaagggagaattcaggacctcgagaaatatgttgaggacactaaaatagatctctggtcgtacaacgcggagcttcttgttgctctggagaaccagcatacaattgatctaactgactcagaaatgaacaaactatttgaaagaacaaagaagcaactgagggaaaatgctgaggatatgggcaatggttgtttcaaaatataccacaaatgtgacaatgcctgcatagggtcaatcagaaatgggacttatgaccatgatgtatacagagacgaagcattaaacaaccggttccagatcaaaggtgttgagctgaagtcaggatacaaagattggatcctatggatttcctttgccatatcatgttttttgctttgtgttgtcttgctggggttcatcatgtgggcctgccaaaaaggcaacattaggtgcaacatttgcatttga

SEQ ID NO: 31933 - RNA, 1701 nt, synthetic construct; identical to SEQ ID NO: 31809
  misc_feature 1..1701: note = hemagglutinin__InfluenzaA__ABK40744
  source 1..1701: mol_type = other RNA

SEQ ID NO: 31934 - RNA, 1701 nt, synthetic construct; identical to SEQ ID NO: 31420
  misc_feature 1..1701: note = hemagglutinin__InfluenzaA__ABK79948
  source 1..1701: mol_type = other RNA

SEQ ID NO: 31935 - RNA, 1698 nt, synthetic construct
  misc_feature 1..1698: note = hemagglutinin__InfluenzaA__ABK79959
  source 1..1698: mol_type = other RNA
atgaaagtaaaactactggttctgttatgtacatttacagctacatatgcagacacaatatgtataggctaccatgccaacaactcgaccgacactgttgacacagtacttgagaagaatgtgacagtgacacactctgtcaacctacttgaggacagtcacaatggaaaactatgtctactaaaaggaatagccccactacaattgggtaattgcagcgttgccggatggatcttaggaaacccagaatgcgaattactgatttccaaggaatcatggtcctacattgtagaaacaccaaatcctgagaatggaacatgttacccagggtatttcgccgactatgaggagctgagggagcaattgagttcagtatcttcatttgagaggttcgaaatattccccaaagagagctcatggcccaaccacaccgtaaccggagtatcagcatcatgctcccataacgggaaaagcagtttttacagaaatttactatggctgacggggaagaatggtttgtatccaaatctgagcaagtcctatgcaaacaacaaagagaaagaagtccttgtactgtggggtgttcatcacccgcctaacataggggaccaaagggccctctatcatacagaaaatgcttatgtctctgtagtgtcttcacattatagcagaagattcaccccagaaatagccaaaagacccaaggtaagagatcaggaaggaaggatcaactactactggactctgctggaacccggggatacaataatatttgaggcaaatggaaatctaatagcgccaaggtttgctttcgcactgagtagaggctttggatcaggaatcatcacctcaaatgcaccaatggatgaatgtgatgcgaagtgtcaaacacctcagggagctataaacagcagtcttcctttccagaatgtacacccagtcacaataggagagtgtccaaagtatgtcaggagtgcaaaattaagaatggttacaggactaaggaacatcccatccattcaatccagaggtttgtttggagccattgccggtttcattgaaggggggtggactggaatggtagatggttggtatggttatcaccatcagaatgagcaaggatctgggtatgctgcagatcaaaaaagcacacaaaatgccattaacgggattacaaacaaggtgaattctgtaattgagaaaatgaacactcaattcacagctgtgggcaaagaattcaacaaattggaaagaaggatggaaaacttaaataaaaaagttgatgatgggtttctagacatttggacatataacgcagaattgttggttctactggaaaatgaaaggactttggacttccatgactccaacgtgaagaatctgtatgagaaagtaaaaagccaattaaagaataatgccaaagaaataggaaacgggtgttttgaattctatcacaagtgtaacgatgaatgcatggagagtgtgaaaaatggaacttatgactatccaaaatattccgaagaatcaaagttgaacagggagagaattgatggagtgaaattggaatcaatgggagtctatcagattctggcgatctactcaacagtcgccagttccctggttcttttggtctccctgggggcaatcagcttctggatgtgttccaatgggtctttgcagtgtagaatatgcatctaa

SEQ ID NO: 31936 - RNA, 1701 nt, synthetic construct
  misc_feature 1..1701: note = hemagglutinin__InfluenzaA__ABK79970
  source 1..1701: mol_type = other RNA
atgaaagcaaaactactagttctgttgtgtgcatttacagctacatatgcagacacaatatgtataggctaccatgcgaacaactcaactgacactgttgacacagtacttgagaagaacgtgacagtgacacactctgtcaacctacttgaggacagtcacaacggaaaactatgccgactaaaaggaacagccccactacaattgggtaattgcagcattgccggatggatcttaggaaatccagaatgcgaatcactgttttctaagaaatcatggtcttacattgcagaaacaccaaaccctaaaaatggaacatgttacccagggtatttcgccgactatgaggaactgagggagcaattgagctcagtatcatcattcgagagatttgaaatattccccaaggatagctcatggcccaaccacactgtaaccaaaggagtgacggcatcatgctcccataatgggaaaagcagcttttacaaaaatttgctatggctgacggagaagaatggcttgtacccaaatctgagcaagtcctatgtaaacaaaaagggaaaagaagtccttgtgctatggggtgttcatcacccgtctaacatgggggaccaacgggccatctatcataaagaaaatgcttatgtttctgtgttgtcttcacattatagcagaagattcaccccagaaatagcaagaagaccaaaagtaagagatcaagaagggagaattaactactactggactctgctggaacccggggacacaataatatttgaggcaaatggaaatctaatagcgccgtggtacgctttcgcactgagtagaggctttgggtcaggaatcatcatctcaaacgcatcaatgggtgaatgtgacgctaagtgtcaaacaccccaaggagctataaacagtagtctccccttccagaatgtacacccagtcacaataggagagtgtccaaagtatgtcaggagtacaaaattaaggatggttacaggactaaggaacgtcccatccattcaatccagaggtttgtttggagccattgccggtttcattgaaggagggtggactggaatgatagatggatggtatggttatcatcatcaaaatgaacaaggatctggctatgctgcggaccaaaaaagcacacaaaatgccattaatgggattacaaacaaggtgaattctataatcgagaaaatgaacactcaattcacagctgtaggcaaagaattcaacaaattagaaagaaggatggaaaacttaaataagaaagttgatgatggatttctggacatttggacatataatgcagaattgttagttctcctggaaaatgaaaggactttggattttcatgactcaaatgtgaagaacctgtatgagaaagtgaaaaaccaattgaagaataatgccaaagaaatagggaacgggtgttttgaattctatcacaagtgtaacaatgaatgcatggaaagtgtgaaaaatggaacttatgactatccaaaatattccaaagaatcaaagttaaacagggaaaaaattgatggagtgaaattggaatcaatgggagtctatcagattctggcgatctactcaactgtcgccagttcgctggtgcttttggtctccctgggggcaatcagcttctggatgtgttctaatgggtctttgcagtgtagaatatgcatctga

SEQ ID NO: 31937 - RNA, 1701 nt, synthetic construct
  misc_feature 1..1701: note = hemagglutinin__InfluenzaA__ABK79981
  source 1..1701: mol_type = other RNA
atgaagactatcattgctttgagctacattttatgtctggttttcactcaaaaacttcccggaaatgacaacagcacggcaacgctgtgcctggggcaccatgcagtgccaaacggaacgctagtgaaaacaatcacgaatgaccaaattgaagtgactaatgctactgagctggttcagagttcctcaacaggtggaatatgcgacagtcctcaccaaatccttgatggagaaaactgcacactaatagatgctctattgggagaccctcattgtgatggcttccaaaataaggaatgggacctttttgttgaacgcagcaaagcctacagcaactgttacccttatgatgtgccggattatgcctcccttaggtcactagttgcctcatccggcacactggagtttaacaatgaaagcttcaattggactggagtcgctcagaatggaacaagctctgcttgcaaaaggagatctaataaaagtttctttagtagattgaattggttgcaccaattaaaatacaaatacccagcactgaacgtgactatgccaaacaatgaaaaatttgacaaattgtacatttggggggttcaccacccgagtacggacagtgaccaaatcagcctatatgctcaagcaccagggagagtcacagtctctaccaaaagaagccaacaaactgtaatcccgaatatcggatctagaccctgggtaaggggtgtctccagcagaataagcatctattggacaatagtaaaaccgggagacatacttttgattaactgcacagggaatctaattgctcctcggggttacttcaaaatacgaagtgggaaaagctcaataatgaggtcagatgcatccattggcaaatgcaattctgaatgcatcactccaaatggaagcattcccaatgacaaaccatttcaaaatgtaaacaggatcacatatggggcctgtcccagatatgttaagcaaaacactctgaaattggcaacagggatgcggaatgtaccagagaaacaaactagaggcatattcggcgcaatcgcgggtttcatagaaaatggttgggagggaatggtggacggttggtacggtttcaggcatcaaaattctgagggcacaggacaagcagcagatctcaaaagcactcaagcagcaatcaaccaaatcaacgggaaactgaataggttaatcgagaaaacgaacgagaaattccatcaaattgaaaaagaattctcagaagtggaagggagaattcaggacctcgagaaatatgttgaggacactaaaatagatctctggtcgtacaacgcggagcttcttgttgccctggagaaccagcatacaattgatctaactgactcagaaatgaacaaactgtttgaaagaacaaagaagcaactgagggaaaatgctgaggatatgggcaatggttgtttcaaaatataccacaaatgtgacaatgcctgcatagggtcaatcagaaatgggacttatgaccatgatgtatacagagacgaagcattaaacaaccggttccagatcaaaggtgttgagctgaagtcaggatacaaagattggatcctatggatttcctttgccatatcatgttttttgctttgtgttgtcttgctggggttcatcatgtgggcctgccaaaaaggcaacattaggtgcaacatttgcatttga

SEQ ID NO: 31938 - RNA, 1701 nt, synthetic construct; identical to SEQ ID NO: 31154
  misc_feature 1..1701: note = hemagglutinin__InfluenzaA__ABK79992
  source 1..1701: mol_type = other RNA

SEQ ID NO: 31939 - RNA, 1701 nt, synthetic construct; identical to SEQ ID NO: 31425
  misc_feature 1..1701: note = hemagglutinin__InfluenzaA__ABK80025
  source 1..1701: mol_type = other RNA

SEQ ID NO: 31940 - RNA, 1701 nt, synthetic construct; identical to SEQ ID NO: 31425
  misc_feature 1..1701: note = hemagglutinin__InfluenzaA__ABK80036
  source 1..1701: mol_type = other RNA

SEQ ID NO: 31941 - RNA, 1701 nt, synthetic construct; identical to SEQ ID NO: 31473
  misc_feature 1..1701: note = hemagglutinin__InfluenzaA__ABK80047
  source 1..1701: mol_type = other RNA

SEQ ID NO: 31942 - RNA, 1701 nt, synthetic construct
  misc_feature 1..1701: note = hemagglutinin__InfluenzaA__ABK80058
  source 1..1701: mol_type = other RNA
atgaagactatcattgctttgagctacattttatgtctggttttcgctcaaaaacttcccgtaaatgacaacagcacggcaacgctgtgcctgggacaccatgcagtgccaaacggaacgctagtgaaaacaatcacgaatgaccacattgaagtgactaatgctactgagctggttcagagttccccaacaggtagaatatgcgacagtcctcaccaaatccttgatggagaaaactgcacactaatagatgctctattgggagaccctcattgtgatggcttccaaaataaggaatgggacctttttgttgaacgcagcacagcctacagcaactgttacccttatgatgtgccggattatgcctcccttaggtcactagttgcctcatccggcacactggagtttaacaatgaaagcttcaattggactggagtcgctcagaatggaacaagctctgcttgcaaaaggagatctattaaaagtttctttagtagattgaattggttgcaccaattaaaatacaaatatccagcactgaacgtgactatgccaaacaatgaaaaatttgacaaattgtacatttggggggttcaccacccgagtacggacagtgaccaaatcagcctatatgctcaagcatcagggagagtcacagtctctaccaaaagaagccaacaaactgtaatcccgaatatcggatctagaccctgggtaaggggtgtctccagcagaataagcatctattggacaatagtaaaaccgggagacatacttttgattaacagcacagggaatctaattgctcctcggggttacttcaaaatacgaagtgggaaaagctcaataatgaggtcaaatgcacccattggcaaatgcaattctgaatgcatcactccaaatggaagcattcccaatgacaaaccatttcaaaatgtaaacaggatcacatatggggcctgtcccagatatgttaagcaaaacactctgaaattggcaacagggatgcggaatgtaccagagaaacaaactagaggcatattcggcgcaattgcgggtttcatagaaaatggttgggaaggaatggtggacggttggtacggtttcaggcatcaaaattctgagggcacaggacaagcagcagatcttaaaagcactcaagctgcaatcaaccaaatcaacgggaaactgaataggttaatcgagaaaacaaacgagaaattccatcaaattgaaaaagaattctcagaagtagaagggagaattcaggacctcgagaaatatgttgaggacactaaaatagatctctggtcgtacaacgcggagcttcttgttgccctggagaaccaacatacaattgatctaactgactcagaaatgaacaaactgtttgaaagaacaaggaagcaactgagggaaaatgctgaggatatgggcaatggttgtttcaaaatataccacaaatgtgacaatgcctgcatagggtcaatcagaaatggaacttatgaccatgatgtatacagagacgaagcattaaacaaccggttccagatcaaaggtgttgagctgaagtcaggatacaaagattggatcctatggatttcctttgccatatcatgttttttgctttgtgttgttttgctggggttcatcatgtgggcctgccaaaaaggcaacattagatgcaacatttgcatttga

SEQ ID NO: 31943 - RNA, 1701 nt, synthetic construct
  misc_feature 1..1701: note = hemagglutinin__InfluenzaA__ABK80069
  source 1..1701: mol_type = other RNA
atgaagactatcattgctttgagctacattttatgtctggttttcgctcaaaaacttcccgtaaatgacaacagcacggcaacgctgtgcctgggacaccatgcagtgccaaacggaacgctagtgaaaacaatcacgaatgaccacattgaagtgactaatgctactgagctggttcagagttcctcaacgggtagaatatgcgacagtcctcaccaaatccttgatggagaaaactgcacactaatagatgctctattgggagaccctcattgtgatggcttccaaaataaggaatgggacctttttgttgaacgcagcacagcctacagcaactgttacccttatgatgtgccggattatgcctcccttaggtcactagttgcctcatccggcacactggagtttaacaatgaaagcttcaattggactggagtcgctcagaatggaacaagctctgcttgcaaaaggagatctattaaaagtttctttagtagattgaattggttgcaccaattaaaatacaaatatccagcactgaacgtgactatgccaaacaatgaaaaatttgacaaattgtacatttggggggttcaccacccgagtacggacagtgaccaaatcagcctatatgctcaagcatcagggagagtcacagtctctaccaaaagaagccaacaaactgtaatcccgaatatcggatctagaccctggataaggggtgtctccagcagaataagcatctattggacaatagtaaaaccgggagacatacttttgattaacagcacagggaatctaattgctcctcggggttactttaaaatacgaagtggaaaaagctcaataatgaggtcaaatgcacccattggcaaatgcaattctgaatgcatcactccaaatggaagcattcccaatgacaaaccatttcaaaatgtaaacaggatcgcatatggggcctgtcccagatatgttaagcaaaacactctgaaattggcaacagggatgcggaatgtaccagagaaacaaactagaggcatattcggcgcaatcgcgggtttcatagaaaatggttgggaggggatggtggacggttggtacggtttcaggcatctaaattctgagggcacaggacaagcagcagatcttaaaagcactcaagcagcaatcaaccaaatcaacgggaaactgaataggttaatcgagaaaacaaacgagaaattccatcaaattgaaaaagaattctcagaagtagaagggagaattcaggacctcgagaaatatgttgaggacactaaaatagatctctggtcgtacaacgcggagcttcttgttgccctggagaaccaacatacaattgatctaactgactcagaaatgaacaaactgtttgaaagaacaaggaagcaactgagggaaaatgctgaggatgtgggcaatggttgtttcaaaatataccacaaatgtgacaatgcctgcatagggtcaatcagaaatggaacttatgaccatgatgtatacagagacgaagcattaaacaaccggttccagatcaaaggtgttgagctgaagtcaggatacaaagattggatcctatggatttcctttgccatatcatgttttttgctttgtgttgttttgctggggttcatcatgtgggcctgccaaaaaggcaacattaggtgcaacatttgcatttga

SEQ ID NO: 31944 - RNA, 1701 nt, synthetic construct
  misc_feature 1..1701: note = hemagglutinin__InfluenzaA__ABK80080
  source 1..1701: mol_type = other RNA
atgaagactatcattgctttgagctacattttatgtctggttttcgctcaaaaacttcccgtaaatgacaacagcacggcaacgctgtgcctgggacaccatgcagtgccaaacggaacgctagtgaaaacaatcacgaatgaccacattgaagtgactaatgctactgaactggttcagagttcctcaacaggtagaatatgcgacagtcctcaccaaatccttgatggagaaaactgcacactaatagatgctctattgggagaccctcattgtgatggcttccaaaataaggaatgggacctttttgttgaacgcagcacagcctacagcaactgttacccttatgatgtgccggattatgcctcccttaggtcactagttgcctcatccggcacactggagtttaacaatgaaagcttcaattggactggagtcgctcagaatggaacaagctctgcttgcaaaaggagatctattaaaagtttctttagtagattgaattggttgcaccaattaaaatacaaatatccagcactgaacgtgactatgccaaacaatgaaaaatttgacaaattgtacatttggggggttcaccacccgagtacggacagtgaccaaatcagcctatatgctcaagcatcagggagagtcacagtctctaccaaaagaagccaacaaactgtaatcccgaatatcggatctagaccctgggtaaggggtgtctccagcagaataagcatctattggacaatagtaaaaccgggagacatacttttgattaacagcacagggaatctaattgctcctcggggttactttaaaatacgaagtgggaaaagctcaataatgaggtcaaatgcacccattggcaaatgcaattctgaatgcatcactccaaatggaagcattcccaatgacaaaccatttcaaaatgtaaacaggatcacatatggggcctgtcccagatatgttaagcaaaacactctgaaattggcaacagggatgcggaatgtaccagagaaacaaactagaggcatattcggcgcaatcgcgggtttcatagaaaatggttgggagggaatggtggacggttggtacggtttcaggcatcaaaattctgagggcacaggacaagcagcagatcttaaaagcactcaagcagcaatcaaccaaatcaacgggaaactgaatagattaatcgagaaaacaaacgagaaattccatcaaattgaaaaggaattctcagaagtagaagggagaattcaggacctcgagaaatatgttgaggacactaaaatagatctctggtcgtacaacgcggagcttcttgttgccctggagaaccaacatacaattgatctaactgactcagaaatgaacaaactgtttgaaagaacaaggaagcaactgagggaaaatgctgaggatatgggcaatggttgtttaaaaatataccacaaatgtgacaatgcctgcatagggtcaatcagaaatggaacttatgaccatgatgtatacagagacgaagcattaaacaaccggttccagatcaaaggtgttgagctgaagtcaggatacaaagattggatcctatggatttcctttgccatatcatgttttttgctttgtgttgttttgctggggttcatcatgtgggcctgccaaaaaggcaacattagatgcaacatttgcatttga

SEQ ID NO: 31945 - RNA, 1701 nt, synthetic construct; identical to SEQ ID NO: 31154
  misc_feature 1..1701: note = hemagglutinin__InfluenzaA__ABK80091
  source 1..1701: mol_type = other RNA

SEQ ID NO: 31946 - RNA, 1701 nt, synthetic construct; identical to SEQ ID NO: 31154
  misc_feature 1..1701: note = hemagglutinin__InfluenzaA__ABK80102
  source 1..1701: mol_type = other RNA

SEQ ID NO: 31947 - RNA, 1701 nt, synthetic construct
  misc_feature 1..1701: note = hemagglutinin__InfluenzaA__ABK80113
  source 1..1701: mol_type = other RNA
atgaagactatcattgctttgagctacattttatgtctggttttcgctcaaaaacttcccggaaatgacaacagcacggcaacgctgtgcctggggcaccatgcagtgccaaacggaacgctagtgaaaacaatcacgaatgaccaaattgaagtgactaatgctactgagctggttcagagttcctcaacaggtagaatatgcgacagtcctcaccaaatccttgatggagaaaactgcacactaatagatgctctattgggagaccctcattgtgatggcttccaaaataaggaatgggacctttttgttgaacgcagcaaagcctacagcaactgttacccttatgatgtgccggattatgtctcccttaggtcactagttgcctcatcaggcacgctggagtttaacaatgaaagcttcaattggactggagtcgctcagaatggaacaagctctgcttgcaaaaggagatctgataaaagtttctttagtagattgaattggttgcaccaattaaaatacaaatatccagcactgaacgtgactatgccaaacaatgaaaaatttgacaaattgtacatttggggggttcaccacccgggtacagacagtgaccaaatcagcctatatgctcaagcatcagggagagtcacagtctctaccaaaagaagccaacaaactgtaatcccgaatatcggatctagaccctgggtaaggggtgtctccagcagaataagcatctattggacaatagtaaaaccgggagacatacttttgattaacagcacagggaatctaattgctcctcggggttacttcaaaatacgaagtgggaaaagctcaataatgaggtcagatgcacccattggcaaatgcaattctgaatgcatcactccaaatggaagcattcccaatgacaaaccatttcaaaatgtaaacaggatcacatatgggccctgtcccagatatgttaagcaaaacactctgaaattggcaacagggatgcggaatgtgccagagaaacaaactagaggcatattcggtgcaatcgcgggcttcatagaaaatggttgggagggaatgatggacggttggtacggtttcaggcatcaaaattctgagggcacagggcaagcagcagatcttaaaagcactcaagcagcaatcaaccaaatcaacgggaaactgaataggttaatcgagaaaacgaacgagaaattccatcaaattgaaaaagaattctcagaagtagaagggagaattcaggacctcgagaaatatgttgaggacactaaaatagatctctggtcgtacaatgcggagcttcttgttgccctggagaaccaacatacaattgatctaactgactcagaaatgaacaaactgtttgaaagaacaaagaagcaactgagggaaaatgctgaggatatgggcaatggttgtttcaaaatataccacaaatgtgacaatgcctgcatagggtcaatcagaaatggaacttatgaccatgatgtatacagagacgaagcattgaacaaccggttccagatcaaaggtgttgagctgaagtcaggatacaaagattggatcctatggatttcctttgccatatcatgttttttgctttgtattgttttgctggggttcatcatgtgggcctgccaaaaaggcaacattaggtgcaacatttgcatttga

SEQ ID NO: 31948 - RNA, 1701 nt, synthetic construct
  misc_feature 1..1701: note = hemagglutinin__InfluenzaA__ABK80124
  source 1..1701: mol_type = other RNA
atgaagactatcattgctttgagctacattttatgtctggttttcgctcaaaaacttcccggaaatgacaacagcacggcaacgctgtgcctggggcaccatgcagtgccaaacggaacgctagtgaaaacaatcacgaatgaccaaattgaagtgactaatgctactgagctggttcagagttcctcaacaggtagaatatgcgacagtcctcaccaaatccttgatggagaaaactgcacactaatagatgctctattgggagaccctcattgtgatggcttccaaaataaggaatgggacctttttgttgaacgcagcaaagcctacagcaactgttacccttatgatgtgccggattatgtctcccttaggtcactagttgcctcatcaggcacgctggagtttaacaatgaaagcttcaattggactggagtcgctcagaatggaacaagctctgcttgcaaaaggagatctgataaaagtttctttagtagattgaattggttgcaccaattaaaatacaaatatccagcactgaacgtgactatgccaaacaatgaaaaatttgacaaattgtacatttggggggttcaccacccgggtacagacagtgaccaaatcagcctatatgctcaagcatcagggagagtcacagtctctaccaaaagaagccaacaaactgtaatcccgaatatcggatctagaccctgggtaaggggtgtctccagcagaataagcatctattggacaatagtaaaaccgggagacatacttttgattaacagcacagggaatctaattgctcctcggggttacttcaaaatacgaagtgggaaaagctcaataatgaggtcagatgcacccattggcaaatgcaattctgaatgcatcactccaaatggaagcattcccaatgacaaaccatttcaaaatgtaaacaggatcacatatgggccctgtcccagatatgttaagcaaaacactctgaaattggcaacagggatgcggaatgtgccagagaaacaaactagaggcatattcggtgcaatcgcgggcttcatagaaaatggttgggagggaatgatggacggttggtacggtttcaggcatcaaaattctgagggcacagggcaagcagcagatcttaaaagcactcaagcagcaatcaaccaaatcaacgggaaactgaataggttaatcgagaaaacgaacgagaaattccatcaaattgaaaaagaattctcagaagtagaagggagaattcaggacctcgagaaatatgttgaggacactaaaatagatctctggtcgtacaatgcggagcttcttgttgccctggagaaccaacatacaattgatctaactgactcagaaatgaacaaactgtttgaaagaacaaagaagcaactgagggaaaatgctgaggatatgggcaatggttgtttcaaaatataccacaaatgtgacaatgcctgcatagggtcaatcagaaatggaacttatgaccatgatgtatacagagacgaagcattgaacaaccggttccagatcaaaggtgttgagctgaagtcaggatacaaaaattggatcctatggatttcctttgccatatcatgttttttgctttgtattgttttgctggggttcatcatgtgggcctgccaaaaaggcaacattaggtgcaacatttgcatttga

SEQ ID NO: 31949 - RNA, 1701 nt, synthetic construct; identical to SEQ ID NO: 31947
  misc_feature 1..1701: note = hemagglutinin__InfluenzaA__ABK80135
  source 1..1701: mol_type = other RNA

SEQ ID NO: 31950 - RNA, 1701 nt, synthetic construct; identical to SEQ ID NO: 31947
  misc_feature 1..1701: note = hemagglutinin__InfluenzaA__ABK80146
  source 1..1701: mol_type = other RNA

SEQ ID NO: 31951 - RNA, 1701 nt, synthetic construct; identical to SEQ ID NO: 31947
  misc_feature 1..1701: note = hemagglutinin__InfluenzaA__ABK80157
  source 1..1701: mol_type = other RNA

SEQ ID NO: 31952 - RNA, 1701 nt, synthetic construct; identical to SEQ ID NO: 31066
  misc_feature 1..1701: note = hemagglutinin__InfluenzaA__ABK80168
  source 1..1701: mol_type = other RNA

SEQ ID NO: 31953 - RNA, 1701 nt, synthetic construct
  misc_feature 1..1701: note = hemagglutinin__InfluenzaA__ABK80179
  source 1..1701: mol_type = other RNA
atgaagactatcattgctttgagctacattttatgcctggttttcgctcaaaaacttcccggaaatgacaacagcacggcaacgctgtgcctggggcatcatgcggtgccaaacggaacgctagtgaaaacaatcacgaatgaccaaattgaagtaactaatgctactgagctggttcagagttcctcaacaggtagaatatgcgacagtcctcatcaaatccttgatggagaaaactgcacactaatagatgctctattgggagaccctcattgtgatggcttccaaaataaggaatgggacctttttgttgaacgcagcaaagcctacagcaactgttacccttatgatgtgccggattatgtctcccttaggtcactagttgcctcatcaggcacgctggagtttaacaatgaaagcttcaattggactggagtcgctcagaatggaacaagctctgcttgcaaaaggagatctgataaaagtttctttagtagattgaattggttgcaccaattaaaatacaaatatccagcactgaacgtgactatgccaaacaatgaaaaatttgacaaattgtacatttggggggttcaccacccgggtacagacagtgaccaaatcagcctatatgctcaagcatcagggagagtcacagtctctaccaaaagaagccaacaaactgtaatcccgaatatcggatctagaccctgggtaaggggtgtctccagcagaataagcatctattggacaatagtaaaaccgggagacatacttttgattaacagcacagggaatctaattgctcctcggggttacttcaaaatacgaagtgggaaaagctcaataatgaggtcagatgcacccattggcaaatgcaattctgaatgcatcactccaaatggaagcgttcccaatgacaaaccatttcaaaatgtaaacaggatcacatatggggcctgtcccagatatgttaagcaaaacactctgaaattggcaacagggatgcggaatgtgccagagaaacaaactagaggcatattcggtgcaatcgcgggcttcatagaaaatggttgggagggaatgatggacggttggtacggtttcaggcatcaaaattctgagggcacagggcaagcagcagatcttaaaagcactcaagcagcaatcaaccaaatcaacgggaaactgaataggttaatcgagaaaacgaacgagaaattccatcaaattgaaaaagaattctcagaagtagaagggagaattcaggacctcgagaaatatgttgaggacactaaaatagatctctggtcgtacaatgcggagcttcttgttgccctggagaaccaacatacaattgatctaactgactcagaaatgaacaaactgtttgaaagaacaaagaagcaactgagggaaaatgctgaggatatgggcaatggttgtttcaaaatataccacaaatgtgacaatgcctgcatagggtcaatcagaaatggaacttatgaccatgatgtatacagagacgaagcattgaacaaccggctccagatcaaaggtgttgagctgaagtcaggatacaaagattggatcctatggatttcctttgccatatcatgttttttgctttgtattgttctgctggggttcatcatgtgggcctgccaaaaaggcaacattaggtgcaacatttgcatttga

SEQ ID NO: 31954 - RNA, 1701 nt, synthetic construct
  misc_feature 1..1701: note = hemagglutinin__InfluenzaA__ABK80190
  source 1..1701: mol_type = other RNA
atgaagactatcattgctttgagctacattttatgcctggttttcgctcaaaaacttcccggaaatgacaacagcacggcaacgctgtgtctggggcatcatgcagtgccaaacggaacgctagtgaaaacaatcacgaatgaccaaattgaagtaactaatgctactgagctggttcagagttcctcaacaggtagaatatgcgacagtcctcaccaaatccttgatggagaaaactgcacactaatagatgctctattgggagaccctcattgtgatggcttccaaaataaggaatgggacctttttgttgaacgcagcaaagcctacagcaactgttacccttatgatgtgccggattatgtctcccttaggtcactagttgcctcatcaggcacgctggagtttaacaatgaaagcttcaattggactggagtcgctcagaatggaacaagctctgcttgcaaaaggagatctgataaaagtttctttagtagattgaattggttgcaccaattaaaatacaaatatccagcactgaacgtgactatgccaaacaatgaaaaatttgacaaattgtacatttggggggttcaccacccgggtacagacagtgaccaaatcagcctatatgctcaagcatcggggagagtcacagtctctaccaaaagaagccaacaaactgtaatcccgaatatcggatctagaccctgggtaaggggtgtctccagcagaataagcatctattggacaatagtaaaaccgggagacatacttttgattaacagcacagggaatctaattgctcctcggggttacttcaaaatacgaagtgggaaaagctcaataatgaggtcagatgcacccattggcaaatgcaattctgaatgcatcactccaaatggaagcattcccaatgacaaaccatttcaaaatgtaaacaggatcacatatggggcctgtcccagatatgttaagcaaaacactctgaaattggcaacagggatgcggaatgtgccagagaaacaaactagaggcatattcggtgcaatcgcgggcttcatagaaaatggttgggagggaatgatggacggttggtacggtttcaggcatcaaaattctgagggcacagggcaagcagcagatcttaaaagcactcaagcagcaatcaaccaaatcaacgggaaactgaataggttaatcgagaaaacgaacgagaaattccatcaaattgaaaaagaattctcagaagtagaagggagaattcaggacctcgagaaatatgttgaggacactaaaatagatctctggtcgtacaatgcggagcttcttgttgccctggagaaccaacatacaattgatctaactgactcagaaatgaacaaactgtttgaaagaacaaagaagcaactgagggaaaatgctgaggatatgggcaatggttgtttcaaaatataccacaaatgtgacaatgcctgcatagggtcaatcagaaatggaacttatgaccatgatgtatacagagacgaagcattgaacaaccggttccagatcaaaggtgttgagctgaagtcaggatacaaagattgggtcctatggatttcctttgccatatcatgtttcttgctttgtattgttttgctggggttcatcatgtgggcctgccaaaaaggcaacattaggtgcaacatttgcatttga

SEQ ID NO: 31955 - RNA, 1701 nt, synthetic construct
  misc_feature 1..1701: note = hemagglutinin__InfluenzaA__ABK80201
  source 1..1701: mol_type = other RNA
atgaagactatcattgctttgagctacattttatgcctggttttcgctcaaaaacttcccggaaatgacaacagcacggcaacgctgtgcctggggcatcatgcggtgccaaacggaacgctagtgaaaacaatcacgaatgaccaaattgaagtaactaatgctactgagctggttcagagttcctcaacaggtagaatatgcgacagtcctcatcaaatccttgatggagaaaactgcacactaatagatgctctattgggagaccctcattgtgatggcttccaaaataaggaatgggacctttttgttgaacgcagcaaagcctacagcaactgttacccttatgatgtgccggattatgtctcccttaggtcactagttgcctcatcaggcacgctggagtttaacaatgaaagcttcaattggactggagtcgctcagaatggaacaagctctgcttgcaaaaggagatctgataaaagtttctttagtagattgaattggttgcaccaattaaaatacaaatatccagcactgaacgtgactatgccaaacaatgaaaaatttgacaaattgtacatttggggggttcaccacccgggtacagacagtgaccaaatcagcctatatgctcaagcatcagggagagtcacagtctctaccaaaagaagccaacaaactgtaatcccgaatatcggatctagaccctgggtaaggggtgtctccagcagaataagcatctattggacaatagtaaaaccgggagacatacttttaattaacagcacagggaatctaattgctcctcggggttacttcaaaatacgaagtgggaaaagctcaataatgaggtcagatgcacccattggcaaatgcaattctgaatgcatcactccaaatggaagcattcccaatgacaaaccatttcaaaatgtaaacaggatcacatatggggcctgtcccagatatgttaagcaaaacactctgaaattggcaacagggatgcggaatgtgccagagaaacaaactagaggcatattcggtgcaatcgcgggcttcatagaaaatggttgggagggaatgatggacggttggtacggtttcaggcatcaaaattctgagggcacagggcaagcagcagatcttaaaagcactcaagcagcaatcaaccaaatcaacgggaaactgaataggttaatcgagaaaacgaacgagaaattccatcaaattgaaaaagaattctcagaagtagaagggagaattcaggacctcgagaaatatgttgaggacactaaaatagatctctggtcgtacaatgcggagcttcttgttgccctggagaaccaacatacaattgatctaactgactcagaaatgaacaaactgtttgaaagaacaaagaagcaactgagggaaaatgctgaggatatgggcaatggttgtttcaaaatataccacaaatgtgacaatgcctgcatagggtcaatcagaaatggaacttatgaccatgatgtatacagagacgaagcattgaacaaccggttccagatcaaaggtgttgagctgaagtcaggatacaaagattggatcctatggatttcctttgccatatcatgttttttgctttgtattgttttgctggggttcatcatgtgggcctgccaaaaaggcaacattaggtgcaacatttgcatttga

SEQ ID NO: 31956 - RNA, 1701 nt, synthetic construct
  misc_feature 1..1701: note = hemagglutinin__InfluenzaA__ABK80212
  source 1..1701: mol_type = other RNA
atgaagactatcattgctttgagctacattctatgtctggttttcgctcaaaaacttcccggaaatgacaacagcacggcaacgctgtgccttgggcaccatgcagtaccaaacggaacgatagtgaaaacaatcacgaatgaccaaattgaagttactaatgctactgagctggttcagagttcctcaacaggtggaatatgcgacagtcctcatcagatccttgatggagaaaactgcacactaatagatgctctattgggagaccctcagtgtgatggcttccaaaataagaaatgggacctttttgttgaacgcagcaaagcctacagcaactgttacccttatgatgtgccggattatgcctcccttaggtcactagttgcctcatccggcacactggagtttaacaatgaaagcttcgattggactggagtcactcagaatggaacaagctctgcttgcaaaaggagatctaataaaagtttctttagtagattgaattggttgacccacttaaaatacaaatacccagcattgaacgtgactatgccaaacaatgaaaaatttgacaaattgtacatttggggggttcaccacccgggtacggacagtgaccaaatcagcctatatgctcaagcatcaggaagaatcacagtctctaccaaaagaagccaacaaactgtaatcccgaatatcggatctagacccagggtaagggatgtctccagccgaataagcatctattggacaatagtaaaaccgggagacatacttttgattaacagcacagggaatctaattgctcctcggggttacttcaaaatacgaagtgggaaaagctcaataatgagatcagatgcacccattggcaaatgcaattctgaatgcatcactccaaatggaagcattcccaatgacaaaccatttcaaaatgtaaacaggatcacatatggggcctgtcccagatatgttaagcaaaacactctgaaattggcaacagggatgcgaaatgtaccagagaaacaaactagaggcatatttggcgcaatcgcgggtttcatagaaaatggttgggagggaatggtggacggttggtacggtttcaggcatcaaaattctgagggcacaggacaagcagcagatctcaaaagcactcaagcagcaatcaaccaaatcaatgggaaactgaataggttaatcgggaaaacaaacgagaaattccatcagattgaaaaagaattctcagaagtagaagggagaattcaggacctcgagaaatatgttgaggacactaaaatagatctctggtcatacaacgcggagcttcttgttgccctggagaaccaacatacaattgatctaactgactcagaaatgaacaaactgtttgaaagaacaaagaagcaactgagggaaaatgctgaggatatgggcaatggttgtttcaaaatataccacaaatgtgacaatgcctgcatagggtcaatcagaaatggaacttatgaccatgatgtgtacagagatgaagcattaaacaaccggttccagatcaaaggtgttgagctgaagtcaggatataaaaattggatcctatggatttcctttgccatatcatgttttttgctttgtgttgctttgttggggttcatcatgtgggcctgccaaaaaggcaacattaggtgcaacatttgcatttga

SEQ ID NO: 31957 - RNA, 1701 nt, synthetic construct; identical to SEQ ID NO: 31024
  misc_feature 1..1701: note = hemagglutinin__InfluenzaA__ABK80223
  source 1..1701: mol_type = other RNA

SEQ ID NO: 31958 - RNA, 1701 nt, synthetic construct
  misc_feature 1..1701: note = hemagglutinin__InfluenzaA__ABK80234
  source 1..1701: mol_type = other RNA
atgaggactatcattgctttgagctacattctatgtctggttttcgctcaaaaacttcccggaaatgacaacagcacggcaacgctgtgccttgggcaccatgcagtaccaaacggaacgatagtgaaaacaatcacaaatgaccaaattgaagttactaatgctactgagctggttcagagttcctcaacaggtggaatatgcgacagtcctcatcagatccttgatggagaaaactgcacactaatagatgctctattgggagaccctcagtgtgatggcttccaaaataagaaatgggacctttttgttgaacgcagcaaagcctacagcaactgttacccttatgatgtgccggatcatgcctcccttaggtcactagttgcctcatccggcacactggagtttaacaatgaaagcttcgattggactggagtcactcagaatggaacaagctctgcttgcaaaaggagatctaataaaagtttctttagtagattgaattggttgacccacttaaaatacaaatacccagcattgaacgtgactatgccaaacaatgaaaaatttgacaaattgtacatttggggggttcaccacccgggtacggacagtgaccaaatcagcctatatgctcaagcatcaggaagaatcacagtctctaccaaaagaagccaacaaactgtaatcccgaatatcggatctagacccagggtaagggatgtctccagccgaataagcatctattggacaatagtaaaaccgggagacatacttttgattaacagcacagggaatctaattgctcctcggggttacttcaaaatacgaagtgggaaaagctcaataatgagatcagatgcacccattggcaaatgcaattctgaatgcatcactccaaatggaagcattcccaatgacaaaccatttcaaaatgtaaacaggatcacatatggggcctgtcccagatatgttaagcaaaacactctgaaattggcaacagggatgcgaaatgtaccagagaaacaaactagaggcatatttggcgcaatcgcgggtttcatagaaaatggttgggagggaatggtggacggttggtacggtttcaggcatcaaaattctgagggcacaggacaagcagcagatctcaaaagcactcaagcagcaatcaaccaaatcaatgggaaactgaataggttaatcgggaaaacaaacgagaaattccatcagattgaaaaagaattctcagaagtagaagggagaattcaggacctcgagaaatatgttgaggacactaaaatagatctctggtcatacaacgcggagcttcttgttgccctggagaaccaacatacaattgatctaactgactcagaaatgaacaaactgtttgaaagaacaaagaagcaactgagggaaaatgctgaggatatgggcaatggttgtttcaaaatataccacaaatgtgacaatgcctgcatagggtcaatcagaaatggaacttatgaccatgatgtgtacagagatgaagcattaaacaaccggttccagatcaaaggtgttgagctgaagtcaggatataaagattggatcctatggatttcctttgccatatcatgttttttgctttgtgttgctttgttggggttcatcatgtgggcctgccaaaaaggcaacattaggtgcaacatttgcatttga

SEQ ID NO: 31959 - RNA, 1701 nt, synthetic construct
  misc_feature 1..1701: note = hemagglutinin__InfluenzaA__ABK80245
  source 1..1701: mol_type = other RNA
atgaagactatcattgctttgagctacatcctatgtctggttttcgctcaaaaacttcccggaaatgacaacagcacggcaacgctgtgccttgggcaccatgcagtaccaaacggaacgatagtgaaaacaatcacgaatgaccaaattgaagttactaatgctactgagctggttcagagttcctcaacaggtggaatatgcgacagtcctcatcagatccttgatggagaaaactgcacactaatagatgctctattgggagaccctcagtgtgatggcttccaaaataagaaatgggacctttttgttgaacgcagcaaagcccacagcaactgttacccttatgatgtgccggattatgcctcccttaggtcactaattgcctcatccggcacactggagtttaacaatgaaagcttcaattggactggagtcactcagaatggaacaagctctgcttgcaaaaggagatctaatcaaagtttctttagtagattgaattggttgacccatttaaaattcaaatacccagcattgaacgtgactatgccaaacaatgaaaaatttgacaaattgtacatttggggggttcaccacccgggtacggacagtgaccaaatcagcctatatgctcaagcaccaggaagaatcacagtctctaccaaaagaagccaacaaactgtaatcccgaatatcggatctagacccagggtaagggatatctccagcagaataagcatctattggacaatagtaaaaccgggagacatacttttgattaacagcacagggaatctaattgctcctcggggttacttcaaaatacgaagtgggaaaagctcaataatgaaatcagatgcacccattggcaaatgcaattctgaatgcatcactccaaatggaagcattcccaatgacaaaccatttcaaaatgtaaacaggatcacatatggggcctgtcccagatatgttaagcaaaacactctgaaattggcaacagggatgcgaaatgtgccagagaaacaaactagaggcatatttggcgcaattgcgggtttcatagaaaatggttgggagggaatggtggacggttggtacggtttcaggcatcagaattctgagggcacaggacaagcagcagatctcaaaagcactcaagcagcaatcaaccaaatcaatgggaaactgaataggttaatcgggaaaacaaacgagaaattccatcagattgaaaaagaattctcagaagtagaagggagaattcaggacctcgagaaatatgttgaggacactaaaatagatctctggtcatacaacgcggagcttcttgttgccctggagaaccaacatacaattgatctaactgactcagaaatgaacaaactgtttgaaagaacaaagaagcaactgagggaaaatgctgaggatatgggcaatggttgtttcaaaatataccacaaatgtgacaatgcctgcatagggtcaatcagaaatggaacttatgaccatgatgtatacagagatgaagcattaaacaaccggttccagatcaaaggtgttgagctgaagtcaggatacaaagattggatcctatggatttcctttgccatatcatgtcttttgctttgtgttgctttgttggggttcatcatgtgggcctgccaaaaaggcaacattaggtgcaacatttgcatttga

SEQ ID NO: 31960 - RNA, 1701 nt, synthetic construct; identical to SEQ ID NO: 31959
  misc_feature 1..1701: note = hemagglutinin__InfluenzaA__ABK80256
  source 1..1701: mol_type = other RNA

SEQ ID NO: 31961 - RNA, 1701 nt, synthetic construct
  misc_feature 1..1701: note = hemagglutinin__InfluenzaA__ABK80267
  source 1..1701: mol_type = other RNA
atgaagactatcattgctttgagctacattctatgtctggttttcgctcaaaaacttcccggaaatgacaacagcacggcaacgctgtgccttgggcaccatgcagtaccaaacggaacgatagtgaaaacaatcacgaatgaccaaattgaagttactaatgctactgagctggttcagagttcctcaacaggtggaatatgcgacagtcctcatcagatccttgatggagaaaactgcacactaatagatgctctattgggagaccctcagtgtgatggcttccaaaataagaaatgggacctttttgttgaacgcagcaaagcctacagcaactgttacccttatgatgtgccggattatgtctcccttaggtcactagttgcctcatccggcacactggagtttaacaatgaaagcttcaattggactggagtcactcaaaatggaacaagctctgcttgcaaaaggagatctaataacagtttctttagtagattgaattggttgacccatttaaaattcaaatacccagcattgaacgtgactatgccaaacaatgaaaaatttgacaaattgtacatttggggggttcaccacccgggtacggacaatgaccaaatcagcctatatgctcaagcatcaggaagaatcacagtctctaccaaaagaagccaacaaactgtaatcccgaatatcggatctagacccagggtaagggatatccccagcagaataagcatctattggacaatagtaaaaccgggagacatacttttgattaacagcacagggaatctaattgctcctcggggttacttcaaaatacgaagtgggaaaagctcaataatgagatcagatgcacccattggcaaatgcaattctgaatgcatcactccaaatggaagcattcccaatgacaaaccatttcaaaatgtaaacaggatcacatatggggcctgtcccagatatgttaagcaaaacactctgaaattggcaacagggatgcgaaatgtaccagagaaacaaactagaggcatatttggcgcaatcgcgggtttcatagaaaatggttgggagggaatggtggatggttggtacggtttcaggcatcaaaattctgagggaataggacaagcagcagatctcaaaagcactcaagcagcaatcaaccaaatcaatgggaagctgaataggttgatcgggaaaaccaacgagaaattccatcagattgaaaaagaattctcagaagtagaagggagaattcaggacctcgagaaatatgttgaggacactaaaatagatctctggtcatacaacgcggagcttcttgttgccctggagaaccaacatacaattgatctaactgactcagaaatgaacaaactgtttgaaagaacaaagaagcaactgagggaaaatgctgaggatatgggcaatggttgtttcaaaatataccacaaatgtgacaatgcctgcatagggtcaatcagaaatggaacttatgaccatgatgtatacagagatgaagcattaaacaaccggttccagatcaaaggtgttgagctgaagtcaggatacaaagattggatcctatggatttcctttgccatatcatgttttttgctttgtgttgctttgttggggttcatcatgtgggcctgccaaaaaggcaacattaggtgcaacatttgcatttga

SEQ ID NO: 31962 - RNA, 1701 nt, synthetic construct
  misc_feature 1..1701: note = hemagglutinin__InfluenzaA__ABK80278
  source 1..1701: mol_type = other RNA
atgaagactatcattgctttgagctacattctatgtctggttttcgctcaaaaacttcccggaaatgacaacagcacggcaacgctgtgccttgggcaccatgcagtaccaaacggaacgatagtgaaaacaatcacgaatgaccaaattgaagttactaatgctactgagctggttcagagttcctcaacaggtggaatatgcgacagtcctcatcagatccttgatggagaaaactgcacactaatagatgctctattgggagaccctcagtgtgatggcttccaaaataagaaatgggacctttttgttgaacgcagcaaagcctacagcaactgttacccttatgatgtgccggattatgcctcccttaggtcactaattgcctcatccggcacactggagtttaacaatgaaagcttcaattggactggagtcactcaaaatggaacaagctctgcttgcaaaaggagatctaatagcagtttctttagtagattaaattggttgacccacttaaaattcaaatacccagcattgaacgtgactatgccaaacaatgaagaatttgacaaattgtacatttggggggttcaccacccgggtacatacaatgaccaaatcagcctatatgctcaagcatcaggaagaatcacagtctctaccaaaagaagccaacaaactgtaatcccgaatatcgggtctagacccagggtaagggatatccccagcagaataagcatctattggacaatagtaaaaccgggagacatacttttgattaacagcacagggaatctaattgctcctcggggttacttcaaaatacgaagtgggaaaagctcaataatgagatcagatgcacccattggcaaatgcaattctgaatgcatcactccaaatggaagcattcccaatgacaaaccatttcaaaatgtaaacaggatcacatatggggcctgtcccagatatgttaagcaaaacactctgaaattggcaacagggatgcgaaatgtaccagagaaacaaactagaggcatatttggcgcaatcgcgggtttcatagaaaatggttgggagggaatggtggatggttggtacggtttcaggcatcaaaattctgagggaataggacaagcagcagatctcaaaagcactcaagcagcaatcgaccaaatcaatgggaagctgaataggttgatcgggaaaaccaacgagaaattccatcagattgaaaaagaattctcagaagtagaagggagaattcaggacctcgagaaatatgttgaggacactaaaatagatctctggtcatacaacgcggagcttcttgttgccctggagaaccaacatacaattgatctaactgactcagaaatgaacaaactgtttgaaagaacaaagaagcaactgagggaaaatgctgaggatatgggcaatggttgtttcaaaatataccacaaatgtgacaatgcctgcatagggtcaatcagaaatggaacttatgaccatgatgtatacagagatgaagcattaaacaaccggttccagatcaaaggtgttgagctgaagtcaggatacaaagattggatcctatggatttcctttgccatatcatgttttttgctttgtgttgctttgttggggttcatcatgtgggcctgccaaaaaggcaacattaggtgcaacatttgcatttga

SEQ ID NO: 31963 - RNA, 1701 nt, synthetic construct
  misc_feature 1..1701: note = hemagglutinin__InfluenzaA__ABK80289
  source 1..1701: mol_type = other RNA
atgaagactatcattgctttgagctacattctatgtctggttttcgctcaaaaacttcccggaaatgacaacagcacggcaacgctgtgccttgggcaccatgcagtaccaaacggaacgatagtgaaaacaatcacgaatgaccaaattgaagttactaatgctactgagctggttcagagttcctcaacaggtggaatatgcgacagtcctcatcagatccttgatggagaaaactgcacactaatagatgctctattgggagaccctcagtgtgatggcttccaaaataagaaatgggacctttttgttgaacgcagcaaagcctacagcaactgttacccttatgatgtgccggattatgcctcccttaggtcactagttgcctcatccggcacactggagtttaacaatgaaagcttcaattggactggagtcactcaaaatggaacaagctctgcttgcaaaaggagatctaataacagtttctttagtagattgaattggttgacccacttaaaattcaaatacccagcattgaacgtgactatgccaaacaatgaaaagtttgacaaattgtacatttggggggttcaccacccgggtacggacaatgaccaaatcttcctgtatgctcaagcatcaggaagaatcacagtttctaccaaaagaagccaacaaactgtaatcccgaatatcggatctagacccagagtaaggaatatccccagtagaataagcatatattggacaatagtaaaaccgggagacatacttttgattaacagcacagggaatctaattgctcctaggggttacttcaaaatacgaagtgggaaaagctcaataatgagatcagatgcacccattggcaaatgcaattctgaatgcatcactccaaatggaagcattcccaatgacaaaccatttcaaaatgtaaacaggatcacatatggggcctgtcccagatatgttaagcaaaacactctgaaattggcaacagggatgcgaaatgtaccagagaaacaaactagaggcatatttggcgcaatcgcgggtttcatagaaaatggttgggagggaatggtggatggttggtacggtttcaggcatcaaaattctgagggaacaggacaagcagcagatctcaaaagcactcaagcagcaatcaatcaaatcaatgggaagctgaataggttgatcgggaaaaccaacgagaaattccatcagattgaaaaagaattctcagaagtagaagggagaattcaggacctcgagaaatatgttgaggacactaaaatagatctctggtcatacaacgcggagcttcttgttgccctggagaaccaacatacaattgatctaactgactcagaaatgaacaaactgtttgaaagaacaaagaagcaactgagggaaaatgctgaggatatgggcaatggttgtttcaaaatataccacaaatgtgacaatgcctgcataggatcaatcagaaatggaacttatgaccatgatgtatacagagatgaagcattaaacaaccggttccagatcaaaggcgttgagctgaagtcaggatacaaagattggatcctatggatttcctttgccatatcatgttttttgctttgtgttgctttgttggggttcatcatgtgggcctgccaaaaaggcaacattaggtgcaacatttgcatttga

SEQ ID NO: 31964 - RNA, 1701 nt, synthetic construct
  misc_feature 1..1701: note = hemagglutinin__InfluenzaA__ABK80300
  source 1..1701: mol_type = other RNA
atgaagactatcattgctttgagctacattttatgtctggttttcgctcaaaaacttcccggaaatgacaacagcacggcaacgctgtgcctggggcaccatgcagtgccaaacggaacgctagtgaaaacaatcacgaatgaccaaattgaagtgactaatgctactgagctggttcagagttcctcaacaggtagaatatgcgacagtcctcaccaaatccttgatggagaaaactgcacactaatagatgctctattgggagaccctcattgtgatggcttccaaaataaggaatgggacctttttgttgaacgcagcaaagcctacagcaactgttacccttatgatgtgccggattatgtctcccttaggtcactagttgcctcatcaggcacgctggagtttaacaatgaaagcttcaattggactggagtcgctcagaatggaacaagctctgcttgcaaaaggagatctgataaaagtttctttagtagattgaattggttgcaccaattaaaatacaaatatccagcactgaacgtgactatgccaaacaatgaaaaatttgacaaattgtacatttggggggttcaccacccgggtacagacagtgaccaaatcagcctatatgctcaagcatcagggagagtcacagtctctaccaaaagaagccaacaaactgtaatcccgaatatcggatctagaccctgggtaaggggtgtctccagcagaataagcatctattggacaatagtaaaaccgggagacatacttttgattaacagcacagggaatctaattgctcctcggggttacttcaaaatacgaagtgggaaaagctcaataatgaggtcagatgcacccattggcaaatgcaattctgaatgcatcactccaaatggaagcattcccaatgacaaaccatttcaaaatgtaaacaggatcacatatgggccctgtcccagatatgttaagcaaaacactctgaaattggcaacagggatgcggaatgtgccagagaaacaaactagaggcatattcggtgcaatcgcgggcttcatagaaaatggttgggagggaatgatggacggttggtacggtttcaggcatcaaaattctgagggcacagggcaagcagcagatcttaaaagcactcaagcagcaatcaaccaaatcaacgggaaactgaataggttaatcgagaaaacgaacgagaaattccatcaaattgaaaaggaattctcagaagtagaagggagaattcaggacctcgagaaatatgttgaggacactaaaatagatctctggtcgtacaatgcggagcttcttgttgccctggagaaccaacatacaattgatctaactgactcagaaatgaacaaactgtttgaaagaacaaagaagcaactgagggaaaatgctgaggatatgggcaatggttgtttcaaaatataccacaaatgtgacaatgcctgcatagggtcaatcagaaatgggacttatgaccatgatgtatacagagacgaagcattgaacaaccggttccagatcaaaggtgttgagctgaagtcaggatacaaagattggatcctatggatttcctttgccatatcatgttttttgctttgtattgttttgctggggttcatcatgtgggcctgccaaaaaggcaacattaggtgcaacatttgcatttga

SEQ ID NO: 31965 - RNA, 1701 nt, synthetic construct
  misc_feature 1..1701: note = hemagglutinin__InfluenzaA__ABK80311
  source 1..1701: mol_type = other RNA
atgaagactatcattgctttgagctacattttatgtctggttttcgctcaaaaacttcccggaaatgacaacagcacggcaacgctgtgcctggggcaccatgcagtgccaaacggaacgctagtgaaaacaatcacgaatgaccaaattgaagtgactaatgctactgagctggttcagagttcctcaacaggtagaatatgcgacagtcctcaccaaatccttgatggagaaaactgcacactaatagatgctctattgggagaccctcattgtgatggcttccaaaataaggaatgggacctttttgttgaacgcagcaaagcctacagcaactgttacccttatgatgtgccggattatgtctcccttaggtcactagttgcctcatcaggcacgctggagtttaacaatgaaagcttcaattggactggagtcgctcagaatggaacaagctctgcttgcaaaaggagatctgataaaagtttctttagtagattgaattggttgcaccaattaaaatacaaatatccagcactgaacgtgactatgccaaacaatgaaaaatttgacaaattgtacatttggggggttcaccacccgggtacagacagtgaccaaatcagcctatatgctcaagcatcagggagagtcacagtctctaccaaaagaagccaacaaactgtaatcccgaatatcggatctagaccctgggtaaggggtgtctccagcagaataagcatctattggacaatagtaaaaccgggagacatacttttgattaacagcacagggaatctaattgctcctcggggttacttcaaaatacgaagtgggaaaagctcaataatgaggtcagatgcacccattggcaaatgcaattctgaatgcatcactccaaatggaagcattcccaatgacaaaccatttcaaaatgtaaacaggatcacatatggaccctgtcccagatatgttaagcaaaacactctgaaattggcaacagggatgcggaatgtgccagagaaacaaactagaggcatattcggtgcaatcgcgggcttcatagaaaatggttgggagggaatgatggacggttggtacggtttcaggcatcaaaattctgagggcacagggcaagcagcagatcttaaaagcactcaagcagcaatcaaccaaatcaacgggaaactgaataggttaatcgagaaaacgaacgagaaattccatcaaattgaaaaagaattctcagaagtagaagggagaattcaggacctcgagaaatatgttgaggacactaaaatagatctctggtcgtacaatgcggagcttcttgttgccctggagaaccaacatacaattgatctaactgactcagaaatgaacaaactgtttgaaagaacaaagaagcaactgagggaaaatgctgaggatatgggcaatggttgtttcaaaatataccacaaatgtgacaatgcctgcatagggtcaatcagaaatggaacttatgaccatgatgtatacagagacgaagcattgaacaaccggttccagatcaaaggtgttgagctgaagtcaggatacaaagattggatcctatggatttcctttgccatatcatgttttttgctttgtattgttttgctggggttcatcatgtgggcctgccaaaaaggcaacattaggtgcaacatttgcatttga

SEQ ID NO: 31966 - RNA, 1707 nt, synthetic construct
  misc_feature 1..1707: note = hemagglutinin__InfluenzaA__ABL07019
  source 1..1707: mol_type = other RNA
atggagaaaatagtgcttcttctttcaatagtcagtcttgttaaaagtgatcagatttgcattggttaccatgcaaacaattcaacagagcaggttgacacaatcatggaaaagaacgttactgttacacatgcccaagacatactggaaaagacacacaacgggaagctctgcgatctagatggagtgaagcctctaattttaagagattgtagtgtagctggatggctcctcgggaacccaatgtgtgacgaattcatcaacgtaccggaatggtcttacatagtggaaaaggccaatccaaccaatgacctctgttacccagggagtttcaacgactatgaagaactgaaacacctattgagcagaataaaccattttgagaaaattcagatcatccccaaaagttcttggtccgatcatgaagcctcatcaggagtgagctcagcatgtccatacctgggaagtccctccttttttagaaatgtggtatggcttaccaaaaagaacagtacatacccaacaataaagaaaagctacaataataccaaccaagaagatcttttggtactgtggggaattcaccatcctaataatgaggcagagcagacaaggctatatcaaaacccaaccacctatatttccattgggacatcaacactaaaccagagattggtaccaaaaatagctactagatccaaagtaaacgggcaaagtggaaggatggagttcttctggacaattttaaaaccaaatgatgcaatcaacttcgagagtaatggaaatttcattgctccagaatatgcatacaaaattgtcaagaaaggggactcagcaattatgaaaagtgaattggaatatagtaactgcaacaccaagtgtcaaactccaatgggggcgataaactctagtatgccattccacaacatacaccctctcaccatcggggaatgccccaaatatgtgaaatcaaacagattagtccttgcaacagggctcagaaatagccctcaaagagagagcagaagaaaaaagagaggtctatttggagctatagcaggttttatagagggaggatggcagggaatggtagatggttggtatgggtaccaccatagtaatgagcaggggagtgggtacgctgcagacaaagaatctactcaaaaggcaatagatggagtcaccaataaggtcaactcaattattgacaaaatgaacactcagtttgaggccgttggaagggaatttaataacttagaaaggagaatagagaatttaaacaagaagatggaagacgggtttctagatgtttggacttataatgccgaacttctggttctcatggaaaatgagagaactctagactttcatgactcaaatgttaagaacctctatgacaaggtccgactacagcttagggataatgcaaaggagctgggtaacggttgtttcgagttctatcacaaatgtgataatgaatgtatggaaagtataagaaacggaacgtacaactatccgcagtattcagaagaagcaagattaaaaagagaggaaataagtggggtaaagttggaatcaataggaacttaccaaatactgtcaatttactcaacagtggcgagttccctagcactggcaatcatgatagctggtctatctttatggatgtgctccaatggatcgttacaatgcagaatttgcatttaa

SEQ ID NO: 31967 - RNA, 1707 nt, synthetic construct
  misc_feature 1..1707: note = hemagglutinin__InfluenzaA__ABL07030
  source 1..1707: mol_type = other RNA
atggagaaaatagtgcttcttcttgcaatagtcagtcttgttaaaagtgatcagatttgcattggttaccatgcaaacaattcaacagagcaggttgacacaatcatggaaaagaacgttactgttacacatgcccaagacatactggaaaagacacacaacgggaagctctgcgatctagatggagtgaagcctctaattttaagagattgtagtgtagctggatggctcctcgggaacccaatgtgtgacgaattcatcaatgtaccggaatggtcttacatagtggagaaggccaatccaaccaatgacctctgttacccagggagtttcaacgactatgaagaactgaaacatctattgagccgaataaaccattttgagaaaattcaaatcatccccaaaagttcttggtccgatcatgaagcctcatcaggagtgagctcagcatgtccatacctgggaagtccctccttttttagaaatgtggtatggcttatcaaaaagaacagtacatacccaacaataaagaaaagctacaataataccaaccaagaagatcttttggtactgtggggaattcaccatcccaatgatgcagcagagcagacaaggctatatcaaaacccaaccacctatatttccattgggacatcaacactaaaccagagattggtaccaaaaatagctactagatccaaagtaaacgggcaaagtggaaggatggagttcttctgggcaattttaaaacctaatgatgcaatcaacttcgagagtaatggaaatttcattgctccagaatatgcatacaaaattgtcaagaaaggggactcagcaattatgaaaagtgaattggaatatggtaactgcaacaccaagtgtcaaactccaatgggggcgataaactctagtatgccattccacaacatacaccctctcaccatcggggaatgccccaaatatgtgaaatcaaacagattagtccttgcaacagggctcagaaatagccctcaaagagagagcagaagaaaaaagagaggactatttggagctatagcaggttttatagagggaggatggcagggaatggtagatggctggtatgggtaccaccatagcaatgagcaggggagtgggtacgctgcagacaaagaatccactcaaaaggcaatagatggagtcaccaataaggtcaactcaattattgacaaaatgaacactcagtttgaggctgttggaagggaatttaataacttagaaaggagaatagagaatttaaacaagaagatggaagacgggtttctagatgtttggacttataatgccgaacttctggttctcatggaaaatgagagaactctagactttcatgactcaaatgttaagaacctctacgacaaggtccgactacagcttagggataatgcaaaagagctgggtaacggttgtttcgagttctatcacaaatgtgataatgaatgtatggaaagtataagaaacggaacgtacaactatccgcagtattcagaagaagcaagattaaaaagggaggaaataagtggggtaaaattggaatcaataggaacttaccaaatactgtcaatttattcaacagtagcgagttccctagcactggcaatcatgatagctggtctatctttatggatgtgctccaatggatcgttacaatgcagaatttgcatttaa

SEQ ID NO: 31968 - RNA, 1707 nt, synthetic construct
  misc_feature 1..1707: note = hemagglutinin__InfluenzaA__ABL10088
  source 1..1707: mol_type = other RNA
atggagaaaatagtgcttctttttgcaatagtcagtcttgttaaaagtgatcagatttgcattggttaccatgcaaacaactcgacagagcaggttgacacaataatggaaaagaacgttactgttacacatgcccaagacatactggaaaagacacacaacgggaagctctgcgatctagatggagtgaagcctctaattttgagagattgtagtgtagctggatggctcctcggaaacccaatgtgtgacgaattcatcaatgtgccggaatggtcctacatagtggagaaggccaatccagtcaatgacctctgttacccaggggatttcaatgactatgaagaattgaaacacctattgagcagaataaaccattttgagaaaattcagatcatccccaaaagttcttggtccagtcatgaagcctcattaggggtgagctcagcatgtccataccagggaaagtcctcctttttcagaaatgtggtatggcttatcaaaaagaacagtacatacccaacaataaagaggagctacaataataccaaccaagaagatcttttggtactgtgggggattcaccatcctaatgatgcggcagagcagacaaagctctatcaaaacccaaccacctatatttccgttgggacatcaacactaaaccagagattggtaccaagaatagctactagatccgaagtaaacgggcaaagtggaaggatggagttcttctggacaattttaaaaccgaatgatgcaatcaacttcgagagtaatggaaatttcgttgctccagaatatgcatacaaaattgtcaagaaaggggactcaacaattatgaaaagtgaattggaatatggtaactgcaacaccaagtgtcaaactccaatgggggcgataaactctagtatgccattccacaatatacaccctctcaccatcggggaatgccccaaatatgtgaaatcaaacagattagtccttgcgactgggctcagaaatagccctcaaagagagagaagaagaaaaaagagaggattatttggagctatagcaggttttatagagggaggatggcagggaatggtagatggttggtatgggtaccaccatagcaatgagcaggggagtgggtacgctgcaaacaaagaatccactcaaaaggcaatagatggagtcaccaataaggtcaactcgatcattgacaaaatgaacactcagtttgaggccgttggaagggaatttaacaacttagaaaggagaatagagaatttaaacaagaagatggaagacgggttcctagatgtctggacttataatgctgaacttctggttctcatggaaaatgagagaactctagactttcatgactcaaatgtcaagaacctttacgacaaggtccgactacagcttagggataatgcaaaggaactgggtaacggttgtttcgagttctatcataaatgtgataatgaatgtatggaaagtgtaagaaacggaacgtatgactacccgcagtattcagaagaagcaagactaaaaagagaggaaataagtggagtaaaattggaatcaataggaatttaccaaatactgtcaatttattctacagtggcgagttccctagcactggcaatcatggtagctggtctatccttatggatgtgctccaatgggtcgttacaatgcagaatttgcatttaa

SEQ ID NO: 31969 - RNA, 1707 nt, synthetic construct
  misc_feature 1..1707: note = hemagglutinin__InfluenzaA__ABL31766
  source 1..1707: mol_type = other RNA
atggagaaaatagtgcttcttcttgcaatagtcagttttgttaaaagtgatcagatttgcattggttaccatgcaaacaattcaacagagcaggttgacacaatcatggaaaagaacgttactgttacacatgcccaagacatactggaaaagacacacaacgggaagctctgcgatctagatggagtgaagcctctaattttaagagattgtagtgtagctggatggctcctcgggaacccaatgtgtgacgaattcatcaatgtaccggaatggtcttacatagtggagaaggccaatccaaccaatgacctctgttacccagggagtttcaacgactatgaagaactgaaacatctattgagcagaataaaccattttgagaaaattcaaatcatccccaaaagttcctggtccgatcatgaagcctcatcaggagtgagctcagcatgtccatacctgggaagtccctccttttttagaaatgtggtatggcttatcaaaaagaacagtacatacccaacaataaagaaaagctacaataataccaaccaagaagatcttttggtactgtggggaattcaccatcctaatgatgcggcagagcagacaaggctatatcaaaacccaaccacctatatttccattgggacatcaacactaaaccagagattggtaccaaaaatagctactagatccaaagtaaacgggcaaagtggaaggatggagttcttctgggcaattttaaaacctaatgatgcaatcaacttcgagagtaatggaaatttcattgctccagaatatgcatacaaaattgtcaagaaaggggactcagcaattatgaaaagtgaattggaatatggtaactgcaacaccaagtgtcaaactccaatgggggcgataaactctagtatgccattccacaacatacaccctctcaccatcggggaatgccccaaatatgtgaaatcaaacagattagtccttgcaacagggctcagaaatagccctcaaagagagagcagaagaaaaaagagaggactatttggagctatagcaggttttatagagggaggatggcagggaatggtagatggctggtatgggtaccaccatagcaatgagcaggggagtgggtacgctgcagacaaagaatccactcaaaaggcaatagatggagtcaccaataaggtcaactcaattattgacaaaatgaacactcagtttgaggctgttggaagggaatttaataacttagaaaggagaatagagaatttaaacaagaagatggaagacgggtttctagatgtttggacttataatgccgaacttctggttctcatggaaaatgagagaactctagactttcatgactcaaatgttaagaacctctacgacaaggtccgactacagcttagggataatgcaaaagagctgggtaacggttgtttcgagttctatcacaaatgtgataatgaatgtatggaaagtataagaaacggaacgtacaactatccgcagtattcagaagaagcaagattaaaaagagaggaaataagtggggtaaaattggaatcaataggaacttaccaaatactgtcaatttattcaacagtagcgagttccctagcactggcaatcatgatagctggtctatctttatggatgtgctccaatggatcgttacaatgcagaatttgcatttaa

SEQ ID NO: 31970 - RNA, 1707 nt, synthetic construct
  misc_feature 1..1707: note = hemagglutinin__InfluenzaA__ABL31780
  source 1..1707: mol_type = other RNA
atggagaaaatagtacttcttctttcaatagtcagtcttgttaaaagtgatcagatttgcattggttaccatgcaaacaattcaacagagcaggttgacacaatcatggaaaagaacgttactgttacacatgcccaagacatactggaaaagacacacaacgggaagctctgcgatctagatggagtgaagcctctaattttaagagattgtagtgtagctggatggctcctcgggaacccaatgtgtgacgaattcatcaacgtaccggaatggtcttacatagtggagaaggccaatccaaccaatgacctctgttacccagggagtttcaacgactatgaagaactgaaacacctattgagcagaataaaccattttgagaaaattcagatcatccccaaaggttcttggtccgatcatgaagcctcatcaggagtgagctcagcatgtccatacctgagaagtccctccttttttagaaatgtggtatggcttatcaaaaagaacagtacatacccaacaataaagaaaagctacaataataccaaccaagaagatcttttggtactgtggggaattcaccatcctaataatgaggcagagcagacaaggctatatcaaaacccaaccacctatatttccattgggacatcaacactaaaccagagattggtaccaaaaatagctactagatccaaagtaaacgggcaaagtggaaggatggagttcttctggacaattttaaaaccaaatgatgcaatcaacttcgagagtaatggaaatttcattgctccagaatatgcatacaaaattgtcaagaaaggggactcagcaattatgaaaagtgaattggaatatggtaactgcaacaccaagtgtcaaactccaatgggggcgataaactctagtatgccattccacaacatacaccctctcaccatcggggaatgccccaaatatgtgaaatcaaacagattagtccttgcaacagggctcagaaatagccctcaaagagagagcagaagaaaaaagagaggtctatttggagctatagcaggttttatagagggaggatggcagggaatggtagatggttggtatgggtaccaccatagcaatgagcaggggagtgggtacgctgcagacaaagaatctactcaaaaggcaatagatggagtcaccaataaggtcaactcaattattgacaaaatgaacactcagtttgaggccgttggaagggaatttaataacttagaaaggagaatagagaatttaaacaagaagatggaagacgggtttctagatgtttggacttataatgccgaacttctggttctcatggaaaatgagagaactctagactttcatgactcaaatgttaaaaacctctatgacaaggtccgactacagcttagggataatgcaaaggagctgggtaacggttgtttcgagttctatcacaaatgtgataatgaatgtatggaaagtataagaaacggaacgtacaactatccgcagtattcagaagaagcaagattaaaaagagaggaaataagtggggtaaagttggaatcaataggaacttaccaaatactgtcaatttactcaacagtggcgagttccctagcactggcaatcatgatagctggtctatctttatggatgtgctccaatggatcgttacaatgcagaatttgcatttaa

SEQ ID NO: 31971 - RNA, 1701 nt, synthetic construct
  misc_feature 1..1701: note = hemagglutinin__InfluenzaA__ABL67165
  source 1..1701: mol_type = other RNA
atgaagactatcattgctttgagctacattctatgtctggttttcgctcaaaaacttcccggaaatgacaacagcacggcaacgctgtgccttgggcaccatgcagtaccaaacggaacgatagtgaaaacaatcacaaatgaccaaattgaagttactaatgctactgagctggttcagagttcctcaacaagtggaatatgcgacagtcctcatcagatccttgatggagaaaactgcacactaatagatgctctattgggagaccctcagtgtgatggcttccaaaataagaaatgggacctttttgttgaacgcagcaaagcctacagcaactgttacccttatgatgtgccggatcatgcctcccttaggtcactagttgcctcatccggcacactggagtttaacaatgaaagcttcgattggactggagtcactcagaatggaacaagctctgcttgcaaaaggagatctaataaaagtttctttagtagattgaattggttgacccacttaaaatacaaatacccagcattgaacgtgactatgccaaacaatgaaaaatttgacaaattgtacatttggggggttcaccacccgggtacggacagtgaccaaatcagcctatatgctcaagcatcaggaagaatcacagtctctaccaaaagaagccaacaaactgtaatcccgaatatcggatctagacccagggtaagggatgtctccagccgaataagcatctattggacaatagtaaaaccgggagacatacttttgattaacagcacagggaatctaattgctcctcggggttacttcaaaatacgaagtgggaaaagctcaataatgagatcagatgcacccattggcaaatgcaattctgaatgcatcactccaaatggaagcattcccaatgacaaaccatttcaaaatgtaaacaggatcacatatggggcctgtcccagatatgttaagcaaaacactctgaaattggcaacagggatgcgaaatgtaccagagaaaaaaactagaggcatatttggcgcaatcgcaggtttcatagaaaatggttgggagggaatggtggacggttggtacggtttcaggcatcaaaattctgagggcacaggacaagcagcagatctcaaaagcactcaagcagcaatcaaccaaatcaatgggaaactgaataggttaatcgggaaaacaaacgagaaattccatcagattgaaaaagaattctcagaagtagaagggagaattcaggacctcgagaaatatgttgaggacactaaaatagatctctggtcatacaacgcggagcttcttgttgccctggagaaccaacatacaattgatctaactgactcagaaatgaacaaactgtttgaaagaacaaagaagcaactgagggaaaatgctgaggatatgggcaatggttgtttcaaaatataccacaaatgtgacaatgcctgcatagggtcaatcagaaatggaacttatgaccatgatgtgtacagagatgaagcattaaacaaccggttccagatcaaaggtgttgagctgaagtcaggatataaagattggatcctatggatttcctttgccatatcatgttttttgctttgtgttgctttgttggggttcatcatgtgggcctgccaaaaaggcaacattaggtgcaacatttgcatttga

SEQ ID NO: 31972 - RNA, 1701 nt, synthetic construct
  misc_feature 1..1701: note = hemagglutinin__InfluenzaA__ABL67176
  source 1..1701: mol_type = other RNA
atgaagactatcattgctttgagctacattttatgtctggttttcactcaaaaacttcccggaaatgacaacagcacggcaacgctgtgcctggggcaccatgcagtgccaaacggaacgctagtgaaaacaatcacgaatgaccaaattgaagtgactaatgctactgagctggttcagagttcctcaacaggtggaatatgcgacagtcctcaccaaatccttgatggagaaaactgcacactaatagatgctctattgggagaccctcattgtgatggcttccaaaataaggaatgggacctttttgttgaacgcagcagagcctacagcaactgttacccttatgatgtgccggattatgcctcccttaggtcactagttgcctcatccggcacactggagtttaacaatgaaagcttcaattggactggagtcgctcagaatggaacaagctctgcttgcaaaaggagatctaataaaagtttctttagtagattgaattggttgcaccaattaaaatacaaatacccagcactgaacgtgactatgccaaacaatgaaaaatttgacaaattgtacatttggggggttcaccacccgagtacggacagtgaccaaatcagcctatatgctcaagcaccagggagagtcacagtctctaccaaaagaagccaacaaactgtaatcccgaatatcggatctagaccctgggtaaggggtgtctccagcagaataagcatctattggacaatagtaaaaccgggagacatacttttgattaactgcacagggaatctaattgctcctcggggttacttcaaaatacgaagtgggaaaagctcaataatgaggtcagatgcatccattggcaaatgcaattctgaatgcatcactccaaatggaagcattcccaatgacaaaccatttcaaaatgtaaacaggatcacatatggggcctgtcccagatatgttaagcaaaacactctgaaattggcaacagggatgcggaatgtaccagagaaacaaactagaggcatattcggcgcaatcgcgggtttcatagaaaatggttgggagggaatggtggacggttggtacggtttcaggcatcaaaattctgagggcacaggacaagcagcagatctcaaaagcactcaagcagcaatcaaccaaatcaacgggaaactgaataggttaatcgagaaaacgaacgagaaattccatcaaattgaaaaagaattctcagaagtggaagggagaattcaggacctcgagaaatatgttgaggacactaaaatagatctctggtcgtacaacgcggagcttcttgttgccctggagaaccagcatacaattgatctaactgactcagaaatgaacaaactgtttgaaagaacaaagaagcaactgagggaaaatgctgaggatatgggcaatggttgtttcaaaatataccacaaatgtgacaatgcctgcatagggtcaatcagaaatgggacttatgaccatgatgtatacagagacgaagcattaaacaaccggttccagatcaaaggtgttgagctgaagtcaggatacaaagattggatcctatggatttcctttgccatatcatgttttttgctttgtgttgtcttgctggggttcatcatgtgggcctgccaaaaaggcaacattaggtgcaacatttgcatttga

SEQ ID NO: 31973 - RNA, 1701 nt, synthetic construct; identical to SEQ ID NO: 31936
  misc_feature 1..1701: note = hemagglutinin__InfluenzaA__ABL67187
  source 1..1701: mol_type = other RNA

SEQ ID NO: 31974 - RNA, 1701 nt, synthetic construct; identical to SEQ ID NO: 31891
  misc_feature 1..1701: note = hemagglutinin__InfluenzaA__ABL67209
  source 1..1701: mol_type = other RNA

SEQ ID NO: 31975 - RNA, 1701 nt, synthetic construct; identical to SEQ ID NO: 31473
  misc_feature 1..1701: note = hemagglutinin__InfluenzaA__ABL67253
  source 1..1701: mol_type = other RNA

SEQ ID NO: 31976 - RNA, 1701 nt, synthetic construct
  misc_feature 1..1701: note = hemagglutinin__InfluenzaA__ABL67264
  source 1..1701: mol_type = other RNA
atgaaagcaaaactactggtcctgttatgtgcactttcagctacagatgcagacacaatatgtataggctaccatgcgaacaactcaaccgacactgttgacacagtactcgaaaagaacgtgacagtgacacactctgtcaacctacttgaggacaatcacaacggaaaactatgcaaactaaaaggaatagccccactacaattggggaaatgcagcattgccggatggatcttaggaaacccagaatgcgaatcactgttttctaagaaatcatggtcctacattgcagaaacaccaaactccgagaatggaacatgttacccagggtatttcgccgactatgaggaactgagggaacaattgagttcagtatcatcattcgagagattcgaaatattccccaaggaaagttcatggcccaaacacaacgtaaccaaaggagtaacggcatcatgctcccataaggggaaaagcagtttttacagaaatttgctatggctgacggagaaaaatggctcgtacccaaatctgagcaagtcctatgtgaacaacaaagagaaagaagtccttgtactatggggtgttcatcacccgtctaacatagaggaccaaaagaccatctatcgtaaagaaaatgcttatgtctctgtagtgtcttcacattataacaggagattcaccccagaaatagcaaaaagacccaaagtaagaaatcaagaagggagaattaactactactggactctgctggaacccggggacacaataatatttgaggcaaatggaaatctaatagcgccatggtatgctttcgcattgagtagaggctttgggtcaggaatcatcacctcaaacgcatcgatggatgaatgtgacgcgaagtgtcaaacaccccagggagctataaacagtagttttccttttcagaatgtacacccagtcacaataggagagtgcccaaagtacgtcaggagtacaaaattaaggatggttacaggactaaggaacatcccatccattcaatccagaggtttgtttggagccattgccggtttcattgaagggggatggactggaatgattgatggatggtatggttatcatcatcagaatgaacagggatctggctatgctgcggatcaaaaaagcacacaaaatgccattaacgggattacaaacaaggtgaactctataatcgagaaaatgaacactcaattcacagctgtgggtaaagaattcaacaaactagaaaaaaggatggaaaacttaaataaaaaagttgatgatggatttctggacatttggacatataatgcagaattgttggttctactggaaaatgaaaggactttggatttccatgactcaaatgtgaagaacctgtatgagaaagtaaaaagccaattaaagaataatgccaaagaaataggaaacgggtgttttgaattctaccacaagtgtaacaatgaatgcatggaaagtgtaaaaaatgggacttatgactatccaaaatattcagaagaatcaaagttaaacagggaaaaaattgatggagtgaaattggaatcaatgggagtctatcagattctggcgatctactcaactgtcgccagttcactggtgcttttggtctccctgggggcaatcagcttctggatgtgttctaatgggtctttgcagtgcagaatatgcatctga

SEQ ID NO: 31977 - RNA, 1701 nt, synthetic construct
  misc_feature 1..1701: note = hemagglutinin__InfluenzaA__ABL67275
  source 1..1701: mol_type = other RNA
atgaagactatcattgctttgagctacattttatgtctggttttcgctcaaaaacttcccgtaaatgacaacagcacggcaacgctgtgcctgggacaccatgcagtgccaaacggaacgctagtgaaaacaatcacgaatgaccacattgaagtgactaatgctactgagctggttcagagttcctcaacgggtagaatatgcgacagtcctcaccaaatccttgatggagaaaactgcacactaatagatgctctattgggagaccctcattgtgatggcttccaaaataaggaatgggacctttttgttgaacgcagcacagcctacagcaactgttacccttatgatgtgccggattatgcctcccttaggtcactagttgcctcatccggcacactggagtttaacaatgaaagcttcaattggactggagtcgctcagaatggaacaagctctgcttgcaaaaggagatctattaaaagtttctttagtagattgaattggttgcaccaattaaaatacaaatatccagcactgaacgtgactatgccaaacaatgaaaaatttgacaaattgtacatttggggggttcaccacccgagtacggacagtgaccaaatcagcctatatgctcaagcatcagggagagtcacagtctctaccaaaagaagccaacaaactgtaatcccgaatatcggatctagaccctgggtaaggggtgtctccagcagaataagcatctattggacaatagtaaaaccgggagacatacttttgattaacagcacagggaatctaattgctcctcggggttactttaaaatacgaagtggaaaaagctcaataatgaggtcaaatgcacccattggcaaatgcaattctgaatgcatcactccaaatggaagcattcccaatgacaaaccatttcaaaatgtaaacaggatcacatatggggcctgtcccagatatgttaagcaaaacactctgaaattggcaacagggatgcggaatgtaccagagaaacaaactagaggcatattcggcgcaatcgcgggtttcatagaaaatggttgggaggggatggtggacggttggtacggtttcaggcatcaaaattctgagggcacaggacaagcagcagatcttaaaagcactcaagcagcaatcaaccaaatcaacgggaaactgaataggttaatcgagaaaacaaacgagaaattccatcaaattgaaaaagaattctcagaagtagaagggagaattcaggacctcgagaaatatgttgaggacactaaaatagatctctggtcgtacaacgcggagcttcttgttgccctggagaaccaacatacaattgatctaactgactcagaaatgaacaaactgtttgaaagaacaaggaagcaactgagggaaaatgctgaggatgtgggcaatggttgtttcaaaatataccacaaatgtgacaatgcctgcatagggtcaatcagaaatggaacttatgaccatgatgtatacagagacgaagcattaaacaaccggttccagatcaaaggtgttaagctgaagtcaggatacaaagattggatcctatggatttcctttgccatatcatgttttttgctttgtgttgttttgctggggttcatcatgtgggcctgccaaaaaggcaacattaggtgcaacatttgcatttga

SEQ ID NO: 31978 - RNA, 1701 nt, synthetic construct
  misc_feature 1..1701: note = hemagglutinin__InfluenzaA__ABL67286
  source 1..1701: mol_type = other RNA
atgaagactatcattgctttgagctacattttatgtctggttttcgctcaaaaacttcccggaaatgacaacagcacggcaacgctgtgcctggggcaccatgcagtgccaaacggaacgctagtgaaaacaatcacgaatgaccaaattgaagtgactaatgctactgagctggttcagagttcctcaacaggtagaatatgcgacagtcctcaccaaatccttgatggagaaaactgcacactaatagatgctctattgggagaccctcattgtgatggcttccaaaataaggaatgggacctttttgttgaacgcagcaaagcctacagcaactgttacccttatgatgtgccggattatgtctcccttaggtcactagttgcctcatcaggcacgctggagtttaacaatgaaagcttcaattggactggagtcgctcagaatggaacaagctctgcttgcaaaaggagatctgataaaagtttctttagtagattgaattggttgcaccaattaaaatacaaatatccagcactgaacgtgactatgccaaacaatgaaaaatttgacaaattgtacatttggggggttcaccacccgggtacagacagtgaccaaatcagcctatatgctcaagcatcagggagagtcacagtctctaccaaaagaagccaacaaactgtaatcccgaatatcggatctagaccctgggtaaggggtgtctccagcagaataagcatctattggacaatagtaaaatcgggagacatacttttgattaacagcacagggaatctaattgctcctcggggttacttcaaaatacgaagtgggaaaagctcaataatgaggtcagatgcacccattggcaaatgcaattctgaatgcatcactccaaatggaagcattcccaatgacaaaccatttcaaaatgtaaacaggatcacatatgggccctgtcccagatatgttaagcaaaacactctgaaattggcaacagggatgcggaatgtgccagagaaacaaactagaggcatattcggtgcaatcgcgggcttcatagaaaatggttgggagggaatgatggacggttggtacggtttcaggcatcaaaattctgagggcacagggcaagcagcagatcttaaaagcactcaagcagcaatcaaccaaatcaacgggaaactgaataggttaatcgagaaaacgaacgagaaattccatcaaattgaaaaagaattctcagaagtagaagggagaattcaggacctcgagaaatatgttgaggacactaaaatagatctctggtcgtacaatgcggagcttcttgttgccctggagaaccaacatacaattgatctaactgactcagaaatgaacaaactgtttgaaagaacaaagaagcaactgagggaaaatgctgaggatatgggcaatggttgtttcaaaatataccacaaatgtgacaatgcctgcatagggtcaatcagaaatggaacttatgaccatgatgtatacagagacgaagcattgaacaaccggttccagatcaaaggtgttgagctgaagtcaggatacaaagattggatcctatggatttcctttgccatatcatgttttttgctttgtattgttttgctggggttcatcatgtgggcctgccaaaaaggcaacattaggtgcaacatttgcatttga

SEQ ID NO: 31979 - RNA, 1701 nt, synthetic construct; identical to SEQ ID NO: 31509
  misc_feature 1..1701: note = hemagglutinin__InfluenzaA__ABL67297
  source 1..1701: mol_type = other RNA

SEQ ID NO: 31980 - RNA, 1701 nt, synthetic construct
  misc_feature 1..1701: note = hemagglutinin__InfluenzaA__ABL67308
  source 1..1701: mol_type = other RNA
atgaagactatcattgctttgagctacattttatgtctggttttcgctcaaaaacttcccggaaatgacaacagcatggcaacgctgtgcctggggcaccatgcagtgccaaacggaacgctagtgaaaacaatcacgaatgaccaaattgaagtgactaatgctactgagctggttcagagttcctcaacaggtagaatatgcgacagtcctcaccaaatccttgatggagaaaactgcacactaatagatgctctattgggagaccctcattgtgatggcttccaaaataaggaatgggacctttttgttgaacgcagcaaagcctacagcagctgttacccttatgatgtgccggattatgtctcccttaggtcactagttgcctcatcaggcacgctggagtttaacaatgaaagcttcaattggactggagtcgctcagaatggaacaagctctgcttgcaaaaggagatctgataaaagtttctttagtagattgaattggttgcatcaattaaaatacaaatatccggcactgaacgtgactatgccaaacaatgaaaaatttgacaaattgtacatttggggggttcaccacccgggtacagacagtgaccaaatcagcctatatgctcaagcatcagggagagtcacagtctctaccaaaagaagccaacaaactgtaatcccgaatatcggatctagaccctgggtaaggggtgtctccagcagaataagcatctattggacaatagtaaaaccgggagacatacttttgattaacagcacagggaatctaattgctcctcggggttacttcaaaatacgaagtgggaaaagctcaataatgaggtcagatgcacccattgacaaatgcaattctgaatgcatcactccaaatggaagcattcccaatgacaaaccatttcaaaatgtaaacaggatcacatatgggctctgtcccagatatgttaagcaaaacactctgaaattggcaacagggatgcggaatgtgccagagaaacaaactagaggcatattcggtgcaatcgcgggcttcatagaaaatggttgggagggaatgatggacggttggtacggtttcaggcatcaaaattctgagggcacagggcaagcagcagatcttaaaagcactcaagcagcaatcaaccaaatcaacgggaaactgaataggttaatcgaaaaaacgaacgagaaattccatcaaattgaaaaagaattctcagaagtagaagggagaattcaggacctcgagaaatatgttgaggacactaaaatagatctctggtcgtacaatgcggagcttcttgttgccctggagaaccaacatacaattgatctaactgactcagaaatgaacaaactgtttgaaagaacaaagaagcaactgagggaaaatgctgaggatatgggcaatggttgtttcaaaatataccacaaatgtgacaatgcctgcatagggtcaatcagaaatggaacttatgaccatgatgtatacagagacgaagcattgaacaaccggttccagatcaaaggtgttgagctgaagtcaggatacaaagattggatcctatggatttcctttgccatatcatgttttttgctttgtattgttttgctggggttcatcatgtgggcctgccaaaaaggcaacgttaggtgcaacatttgcatttga

SEQ ID NO: 31981 - RNA, 1701 nt, synthetic construct; identical to SEQ ID NO: 31811
  misc_feature 1..1701: note = hemagglutinin__InfluenzaA__ABL67319
  source 1..1701: mol_type = other RNA

SEQ ID NO: 31982 - RNA, 1701 nt, synthetic construct
  misc_feature 1..1701: note = hemagglutinin__InfluenzaA__ABL67330
  source 1..1701: mol_type = other RNA
atgaagactatcattgctttgagctacattttatgcctggttttcgctcaaaaacttcccggaaatgacaacagcacggcaacgctgtgcctggggcatcatgcggtgccaaacggaacgctagtgaaaacaatcacgaatgaccaaattgaagtaactaatgctactgagctggttcagagttcctcaacaggtagaatatgcgacagtcctcatcaaatccttgatggagaaaactgcacactaatagatgctctattgggagaccctcattgtgatggcttccaaaataaggaatgggacctttttgttgaacgcagcaaagcctacagcaactgttacccttatgatgtgccggattatgtctcccttaggtcactagttgcctcatcaggcacgctggagtttaacaatgaaagcttcaattggactggagtcgctcagaatggaacaagctctgcttgcaaaaggagatctgataaaagtttctttagtagattgaattggttgcaccaattaaaatacaaatatccagctctgaacgtgactatgccaaacaatgaaaaatttgacaaattgtacatttggggggttcaccacccgggtacagacagtgaccaaatcagcctatatgctcaagcatcagggagagtcacagtctctaccaaaagaagccaacaaactgtaatcccgaatatcggatctagaccctgggtaaggggtgtctccagcagaataagcatctattggacaatagtaaaaccgggagacatacttttgattaacagcacagggaatctaattgctcctcggggttacttcaaaatacgaagtgggaaaagctcaataatgaggtcagatgcacccattggcaaatgcaattctgaatgcatcactccaaatggaagcattcccaatgacaaaccatttcaaaatgtaaacaggatcacatatggggcctgtcccagatatgttaagcaaaacactctgaaattggcaacagggatgcggaatgtgccagagaaacaaactagaggcatattcggtgcaatcgcgggcttcatagaaaatggttgggagggaatgatggacggttggtacggtttcaggcatcaaaattctgagggcacagggcaagcagcagatcttaaaagcactcaagcagcaatcaaccaaatcaacgggaaactgaataggttaatcgagaaaacgaacgagaaattccatcaaattgaaaaagaattctcagaagtagaagggagaattcaggacctcgagaaatatgtggaggacactaaaatagatctctggtcgtacaatgcggagcttcttgttgccctggagaaccaacatacaattgatctaactgactcagaaatgaacaaactgtttgaaagaacaaagaagcaactgagggaaaatgctgaggatatgggcaatggttgtttcaaaatataccacaaatgtgacaatgcctgcatagggtcaatcagaaatggaacttatgaccatgatgtatacagagacgaagcattgaacaaccggttccagatcaaaggtgttgagctgaagtcaggatacaaagattggatcctatggatttcctttgccatatcatgttttttgctttgtattgttttgctggggttcatcatgtgggcctgccaaaaaggcaacattaggtgcaacatttgcatttga

SEQ ID NO: 31983 - RNA, 1701 nt, synthetic construct; identical to SEQ ID NO: 31024
  misc_feature 1..1701: note = hemagglutinin__InfluenzaA__ABL67341
  source 1..1701: mol_type = other RNA

SEQ ID NO: 31984 - RNA, 1701 nt, synthetic construct
  misc_feature 1..1701: note = hemagglutinin__InfluenzaA__ABL67352
  source 1..1701: mol_type = other RNA
atgaagactatcattgctttgagctacattctatgtctggttttcgctcaaaaacttcccggaaatgacaacagcacggcaacgctgtgccttgggcaccatgcagtaccaaacggaacgatagtgaaaacaatcacaaatgaccaaattgaagttactaatgctactgagctggttcagagttcctcaacaggtggaatatgcgacagtcctcatcagatccttgatggagaaaactgcacactaatagatgctctattgggagaccctcagtgtgatggcttccaaaataagaaatgggacctttttgttgaacgcagcaaagcctacagcaactgttacccttatgatgtgccggatcatgcctcccttaggtcactagttgcttcatccggcacactggagtttaacaatgaaagcttcgattggactggagtcactcagaatggaacaagctctgcttgcaaaaggagatctaataaaagtttctttagtagattgaattggttgacccacttaaaatacaaatacccagcattgaacgtgactatgccaaacaatgaaaaatttgacaaattgtacatttggggggttcaccacccgggtacggacagtgaccaaatcagcctatatgctcaagcatcaggaagaatcacagtctctaccaaaagaagccaacaaactgtaatcccgaatatcggatctagacccagggtaagggatgtctccagccgaataagcatctattggacaatagtaaaaccgggagacatacttttgattaacagcacagggaatctaattgctcctcggggttacttcaaaatacgaagtgggaaaagctcaataatgagatcagatgcacccattggcaaatgcaattctgaatgcatcactccaaatggaagcattccaaatgacaaaccatttcaaaatgtaaacaggatcacatatggggcctgccccagatatgttaagcaaaacactctgaaattggcaacagggatgcgaaatgtaccagagaaacaaactagaggcatatttggcgcaatcgcgggtttcatagaaaatggttgggagggaatggtggacggttggtacggtttcaggcatcaaaattctgagggcacaggacaagcagcagatctcaaaagcactcaagcagcaatcaaccaaatcaatgggaaactgaataggttaatcgggaaaacaaacgagaaattccatcagattgaaaaagaattctcagaagtagaagggagaattcaggacctcgagaaatatgttgaggacactaaaatagatctctggtcatacaacgcggagcttcttgttgccctggagaaccaacatacaattgatctaactgactcagaaatgaacaaactgtttgaaagaacaaagaagcaactgagggaaaatgctgaggatatgggcaatggttgtttcaaaatataccacaaatgtgacaatgcctgcatagggtcaatcagaaatggaacttatgaccatgatgtgtacagagatgaagcattaaacaaccggttccagatcaaaggtgttgagctgaagtcaggatataaagattggatcctatggatttcctttgccatatcatgttttttgctttgtgttgctttgttggggttcatcatgtgggcctgccaaaaaggcaacattaggtgcaacatttgcatttga

SEQ ID NO: 31985 - RNA, 1701 nt, synthetic construct
  misc_feature 1..1701: note = hemagglutinin__InfluenzaA__ABL67363
  source 1..1701: mol_type = other RNA
atgaagactatcattgctttgagctacattctatgtctggttttcgctcaaaaacttcccggaaatgacaacagcacggcaacgctgtgccttgggcaccatgcagtaccaaacggaacgatagtgaaaacaatcacgaatgaccaaattgaagttactaatgctactgagctggttcagagttcctcaacaggtggaatatgcgacagtcctcatcagatccttgatggagaaaactgcacactaatagatgctctattgggagaccctcagtgtgatggcttccaaaataagaaatgggacctttttgttgaacgcagcaaagcctacagcaactgttacccttatgatgtgccggattatgcctcccttaggtcactagttgcctcatccggcacactggagtttaacaatgaaagcttcgattggactggagtcactcagaatggaacaagctctgcttgcaaaaggagatctaataaaagtttctttagtagattgaattggttgacccacttaaaatacaaatacccagcattgaacgtgactatgccaaacaatgaaaaatttgacaaattgtacatttggggggttcaccacccgggtacggacagtgaccaaatcagcctatatgctcaagcatcaggaagaatcacagtctctaccaaaagaagccaacaaactgtaatcccgaatatcggatctagacccagggtaagggatgtctccagccgaataagcatctattggacaatagtaaaaccgggagacatacttttgattaacagcacagggaatctaattgctcctcggggttacttcaaaatacgaagtgggaaaagctcaataatgagatcagatgcacccattggcaaatgcaattctgaatgcatcactccaaatggaagcattcccaatgacaaaccatttcaaaatgtaaacaggatcacatatggggcctgtcccagatatgttaagcaaaacactctgaaattggcaacagggatgcgaaatgtaccagagaaacaaactagaggcatatttggcgcaatcgcgggtttcatagaaaatggttgggagggaatggtggacggttggtacggtttcaggcatcaaaattctgagggcacaggacaagcagcagatctcaaaagcactcaagcagcaatcaaccaaatcaatgggaaactgaataggttaatcgggaaaacaaacgagaaattccatcagattgaaaaagaattctcagaagtagaagggagaattcaggacctcgagaaatatgttgaggacactaaaatagatctctggtcatacaacgcggagcttcttgttgccctggagaaccaacatacaattgatctaactgactcagaaatgaacaaactgtttgaaagaacaaagaagcaactgagggaaaatgctgaggatatgggcaatggttgtttcaaaatataccacaaatgtgacaatgcctgcatagggtcaatcagaaatggaacttatgaccatgatgtgtacagagatgaagcattaaacaaccggttccagatcaaaggtgttgagctgaagtcaggatataaagattggatcctatggatttcctttgccatatcatgttttttgctttgtgttgctttgttggggttcatcatgtgggcctgccaaaaaggcaacattaggtgcaacatttgcatttga

SEQ ID NO: 31986 - RNA, 1701 nt, synthetic construct
  misc_feature 1..1701: note = hemagglutinin__InfluenzaA__ABL67374
  source 1..1701: mol_type = other RNA
atgaagactatcattgctttgagctacatcctatgtctggttttcgctcaaaaacttcccggaaatgacaacagcacggcaacgctgtgccttgggcaccatgcagtaccaaacggaacgatagtgaaaacaatcacgaatgaccaaattgaagttactaatgctactgagctggttcagagttcctcaacaggtggaatatgcgacagtcctcatcagatccttgatggagaaaactgcacactaatagatgctctattgggagaccctcagtgtgatggcttccaaaataagaaatgggacctttttgttgaacgcagcaaagcccacagcaactgttacccttatgatgtgccggattatgcctcccttaggtcactaattgcctcatccggcacactggagtttaacaatgaaagcttcaattggactggagtcactcagaatggaacaagctctgcttgcaaaaggagatctaatcaaagtttctttagtagattgaattggttgacccatttaaaattcaaatacccagcattgaacgtgactatgccaaacaatgaaaaatttgacaaattgtacatttggggggttcaccacccgggtacggacagtgaccaaatcagcctatatgctcaagcaccaggaagaatcacagtctctaccaaaagaagccagcaaactgtaatcccgaatatcggatctagacccagggtaagggatatctccagcagaataagcatctattggacaatagtaaaaccgggagacatacttttgattaacagcacagggaatctaattgctcctcggggttacttcaaaatgcgaagtgggaaaagctcaataatgaaatcagatgcacccattggcaaatgcaattctgaatgcatcactccaaatggaagcattcccaatgacaaaccatttcaaaatgtaaacaggatcacatatggggcctgtcccagatatgttaagcaaaacactctgaaattggcaacagggatgcgaaatgtaccagagaaacaaactagaggcatatttggcgcaattgcgggtttcatagaaaatggttgggagggaatggtggacggttggtacggtttcaggcatcagaattctgagggcacaggacaagcagcagatctcaaaagcactcaagcagcaatcaaccaaatcaatgggaaactgaataggttaatcgggaaaacaaacgagaaattccatcagattgaaaaagaattctcagaagtagaagggagaattcaggacctcgagaaatatgttgaggacactaaaatagatctctggtcatacaacgcggagcttcttgttgccctggagaaccaacatacaattgatctaactgactcagaaatgaacaaactgtttgaaagaacaaagaagcaactgagggaaaatgctgaggatatgggcgatggttgtttcaaaatataccacaaatgtgacaatgcctgcatagggtcaatcagaaatggaacttatgaccatgatgtatacagagatgaagcattaaacaaccggttccagatcaaaggtgttgagctgaagtcaggatacaaagattggatcctatggatttcctttgccatatcatgtcttttgctttgtgttgctttgttggggttcatcatgtgggcctgccaaaaaggcaacattaggtgcaacatttgcatttga

SEQ ID NO: 31987 - RNA, 1701 nt, synthetic construct; identical to SEQ ID NO: 30826
  misc_feature 1..1701: note = hemagglutinin__InfluenzaA__ABL67385
  source 1..1701: mol_type = other RNA

SEQ ID NO: 31988 - RNA, 1701 nt, synthetic construct
  misc_feature 1..1701: note = hemagglutinin__InfluenzaA__ABL67396
  source 1..1701: mol_type = other RNA
atgaagactatcattgctttgagctacattctatgtctggttttcgctcaaaaacttcccggaaatgacaacagcacggcaacgctgtgccttgggcaccatgcagtaccaaacggaacgatagtgaaaacaatcacgaatgaccaaattgaagttactaatgctactgagctggttcagagttcctcaacaggtggaatatgcgacagtcctcatcagatccttgatggagaaaactgcacactaatagatgctctattgggagaccctcagtgtgatggcttccaaaataagaaatgggacctttttgttgaacgcagcaaagcctacagcaactgttacccttatgatgtgccggattatgtctcccttaggtcactagttgcctcatccggcacactggagtttaacaatgaaagcttcaattggactggagtcactcaaaatggaacaagctctgcttgcaaaaggagatctaataacagtttctttagtagattgaattggttgacccatttaaaattcaaatacccagcattgaacgtgactatgccaaacaatgaaaaatttgacaaattgtacatttggggggttcaccacccgggtacggacaatgaccaaatcagcctatatgctcaagcatcaggaagaatcacagtctctaccaaaagaagccaacaaactgtaatcccgaatatcggatctagacccagggtaagggatatccccagcagaataagcatctattggacaatagtaaaaccgggagacatacttttgattaacagcacagggaatctaattgctcctcggggttacttcaaaatacgaagtgggaaaagctcaataatgagatcagatgcacccattggcaaatgcaattctgaatgcatcactccaaatggaagcattcccaatgacaaaccatttcagaatgtaaacaggatcacatatggggcctgtcccagatatgttaagcaaaacactctgaaattggcaacagggatgcgaaatgtaccagagaaacaaactagaggcatatttggcgcaatcgcgggtttcatagaaaatggttgggagggaatggtggatggttggtacggtttcaggcatcaaaattctgagggaataggacaagcagcagatctcaaaagcactcaagcagcaatcaaccaaatcaatgggaagctgaataggttgatcgggaaaaccaacgagaaattccatcagattgaaaaagaattctcagaagtagaagggagaattcaggacctcgagaaatatgttgaggacactaaaatagatctctggtcatacaacgcggagcttcttgttgccctggagaaccaacatacaattgatctaactgactcagaaatgaacaaactgtttgaaagaacaaagaagcaactgagggaaaatgctgaggatatgggcaatggttgtttcaaaatataccacaaatgtgacaatgcctgcatagggtcaatcagaaatggaacttatgaccatgatgtatacagagatgaagcattaaacaaccggttccagatcaaaggtgttgagctgaagtcaggatacaaagattggatcctatggatttcctttgccatatcatgttttttgctttgtgttgctttgttggggttcatcatgtgggcctgccaaaaaggcaacattaggtgcaacatttgcatttga

SEQ ID NO: 31989 - RNA, 1701 nt, synthetic construct
  misc_feature 1..1701: note = hemagglutinin__InfluenzaA__ABL67407
  source 1..1701: mol_type = other RNA
atgaagactatcattgctttgagctacattctatgtctggttttcgctcaaaaacttcccggaaatgacaacagcacggcaacgctgtgccttgggcaccatgcagtaccaaacggaacgatagtgaaaacaatcacgaatgaccaaattgaagttactaatgctactgagctggttcagagttcctcaacaggtggaatatgtgacagtcctcatcagatccttgatggagaaaactgcacactaatagatgctctattgggagaccctcagtgtgatggcttccaaaataagaaatgggacctttttgttgaacgcagcaaagcctacagcaactgttacccttatgatgtgccggattatgcctcccttaggtcactagttgcctcatccggcacactggagtttaacaatgaaagcttcaattggactggagtcactcaaaatggaacaagctctgcttgcaaaaggagatctaataacagtttctttagtagattgaattggttgacccacttaaaattcaaatacccagcattgaacgtgactatgccaaacaatgaaaaatttgacaaattgtacatttggggggttcaccacccgggtacggacaatgaccaaatcttcctgtatgctcaagcatcaggaagaatcacagtctctaccaaaagaagccaacaaactgtaatcccgaatatcggatctagacccagagtaaggaatatccccagcagaataagcatctattggacaatagtaaaaccgggagacatacttttgattaacagcacagggaatctaattgctcctaggggttacttcaaaatacgaagtgggaaaagctcaataatgagatcagatgcacccattggcaaatgcaattctgaatgcatcactccaaatggaagtattcccaatgacaaaccatttcaaaatgtaaacaggatcacatatggggcctgtcccagatatgttaagcaaaacactctgaaattggcaacagggatgcgaaatgtaccagagaaacaaactagaggcatatttggcgcaatcgcgggtttcatagaaaatggttgggagggaatggtggatggttggtacggtttcaggcatcaaaattctgagggaataggacaagcagcagatctcaaaagcactcaagcagcaatcaatcaaatcaatgggaagctgaataggttgatcgggaaaaccaacgagaaattccatcagattgaaaaagaattctcagaagtagaagggagaattcaggacctcgagaaatatgttgaggacactaaaatagatctctggtcatacaacgcggagcttcttgttgccctggagaaccaacatacaattgatctaactgactcagaaatgaacaaactgtttgaaagaacaaagaagcaactgagggaaaatgctgaggatatgggcaatggttgtttcaaaatataccacaaatgtgacaatgcctgcataggatcaatcagaaatggaacttatgaccatgatgtatacagagatgaagcattaaacaaccggttccagatcaaaggcgttgagctgaagtcaggatacaaagattggatcctatggatttcctttgccatatcatgttttttgctttgtgttgctttgttggggttcatcatgtgggcctgccaaaaaggcaacattaggtgcaacatttgcatttga

SEQ ID NO: 31990 - RNA, 1701 nt, synthetic construct
  misc_feature 1..1701: note = hemagglutinin__InfluenzaA__ABL67418
  source 1..1701: mol_type = other RNA
atgaagactatcattgctttgagctacattctatgtctggttttcgctcaaaaacttcccggaaatgacaacagcacggcaacgctgtgccttgggcaccatgcagtaccaaacggaacgatagtgaaaacaatcacgaatgaccaaattgaagttactaatgctactgagctggttcagagttcctcaacaggtggaatatgcaacagtcctcatcagatccttgatggagaaaactgcacactaatagatgctctattgggagaccctcagtgtgatggcttccaaaataagaaatgggacctttttgttgaacgcagcaaagcctacagcaactgttacccttatgatgtgccggattatgcctcccttaggtcactagttgcctcatccggcacactggagtttaacaatgaaagcttcaattggactggagtcactcaaaatggaacaagctctgcttgcaaaaggagatctaataacagtttctttagtagattgaattggttgacccacttaaaattcaaatacccagcattgaacgtgactatgccaaacaatgaaaaatttgacaaattgtacatttggggggttcaccacccgggtacggacaatgaccaaatcttcctgtatgctcaagcatcaggaagaatcacagtctctaccaaaagaagccaacaaactgtaatcccgaatatcggatctagacccagagtaaggaatatccccagcagaataagcatctattggacaatagtaaaaccgggagacatacttttgattaacagcacagggaatctaattgctcctaggggttacttcaaaatacgaagtgggaaaagctcaataatgagatcagatgcacccattggcaaatgcaattctgaatgcatcactccaaatggaagcattcccaatgacaaaccatttcaaaatgtaaacaggatcacatatggggcctgtcccagatatgttaagcaaaacactctgaaattggcaacagggatgcgaaatgtaccagagaaacaaactagaggcatatttggcgcaatcgcgggtttcatagaaaatggttgggagggaatggtggatggttggtacggtttcaggcatcaaaattctgagggaataggacaagcagcagatctcaaaagcacgcaagcagcaatcaatcaaatcaatgggaagctgaataggttgatcgggaagaccaacgagaaattccatcagattgaaaaagaattctcagaagtagaagggagaattcaagacctcgagaaatatgttgaggacactaaaatagatctctggtcatacaacgcggagcttcttgttgccctggagaaccaacatacaattgatctaactgactcagaaatgaacaaactgtttgaaagaacaaagaagcaactgagggaaaatgctgaggatatgggcaatggttgtttcaaaatataccacaaatgtgacaatgcctgcataggatcaatcagaaatggaacttatgaccatgatgtatacagagatgaagcattaaacaaccggttccagatcaaaggcgttgagctgaagtcaggatacaaagattggatcctatggatttcctttgccatatcatgttttttgctttgtgttgctttgttggggttcatcatgtgggcctgccaaaaaggcaacattaggtgcaacatttgcatttga

SEQ ID NO: 31991 - RNA, 1707 nt, synthetic construct
  misc_feature 1..1707: note = hemagglutinin__InfluenzaA__ABL67781
  source 1..1707: mol_type = other RNA
atggagaaaatagtgcttctttttgcaatagtcagtcttgttaaaagtgatcagatttgcattggttaccatgcaaacaactcgacagagcaggttgacacaataatggaaaagaacgttactgttacacatgcccaagacatactggaaaagacacacaacgggaagctctgcgatctagatggagtgaagcctctaattttgagagattgtagtgtagctggatggctcctcggaaacccaatgtgtgacgaattcatcaatgtgccggaatggtcttacatagtggagaaggccaatccagtcaatgacctctgttacccaggggatttcaatgactatgaagaattgaaacacctattgagcaggataaaccattttgagaaaattcagatcatccccaaaagttcttggtccagtcatgaagcctcattaggggtgagctcagcatgtccataccagggaaagtcctcctttttcagaaatgtggtatggcttatcaaaaagaacagtacatacccaacaataaagaggagctacaataataccaaccaagaagatcttttggtactgtgggggattcaccatcctaatgatgcggcagagcagacaaagctctatcaaaacccaaccacctatatttccgttgggacatcaacactaaaccagagattggtaccaagaatagctactagatccaaagtaaacgggcaaagtggaaggatggagttcttctggacaattttaaaaccgaatgatgcaatcaactttgagagtaatggaaatttcattgctccagaatatgcatacaaaattgtcaagaaaggggactcaacaattatgaaaagtgaattggaatatggtaactgcaacaccaagtgtcaaactccaatgggggcgataaactctagtatgccattccacaatatacaccctctcaccatcggggaatgccccaaatatgtgaaatcaaacagattagtccttgcgactgggctcagaaatagccctcaaagagagagaagaagaaaaaagagaggattatttggagctatagcaggttttatagagggaggatggcagggaatggtagatggttggtatgggtaccaccatagcaatgagcaggggagtgggtacgctgcagacaaagaatccactcaaaaggcaatagatggagtcaccaataaggtcaactcgatcattgacaaaatgaacactcagtttgaggccgttggaagggaatttaacaacctagaaaggagaatagagaatttaaacaagaagatggaagacgggttcctagatgtctggacttataatgctgaacttctggttctcatggaaaatgagagaactctagactttcatgactcaaatgtcaagaacctttacgacaaggtccgactacagcttagggataatgcaaaggagctgggtaacggttgtttcgagttctatcataaatgtgataatgaatgtatggaaagtgtaagaaacggaacgtatgactacccgcagtattcagaagaagcaagactaaaaagagaggaaataagtggagtaaaattggaatcaataggaatttaccaaatactgtcaatttattctacagtggcgagttccctagcactggcaatcatggtagctggtctatccttatggatgtgctccaatgggtcgttacaatgcagaatttgcatttaa

SEQ ID NO: 31992 - RNA, 1707 nt, synthetic construct
  misc_feature 1..1707: note = hemagglutinin__InfluenzaA__ABL67794
  source 1..1707: mol_type = other RNA
atggagaaaatagtgctcctttttgcaatagtcagtcttgttaaaagtgatcagatttgcattggttaccatgcaaacaactcgacagagcaggttgacacaataatggaaaagaacgttactgttacacatgcccaagacatactggaaaagacacacaacgggaagctctgcgatctagatggagtgaagcctctaattttgagagattgtagtgtagctggatggctcctcggaaacccaatgtgtgacgaattcatcaatgtgccggaatggtcttacatagtggagaaggccaatccagtcaatgacctctgttacccaggggatttcaatgactatgaagaattgaaacacctattgagcagaataaaccattttgagaaaattcagatcatccccaaaagttcttggtccagtcatgaagcttcattaggggtgagctcagcatgtccataccagggaaagtcctcctttttcagaaatgtggtatggcttatcaaaaagaacagtacatacccaacaataaagaggagctacaataataccaaccaagaagatcttttggtactgtgggggattcaccatcctaatgatgcggcagagcagacaaagctctatcaaaacccaaccacctatatttccgttgggacatcaacactaaaccagagattggtaccaagaatagctactagatccaaagtaaacgggcaaagtggaaggatggagttcttctggacaattttaaaaccgaatgatgcaatcaacttcgagagtaatggaaacttcattgctccagaatatgcatacaaaattgtcaagaaaggggactcaacaattatgaaaagtgaattggaatatggtaactgcaacaccaagtgtcaaactccaatgggggcgataaactctagtatgccattccacaatatacaccctctcaccatcggggaatgccccaaatatgtgaaatcaaacagattagtccttgcgactgggctcagaaatagccctcaaagagagaaaagaagaaaaaagagaggattatttggagctatagcaggttttatagagggaggatggcagggaatggtagatggttggtatgggtaccaccatagcaatgagcaggggagtgggtacgctgcagacaaagaatccactcaaaaggcaatagatggagtcaccaataaggtcaactcgatcattgacaaaatgaacactcagtttgaggccgttggaagggaatttaacaacttagaaaggagaatagagaatttaaacaagaagatggaagacgggttcctagatgtctggacttataatgctgaacttctggttctcatggaaaatgagagaactctagactttcatgactcaaatgtcaagaacctttacgacaaggtccgactacagcttagggataatgcaaaggagctgggtaacggttgtttcgagttctatcataaatgtgataatgaatgtatggaaagcgtaagaaacggaacgtatgactacccgcagtattcagaagaagcaagactaaaaagagaggaaataagtggagtaaaattggaatcaataggaatttaccaaatactgtcaatttattctacagtggcgagttccctagcactggcaatcatggtagctggtctatccttatggatgtgctccaatgggtcgttacaatgcagaatttgcatttaa

SEQ ID NO: 31993 - RNA, 1707 nt, synthetic construct
  misc_feature 1..1707: note = hemagglutinin__InfluenzaA__ABL67816
  source 1..1707: mol_type = other RNA
atggagaaaatagtgcttctttttgcaatagtcagtcttgttaaaagtgatcagatttgcattggttaccatgcaaacaactcgacagagcaggttgacacaataatggaaaagaacgttactgttacacatgcccaagacatactggaaaagacacacaacgggaagctctgcgatctagatggagtgaagcctctaattttgagagattgtagtgtagctggatggctactcggaaacccaatgtgtgacgaattcatcaatgtgccggaatggtcttacatagtggagaaggccaatccagtcaatgacctctgttacccaggggatttcaatgactatgaagaattgaaacacctattgagcagaataaaccattttgagaaaattcagatcatccccaaaagttcttggtccagtcatgaagcctcattaggggtgagctcagcatgtccataccagggaaagtcctcctttttcagaaatgtggtatggcttatcaaaaagaacagtacatacccaacaataaagaggagctacaataataccaaccaagaagatctgttggtactgtgggggattcaccatcctaatgatgcggcagagcagacaaagctctatcaaaacccaaccacctatatttccgttgggacatcaacactaaaccagagattggtaccaagaatagctactagatccaaagtgaacgggcaaagtggaaggatggagttcttctggacaattttaaaaccgaatgatgcaatcaacttcgagagtaatggaaatttcattgctccagaatatgcatacaaaattgtcaagaaaggggactcaacaattatgaaaagtgaattggaatatggtaactgcaacaccaagtgtcaaactccaatgggggcgataaactctagtatgccattccacaatatacaccctctcaccatcggggaatgccccaaatatgtgaaatcaaacagattagttcttgcgactgggctcagaaatagccctcaaagagagagaagaagaaaaaagagaggattatttggagctatagcaggttttatagagggaggatggcagggaatggtagatggttggtatgggtaccaccatagcaatgagcaggggagtgggtacgctgcagacaaagaatccactcaaaaggcaatagatggagtcaccaataaggtcaactcgatcattaacaaaatgaacactcagtttgaggccgttggaagggaatttaacaacttagaaaggagaatagagaatttaaacaagaagatggaagacggattcctagatgtctggacttataatgctgaacttctggttctcatggaaaatgagagaactctagactttcatgactcaaatgtcaagaacctttacgacaaggtccgactacagcttagggataatgcaaaggagctgggtaacggttgtttcgagttctatcataaatgtgataatgaatgtatggaaagtgtaagaaacggaacgtatgactacccgcagtattcagaagaagcaagactaaaaagagaggaaataagtggagtaaaattggaatcaataggaatttaccaaatactgtcaatttattctacagtggcgagttccctagcactggcaatcatggtagctggtctatccttatggatgtgctccaatgggtcgttacaatgcagaatttgcatttaa

SEQ ID NO: 31994 - RNA, 1707 nt, synthetic construct
  misc_feature 1..1707: note = hemagglutinin__InfluenzaA__ABL67827
  source 1..1707: mol_type = other RNA
atggagaaaatagtgcttctttttgcaatagtcagtcttgttaaaagtgatcatatttgcattggttaccatgcaaacaactcgacagagcaggttgacacaataatggaaaagaacgttactgttacacatgcccaagacatactggaaaagacacacaacgggaagctctgcgatctagatggagtgaagcctctaattttgagagattgtagtgtagctggatggctactcggaaacccaatgtgtgacgaattcatcaatgtgccggaatggtcttacatagtggagaaggccaatccagtcaatgacctctgttacccaggggatttcaatgactatgaagaattgaaacacctattgagcagaataaaccattttgagaaaattcagatcatccccaaaagttcttggtccagtcatgaagcctcattaggggtgagctcagcatgtccataccagggaaagtcctcctttttcagaaatgtggtatggcttatcaaaaagaacagtacatacccaacaataaagaggagctacaataataccaaccaagaagatcttttggtactgtgggggattcaccatcctaatgatgcggcagagcagacaaagctctatcaaaacccaaccacctatatttccgttgggacatcaacactaaaccagagattggtaccaagaatagctactagatccaaagtgaacgggcaaagtggaaggatggagttcttctggacaattttaaaaccgaatgatgcaatcaacttcgaaagtaatggaaatttcattgctccagaatatgcatacgaaattgtcaagaaaggggactcaacaattatgaaaagtgaattggaatatggtaactgcaataccaagtgtcaaactccaatgggggcgataaactctagtatgccattccacaatatacaccctctcaccatcggggaatgccccaaatatgtgaaatcaaacagattagttcttgcgactgggctcagaaatagccctcaaatagagagaagaagaaaaaagagaggattatttggagctatagcaggttttctagagggaggatggcagggaatggtagatggttggtatgggtaccaccatagcaatgagcaggggagtgggtacgctgcagacaaagaatccactcaaaaggcaatagatggagtcaccaataaggtcaactcgatcattaacaaaatgaacactcagtttgaggccgttggaagggaatttaacaacttagaaaggagaatagagaatttaaacaagaagatggaagatgggttcctagatgtctggacttataatgctgaacttctggttctcatggaaaatgagagaactctagactttcatgactcaaatgtcaagaacctttacgacaaggtccgactacagcttagggataatgcaaaggagctgggtaacggttgtttcgagttctatcataaatgtgataatgaatgtatggaaagtgtaagaaacggaacgtatgactacccgcagtattcagaagaagcaagactaaaaagagaggaaataagtggagtaaaattggaatcaataggaatttaccaaatactgtcaatttattctacagtggcgagttccctagcactggcaatcatggtagctggtctatccttatggatgtgctccaatgggtcgttacaatgcagaatttgcatttaa

SEQ ID NO: 31995 - RNA, 1701 nt, synthetic construct
  misc_feature 1..1701: note = hemagglutinin__InfluenzaA__ABM22015
  source 1..1701: mol_type = other RNA
atgaagactatcattgctttgagctacattctatgtctggttttcgctcaaaaacttcccggaaatgacaacagcacggcaacgctgtgccttgggcaccatgcagtaccaaacggaacgatagtgaaaacaatcacgaatgaccaaattgaagttactaatgctactgagctggttcagagttcctcaacaggtggaatatgcgacagtcctcatcagatccttgatggagaaaactgcacactaatagatgctctattgggagaccctcagtgtgatggcttccaaaataagaaatgggacctttttgttgaacgcagcaaagcctacagcaactgttacccttatgatgtgccggattatgcctcccttaggtcactagttgcctcatccggcacactggagtttaacaatgaaagcttcaattggactggagtcactcaaaatggaacaagctctgcttgcaaaaggagatctaataacagtttctttagtagattgaattggttgacccacttaaaattcaaatacccagcattgaacgtgactatgccaaacaatgaaaaatttgacaaattgtacatttggggggttcaccacccgggtacggacaatgaccaaatcttcctgtatgctcaagcatcaggaagaatcacagtctctaccaaaagaagccaacaaactgtaatcccgaatatcggatctagacccagagtaaggaatatccccagcagaataagcatctattggacaatagtaaaaccgggagacatacttttgattaacagcacagggaatctaattgctcctaggggttacttcaaaatacgaagtgggaaaagctcaataatgagatcagatgcacccattggcaaatgcaattctgaatgcatcactccaaatggaagcattcccaatgacaaaccatttcaaaatgtaaacaggatcacatatggggcctgtcccagatatgttaagcaaaacactctgaaattggcaacagggatgcgaaatgtaccagagaaacaaactagaggcatatttggcgcaatcgcgggtttcatagaaaatggttgggagggaatggtggatggttggtacggtttcaggcatcaaaattctgagggaataggacaagcagcagatctcaaaagcactcaagcagcaatcaatcaaatcaatgggaagctgaataggttgatcgggaaaaccaacgagaaattccatcagattgaaaaagaattctcagaagtagaagggagaattcaggacctcgagaaatatgttgaggacactaaaatagatctctggtcatacaacgcggagcttcttgttgccctggagaaccaacatacaattgatctaactgactcagaaatgaacaaactgtttgaaagaacaaagaagcaactgagggaaaatgctgaggatatgggcaatggttgtttcaaaatataccacaaatgtgacaatgcctgcataggatcaatcagaaatggaacttatgaccatgatgtatacagagatgaagcattaaacaaccggttccagatcaaaggcgttgagctgaagtcaggatacaaagattggatcctatggatttcctttgccatatcatgttttttgctttgtgttgctttgttggggttcatcatgtgggcctgccaaaaaggcaacattaggtgcgacatttgcatttga

SEQ ID NO: 31996 - RNA, 1701 nt, synthetic construct
  misc_feature 1..1701: note = hemagglutinin__InfluenzaA__ABM22026
  source 1..1701: mol_type = other RNA
atgaaagcaaaactactagttctgttgtgtgcatttacagctacatatgcagacacaatatgtataggctaccatgcgaacaactcaactgacactgttgacacagtacttgagaagaacgtgacagtgacacactctgtcaacctacttgaggacagtcacaacggaaaactatgccgactaaaaggaacagccccactacaattgggtaattgcagcattgccggatggatcttaggaaatccagaatgcgaatcactgttttctaaggaatcatggtcttacattgcagaaacaccaaaccctaaaaatggaacatgttacccagggtatttcgccgactatgaggaactgagggagcaattgagctcagtatcatcattcaagagatttgaaatattccccaaggatagctcatggcccaaccacactgtaaccaaaggagtgacggcatcatgctcccataatgggaaaagcagcttttacaaaaatttgctatggctgacggagaagaatggcttgtacccaaatctgagcaagtcctatgtaaacaaaaagggaaaagaagtccttgtgctatggggtgttcatcacccgtctaacatgggggaccaacgggccatctatcataaagaaaatgcttatgtttctgtgttgtcttcacattatagcagaagattcaccccagaaatagcaagaagaccaaaagtaagagatcaagaagggagaattaactactactggactctgctggaacccggggacacaataatatttgaggcaaatggaaatctaatagcgccgtggtacgctttcgcactgagtagaggctttgggtcaggaatcatcatctcaaacgcatcaatgggtgaatgtgacgctaagtgtcaaacaccccaaggagctataaacagtagtctccccttccagaatgtacacccagtcacaataggagagtgtccaaagtatgtcaggagtacaaaattaaggatggttacaggactaaggaacgtcccatccattcaatccagaggtttgtttggagccattgccggtttcattgaaggagggtggactggaatgatagatggatggtatggttatcatcatcaaaatgaacaaggatctggctatgctgcggaccaaaaaagcacacaaaatgccattaatgggattacaaacaaggtgaattctataatcgagaaaatgaacactcaattcacagctgtaggcaaagaattcaacaaattagaaagaaggatggaaaacttaaataagaaagttgatgatggatttctggacatttggacatataatgcagaattgttagttctcctggaaaatgaaaggactttggattttcatgactcaaatgtgaagaacctgtatgagaaagtgaaaaaccaattgaagaataatgccaaagaaatagggaacgggtgttttgaattctatcacaagtgtaacaatgaatgcatggaaagtgtgaaaaatggaacttatgactatccaaaatattccaaagaatcaaagttaaacagggaaaaaattgatggagtgaaattggaatcaatgggagtctatcagattctggcgatctactcaactgtcgccagttcgctggtgcttttggtctccctgggggcaatcagcttctggatgtgttctaatgggtctttgcagtgtagaatatgcatctga

SEQ ID NO: 31997 - RNA, 1701 nt, synthetic construct; identical to SEQ ID NO: 31137
  misc_feature 1..1701: note = hemagglutinin__InfluenzaA__ABM22037
  source 1..1701: mol_type = other RNA

SEQ ID NO: 31998 - RNA, 1701 nt, synthetic construct; identical to SEQ ID NO: 31947
  misc_feature 1..1701: note = hemagglutinin__InfluenzaA__ABM22059
  source 1..1701: mol_type = other RNA

SEQ ID NO: 31999 - RNA, 1701 nt, synthetic construct
  misc_feature 1..1701: note = hemagglutinin__InfluenzaA__ABM22070
  source 1..1701: mol_type = other RNA
atgaagactatcattgctttgagctacattttatgcctggttttcgctcaaaaacttcccggaaatgacaacagcacggcaacgctgtgcctggggcatcatgcggtgccaaacggaacgctagtgaaaacaatcacgaatgaccaaattgaggtaactaatgctactgagctggttcagagttcctcaacaggtagaatatgcgacagtcctcatcaaatccttgatggagaaaactgcacactaatagatgctctattgggagaccctcattgtgatggcttccaaaataaggaatgggacctttttgttgaacgcagcaaagcctacagcaactgttacccttatgatgtgccggattatgtctcccttaggtcactagttgcctcatcaggcacgctggagtttaacaatgaaagcttcaattggactggagtcgctcagaatggaacaagctctgcttgcaaaaggagatctgataaaagtttctttagtagattgaattggttgcaccaattaaaatacaaatatccagcactgaacgtgactatgccaaacaatgaaaaatttgacaaattgtacatttggggggttcaccacccgggtacagacagtgaccaaatcagcctatatgctcaagcatcagggagagtcacagtctctaccaaaagaagccaacaaactgtaatcccgaatatcggatctagaccctgggtaaggggtgtctccagcagaataagcatctattggacaatagtaaaaccgggagacatacttttgattaacagcacagggaatctaattgctcctcggggttacttcaaaatacgaagtgggaaaagctcaataatgaggtcagatgcacccattggcaaatgcaattctgaatgcatcactccaaatggaagcattcccaatgacaaaccatttcaaaatgtaaacaggatcacatatggggcctgtcccagatatgttaagcaaaacactctgaaattggcaacagggatgcggaatgtgccagagaaacaaactagaggcatattcggtgcaatcgcgggcttcatagaaaatggttgggagggaatgatggacggttggtacggtttcaggcatcaaaattctgagggcacagggcaagcagcagatcttaaaagcactcaagcagcaatcaaccaaatcaacgggaaactgaataggttaatcgagaaaacgaacgagaaattccatcaaattgaaaaagaattctcagaagtagaagggagaattcaggacctcgagaaatatgttgaggacactaaaatagatctctggtcgtacaatgcggagcttcttgttgccctggagaaccaacatacaattgatctaactgactcagaaatgaacaaactgtttgaaagaacaaagaagcaactgagggaaaatgctgaggatatgggcaatggttgtttcaaaatataccacaaatgtgacaatgcctgcatagggtcaatcagaaatggaacttatgaccatgatgtatacagagacgaagcattgaacaaccggttccagatcaaaggtgttgagctgaagtcaggatacaaagattggatcctatggatttcctttgccatatcatgttttttgctttgtattgttttgctggggttcatcatgtgggcctgccaaaaaggcaacattaggtgcaacatttgcatttga

SEQ ID NO: 32000 - RNA, 1701 nt, synthetic construct
  misc_feature 1..1701: note = hemagglutinin__InfluenzaA__ABM22081
  source 1..1701: mol_type = other RNA
atgaagactatcattgctttgagctacattctatgtctggttttcgctcaaaaacttcccggaaatgacaacagcacggcaacgctgtgccttgggcaccatgcagtaccaaacggaacgatagtgaaaacaatcacaaatgaccaaattgaagttactaatgctactgagctggttcagagttcctcaacaggtggaatatgcgacagtcctcatcagatccttgatggagaaaactgcacactaatagatgctctattgggagaccctcagtgtgatggcttccaaaataagaaatgggacctttttgttgaacgcagcaaagcctacagcaactgttacccttatgatgtgccggatcatgcctcccttaggtcactagttgcctcatccggcacactggagtttaacaatgaaagcttcgattggactggagtcactcagaatggaacaagctctgcttgcaaaaggagatctaataaaagtttctttagtagattgaattggttgacccacttaaaatacaaatacccagcattgaacgtgactatgccaaacaatgaaaaatttgacaaattgtacatttggggggttcaccacccgggtacggacagtgaccaaatcagcctatatgctcaagcatcaggaagaatcacagtctctaccaaaagaagccaacaaactgtaatcccgaatatcggatctagacccagggtaagggatgtctccagccgaataagcatctattggacaatagtaaaaccgggagacatacttttgattaacagcacagggaatctaattgctcctcggggttacttcaaaatacgaagtgggaaaagctcaataatgagatcagatgcacccattggcaaatgcaattctgaatgcatcactccaaatggaagcattcccaatgacaaaccatttcaaaatgtaaacaggatcacatatggggcctgtcccagatatgttaagcaaaacactctgaaattggcaacagggatgcgaaatataccagagaaacaaactagaggcatatttggcgcaatcgcgggtttcatagaaaatggttgggagggaatggtggacggttggtacggtttcaggcatcaaaattctgagggcacaggacaagcagcagatctcaaaagcactcaagcagcaatcaaccaaatcaatgggaaactgaataggttaatcgggaaaacaaacgagaaattccatcagattgaaaaagaattctcagaagtagaagggagaattcaggacctcgagaaatatgttgaggacactaaaatagatctctggtcatacaacgcggagcttcttgttgccctggagaaccaacatacaattgatctaactgactcagaaatgaacaaactgtttgaaagaacaaagaagcaactgagggaaaatgctgaggatatgggcaatggttgtttcaaaatataccacaaatgtgacaatgcctgcatagggtcaatcagaaatggaacttatgaccatgatgtgtacagagatgaagcattaaacaaccggttccagatcaaaggtgttgagctgaagtcaggatataaagattggatcctatggatttcctttgccatatcatgttttttgctttgtgttgctttgttggggttcatcatgtgggcctgccaaaaaggcaacattaggtgcaacatttgcatttga

SEQ ID NO: 32001 - RNA, 1701 nt, synthetic construct
  misc_feature 1..1701: note = hemagglutinin__InfluenzaA__ABM22092
  source 1..1701: mol_type = other RNA
atgaagactatcattgctttgagctacattctatgtctggttttcgctcaaaaacttcccggaaatgacaacagcacggcaacgctgtgccttgggcaccatgcagtaccaaacggaacgatagtgaaaacaatcacaaatgaccaaattgaagttactaatgctactgagctggttcagagttcctcaacaggtgaaatatgcgacagtcctcatcagatccttgatggagaaaactgcacactaatagatgctctattgggagaccctcagtgtgatggcttccaaaataagaaatgggacctttttgttgaacgcagcaaagcctacagcaactgttacccttatgatgtgccggatcatgcctcccttaggtcactagttgcctcatccggcacactggagtttaacaatgaaagcttcgattgggctggagtcactcagaatggaacaagctctgcttgcaaaaggagatctaataaaagtttctttagtagattgaattggttgacccacttaaaatacaaatacccagcattgaacgtgactatgccaaacaatgaaaaatttgacaaattgtacatttggggggttcaccacccgggcacggacagtgaccaaatcagcctatatgctcaagcatcaggaagaatcacagtctctaccaaaagaagccaacaaactgtaatcccgaatatcggatctagacccagggtaagggatgtctccagccgaataagcatctattggacaatagtaaaaccgggagacatacttttgattaacagcacagggaatctaattgctcctcggggttacttcaaaatacgaagtgggaaaagctcaataatgagatcagatgcacccattggcaaatgcaattctgaatgcatcactccaaatggaagcattcccaatgacaaaccatttcaaaatgtaaacaggatcacatatggggcctgtcccagatatgttaagcaaaacactctgaaattggcaacagggatgcgaaatgtaccagagaaacaaactagaggcatatttggcgcaatcgcgggtttcatagaaaatggttgggagggaatggtggacggttggtacggtttcaggcatcaaaattctgagggcacaggacaagcagcagatctcaaaagcactcaagcagcaatcaaccaaatcaatgggaaactgaataggttaatcgggaaaacaaacgagaaattccatcagattgaaaaagaattctcagaagtagaagggagaattcaggacctcgagaaatatgttgaggacactaaaatagatctctggtcatacaacgcggagcttcttgttgccctggagaaccaacatacaattgatctaactgactcagaaatgaataaactgtttgaaagaacaaagaagcaactgagggaaaatgctgaggatatgggcaatggttgtttcaaaatataccacaaatgtgacaatgcctgcatagggtcaatcagaaatggaacttatgaccatgatgtgtacagagatgaagcattaaacaaccggttccagatcaaaggtgttgagctgaagtcaggatataaagattggatcctatggatttcctttgccatatcatgttttttgctttgtgttgctttgttggggttcatcatgtgggcctgccaaaaaggcaacattaggtgcaacatttgcatttga

SEQ ID NO: 32002 - RNA, 1701 nt, synthetic construct
  misc_feature 1..1701: note = hemagglutinin__InfluenzaA__ABM22103
  source 1..1701: mol_type = other RNA
atgaagactatcattgctttgagctacattctatgtctggttttcgctcaaaaacttcccggaaatgacaacagcacggcaacgctgtgccttgggcaccatgcagtaccaaacggaacgatagtgaaaacaatcacaaatgaccaaattgaagttactaatgctactgagctggttcagagttcctcaacaggtggaatatgcgacagtcctcatcagatccttgatggagaaaactgcacactaatagatgctctattgggagaccctcagtgtgatggcttccaaaataagaaatgggacctttttgttgaacgcagcaaagcctacagcaactgttacccttatgatgtgccggatcatgcctcccttaggtcactagttgcctcatccggcacactggagtttaacaatgaaagcttcgattggactggagtcactcagaatggaacaagctctgcttgcaaaaggagatctaataaaagtttctttagtagattgaattggttgacccacttaaaatacaaatacccagcattgaacgtgactatgccaaacaatgaaaaatttgacaaattgtacatttggggggttcaccacccgggtacggacagtgaccaaatcagcctatatgctcaagcatcaggaagaatcacagtctctaccaaaagaagccaacaaactgtaatcccgaatatcggatctagacccagggtaagggatgtctccagccgaataagcatctattggacaatagtaaaaccgggagacatacttttgattaacagcacagggaatctaattgctcctcggggttacttcaaaatacgaaatgggaaaagctcaataatgagatcagatgcacccattggcaaatgcaattctgaatgcatcacaccaaatggaagcattcccaatgacaaaccatttcaaaatgtaaacaggatcacatatggggcctgtcccagatatgttaagcaaaacactctgaaattggcaacagggatgcgaaatgtaccagagaaacaaactagaggcatatttggcgcaatcgcgggtttcatagaaaatggttgggagggaatggtggacggttggtacggtttcaggcatcaaaattctgagggcacaggacaagcagcagatctcaaaagcactcaagcagcaatcaaccaaatcaatgggaaactgaataggttaatcgggaaaacaaacgagaaattccatcagattgaaaaagaattctcagaagtagaagggagaattcaggacctcgagaaatatgttgaggacactaaaatagatctctggtcatacaacgcggagcttcttgttgccctggagaaccaacatacaattgatctaactgactcagaaatgaacaaactgtttgaaagaacaaagaagcaactgagggaaaatgctgaggatatgggcaatggttgtttcaaaatataccacaaatgtgacaatgcctgcatagggtcaatcagaaatggaacttatgaccatgatgtgtacagagatgaagcattaaacaaccggttccagatcaaaggtgttgagctgaagtcaggatataaagattggatcctatggatttcctttgccatatcatgttttttgctttgtgttgctttgttggggttcatcatgtgggcctgccaaaaaggcaacattaggtgcaacatttgcatttga

SEQ ID NO: 32003 - RNA, 1701 nt, synthetic construct; identical to SEQ ID NO: 31024
  misc_feature 1..1701: note = hemagglutinin__InfluenzaA__ABM22114
  source 1..1701: mol_type = other RNA

SEQ ID NO: 32004 - RNA, 1701 nt, synthetic construct; identical to SEQ ID NO: 31959
  misc_feature 1..1701: note = hemagglutinin__InfluenzaA__ABM22125
  source 1..1701: mol_type = other RNA

SEQ ID NO: 32005 - RNA, 1701 nt, synthetic construct
  misc_feature 1..1701: note = hemagglutinin__InfluenzaA__ABM22136
  source 1..1701: mol_type = other RNA
atgaagactatcattgctttgagctacattctatgtctggttttcgctcaaaaacttcccggaaatgacaacagcacggcaacgctgtgccttgggcaccatgcagtaccaaacggaacgatagtgaaaacaatcacgaatgaccaaattgaagttactaatgctactgagctggttcagagttcctcaacaggtggaatatgtgacagtcctcatcagatccttgatggagaaaactgcacactaatagatgctctattgggagaccctcagtgtgatggcttccaaaataagaaatgggacctttttgttgaacgcagcaaagcctacagcaactgttacccttatgatgtgccggattatgcctcccttaggtcactagttgcctcatccggcacactggagtttaacaatgaaagcttcaattggactggagtcactcaaaatggaacaagctctgcttgcaaaaggagatctaataacagtttctttagtagattgaattggttgacccacttaaaattcaaatacccagcattgaacgtgactatgccaaacaatgaaaaatttgacaaattgtacatttggggggttcaccacccgggtacggacaatgaccaaatcttcctgtatgcccaagcatcaggaagaatcacagtctctaccaaaagaagccaacaaactgtaatcccgaatatcggatctagacccagagtaaggaatatccccagcagaataagcatctattggacaatagtaaaaccgggagacatacttttgattaacagcacagggaatctaattgctcctaggggttacttcaaaatacgaagtgggaaaagctcaataatgagatcagatgcacccattggcaaatgcaattctgaatgcatcactccaaatggaagtattcccaatgacaaaccatttcaaaatgtaaacaggatcacatatggggcctgtcccagatatgttaagcaaaacactctgaaattggcaatagggatgcgaaatgtaccagagaaacaaactagaggcatatttggcgcaattgcgggtttcatagaaaatggttgggagggaatggtggatggttggtacggtttcaggcatcaaaattctgagggaataggacaagcagcagatctcaaaagcactcaagcagcaatcaatcaaatcaatgggaagctgaataggttgatcgggaaaaccaacgagaaattccatcagattgaaaaagaattctcagaagtagaagggagaattcaggacctcgagaaatatgttgaggacactaaaatagatctctggtcatacaacgcggagcttcttgttgccctggagaaccaacatacaattgatctaactgactcagaaatgaacaaactgtttgaaagaacaaagaagcaactgagggaaaatgctgaggatatgggcaatggttgtttcaaaatataccacaaatgtgacaatgcctgcataggatcaatcagaaatggaacttatgaccatgatgtatacagagatgaagcattaaacaaccggttccagatcaaaggcgttgagctgaagtcaggatacaaagattggatcctatggatttcctttgccatatcatgttttttgctttgtgttgctttgttggggttcatcatgtgggcctgccaaaaaggcaacattaggtgcaacatttgcatttga

SEQ ID NO: 32006 - RNA, 1701 nt, synthetic construct
  misc_feature 1..1701: note = hemagglutinin__InfluenzaA__ABM22147
  source 1..1701: mol_type = other RNA
atgaagactatcattgctttgagctacattctatgtctggttttcgctcaaaaacttcccggaaatgacaacagcacggcaacgctgtgccttgggcaccatgcagtaccaaacggaacgatagtgaaaacaatcacgaatgaccaaattgaagttactaatgctactgagctggttcagagttcctcaacaggtggaatatgcgacagtcctcatcaaatccttgatggagaaaactgcacactaatagatgctctattgggagaccctcagtgtgatggcttccaaaataagaaatgggacctttttgttgaacgcagcaaagcctacagcaactgttacccttatgatgtgccggattatgcctcccttaggtcactaattgcctcatccggcacactggagtttaacaatgaaagcttcaattggactggagtcactcaaaatggaacaagctctgcttgcaaaaggagatctaatagcagtttctttagtagattgaattggttgacccacttaaaattcaaatacccagcattgaacgtgactatgccaaacaatgaagaatttgacaaattgtacatttggggggttcaccacccgggtacatacaatgaccaaatcagcctatatgctcaagcatcaggaagaatcacagtctctaccaaaagaagccaacaaactgtaatcccgaatatcgggtctagacccagggtaagggatatccccagcagaataagcatctattggacaatagtaaaaccgggagacatacttttgattaacagcacagggaatctaattgctcctcggggttacttcaaaatacgaagtgggaaaagctcaataatgagatcagatgcacccattggcaaatgcaattctgaatgcatcactccaaatggaagcattcccaatgacaaaccatttcaaaatgtaaacaggatcacatatggggcctgtcccagatatgttaagcaaaacactctgaaattggcaacagggatgcgaaatgtaccagagaaacaaaccagaggcatatttggcgcaatcgcgggtttcatagaaaatggttgggagggaatggtggatggttggtacggtttcaggcatcaaaattctgagggaataggacaagcagcagatctcaaaagcactcaagcagcaatcgaccaaatcaatgggaagctgaataggttgatcgggaaaaccaacgagaaattccatcagattgaaaaagaattctcagaagtagaagggagaattcaggacctcgagaaatatgttgaggacactaaaatagatctctggtcatacaacgcggagcttcttgttgccctggagaaccaacatacaattgatctaactgactcagaaatgaacaaactgtttgaaagaacaaagaagcaactgagggaaaatgctgaggatatgggcaatggttgtttcaaaatataccacaaatgtgacaatgcctgcatagggtcaatcagaaatggaacttatgaccatgatgtatacagagatgaagcattaaacaaccggttccagatcaaaggtgttgagctgaagtcaggatacaaagattggatcctatggatttcctttgccatatcatgttttttgctttgtgttgctttgttggggttcatcatgtgggcctgccaaaaaggcaacattaggtgcaacatttgcatttga

SEQ ID NO: 32007 - RNA, 1701 nt, synthetic construct; identical to SEQ ID NO: 31425
  misc_feature 1..1701: note = hemagglutinin__InfluenzaA__ABM22158
  source 1..1701: mol_type = other RNA

SEQ ID NO: 32008 - RNA, 1701 nt, synthetic construct
  misc_feature 1..1701: note = hemagglutinin__InfluenzaA__ABM22169
  source 1..1701: mol_type = other RNA
atgaaagcaaaactactggtcctgttatgtgcactttcagctacagatgcagacacaatatgtataggctaccatgcgaacaactcaaccgacactgttgacacagtactcgaaaagaacgtgacagtgacacactctgtcaacctacttgaggacaatcacaacggaaaactatgcaaactaaaaggaatagccccactacaattggggaaatgcagcattgccggatggatcttaggaaacccagaatgcgaatcactgttttctaagaaatcatggtcctacattgcagaaacaccaaactccgagaatggaacatgttacccagggtatttcgccgactatgaggaactgagggaacaattgagttcagtatcatcattcgagagattcgaaatattccccaaggaaagttcatggcccaaacacaacgtaaccaaaggagtaacggcatcatgctcccataaggggaaaagcagtttttacagaaatttgctatggctgacggagaaaaatggctcgtacccaaatctgagcaagtcctatgtgaacaacaaagagaaagaagtccttgtactatggggtgttcatcacccgtctaacatagaggaccaaaagaccatctatcgtaaagaaaatgcttatgtctctgtagtgtcttcacattataacaggagattcaccccagaaatagcaaaaagacccaaagtaagaaatcaagaagggagaattaactactactggactctgctggaacccggggacacaataatatttgaggcaaatggaaatctaatagcgccatggtatgctttcgcattgagtagaggctttgggtcaggaatcatcacctcaaacgcatcgatggatgaatgtgacgcgaagtgtcaaacaccccagggagctataaacagtagtcttccttttcagaatgtacacccagtcacaataggagagtgcccaaagtacgtcaggagtacaaaattaaggatggttacaggactaaggaacatcccatccattcaatccagaggtttgtttggagccattgccggtttcattgaagggggatggactggaatgattgatggatggtatggttatcatcatcagaatgaacagggatctggctatgctgcggatcaaaaaagcacacaaaatgccattaatgggattacaaacaaggtgaactctataatcgagaaaatgaacactcaattcacagctgtgggtaaagaattcaacaaactagaaaaaaggatggaaaacttaaataaaaaagttgatgatgggtttctggacatttggacatataatgcagaattgttggttctactggaaaatgaaaggactttggatttccatgactcaaatgtgaagaacctgtatgagaaagtaaaaagccaattaaagaataatgccaaagaaataggaaacgggtgttttgaattctaccacaagtgtaacaatgaatgcatggaaagtgtaaaaaatgggacttatgactatccaaaatattcagaagaatcaaagttaaacagggaaaaaattgatggagtgaaattggaatcaatgggagtctatcagattctggcgatctactcaactgtcgccagttcactggtgcttttggtctccctgggggcaatcagcttctggatgtgttctaatgggtctttgcagtgcagaatatgcatctga

SEQ ID NO: 32009 - RNA, 1701 nt, synthetic construct
  misc_feature 1..1701: note = hemagglutinin__InfluenzaA__ABM22180
  source 1..1701: mol_type = other RNA
atgaaagcaaaactactggtcctgttatgtgcactttcagctacagatgcagacacaatatgtataggctaccatgcgaacaactcaaccgacactgttgacacagtactcgaaaagaacgtgacagtgacacactctgtcaacctacttgaggacaatcacaacggaaaactatgcaaactaaaaggaatagccccactacaattggggaaatgcagcattgccggatggatcttaggaaacccagaatgcgaatcactgttttctaagaaatcatggtcctacattgcagaaacaccaaactccgagaatggaacatgttacccagggtatttcgccgactatgaggaactgagggaacaattgagttcagtatcatcattcgagagattcgaaatattccccaaggaaagttcatggcccaaacacaacgtaaccaaaggagtaacggcatcatgctcccataaggggaaaagcagtttttacagaaatttgctatggctgacggagaaaaatggctcgtacccaaatctgagcaagtcctatgtgaacaacaaagagaaagaagtccttgtactatggggtgttcatcacccgtccaacatagaggaccaaaagaccatctatcgtaaagaaaatgcttatgtctctgtagtgtcttcacattataacaggagattcaccccagaaatagcaaaaagacccaaagtaagaaatcaagaagggagaattaactactactggactctgctggaacccggggacacaataatatttgaggcaaatggaaatctaatagcgccatggtatgctttcgcattgagtagaggctttgggtcaggaatcatcacctcaaacgcatcgatggatgaatgtgacgcgaagtgtcagacaccccagggagctataaacagtagtcttccttttcagaatgtacacccagtcacaataggagagtgcccaaagtacgtcaggagtacaaaattaaggatggttacaggactaaggaacatcccatccattcaatccagaggtttgtttggagccattgccggtttcattgaagggggatggactggaatgattgatggatggtatggttatcatcatcagaatgaacagggatctggctatgctgcggatcaaaaaagcacacaaaatgccattaacgggattacaaacaaggtgaactctataatcgagaaaatgaacactcaattcacagctgtgggtaaagaattcaacaaactagaaaaaaggatggaaaacttaaataaaaaagttgatgatggatttctggacatttggacatataatgcagaattgttggttctactggaaaatgaaaggactttggatttccatgactcaaatgtgaagaacctgtatgagaaagtaaaaagccaattaaagaataatgccaaagaaataggaaacgggtgttttgaattctaccacaagtgtaacaatgaatgcatggaaagtgtaaaaaatgggacttatgactatccaaaatattcagaagaatcaaagttaaacagggaaaaaattgatggagtgaaattggaatcaatgggagtctatcagattctggcgatctactcaactgtcgccagttcactggtgcttttggtctccctgggggcaatcagcttctggatgtgttctaatgggtctttgcagtgcagaatatgcatctga

SEQ ID NO: 32010 - RNA, 1701 nt, synthetic construct
  misc_feature 1..1701: note = hemagglutinin__InfluenzaA__ABM22191
  source 1..1701: mol_type = other RNA
atgaaagcaaaactactggtcctgttatgtgcactttcagctacagatgcagacacaatatgtataggctaccatgcgaacaactcaaccgacactgttgacacagtactcgaaaagaacgtgacagtgacacactctgtcaacctacttgaggacaatcacaacggaaaactatgcaaactaaaaggaatagccccactacaattggggaaatgcagcattgccggatggatcttaggaaacccagaatgcgaatcactgttttctaagaaatcatggtcctacattgcagaaacaccaaactccgagaatggaacatgttacccagggtatttcgccgactatgaggaactgagggaacaattgagttcagtatcatcattcgagagattcgaaatattccccaaggaaagttcatggcccaaacacaacgtaaccaaaggagtaacggcatcatgctcccataaggggaaaagcagtttttacagaaatttgctatggctgacggagaaaaatggctcgtacccaaatctgagcaagtcctatgtgaacaacaaagagaaagaagtccttgtactatggggtgttcatcacccgtctaacatagaggaccaaaagaccatctatcgtaaagaaaatgcttatgtctctgtagtgtcttcacattataacaggagattcaccccagaaatagcaaaaagacccaaagtaagaaatcaagaagggagaattaactactactggactctgctggaacccggggacacaataatatttgaggcaaatggaaatctaatagcgccatggtatgctttcgcactgagtagaggctttgggtcaggaatcatcacctcaaacgcatcgatggatgaatgtgacgcgaagtgtcaaacaccccagggagctataaacagtagtcttccttttcagaatgtacacccagtcacaataggagagtgcccaaagtacgtcaggagtacaaaattaaggatggttacaggactaaggaacatcccatccattcaatccagaggtttgtttggagccattgccggtttcattgaagggggatggactggaatgattgatggatggtatggttatcatcatcagaatgaacagggatctggctatgctgcggatcaaaaaagcacacaaaatgccattaacgggattacaaacaaggtgaactctataatcgagaaaatgaacactcaattcacagctgtgggtaaagaattcaacaaactagaaaaaaggatggaaaacttaaataaaaaagttgatgatggatttctggacatttggacatataatgcagaattgttggttctactggaaaatgaaaggactttggatttccatgactcaaatgtgaagaacctgtatgagaaagtaaaaagccaattaaagaataatgccaaagaaataggaaacgggtgttttgaattctaccacaagtgtaacaatgaatgcatggaaagtgtaaaaaatgggacttatgactatccaaaatattcagaagaatcaaagttaaacagggaaaaaattgatggagtgaaattggaatcaatgggagtctatcagattctggcgatctactcaactgtcgccagttcactggtgcttttggtctccctgggggcaatcagcttctggatgtgttctaatgggtctttgcagtgcagaatatgcatctga

SEQ ID NO: 32011 - RNA, 1701 nt, synthetic construct
  misc_feature 1..1701: note = hemagglutinin__InfluenzaA__ABM22202
  source 1..1701: mol_type = other RNA
atgaaagcaaaactactggtcctgttatgtgcactttcagctacagatgcagacacaatatgtataggctaccatgcgaacaactcaaccgacactgttgacacagtactcgaaaagaacgtgacagtgacacactctgtcaacctacttgaggacaatcacaacggaaaactatgcaaactaaaaggaatagccccactacaattggggaaatgcagcattgccggatggatcttaggaaacccagaatgcgaatcactgttttctaagaaatcatggtcctacattgcagaaacaccaaactccgagaatggaacatgttacccagggtatttcgccgactatgaggaactgagggaacaattgagttcagtatcatcattcgagagattcgaaatattccccaaggaaagttcatggcccaaacacaacgtaaccaaaggagtaacggcatcatgctcccataaggggaaaagcagtttttacagaaatttgctatggctgacggagaaaaatggctcgtacccaaatctgagcaagtcctatgtgaacaacaaagagaaagaagtccttgtactatggggtgttcatcacccgtctaacatagaggaccaaaagaccatctatcgtaaagaaaatgcttatgtatctgtagtgtcttcacattataacaggagattcaccccagaaatagcaaaaagacccaaagtaagaaatcaagaagggagaattaattactactggactctgctggaacccggggacacaataatatttgaggcaaatggaaatctaatagcgccatggtatgctttcgcattgagtagaggctttgggtcaggaatcatcacctcaaacgcatcgatggatgaatgtgacgcgaagtgtcaaacaccccagggagctataaacagtagtcttccttttcagaatgtacacccagtcacaataggagagtgcccaaagtacgtcaggagtacaaaattaaggatggttacaggactaaggaacatcccatccattcaatccagaggtttgtttggagccattgccggtttcattgaagggggatggactggaatgattgatggatggtatggttatcatcatcagaatgaacagggatctggctatgctgcggatcaaaaaagcacacaaaatgccattaacgggattacaaacaaggtgaactctataatcgagaaaatgaacactcaattcacagctgtgggtaaagaattcaacaaactagaaaaaaggatggaaaacttaaataaaaaagttgatgatggatttctggacatttggacatataatgcagaattgttggttctactggaaaatgaaaggactttggatttccatgactcaaatgtgaagaacctgtatgagaaagtaaaaagccaattaaagaataatgccaaagaaataggaaacgggtgttttgaattctaccacaagtgtaacaatgaatgcatggaaagtgtaaaaaatgggacttatgactatccaaaatattcagaagaatcaaagttaaacagggaaaaaattgatggagtgaaattggaatcaatgggagtctatcagattctggcgatctactcaactgtcgccagttcactggtgcttttggtctccctgggggcaatcagcttctggatgtgttctaatgggtctttgcagtgcagaatatgcatctga

SEQ ID NO: 32012 - RNA, 1701 nt, synthetic construct
  misc_feature 1..1701: note = hemagglutinin__InfluenzaA__ABM22213
  source 1..1701: mol_type = other RNA
atgaaagcaaaactactggtcctgttatgtgcactttcagctacagatgcagacacaatatgtataggctaccatgcgaacaactcaaccgacactgttgacacagtactcgaaaagaacgtgacagtgacacactctgtcaacctacttgaggacaatcacaacggaaaactatgcaaactaaaaggaatagccccactacaattggggaaatgcagcattgccggatggatcttaggaaacccagaatgcgaatcactgttttctaagaaatcatggtcctacattgcagaaacaccaaactccgagaatggaacatgttacccagggtatttcgccgactatgaggaactgagggaacaattgagttcagtatcatcattcgagagattcgaaatattccccaaggaaagttcatggcccaaacacaacgtaaccaaaggagtaacggcatcatgctcccataaggggaaaagcagtttttacagaaatttgctatggctgacggagaaaaatggctcgtacccaaatctgagcaagtcctatgtgaacaacaaagagaaagaagtccttgtactatggggtgttcatcacccgtccaacatagaggaccaaaagaccatctatcgtaaagaaaatgcttatgtctctgtagtgtcttcacattataacaggagattcaccccagaaatagcaaaaagacccaaagtaagaaatcaagaagggagaattaactactactggactctgctggaacccggggacacaataatatttgaggcaaatggaaatctaatagcgccatggtatgctttcgcattgagtagaggctttgggtcaggaatcatcacctcaaacgcatcgatggatgaatgtgacgcgaagtgtcaaacaccccagggagctataaacagtagtcttccttttcagaatgtacacccagtcacaataggagagtgcccaaagtacgtcaggagtacaaaattaaggatggttacaggactaaggaacatcccatccattcaatccagaggtttgtttggagccattgccggtttcattgaagggggatggactggaatgattgatggatggtatggttatcatcatcagaatgaacagggatctggctatgctgcggatcaaaaaagcacacaaaatgccattaacgggattacaaacaaggtgaactctataatcgagaaaatgaacactcaattcacagctgtgggtaaagaattcaacaaactagaaaaaaggatggaaaacttaaataaaaaagttgatgatggatttctggacatttggacatataatgcagaattgttggttctactggaaaatgaaaggactttggatttccatgactcaaatgtgaagaacctgtatgagaaagtaaaaagccaattaaagaataatgccaaagaaataggaaacgggtgttttgaattctaccacaagtgtaacaatgaatgcatggaaagtgtaaaaaatgggacttatgactatccaaaatattcagaagaatcaaagttaaacagggaaaaaattgatggagtgaaattggaatcaatgggagtctatcagattctggcgatctactcaactgtcgccagttcactggtgcttttggtctccctgggggcaatcagcttctggatgtgttctaatgggtctttgcagtgcagaatatgcatctga

SEQ ID NO: 32013 - RNA, 1701 nt, synthetic construct
  misc_feature 1..1701: note = hemagglutinin__InfluenzaA__ABM22224
  source 1..1701: mol_type = other RNA
atgaaagcaaaactactggtcctgttatgtgcactttcagctacagacgcagacacaatatgtataggctaccatgcgaacaactcaaccgacactgttgacacagtgctcgaaaagaacgtgacagtgacacactctgtcaacctacttgaggacaatcacaacggaaaactatgcaaactaaaaggaatagccccactacaattggggaaatgcagcattgccggatggatcttaggaaacccagaatgcgaatcactgttttctaagaaatcatggtcctacattgcagaaacaccaaactccgagaatggaacatgttacccagggtatttcgccgactatgaggaactgagggaacaattgagttcagtatcatcattcgagagattcgaaatattccccaaggaaagttcatggcccaaacacaacgtaaccaaaggagtaacggcatcatgctcccataaggggaaaagcagtttttacagaaatttgctatggctgacggagaaaaatggctcgtacccaaatctgagcaagtcctatgtgaacaacaaagagaaagaagtccttgtactatggggtgttcatcacccgtctaacatagaggaccaaaagaccatctatcgtaaagaaaatgcttatgtctctgtagtgtcttcacattataacaggagattcaccccagaaatagcaaaaagacccaaagtaagaaatcaagaagggagaattaactactactggactctgctggaacccggggacacaataatatttgaggcaaatggaaatctaatagcgccatggtatgctttcgcattgagtagaggctttgggtcaggaatcatcacctcaaacgcatcgatggatgaatgtgacgcgaagtgtcaaacaccccagggagctataaacagtagtcttccttttcagaatgtacacccagtcacaataggagagtgcccaaagtacgtcaggagtacaaaattaaggatggttacaggactaaggaacatcccatccattcaatccagaggtttgtttggagccattgccggtttcattgaagggggatggactggaatgattgatggatggtatggttatcatcatcagaatgaacagggatctggctatgctgcggatcaaaaaagcacacaaaatgccattaacgggattacaaacaaggtgaactctataatcgagaaaatgaacactcaattcacagctgtgggtaaagaattcaacaaactagaaaaaaggatggaaaacttaaataaaaaagttgatgatggatttctggacatttggacatataatgcagaattgttggttctactggaaaatgaaaggactttggatttccatgactcaaatgtgaagaacctgtatgagaaagtaaaaagccaattaaagaataatgccaaagaaataggaaacgggtgttttgaattctaccacaagtgtaacaatgaatgcatggaaagtgtaaaaaatgggacttatgactatccaaaatattcagaagaatcaaagttaaacagggaaaaaattgatggagtgaaattggaatcaatgggagtctatcagattctggcgatctactcaactgtcgccagttcactggtgcttttggtctccctgggggcaatcagcttctggatgtgttctaatgggtctttgcagtgcagaatatgcatctga

SEQ ID NO: 32014 - RNA, 1701 nt, synthetic construct
  misc_feature 1..1701: note = hemagglutinin__InfluenzaA__ABM22235
  source 1..1701: mol_type = other RNA
atgaaagcaaaactactggtcctgttatgtgcactttcagctacagatgcagacacaatatgtataggctaccatgcgaacaactcaaccgacactgttgacacagtactcgaaaagaacgtgacagtgacacactctgtcaacctacttgaggacaatcacaacggaaaactatgcaaactaaaaggaatagccccactacaattggggaagtgcagcattgccggatggatcttaggaaacccagaatgcgaatcactgttttctaagaaatcatggtcctacattgcagaaacaccaaactccgagaatggaacatgttacccagggtatttcgccgactatgaggaactgagggaacaattgagttcagtatcatcattcgagagattcgaaatattccccaaggaaagttcatggcccaaacacaacgtaaccaaaggagtaacggcatcatgctcccataaggggaaaagcagtttttacagaaatttgctatggctgacggagaaaaatggctcgtacccaaatctgagcaagtcctatgtgaacaacaaagagaaagaagtccttgtactatggggtgttcatcacccgtctaacatagaggaccaaaagaccatctatcgtaaagaaaatgcttatgtctctgtagtgtcttcacattataacaggagattcaccccagaaatagcaaaaagacccaaagtaagaaatcaagaagggagaattaactactactggactctgctggaacccggggacacaataatatttgaggcaaatggaaatctaatagcgccatggtatgctttcgcattgagtagaggctttgggtcaggaatcatcacctcaaacgcatcgatggatgaatgtgacgcgaagtgtcaaacaccccagggagctataaacagtagtcttccttttcagaatgtacacccagtcacaataggagagtgcccaaagtacgtcaggagtacaaaattaaggatggttacaggactaaggaacattccatccattcaatccagaggtttgtttggagccattgccggtttcattgaagggggatggactggaatgattgatggatggtatggttatcatcatcagaatgaacagggatctggctatgctgcggatcaaaaaagcacacaaaatgccattaacgggattacaaacaaggtgaactctataatcgagaaaatgaacactcaattcacagctgtgggtaaagaattcaacaaactagaaaaaaggatggaaaacttaaataaaaaagttgatgatggatttctggacatttggacatataatgcagaattgttggttctactggaaaatgaaaggactttggatttccatgactcaaatgtgaagaacctgtatgagaaagtaaaaagccaattaaagaataatgccaaagaaataggaaacgggtgttttgaattctaccacaagtgtaacaatgaatgcatggaaagtgtaaaaaatgggacttatgactatccaaaatattcagaagaatcaaagttaaacagggaaaaaattgatggagtgaaattggaatcaatgggagtctatcagattctggcgatctactcaactgtcgccagttcactggtgcttttggtctccctgggggcaatcagcttctggatgtgttctaatgggtctttgcagtgcagaatatgcatctga

SEQ ID NO: 32015 - RNA, 1701 nt, synthetic construct
  misc_feature 1..1701: note = hemagglutinin__InfluenzaA__ABM22268
  source 1..1701: mol_type = other RNA
atgaaagtaaaactactagtcctgttgtgtgcatttacagctacatatgcagacacaatatgtataggctaccatgcgaacaactcaaccgacactgttgacacagtacttgagaagaacgtgacagtgacacactctgtcaacctacttgaggacagtcacaacggaaaactatgccgactaaaaggaacagccccactacaattgggtaattgcagcgttgccggatggatcttaggaaacccagaatgcgaatcactgttttctaaggaatcatggtcctacattgcagaaacaccaaaccctgagaatggaacatgttacccagggtatttcgccgactatgaggaactgagggagcaattgagctcagtatcatcattcgagagattcgaaatattccccaaggaaagctcatggcccaaccacaccgtaaccaaaggagtgacggcatcatgttcccataatgggaaaagcagtttttacaaaaatttgctatggctgacggaaaagaatggcttgtacccaaatctgagcaagtcctatgtaaacaacaaggagaaagaagtccttgtactatggggtgttcatcacccgtcgaacataggggaccaaagggccatctatcatacagaaaatgcttatgtctctgtagtgtcttcacattatagcagaagattcaccccagaaatagcaaaaagacccaaagtaagagatcaagaagggagaattaactactactggactctgctggaacccggggacacaataatatttgaggcaaatggaaatctaatagcgccatggtacgctttcgcactgagtagaggctttgggtcaggaatcatcacctcaaacgcatcaatgggtgaatgtgacgctaagtgtcaaacaccccaaggagctataaacagtagtcttcctttccagaatgtacacccagtcacaataggagagtgtcccaagtatgtcaggagtacaaaattaaggatggttacaggactaagaaacatcccatccattcaatctagaggtttgtttggagccattgccggtttcattgaaggggggtggactggaatgatagatggatggtatggttatcatcatcagaatgaacaaggatctggctatgctgcagaccaaaaaagcacacaaaatgccattgatgggattacaaacaaggtgaattctgtaatcgagaaaatgaacactcaattcacagctgtaggcaaagaattcaacaaattagagagaaggatggaaaacttaaataagaaagttgatgatggatttctggacatttggacatataatgcagagttgttggttctcctggaaaatgaaaggactttggattttcatgactcaaatgtgaagaatctgtatgagaaagtaaaaaaccaattgaagaataatgccaaagaaatcgggaacgggtgttttgaattctatcacaagtgtaacaatgaatgcatggaaagtgtgaaaaatggaacttatgactatccaaaatattccgaagaatcaaagttaaacagggaaaaaattgatggagtgaaattggaatcaatgggcgtctatcagattctggcgatctactcaactgtcgccagttcactggtgcttttggtctccctgggggcaatcagtttctggatgtgttctaatgggtctttgcagtgtagaatatgcatctga

SEQ ID NO: 32016 - RNA, 1701 nt, synthetic construct
  misc_feature 1..1701: note = hemagglutinin__InfluenzaA__ABM22279
  source 1..1701: mol_type = other RNA
atgaaagcaaaactactagtcctgttgtgtgcatttacagctacatatgcagacacaatatgtataggctaccatgcgaacaactcaaccgacactgttgacacagtacttgagaagaacgtgacagtgacacactctgtcaacctacttgaggacagacacaacggaaaactatgccgactaaaaggaacagccccactacaattgggtaattgcagcgttgccggatggatcttaggaaacccagaatgcgaatcactgttttctaaggaatcatggtcctacattgcagaaacaccaaaccctgagaatggaacatgttacccagggtatttcgccgactatgaggaactgagggagcaattgagctcagtatcatcattcgagagattcgaaatattccccaaggaaagctcatggcccaaccacacagtaaccaaaggagtgacggcatcatgctcccataatgggaaaagcagtttttacaaaaatttgctatggctgacggaaaagaatggcttgtacccaaatctgagcaagtcctatgtaaacaacaaggagaaagaagtccttgtactatggggtgttcatcacccgtctaacataggggaccaaagggccatctatcatacagaaaatgcttatgtctctgtggtgtcttcacattatagcagaagattcaccccagaaatagcaaaaagacccaaagtaagagatcaagaagggagaattaactactactggactctgctggaacccggggacacaataatatttgaggcaaatggaaatctaatagcgccatggtacgctttcgcattgagtagaggctttgggtcaggaatcatcacctcaaacgcatcaatgggtgactgtgacgctaagtgtcaaacaccccaaggagctataaacagtagtcttcctttccagaatgtacacccagtcacaataggagggtgtcccaagtatgtcaggagtacaaaattaaggatggttacaggactaagaaacatcccatccattcaatctagaggtttgtttggagccattgccggtttcattgaaggggggtggactggaatgatagatggatggtatggttatcatcatcagaatgaacaaggatctggctatgctgcagacaaaaaaagcacacaaaatgccattgatgggattacaaacaaggtgaattctgtaatcgagaaaatgaacactcaattcacagctgtaggcaaagaattcaacaaattagagagaaggatggaaaacttaaataagaaagttgatgatggatttctggacatttggacatataatgcagagttgttggttctcctggaaaatgaaaggactttggattatcatgactcaaatgtgaagaatctgtatgagaaagtaaaaaaccaattgaagaataatgccaaagaaatcgggaacgggtgttttgaattctatcacaagtgtaacaatgaatgcatggaaagtgtgaaaaatggaacttatgactatccaaaatattccgaagaatcaaagttaaaaagggaaaaaattgatggagtgaaattggaatcaatgggagtctatcagattctggcgatctactcaactgtcgccagttcactggtgcttttggtctccctgggggcaatcagtttctggatgtgttctaatgggtctttgcagtgtagaatatgcatctga

SEQ ID NO: 32017 - RNA, 1701 nt, synthetic construct
  misc_feature 1..1701: note = hemagglutinin__InfluenzaA__ABM22290
  source 1..1701: mol_type = other RNA
atgaaagcaaaactactagtcctgttgtgtgcatttacagctacatatgcagacacaatatgtataggctaccatgcgaacaactcaaccgacactgttgacacagtacttgagaagaacgtgacagtgacacactctgtcaacctacttgagaacagtcacaacggaaaactatgccgactaaaaggaacagccccactacaattgggtaattgcagcgttgccggatggatcttaggaaacccagaatgcgaatcactgttttctaaggaatcatggtcctacattgcagaaacaccaaaccctgagaatggaacatgttacccagggtatttcgccgactatgaggaactgagggagcaattgagctcagtatcatcattcgagagattcgaaatattccccaaagaaagctcatggcccaaccacaccgtaaccaaaggagtgacggcatcatgctcccataatgggaaaagcagtttttacaaaaatttgctatggctgacggaaaagaatggcttgtacccaaatctgagcaagtcctatgtaaacaacaaggagaaagaagtccttgtactatggggtgttcatcacccgtctaacataggggaccaaagggccatctatcatacagaaaatgcttatgtctctgtagtgtcttcacattatagcagaagattcaccccagaaatagcaaaaagacccaaagtaagagatcaagaagggagaattaactactactggactctgctggaacccggggacacaataatatttgaggcaaatggaaatctaatagcgccatggtacgctttcgcactgagtagaggctttgggtcaggaatcatcacctcaaacgcatcaatgggtgaatgtgacgctaagtgtcaaacaccccaaggagctataaacagtagtcttcctttccagaatgtacacccagtcacaataggagagtgtcccaagtatgtcaggagtacaaaattaaggatggttacaggactaagaaacattccatccattcaatctagaggtttgtttggagccattgccggtttcattgaaggggggtggactggaatgatagatggatggtatggttatcatcatcagaatgaacaaggatctggctatgctgcagaccaaaaaagcacacaaaatgccattgatgggattacaaacaaggtgaattctgtaatcgagaaaatgaacactcaattcacagctgtaggcaaagaattcaacaaattagagagaaggatggaaaacttaaataagaaagttgatgatggatttctggacatttggacatataatgcagagttgttggttctcctggaaaatgaaaggactttggattttcatgactcaaatgtgaagaatctgtatgagaaagtaaaaaaccaattgaagaataatgccaaagaaatcgggaacgggtgttttgaattctatcacaagtgtaacaatgaatgcatggaaagcgtgaaaaatggaacttatgactatccaaaatattccgaagaatcaaagttaaacagggaaaaaattgatggagtgaaattggaatcaatgggagtctatcagattctggcgatctactcaactgtcgccagttcactggtgcttttggtctccctgggggcaatcagtttctggatgtgttctaatgggtctttgcagtgtagaatatgcatctga

SEQ ID NO: 32018 - RNA, 1701 nt, synthetic construct; identical to SEQ ID NO: 30762
  misc_feature 1..1701: note = hemagglutinin__InfluenzaA__ABM22301
  source 1..1701: mol_type = other RNA

SEQ ID NO: 32019 - RNA, 1701 nt, synthetic construct; identical to SEQ ID NO: 30762
  misc_feature 1..1701: note = hemagglutinin__InfluenzaA__ABM22312
  source 1..1701: mol_type = other RNA

SEQ ID NO: 32020 - RNA, 1701 nt, synthetic construct; identical to SEQ ID NO: 30762
  misc_feature 1..1701: note = hemagglutinin__InfluenzaA__ABM22323
  source 1..1701: mol_type = other RNA

SEQ ID NO: 32021 - RNA, 1701 nt, synthetic construct; identical to SEQ ID NO: 30762
  misc_feature 1..1701: note = hemagglutinin__InfluenzaA__ABM22334
  source 1..1701: mol_type = other RNA

SEQ ID NO: 32022 - RNA, 1701 nt, synthetic construct; identical to SEQ ID NO: 30763
  misc_feature 1..1701: note = hemagglutinin__InfluenzaA__ABM22345
  source 1..1701: mol_type = other RNA

SEQ ID NO: 32023 - RNA, 1701 nt, synthetic construct; identical to SEQ ID NO: 30763
  misc_feature 1..1701: note = hemagglutinin__InfluenzaA__ABM22356
  source 1..1701: mol_type = other RNA

SEQ ID NO: 32024 - RNA, 1701 nt, synthetic construct; identical to SEQ ID NO: 30783
  misc_feature 1..1701: note = hemagglutinin__InfluenzaA__ABM22367
  source 1..1701: mol_type = other RNA

SEQ ID NO: 32025 - RNA, 1698 nt, synthetic construct; identical to SEQ ID NO: 31346
  misc_feature 1..1698: note = hemagglutinin__InfluenzaA__ABM66864
  source 1..1698: mol_type = other RNA

SEQ ID NO: 32026 - RNA, 1701 nt, synthetic construct
  misc_feature 1..1701: note = hemagglutinin__InfluenzaA__ABM66886
  source 1..1701: mol_type = other RNA
atgaaagcaaaactactggtcctgttatgtgcactttcagctacagatgcagacacaatatgtataggctaccatgcgaacaactcaaccgacactgttgacacagtactcgaaaagaacgtgacagtgacacactctgtcaacctacttgaggacaatcacaacggaaaactatgcaaactaaaaggaatagccccactacaattggggaaatgcagcattgccggatggatcttaggaaacccagaatgcgaatcactgttttctaagaaatcatggtcctacattgcagaaacaccaaactccgagaatggaacatgttacccagggtatttcgccgactatgaggaactgagggaacaattgagttcagtatcatcattcgagagattcgaaatattccccaaggaaagttcatggcccaaacacaacgtaaccaaaggagtaacggcatcatgctcccataaggggaaaagcagtttttacagaaatttgctatggctgacggagaaaaatggctcgtacccaaatctgagcaagtcctatgtgaacaacaaagagaaagaagtccttgtactatggggtgttcatcacccgtctaacatagaggaccaaaagaccatctatcgtaaagaaaatgcttatgtctctgtagtgtcttcacattataacaggagattcaccccagaaatagcaaaaagacccaaagtaagaaatcaagaagggagaattaactactactggactctgctggaacccggggacacaataatatttgaggcaaatggaaatctaatagcgccatggtatgctttcgcattgagtagaggctttgggtcaggaatcatcacctcaaacgcatcgatggatgaatgtgacgcgaagtgtcaaacaccccagggagctataaacagtagtcttccttttcagaatgtacacccagtcacaataggagagtgcccaaagtacgtcaggagtacaaaattaaggatggttacaggactaaggaacatcccatccattcaatccagaggtttgtttggagccattgccggtttcattgaagggggatggactggaatgattgatggatggtatggttatcatcatcagaatgaacagggatctggctatgctgcggatcaaaaaagcacacaaaatgccattaacgggattacaaacaaggtgaactctataatcgagaaaatgaacactcaattcacagctgtgggtaaagagttcaacaaactagaaaaaaggatggaaaacttaaataaaaaagttgatgatggatttctggacatttggacatataatgcagaattgttggttctactggaaaatgaaaggactttggatttccatgactcaaatgtgaagaacctgtatgagaaagtaaaaagccaattaaagaataatgccaaagaaataggaaacgggtgttttgaattctaccacaagtgtaacaatgaatgcatggaaagtgtaaaaaatgggacttatgactatccaaaatattcagaagaatcaaagttaaacagggaaaaaattgatggagtgaaattggaatcaatgggagtctatcagattctggcgatctactcaactgtcgccagttcactggtgcttttggtctccctgggggcaatcagcttctggatgtgttctaatgggtctttgcagtgcagaatatgcatctga

SEQ ID NO: 32027 - RNA, 1701 nt, synthetic construct
  misc_feature 1..1701: note = hemagglutinin__InfluenzaA__ABM66897
  source 1..1701: mol_type = other RNA
atgaaagcaaaactactggtcctgttatgtgcactttcagctacagacgcagacacaatatgtataggctaccatgcgaacaactcaaccgacactgttgacacagtgctcgaaaagaacgtgacagtgacacactctgtcaacctacttgaggacaatcacaacggaaaactatgcaaactaaaaggaatagccccactacaattggggaaatgcagcattgccggatggatcttaggaaacccagaatgcgaatcactgttttctaagaaatcatggtcctacattgcagaaacaccaaactccgagaatggaacatgttacccagggtatttcgccgactatgaggaactgagggaacaattgagctcagtatcatcattcgagagattcgaaatattccccaaggaaagttcatggcccaaacacaacgtaaccaaaggagtaacggcatcatgctcccataaggggaaaagcagtttttacagaaatttgctatggctgacggagaaaaatggctcgtacccaaatctgagcaagtcctatgtgaacaacaaagagaaagaagtccttgtactatggggtgttcatcacccgtctaacatagaggaccaaaagaccatctatcgtaaagaaaatgcttatgtctctgtagtgtcttcacattataacaggagattcaccccagaaatagcaaaaagacccaaagtaagaaatcaagaagggagaattaactactactggactctgctggaacccggggacacaataatatttgaggcaaatggaaatctaatagcgccatggtatgctttcgcattgagtagaggctttgggtcaggaatcatcacctcaaacgcatcgatggatgaatgtgacgcgaagtgtcaaacaccccagggagctataaacagtagtcttccttttcagaatgtacacccagtcacaataggagagtgcccaaagtacgtcaggagtacaaaattaaggatggttacaggactaaggaacatcccatccattcaatccagaggtttgtttggagccattgccggtttcattgaagggggatggactggaatgattgatggatggtatggttatcatcatcagaatgaacagggatctggctatgctgcggatcaaaaaagcacacaaaatgccattaacgggattacaaacaaggtgaactctataatcgagaaaatgaacactcaattcacagctgtgggtaaagaattcaacaaactagaaaaaaggatggaaaacttaaataaaaaagttgatgatggatttctggacatttggacatataatgcagaattgttggttctactggaaaatgaaaggactttggatttccatgactcaaatgtgaagaacctgtatgagaaagtaaaaagccaattaaagaataatgccaaagaaataggaaacgggtgttttgaattctaccacaagtgtaacaatgaatgcatggaaagtgtaaaaaatgggacttatgactatccaaaatattcagaagaatcaaagttaaacagggaaaaaattgatggagtgaaattggaatcaatgggagtctatcagattctggcgatctactcaactgtcgccagttcactggtgcttttggtctccctgggggcaatcagcttctggatgtgttctaatgggtctttgcagtgcagaatatgcatctga

SEQ ID NO: 32028 - RNA, 1701 nt, synthetic construct; identical to SEQ ID NO: 31425
  misc_feature 1..1701: note = hemagglutinin__InfluenzaA__ABM66908
  source 1..1701: mol_type = other RNA

SEQ ID NO: 32029 - RNA, 1701 nt, synthetic construct; identical to SEQ ID NO: 30763
  misc_feature 1..1701: note = hemagglutinin__InfluenzaA__ABM66919
  source 1..1701: mol_type = other RNA

SEQ ID NO: 32030 - RNA, 1701 nt, synthetic construct; identical to SEQ ID NO: 30763
  misc_feature 1..1701: note = hemagglutinin__InfluenzaA__ABM66930
  source 1..1701: mol_type = other RNA

SEQ ID NO: 32031 - RNA, 1701 nt, synthetic construct; identical to SEQ ID NO: 30763
  misc_feature 1..1701: note = hemagglutinin__InfluenzaA__ABM66941
  source 1..1701: mol_type = other RNA

SEQ ID NO: 32032 - RNA, 1701 nt, synthetic construct
  misc_feature 1..1701: note = hemagglutinin__InfluenzaA__ABM66952
  source 1..1701: mol_type = other RNA
atgaagactatcattgctttgagctacattctatgtctggttttcgctcaaaaacttcccggaaatgacaacagcacggcaacgctgtgccttgggcaccatgcagtaccaaacggaacgatagtgaaaacaatcacgaatgaccaaattgaagttactaatgctactgagctggttcagagttcctcaacaggtggaatatgcgacagtcctcatcagatccttgatggagaaaactgcacactaatagatgctctattgggagaccctcagtgtgatggcttccaaaataagaaatgggacctttttgttgaacgcagcaaagcctacagcaactgttacccttatgatgtgccggattatgcctcccttaggtcactagttgcctcatccggcacactggagtttaacaatgaaagcttcaattggactggagtcactcaaaatggaacaagctctgcttgcaaaaggagatctaataacagtttctttagtagattgaattggttgacccacttaaaattcaaatacccagcattgaacgtgactatgccaaacaatgaaaaatttgacaaattgtacatttggggggttcaccacccaggtacggacaatgaccaaattagcctatatgctcaagcttcaggaagaatcacagtctctaccaaaagaagccaacaaactgtaatcccgaatatcggatctagacccagggtaagggatatccccagcagaataagcatctattggacaatagtaaaaccgggagacatacttttgattaacagcacagggaatctaattgctcctcggggttacttcaaaatacgaagtgggaaaagctcaataatgagatcagatgcacccattggcaaatgcaattctgaatgcatcactccaaatggaagcattcccaatgacaaaccatttcaaaatgtaaacaggatcacatatggggcctgtcccagatatgttaagcaaaacactctgaaattggcaacagggatgcgaaatgtaccagagaaacaaactagaggcatatttggcgcaatcgcgggtttcatagaaaatggttgggagggaatggtggatggttggtacggtttcaggcatcaaaattctgagggaataggacaagcagcagatctcaaaagcactcaagcagcaatcaaccaaatcaatgggaagctgaataggttgatcgggaaaaccaacgagaaattccatcagattgaaaaagaattctcagaagtagaagggagaattcaggacctcgagaaatatgttgaggacactaaaatagatctctggtcatacaacgcggagcttcttgttgccctggagaaccaacatacaattgatctaactgactcagaaatgaacaaactgtttgaaagaacaaagaagcaactgagggaaaatgctgaggatatgggcaatggttgtttcaaaatataccacaaatgtgacaatgcctgcatagggtcaatcagaaatggaacttatgaccatgatgtatacagagatgaagcattaaacaaccggttccagatcaaaggtgttgagctgaagtcaggatacaaagattggatcctatggatttcctttgccatatcatgttttttgctttgtgttgttttgttggggttcatcatgtgggcctgccaaaaaggcaacattaggtgcaacatttgcatttga

SEQ ID NO: 32033 - RNA, 1701 nt, synthetic construct; identical to SEQ ID NO: 32032
  misc_feature 1..1701: note = hemagglutinin__InfluenzaA__ABM66963
  source 1..1701: mol_type = other RNA

SEQ ID NO: 32034 - RNA, 1701 nt, synthetic construct; identical to SEQ ID NO: 32032
  misc_feature 1..1701: note = hemagglutinin__InfluenzaA__ABM66974
  source 1..1701: mol_type = other RNA

SEQ ID NO: 32035 - RNA, 1701 nt, synthetic construct; identical to SEQ ID NO: 32032
  misc_feature 1..1701: note = hemagglutinin__InfluenzaA__ABM66985
  source 1..1701: mol_type = other RNA

SEQ ID NO: 32036 - RNA, 1701 nt, synthetic construct; identical to SEQ ID NO: 30783
  misc_feature 1..1701: note = hemagglutinin__InfluenzaA__ABM66996
  source 1..1701: mol_type = other RNA

SEQ ID NO: 32037 - RNA, 1701 nt, synthetic construct; identical to SEQ ID NO: 30783
  misc_feature 1..1701: note = hemagglutinin__InfluenzaA__ABM67007
  source 1..1701: mol_type = other RNA

SEQ ID NO: 32038 - RNA, 1701 nt, synthetic construct; identical to SEQ ID NO: 30783
  misc_feature 1..1701: note = hemagglutinin__InfluenzaA__ABM67018
  source 1..1701: mol_type = other RNA

SEQ ID NO: 32039 - RNA, 1701 nt, synthetic construct
  misc_feature 1..1701: note = hemagglutinin__InfluenzaA__ABM67029
  source 1..1701: mol_type = other RNA
atgaagactatcattgctttgagctacattatatgtctggttttcgctcaaaaacttcccggaaatgacaacagcacggcaacgctgtgccttgggcaccatgcagtaccaaacggaacgatagtgaaaacaatcacgaatgaccaaattgaagttactaatgctactgagttggttcagagttcctcaacaggtgaaatatgcgacagtcctcatcagatccttgatggagaaaactgcacactaatagatgctctattgggagaccctcagtgtgatggcttccaaaataagaaatgggacctttttgttgaacgcagcaaagcctacagcaactgttacccttatgatgtgccggattatgcctcccttaggtcactagttgcctcatccggcacactggagtttaacaatgaaagcttcaattggactggagtcactcaaaatggaacaagctctgcttgcaaaaggagatctaataacagtttctttagtagattgaattggttgacccacttaaaattcaaatacccagcattgaacgtgactatgccaaacaatgaaaaatttgacaaattgtacatttggggggttcaccacccgggtacggacaatgaccaaatcttcctgtatgctcaagcatcaggaagaatcacagtctctaccaaaagaagccaacaaactgtaatcccgaatatcggatctagacccagagtaagggatatccccagcagaataagcatctattggacaatagtaaaaccgggtgacatacttttgattaacagcacagggaatctaattgctcctaggggttacttcagaatacgaagtgggaaaagctcaataatgagatcagatgcacccattggcaaatgcaattctgaatgcatcactccaaatggaagcattcccaatgacaaaccatttcaaaatgtaaacaggatcacatatggggcctgtcccagatatgttaagcaaaacactctgaaattggcaacagggatgcgaaatgtaccagagaaacaaactagaggcatatttggcgcaatcgcgggtttcatagaaaatggttgggagggaatggtggatggttggtacggtttcaggcatcaaaattctgagggaataggacaagcagcagatctcaaaagcactcaagcagcaatcaatcaaatcaatgggaagctgaataggttgatcgggaaaaccaacgagaaattccatcagattgaaaaagaattctcagaagtagaggggagaattcaggacctcgagaaatatgttgaggacactaaaatagatctctggtcatacaacgcggagcttcttgttgccctggagaaccaacatacaattgatctaactgactcagaaatgaacaaactgtttgaaagaacaaagaagcaactgagggaaaatgctgaggatatgggcaatggttgtttcaaaatataccacaaatgtgacaatgcctgcataggatcaatcagaaatggaacttatgaccatgatgtatacagagatgaagcattaaacaaccggttccagatcaaaggcgttgagctgaagtcaggatacaaagattggatcctatggatttcctttgccatatcatgttttttgctttgtgttgctttattggggttcatcatgtgggcctgccaaaaaggcaacattaggtgcaacatttgcatttga

SEQ ID NO: 32040 - RNA, 1698 nt, synthetic construct
  misc_feature 1..1698: note = hemagglutinin__InfluenzaA__ABM67051
  source 1..1698: mol_type = other RNA
atgaaagtaaaactactggttctgttatgtacatttacagctacatatgcagacacaatatgtataggctaccatgccaacaactcaaccgacactgttgacacagtacttgagaagaatgtgacagtgacacactctgtcaacctacttgaggacagtcacaatggaaaactatgtctactaaaaggaatagccccactacaattgggtaattgcagcgttgccggatggatcttaggaaacccagaatgcgaattactgatttccaaggaatcatggtcctacattgtagaaacaccaaatcctgagaatggaacatgttacccagggtatttcgccgactatgaggaactgagggagcaattgagttcagtatcttcatttgagaggttcgaaatattccccaaagagagctcatggcccaaccacaccgtaaccggagtatcagcatcatgctcccataacgggaaaagcagtttttacagaaatttgctatggctgacggggaagaatggtttgtacccaaacctgagcaagtcctatgcaaacaacaaagagaaagaagtccttgtactatggggtgttcaccacccgcctaacataggggaccaaagggccctctatcatacagaaaatgcttatgtctctgtagtgtcttcacattatagcagaagattcaccccagaaatagccaaaagacccaaggtgagagatcaggaaggaagaatcaactactactggactctgctggaacccggggatacaataatatttgaggcaaatggaaatctaatagcgccaaggtatgctttcgcactgagtagaggctttggatcaggaatcatcacctcaaatgcaccaatggatgaatgtgatgcgaagtgtcaaacacctcagggagctataaacagcagtcttcctttccagaatgtacacccagtcacaataggagagtgtccaaagtatgtcaggagtgcaaaattaaggatggttacaggactaaggaacatcccatccattcaatccagaggtttgtttggagccattgccggtttcattgaaggggggtggactggaatggtggatggttggtatggttatcatcatcagaatgagcaaggatctgggtatgctgcagatcaaaaaagcacacaaaatgccattaacgggattacaaacaaggtgaattctgtaattgagaaaatgaacactcaattcacagctgtgggcaaagaattcaacaaattggaaagaaggatggaaaacttaaataaaaaagttgatgatgggtttctagacatttggacatataatgcagaattgttggttctactggaaaatgaaaggactttggatttccatgactccaacgtgaagaatctgtatgagaaagtaaaaagccaattaaagaataatgccaaagaaataggaaacgggtgttttgaattctatcacaagtgtaacgatgaatgcatggagagtgtgaaaaatggaacttatgactatccaaaatattccgaagaatcaaagttaaacagggagaaaattgatggagtgaaattggaatcaatgggagtctatcagattctggcgatctactcaacagtcgccagttccctggttcttttggtctccctgggggcaatcagcttctggatgtgttccaatgggtctttgcagtgtagaatatgcatctaa

SEQ ID NO: 32041 - RNA, 1707 nt, synthetic construct
  misc_feature 1..1707: note = hemagglutinin__InfluenzaA__ABM90467
  source 1..1707: mol_type = other RNA
atggagaaaatagtgcttcttctttcaatagtcagtcttgttaaaagtgatcagatttgcattggttaccatgcaaacaattcaacagagcaggttgacacaatcatggaaaagaacgttactgttacacatgcccaagacatactggaaaagacacacaacgggaagctctgcgatctagatggagtgaagcctctaattttaagagattgtagtgtagctggatggctcctcgggaacccaatgtgtgacgaattcatcaacgtaccggaatggtcttacatagtggagaaggccaatccaaccaatgacctctgttacccagggagtttcaacgactatgaagaactgaaacacctattgagcagaataaaccattttgagaaaattcagatcatccccaaaagttcttggtccgatcatgaagcctcatcaggagtgagctcagcatgtccatacctgggaagtccctccttttttagaaatgtggtatggcttatcaaaaagaacagtacatacccaacaataaagaaaagctacaataataccaaccaagaagatcttttggtactgtggggaattcaccatcctaataatgaggcagagcagacaaggctatatcaaaacccaaccacctatatttccattgggacatcaacactaaaccagagattggtaccaaaaatagctactagatccaaagtaaacgggcaaagtggaaggatggagtttttctggacaattttaaaaccaaatgatgcaatcaacttcgagagtaatggaaatttcattgctccagaatatgcatacaaaattgtcaagaaaggggactcagcaattatgaaaagtgaattggaatatggtaactgcaacaccaagtgtcaaactccaatgggggcgataaactctagtatgccattccacaacatacaccctctcaccatcggggaatgccccaaatatgtgaaatcaaacagattagtccttgcaacagggctcagaaatagccctcaaagagagagcagaagaaaaaagagaggtctatttggagctatagcaggttttatagagggaggatggcagggaatggtagatggttggtatgggtaccaccatagcaatgagcaggggagtgggtacgctgcagacaaagaatctactcaaaaggcaatagatggagtcaccaataaggtcaactcaattattgacaaaatgaacactcagtttgaggccgttggaagggaatttaataacttagaaaggagaatagagaatttaaacaagaagatggaagacgggtttctagatgtttggacttataatgccgaacttctggttctcatggaaaatgagagaactctagactttcatgactcaaatgttaagaacctctatgacaaggtccgactacagcttagggataatgcaaaggagctgggtaacggttgtttcgagttctatcacaaatgtgataatgaatgtatggaaagtataaggaacggaacgtacaactatccgcagtattcagaagaagcaagattaaaaagagaggaaataagtggggtaaagttggaatcaataggaacttaccaaatactgtcaatttactcaacagtggcgagttccctagcactggcaatcatgatagctggtctatctttatggatgtgctccaatggatcgttacaatgcagaatttgcatttaa

SEQ ID NO: 32042 - RNA, 1707 nt, synthetic construct
  misc_feature 1..1707: note = hemagglutinin__InfluenzaA__ABM90511
  source 1..1707: mol_type = other RNA
atggagaaaatagtgcttcttctttcaatagtcagtcttgttaaaagtgatcagatttgcattggttaccatgcaaacaattcaacagagcaggttgacacaatcatagaaaaaaacgttactgttacacatgcccaagacatactggaaaagacacacaacgggaagctctgcgatctagatggagtgaagcctctaattttaaaagattgtagtgtagctggatggctcctcgggaacccaatgtgtgacgaattcatcaacgtaccggaatggtcttacatagtggaaaaggccaatccaaccaatgacctctgttacccagggagtttcaacgactatgaagaactgaaacacctattgagcagaataaaccattttgagaaaattcagatcatccccaaaagttcttggtccgatcatgaagcctcatcaggagtgagctcagcatgtccatacctgggaagtccctccttttttagaaatgtggtatggcttatcaaaaagaacagtacatacccaacaataaagaaaagctacaataataccaaccaagaagatcttttggtactgtggggaattcaccatcctaataatgaggaagagcagacaaggctatatcaaaacccaaccacctatatttccattgggacatcaacactaaaccagagattggtaccaaaaatagctactagatccaaagtaaacgggcaaagtgggaggatggagttcttctggacaattttaaaaccaaatgatgcaatcaatttcgagagcaatggaaatttcattgctccagaatatgcatacaaaattgtcaagaaaggggactcagcaattatgaagagtgaattggaatatagtaactgcaacaccaagtgtcaaactccaatgggggcgataaactctagtatgccattccacaacatacaccctctcaccatcggggaatgccccaaatatgtgaaatcaagcagattagtccttgcaacagggctcagaaatagccctcaaagagagagcagaagaaaaaagagaggtctatttggagctatagcaggttttatagagggaggatggcagggaatggtagatggttggtatgggtaccaccatagcaatgagcaggggagtgggtacgctgcagacaaagaatctactcaaaaggcaatagatggagtcaccaataaggtcaactcaattattgacaaaatgaacactcagtttgaggccgttggaagggaatttaataacttagaaaggagaatagagaatttaaacaagaagatggaagacgggtttctagatgtttggacttataatgccgaacttctggttctcatggaaaatgagagaactctagactttcatgactcaaatgttaagaacctctatgacaaggtccgactacagcttagggataatgcaaaggagctgggtaacggttgtttcgagttctatcacaaatgtgataatgaatgtatggaaagtataagaaacggaacgtacaactatccgcagtattcagaagaagcaagattaaaaagagaggaaataagtggggtaaagttggaatcaataggaacttaccaaatactgtcaatttactcaacagtggcgagttccctagcactggcaatcatgatagctggtctatctttatggatgtgctccaatggatcgttacaatgcagaatttgcatttaa

SEQ ID NO: 32043 - RNA, 1707 nt, synthetic construct
  misc_feature 1..1707: note = hemagglutinin__InfluenzaA__ABM90533
  source 1..1707: mol_type = other RNA
atggagaaaatagtgcttcttctttcaatagtcagtcttgttaaaagtgatcagatttgcattggttaccatgcaaacaattcaacagagcaggttgacacaatcatggaaaaaaacgttactgttacacatgcccaagacatactggaaaagacacacaacgggaagctctgcgatctagatggagtgaagcctctaattttaaaagattgtagtgtagctggatggctcctcgggaacccaatgtgtgacgaattcatcaacgtaccggaatggtcttacatagtggaaaaggccaatccaaccaatgacctctgttacccagggagtttcaacgactatgaagaactgaaacacctattgagcagaataaaccattttgagaaaattcagatcatccccaaaagttcttggtccgatcatgaagcctcatcaggagtgagctcagcatgtccatacctgggaagtccctccttttttagaaatgtggtatggcttatcaaaaagaacagtacatacccaacaataaagaaaagctacaataataccaaccaagaagatcttttggtactgtggggaattcaccatcctaataatgaggaagagcagacaaggctatatcaaaacccaaccacctatatttccattgggacatcaacactaaaccagagattggtaccaaaaatagctactagatccaaagtaaacgggcaaagtgggaggatggagttcttctggacaattttaaaaccaaatgatgcaatcaatttcgagagcaatggaaatttcattgctccagaatatgcatacaaaattgtcaagaaaggggactcagcaattatgaagagtgaattggaatatagtaactgcaacaccaagtgtcaaactccaatgggggcgataaactctagtatgccattccacaacatacaccctctcaccatcggggaatgccccaaatatgtgaaatcaagcagattagtccttgcaacagggctcagaaatagccctcaaagagagagcagaagaaaaaagagaggtctatttggagctatagcaggttttatagagggaggatggcagggaatggtagatggttggtatgggtaccaccatagcaatgagcaggggagtgggtacgctgcagacaaagaatctactcaaaaggcaatagatggagtcaccaataaggtcaactcaattattgacaaaatgaacactcagtttgaggccgttggaagggaatttaataacttagaaaggagaatagagaatttaaacaagaagatggaagacgggtttctagatgtttggacttataatgccgaacttctggttctcatggaaaatgagagaactctagactttcatgactcaaatgttaagaacctctatgacaaggtccgactacagcttagggataatgcaaaggagctgggtaacggttgtttcgagttctatcacaaatgtgataatgaatgtatggaaagtataagaaacggaacgtacaactatccgcagtattcagaagaagcaagattaaaaagagaggaaataagtggggtaaagttggaatcaataggaacttaccaaatactgtcaatttactcaacagtggcgagttccctagcactggcaatcatgatagctggtctatctttatggatgtgctccaatggatcgttacaatgcagaatttgcatttaa

SEQ ID NO: 32044 - RNA, 1707 nt, synthetic construct; identical to SEQ ID NO: 32043
  misc_feature 1..1707: note = hemagglutinin__InfluenzaA__ABM90544
  source 1..1707: mol_type = other RNA

SEQ ID NO: 32045 - RNA, 1701 nt, synthetic construct
  misc_feature 1..1701: note = hemagglutinin__InfluenzaA__ABN50900
  source 1..1701: mol_type = other RNA
atgaaagcaaaactgctggtcctgttatgtgcactttcagctacagatgcagacacaatatgtataggctaccatgcgaacaactcaaccgatactgttgacacagtactcgaaaagaacgtgacagtgacacactctgtcaacctacttgaggacagtcacaacggaaaactatgcagactaaaaggaatagccccactacaattggggaaatgcagcattgccgggtggatcttaggaaacccagaatgtgaatcactgttttctaagaaatcatggtcctacattgcagaaacaccaaactccgagaatgggacatgttacccagggtatttcgccgactatgaggaactgagggagcaattgagttcagtatcatcattcgagagattcgaaatattccccaaggaaagttcatggcccaaacacaacgtaaccagaggagtaacggcatcatgctcccataaggggaaaagcagtttttacagaaatttgctatggctgacggagaaaaatggctcgtacccaaatctgagcaagtcctatgtgaacaacaaagagaaagaagtccttgtactatggggtgttcatcacccgtctaacatagaggaccaaaagaccatctatcgtaaagaaaatgcttatgtctctgtagtgtcttcacattataacagaagattcaccccagaaatagcaaaacgacccaaagtaagaggtcaagaagggagaattaactactactggactctgctggaacccggggacacaataatatttgaggcaaatggaaatctaatagcgccatggtatgctttcgcactgagtagaggctttgggtcaggaatcatcacctcaaacgcatcaatggatgaatgtgacgcgaagtgtcaaacaccccagggagctataaacagtagtcttcctttccagaatgtacacccagtcacaataggagagtgcccaaaatacgtcaggagtacaaaattaaggatggtcacaggactaaggaacattccatccattcaatccagaggtttgtttggagccattgccggtttcattgaagggggatggactggaatgatagatggatggtatggttatcatcatcagaatgaacagggatccggctatgctgcagatcaaaaaagcacacaaaatgccattaacgggattacaaacaaggtgaactctgttatcgagaaaatgaacactcaattcacagctgtaggtaaagaattcaacaaattagaaaaaaggatggaaaacttaaataaaaaagttgatgatgggtttctggacatttggacatataatgcagaattgttggttctactggaaaatgaaaggactttggattttcatgactcaaatgtgaagaacctgtatgagaaggtaaaaagccaattaaagaataatgccaaagaaataggaaacgggtgttttgaattctaccacaagtgtaacaatgaatgcatggagagtgtaaaaaatggaacttatgactatccaaaatattcagaggaatcaaagttaaacagggaaaaaattgatggagtgaaattggaatcaatgggagtctatcagattctggcgatctactcaactgtcgccagttcactggtgcttttggtctccctgggggcaatcagcttctggatgtgttctaatgggtctttgcagtgcagaatatgcatctga

SEQ ID NO: 32046 - RNA, 1701 nt, synthetic construct; identical to SEQ ID NO: 31425
  misc_feature 1..1701: note = hemagglutinin__InfluenzaA__ABN50917
  source 1..1701: mol_type = other RNA

SEQ ID NO: 32047 - RNA, 1701 nt, synthetic construct
  misc_feature 1..1701: note = hemagglutinin__InfluenzaA__ABN50928
  source 1..1701: mol_type = other RNA
atgaaagcaaaactactaatcctgttatgtgcatttacagctacagatgcagacacaatatgtataggctaccatgcgaacaactcaaccgacactgttgacacagtacttgaaaagaacgtgacagtgacacactctgtcaacctacttgaggacagtcacaacggaaaactatgtcgactaaaaggaatagccccactacaattgggtaattgcagcattgccggatggattttaggaaacccagaatgcgaatcactgttttctaagaaatcatggtcctacattgcagaaacaccaaactccgagaatggaacatgttacccagggtatttcgccgactatgaggaactgagagagcaattgagttcagtatcatcattcgagagattcgaaatattccccaaagaaagctcatggcccaaccacaccgtaaccaaaggagtaacggcatcatgctcccataaggggaaaagcagtttttacagaaatttgctatggctgacggagaagaatggctcgtacccaaatctgagcaagtcctatgtgaacaacaaagagaaagaagtccttgtactatggggtgttcatcacccgtctaacataggggaccaaagggccatctatcatacagaaaatgcttatgtctctgtagtgtcttcacattataacaggagattcaccccagaaatagcaaaaagacccaaagtaagaggtcaagaaggaagaattaactactactggactctgctggaacccggggacacaataatatttgaggcaaatggaaatctaatagcgccatggtatgctttcgcactgagtagaggctttgggtcaggaatcatcacctcaaacgcatcaatggatgaatgtgacgcgaagtgtcaaacaccccagggagctataaacagtagtcttcctttccagaatgtacacccagtcacaataggagagtgcccaaagtatgtcaggagtacaaaattaagaatggttacaggactaaggaacatcccatccattcaatccagaggtttgtttggagccattgccggtttcattgaaggggggtggactggaatgatagatggatggtatggttatcatcatcagaatgaacaaggatctggctatgctgcggatcaaaaaagcacacaaaatgccattaacgggattacaaacaaggtgaattctgtaatcgagaaaatgaacactcaattcacagctgtgggcaaagaattcaacaaattagaaagaaggatggaaaacttaaataaaaaagttgatgatggatttctggacatttggacatataatgcagaattgttggttctactggaaaatgaaaggactttggattttcatgactcaaatgtgaagaatctgtatgagaaagtaaaaagccaattaaagaacaatgccaaagaaataggaaacgggtgttttgaattctaccacaagtgtaacaatgaatgcatggaaagtgtgaaaaatggaacttatgactatccaaaatattccgaggaatcaaagttaaacagggaaaaaattgatggagtgaaattggaatcaatgggagtctatcagattctggcgatctactcaactgtcgccagttcactggtgcttttggtctccctgggggcaatcagcttctggatgtgttctaatgggtctttgcagtgtagaatatgcatctga

SEQ ID NO: 32048 - RNA, 1701 nt, synthetic construct
  misc_feature 1..1701: note = hemagglutinin__InfluenzaA__ABN50940
  source 1..1701: mol_type = other RNA
atgaaagcaaaactactagtcctgttatgtgcattcacagctacagatgcagacacaatatgtataggctaccatgcgaacaactcaaccgacactgttgacacagtacttgaaaagaacgtgacagtgacacactctgtcaacctacttgaggacagtcacaacggaaaactatgtcgactaaaaggaatagccccactacaattgggtaattgcagtattgccggatggattttaggaaacccagaatgcgaatcactgttttctaagaaatcatggtcctacattgcagaaacaccaaactccgagaatggaacatgttacccagggtatttctctgactatgaggaactgagggagcaattgagttcagtatcatcattcgagagattcgaaatattccccaaagaaagctcatggcccaaccacaccgtaaccaaaggagtaacggcatcatgctcccataaggggaaaagcagtttttacagaaatttgctatggctgacggagaagaatggctcgtacccaaatctgagcaagtcctatgtgaacaacaaagagaaagaagtccttgtactatggggtgttcatcacccgtctaacataggggaccaaagggccatctatcatacagaaaatgcttatgtctctgtagtgtcttcacattataacaggagattcaccccagaaatagcaaaaagacccaaagtaagagatcaagaaggaagaattaactactactggactctgctggaacccgaggacacaataatatttgaggcaaatggaaatctaatagcgccatggtatgcttttgcactgagtagaggctttgggtcaggaatcatcacctcaaacgcatcaatggatgaatgtgacgcgaagtgtcaaacaccccagggagctataaacagtagtcttcctttccagaatgtacacccagtcacaataggagagtgcccaaagtatgtcaggagtacaaaattaagaatggttacaggactaaggaacatcccatccattcaatccagaggtttgtttggagccattgccggtttcattgaaggggggtggactggaatgatagatggatggtatggttatcatcatcagaatgaacaaggatctggctatgctgcggatcaaaaaagcacacaaaatgccattaacgggattacaaacaaggtgaattctgtaatcgagaaaatgaacactcaattcacagctgtgggcaaagaattcaacaaattagaaagaaggatggaaaacttaaataaaaaagttgatgatgggtttctggacatttggacatataatgcagaattgttggttctactggaaaatgaaaggactttggattttcatgactcaaatgtgaagaatctgtatgagaaagtaaaaagccaattaaagaacaatgccaaagaaataggaaacgggtgttttgaattctaccacaagtgtaacaatgaatgcatggaaagtgtgaaaaatggaacttatgactatccaaaatattccgaggaatcaaagttaaacagggaaaaaattgatggagtgaaattggaatcaatgggagtctatcagattctggcgatctactcaactgtcgccagttcactggtgcttttggtctccctgggggcaatcagcttctggatgtgttctaatgggtctttgcagtgtagaatatgcatctga

SEQ ID NO: 32049 - RNA, 1701 nt, synthetic construct
  misc_feature 1..1701: note = hemagglutinin__InfluenzaA__ABN50951
  source 1..1701: mol_type = other RNA
atgaaagtaaaactactagtcctgttgtgtgcatttacagctacatatgcagacacaatatgtataggctaccatgcgaacaactcaaccgacactgttgacacagtacttgagaagaacgtgacagtgacacactctgtcaacctacttgaggacagtcacaacggaaaactatgccgactaaaaggaacagccccactacaattgggtaattgcagcgttgccggatggatcttaggaaacccagaatgcgaatcactgttttctaaggagtcatggtcctacattgcagaaacaccaaaccctgagaatggaacatgttacccagggtatttcgccgactatgaggaactgagggagcaattgagctcagtatcatcattcgagagattcgaaatattccccaaggaaagctcatggcccaaccacaccgtaaccaaaggagtgacggcatcatgctcccataatgggaaaagcagtttttacaaaaatttgctatggctgacggaaaagaatggcttgtacccaaatctgagcaagtcctatgtaaacaacaaggagaaagaagtccttgtactatggggtgttcatcacccgtctaacataggggaccaaagggccatctatcatacagaaaatgcttatgtctctgtagtgtcttcacattatagcagaagattcaccccagaaatagcaaaaagacccaaagtaagagatcaagaagggagaattaactactactggactctgctggaacccggggacacaataatatttgaggcaaatggaaatctaatagcgccatggtacgctttcgcactgagtagaggctttgggtcaggaatcatcacctcaaacgcatcaatgggtgaatgtgacgctaagtgtcaaacaccccaaggagctataaacagtagtcttcctttccagaatgtacacccagtcacaataggagagtgtcccaagtatgtcaggagtacaaaattaaggatggttacaggactaagaaacatcccatccattcaatctagaggtttgtttggagccattgccggtttcattgaaggggggtggactggaatgatagatggatggtatggttatcatcatcagaatgaacaaggatctggctatgctgcagaccaaaaaagcacacaaaatgccattgatgggattacaaacaaggtgaattctgtaatcgagaaaatgaacactcaattcacagctgtaggcaaagaattcaacaaattagagagaaggatggaaaacttaaataagaaagttgatgatggatttctggacatttggacatataatgcagagttgttggttctcctggaaaatgaaaggactttggattttcatgactcaaatgtgaagaatctgtatgagaaagtaaaaaaccaattgaagaataatgccaaagaaatcgggaacgggtgttttgaattctatcacaagtgtaacaatgaatgcatggaaagtgtgaaaaatggaacttatgactatccaaaatattccgaagaatcaaagttaaacagggaaaaaattgatggagtgaaattggaatcaatgggcgtctatcagattctggcgatctactcaactgtcgccagttcactggtgcttttggtctccctgggggcaatcagtttctggatgtgttctaatgggtctttgcagtgtagaatatgcatctga

SEQ ID NO: 32050 - RNA, 1701 nt, synthetic construct
  misc_feature 1..1701: note = hemagglutinin__InfluenzaA__ABN50962
  source 1..1701: mol_type = other RNA
atgaaagcaaaactactagtcctgttgtgtgcatttacagctacatatgcagacacaatatgtataggctaccatgcgaacaactcaaccgacactgttgacacagtacttgagaagaacgtgacagtgacacactctgtcaacctacttgaggacagtcacaacggaaaactatgccgactaaaaggaacagccccactacaattgggtaattgcagcgttgccggatggatcttaggaaacccagaatgcgaatcactgttttctaaggaatcatggtcctacattgcagaaacaccaaaccctgagaatggaacatgttacccagggtatttcgccgactatgaggaactgagggagcaattgagctcagtatcatcattcgagagattcgaaatattccccaaggaaagctcatggcccaaccacacagtaaccaaaggagtgacggcatcatgctcccataatgggaaaagcagtttttacaaaaatttgctatggctgacggaaaagaatggcttgtacccaaatctgagcaagtcctatgtaaacaacaaggagaaagaagtccttgtactatggggtgttcatcacccgtctaacataggggaccaaagggccatctatcatacagaaaatgcttatgtctctgtggtgtcttcacattatagcagaagattcaccccagaaatagcaaaaagacccaaagtaagagatcaagaagggagaattaactactactggactctgctggaacccggggacacaataatatttgaggcaaatggaaatctaatagcgccatggtacgctttcgcattgagtagaggctttgggtcaggaatcatcacctcaaacgcatcaatgggtgaatgtgacgctaagtgtcaaacaccccaaggagctataaacagtagtcttcctttccagaatgtacacccagtcacaataggagagtgtcccaagtatgtcaggagtacaaaattaaggatggttacaggactaagaaacatcccatccattcaatctagaggtttgtttggagccattgccggtttcattgaaggggggtggactggaatgatagatggatggtatggttatcatcatcagaatgaacaaggatctggatatgctgcagacaaaaaaagcacacaaaatgccattgatgggattacaaacaaggtgaattctgtaatcgagaaaatgaacactcaattcacagctgtaggcaaagaattcaacaaattagagagaaggatggaaaacttaaataagaaagttgatgatggatttctggacatttggacatataatgcagagttgttggttctcctggaaaatgaaaggactttggattttcatgactcaaatgtgaagaatctgtatgagaaagtaaaaaaccaattgaagaataatgccaaagaaatcgggaacgggtgttttgaattctatcacaagtgtaacaatgaatgcatggaaagtgtgaaaaatggaacttatgactatccaaaatattccgaagaatcaaagttaaaaagggaaaaaattgatggagtgaaattggaatcaatgggagtctatcagattctggcgatctactcaactgtcgccagttcactggtgcttttggtctccctgggggcaatcagtttctggatgtgttctaatgggtctttgcagtgtagaatatgcatctga

SEQ ID NO: 32051 - RNA, 1701 nt, synthetic construct
  misc_feature 1..1701: note = hemagglutinin__InfluenzaA__ABN50973
  source 1..1701: mol_type = other RNA
atgaaagcaaaactactagtcctgttgtgtgcatttacagctacatatgcagacacaatatgtataggctaccatgcgaacaactcaaccgacactgttgacacagtacttgagaagaacgtgacagtgacacactctgtcaacctacttgaggacagtcacaacggaaaactatgccgactaaaaggaacagccccactacaattgggtaattgcagcgttgccggatggatcttaggaaacccagaatgcgaatcactgttttctaaggaatcatggtcctacattgcagaaacaccaaaccctgagaatggaacatgttacccagggtatttcgccgactatgaggaactgagggagcaattgagctcagtatcatcattcgagagattcgaaatattccccaaggaaagctcatggcccaaccacacagtaaccaaaggagtgacggcatcatgctcccacaatgggaaaagcagtttttacaaaaatttgctatggctgacggaaaagaatggcttgtacccaaatctgagcaagtcctatgtaaacaacaaggagaaagaagtccttgtactatggggtgttcatcacccgtctaacataggggaccaaagggccatctatcatacagaaaatgcttatgtctctgtggtgtcttcacattatagcagaagattcaccccagaaatagcaaaaagacccaaagtaagagatcaagaagggagaattaactactactggactctgctggaacccggggacacaataatatttgaggcaaatggaaatctaatagcgccatggtacgctttcgcattgagtagaggctttgggtcaggaatcatcacctcaaacgcatcaatgggtgactgtgacgctaagtgtcaaacaccccaaggagctataaacagtagtcttcctttccagaatgtacacccagtcacaataggagagtgtcccaagtatgtcaggagtacaaaattaaggatggttacaggactaagaaacatcccatccattcaatctagaggtttgtttggagccattgccggtttcattgaaggggggtggactggaatgatagatggatggtatggttatcatcatcagaatgaacaaggatctggctatgctgcagacaaaaaaagcacacaaaatgccattgatgggattacaaacaaggtgaattctgtaatcgagaaaatgaacactcaattcacagctgtaggcaaagaattcaacaaattagagagaaggatggaaaacttaaataagaaagttgatgatggatttctggacatttggacatataatgcagagttgttggttctcctggaaaatgaaaggactttggattttcatgactcaaatgtgaagaatctgtatgagaaagtaaaaaaccaattgaagaataatgccaaagaaatcgggaacgggtgttttgaattctatcacaagtgtaacaatgaatgcatggaaagtgtgaaaaatggaacttatgactatccaaaatattccgaagaatcaaagttaaaaagggaaaaaattgatggagtgaaattggaatcaatgggagtctatcagattctggcgatctactcaactgtcgccagttcactggtgcttttggtctccctgggggcaatcagtttctggatgtgttctaatgggtctttgcagtgtagaatatgcatctga

SEQ ID NO: 32052 - RNA, 1701 nt, synthetic construct; identical to SEQ ID NO: 30762
  misc_feature 1..1701: note = hemagglutinin__InfluenzaA__ABN50984
  source 1..1701: mol_type = other RNA

SEQ ID NO: 32053 - RNA, 1701 nt, synthetic construct; identical to SEQ ID NO: 30763
  misc_feature 1..1701: note = hemagglutinin__InfluenzaA__ABN50995
  source 1..1701: mol_type = other RNA

SEQ ID NO: 32054 - RNA, 1701 nt, synthetic construct
  misc_feature 1..1701: note = hemagglutinin__InfluenzaA__ABN51043
  source 1..1701: mol_type = other RNA
atgaagactatcattgctttgagctacattctatgtctggttttcgctcaaaaacttcccggaaatgacaacagcacggcaacgctgtgccttgggcaccatgcagtaccaaacggaacgatagtgaaaacaatcacgaatgaccaaattgaagttactaatgctactgagctggttcagagttcctcaacaggtgaaatatgcgacagtcctcatcagatccttgatggagaaaactgcacactaatagatgctctattgggagaccctcagtgtgatggcttccaaaataagaaatgggacctttttgttgaacgcagcaaagcctacagcaactgttacccttatgatgtgccggattatgcctcccttaggtcactagttgcctcatccggcacactggagtttaacaatgaaagcttcaattggactggagtcactcaaaatggaacaagctctgcttgcaaaaggagatctaataacagtttctttagtagactgaattggttgacccacttaaaattcaaatacccagcattgaacgtgactatgccaaacaatgaaaaatttgacaaattgtacatttggggggttcaccacccgggtacggacaatgaccaaatcttcttgtatgctcaagcatcaggaagaatcacagtctctaccaaaagaagccaacaaactgtaatcccgaatatcggatccagacctagagtaagggatatccccagcagaataagcatctattggacaatagtaaaaccgggagacatacttttgattaacagcacagggaatctaattgctcctaggggttacttcaaaatacgaagtgggaaaagctcaataatgagatcagatgcacccattggcaaatgcaattctgaatgcatcactccaaatggaagcattcccaatgacaaaccatttcaaaatgtaaacagaatcacatatggggcctgtcccagatatgttaagcaaaacactctgaaattggcaacagggatgagaaatgtaccagagaaacaaactagaggcatatttggcgcaatcgcgggtttcatagaaaatggttgggagggaatggtggatggttggtacggtttcaggcatcaaaattctgagggaataggacaagcagcagatctcaaaagcactcaagcagcaatcaatcaaatcaatgggaagctgaataggttgatcgggaaaaccaacgagaaattccatcagattgaaaaagaattctcagaagtagaagggagaattcaggacctcgagaaatatgttgaggacactaaaatagatctctggtcatacaacgcggagcttcttgttgccctggagaaccaacatacaattgatctaactgactcagaaatgaacaaactgtttgaaagaacaaagaagcaactgagggaaaatgctgaggatatgggcaatggttgtttcaaaatataccacaaatgtgacaatgcctgcataggatcaatcagaaatggaacttatgaccatgatgtatacagagatgaagcattaaacaaccggttccagatcaaaggcgttgagctgaagtcaggatacaaagattggatcctatggatttcctttgccatatcatgttttttgctttgtgttgttttgttggggttcatcatgtgggcctgccaaaaaggcaacattaggtgcaacatttgcatttga

SEQ ID NO: 32055 - RNA, 1701 nt, synthetic construct
  misc_feature 1..1701: note = hemagglutinin__InfluenzaA__ABN51054
  source 1..1701: mol_type = other RNA
atgaagactatcattgctttgagctacattctatgtctggttttcgctcaaaaacttcccggaaatgacaacagcacggcaacgctgtgccttgggcaccatgcagtaccaaacggaacgatagtgagaacaatcacgaatgaccaaattgaagttactaatgctactgagctggttcagagttcctcaacaggtgaaatatgcgacagccctcatcagatccttgatggagaaaactgcacactaatagatgctctattgggagaccctcagtgtgatggcttccaaaataagaaatgggacctttttgttgaacgcagcaaagcctacagcaactgttacccttatgatgtgccggattatgcctcccttaggtcactagttgcctcatccggcacactggagtttaacaatgaaagcttcaattggactggagtcactcaaaatggaacaagctctgcttgcaaaaggagatctaataacagtttctttagtagattgaattggttgacccacttaaaattcaaatacccagcattgaacgtgactatgccaaacaatgaaaaatttgacaaattgtacatttggggggttcaccacccgggtacggacaatgaccaaatcttcctgtatgctcaagcatcaggaagaatcacagtctctaccaaaaggagccaacaaactgtaatcccgaatatcggatctagacccagagtaaggaatatccccagcagaataagcatctattggacaatagtaaaaccgggagacatacttttgattaacagcacagggaatctaattgctcctaggggttacttcaaaatacgaagtgggaaaagctcaataatgagatcagatgcacccattggcaaatgcaattctgaatgcatcactccaaatggaagcattcccaatgacaaaccatttcaaaatgtaaacaggatcacatatggggcctgtcccagatatgttaagcaaaacactctgaaattggcaacagggatgcgaaatgtaccagagaaacaaactagaggcatatttggcgcaatcgcgggtttcatagaaaatggttgggagggaatggtggatggttggtacggtttcaggcatcaaaattctgagggaataggacaagcagcagatctcaaaagcactcaagcagcaatcaatcaaatcaatgggaagctgaataggttgatcgggaaaaccaacgagaaattccatcagattgaaaaagaattctcagaagtagaagggagaattcaggacctcgagaaatatgttgaggacactaaaatagatctctggtcatacaacgcggagcttcttgttgccctggagaaccaacatacaattgatctaactgactcagaaatgaacaaactgtttgaaagaacaaagaagcaactgagggaaaatgctgaggatatgggcaatggttgtttcaaaatataccacaaatgtgacaatgcctgcataggatcaatcagaaatggaacttatgaccatgatgtatacagagatgaagcattaaacaaccggttccagatcaaaggcgttgagctgaagtcaggatacaaagattggatcctatggatttcctttgccatatcatgttttttgctttgtgttgctttgttggggttcatcatgtgggcctgccaaaaaggcaacattaggtgcaacatttgcatttga

SEQ ID NO: 32056 - RNA, 1701 nt, synthetic construct
  misc_feature 1..1701: note = hemagglutinin__InfluenzaA__ABN51066
  source 1..1701: mol_type = other RNA
atgaaagcaaaactactagtcctgttgtgtgcatttacagctacatatgcagacacaatatgtataggctaccatgcgaacaactcaaccgacactgttgacacagtacttgagaagaacgtgacagtgacacactctgtcaacctacttgaggacagtcacaacggaaaactatgccgactaaaaggaacagccccactacaattgggtaattgcagcgttgccggatggatcttaggaaacccagaatgcgaatcactgttttctaaggaatcatggtcctacattgcagaaacaccaaaccctgagaatggaacatgttacccagggtatttcgccgactatgaggaactgagggagcaattgagctcagtatcatcattcgagagattcgaaatattccccaagaaaagctcatggcccaaccacacagtaaccaaaggagtgacggcatcatgctcccataatgggaaaagcagtttttacaaaaatttgctatggctgacggaaaagaatggcttgtacccaaatctgagcaagtcctatgtaaacaacaaggagaaagaagtccttgtactatggggtgttcatcacccgtctaacataggggaccaaaggaccatctatcatacagaaaatgcttatgtctctgtggtgtcttcacattatagcagaaggttcaccccagaaatagcaaaaagacccaaagtaagagatcaagaagggagaattaactactactggactctgctggaacccggggacacaataatatttgaggcaaatggaaatctaatagcgccatggtatgctttcgcattgagtagaggctttgggtcaggaatcatcacctcaaacgcatcaatgggtgactgtgacgctaagtgtcaaacaccccaaggagctataaacagtagtcttcctttccagaatgtacacccagtcacaataggagagtgtcccaagtatgtcaggagtacaaaattaaggatggttacaggactaagaaacatcccatccattcaatctagaggtttgtttggagccattgccggtttcattgaaggggggtggactggaatgatagatggatggtatggttatcatcatcagaatgaacaaggatctggctatgctgcagacaaaaaaagcacacaaaatgccattgatgggattacaaacaaggtgaattctgtaatcgagaaaatgaacactcaattcacagctgtaggcaaagaattcaacaaattagagagaaggatggaaaacttaaataagaaagttgatgatggatttctggacatttggacatataatgcagagttgttggttctcctggaaaatgaaaggactttggattttcatgactcaaatgtgaagaatctgtatgagaaagtaaaaaaccaattgaagaataatgccaaagaaatcgggaacgggtgttttgaattctatcacaagtgtaacaatgaatgcatagaaagtgtgaaaaatggaacttatgactatccaaaatattccgaagaatcaaagttaaaaagggaaaaaattgatggagtgaaattggaatcaatgggagtctatcagattctggcgatctactcaactgtcgccagttcactggtgcttttggtctccctgggggcaatcggtttctggatgtgttctaatgggtctttgcagtgtagaatatgcatctga

SEQ ID NO: 32057 - RNA, 1698 nt, synthetic construct
  misc_feature 1..1698: note = hemagglutinin__InfluenzaA__ABN51077
  source 1..1698: mol_type = other RNA
atgaaagcaaaactactggtcctgttatgtacatttacagctacatacgcagacacaatatgtataggctaccatgccaacaactcaacagacactgttgacacagtacttgagaagaatgtgacagtgacacactctgtcaacctacttgaggacagtcacaatggaaaactatgtctactaaaaggaatagccccactacaattgggtaattgcagcgttgccggatggatcttaggaaacccagaatgcgaattactgatttccaaggaatcatggtcctacattgtagaaacaccaaatcccgagaatggaacatgttacccagggtatttcgccgactatgaggaactgagggagcaattgagttcagtatcttcatttgagagattcgaaatattccccaaaggaagctcatggcccaaccacaccgtaaccggagtatcagcatcatgctcccataatgggaaaagcagtttttacagaaatttgctatggctgacggggaagaatggtttgtacccaaacctgagcatgtcctatgtaaacaacaaagagaaagaagtccttgtgctatggggtgttcatcacccacctaacataggggaccaaagggccctctaccatacagaaaatgcttatgtctctgtagtgtcttcacattatagcagaagattcaccccagaaatagccaaaagacccaaagtaagagatcaggaaggaagaatcaactactactggactctgctggaacccggggacacaataatatttgaggcaaatggaaatctaatagcgccatggtatgctttcgcactgagtagaggctttggatcagggatcatcacctcaaatgcaccaatggatgaatgtgatgcgaagtgtcaaacacctcagggagctataaacagtagtcttcctttccagaatgtacacccagttacaataggagagtgtccaaagtatgtcaggagtgcaaaattaaggatggttacaggactaaggaacatcccatccattcaatccagaggtttgtttggagccattgccggtttcattgaaggggggtggactggaatggtagatgggtggtatggttatcatcatcagaatgagcaaggatctggctatgctgcagatcaaaaaagcacacaaaatgccattaacgggattacgaacaaggtgaattctgtaattgagaaaatgaacactcaattcacagctgtgggcaaagaattcaacaaattagaaagaaggatggaaaacttaaataaaaaagttgatgatgggtttctagacatttggacatataatgcagaattgttggttctactggaaaatgaaaggactttggatttccatgactccaatgtgaagaatctgtatgagaaagtaaaaagccaattaaagaataatgccaaagaaataggaaacgggtgttttgaattctatcacaagtgtaacaatgaatgcatggaaagtgtgaaaaatggaacttatgactatccaaaatattccgaagaatcaaagttaaacagggagaaaattgatggagtaaaattggaatcaatgggagtctatcagattctggcgatctactcaactgtcgccagttccctggttcttttggtctccctgggggcaatcagcttctggatgtgttccaatgggtctttgcagtgtagaatatgcatctga

SEQ ID NO: 32058 - RNA, 1698 nt, synthetic construct
  misc_feature 1..1698: note = hemagglutinin__InfluenzaA__ABN51088
  source 1..1698: mol_type = other RNA
atgaaagtaaaactactggttctgttatgtacatttacagctacatatgcagacacaatatgtataggctaccatgccaacaactcaaccgacactgttgacacagtacttgagaagaatgtgacagtgacacactctgtcaacctacttgaggacagtcacaatggaaaactatgtctactaaaaggaatagccccactacaattgggtaattgcagcgttgccggatggatcttaggaaacccagaatgcgaattactgatttccaaggaatcatggtcctacattgtagaaacaccaaatcctgagaatggaacatgttacccagggtatttcgccgactatgaggaactgagggagcaattgagttcagtatcttcatttgagaggttcgaaatattccccaaagagagctcatggcccaaccataccgtaaccggagtatcagcatcatgctcccataacgggaaaagcagtttttacagaaatttgctatggctgacggggaagaatggtttgtacccaaacctgagcaagtcctatgcaaacaacaaagagaaagaagtccttgtactatggggtgttcatcacccgcctaacataggggaccaaagggccctctatcatacagaaaatgcttatgtctctgtagtgtcttcacattatagcagaagattcaccccagaaatagccaaaagacccaaggtgagagatcaggaaggaagaatcaactactactggactctgctggaacccggggatacaataatatttgaggcaaatggaaatctaatagcgccaagatatgctttcgcactgagtagaggctttggatcaggaatcatcacctcaaatgcaccaatggatgaatgtgatgcgaagtgtcaaacacctcagggagctataaacagcagtcttcctttccagaatgtacacccagtcacaataggagagtgtccaaagtatgtcaggagtgcaaaattaaggatggttacaggactaaggaacatcccatccattcaatccagaggtttgtttggagccattgccggtttcattgagggggggtggactggaatggtagatggttggtatggttatcatcatcagaatgagcaaggatctgggtatgctgcagatcaaaaaagcacacaaaatgccattaacgggattacaaacaaggtgaattctgtaattgagaaaatgaacactcaattcacagctgtgggcaaagaattcaacaaattggaaagaaggatggaaaacttaaataaaaaagttgatgatgggtttctagacatttggacatataatgcagaattgttggttctactggaaaatgaaaggactttggatttccatgactccaacgtgaagaatctgtatgagaaagtaaaaagccaattaaagaataatgccaaagaaataggaaacgggtgttttgaattctatcacaagtgtaacgatgaatgcatggagagtgtgaaaaatggaacttatgactatccaaaatattccgaagaatcaaagttaaacagggagaaaattgatggagtgaaattggaatcaatgggagtctatcagattctggcgatctactcaacagtcgccagttccctggttcttttggtctccctgggggcaatcagcttctggatgtgttccaatgggtctttgcagtgtagaatatgcatctaa

SEQ ID NO: 32059 - RNA, 1701 nt, synthetic construct
  misc_feature 1..1701: note = hemagglutinin__InfluenzaA__ABN51099
  source 1..1701: mol_type = other RNA
atgaagaccatcattgctttgagctacattttctgtctggctctcggccaagaccttccaggaaatgacaacagcacagcaacgctgtgcctgggacatcatgcggtgccaaacggaacactagtgaaaacaataacaaatgatcagattgaagtgactaatgctactgagctagttcagagctcctcaacggggaaaatatgcaacaatcctcatcgaatccttgatggaatagactgcacactgatagatgctctattgggggaccctcattgtgatgtttttcaaaatgagacatgggaccttttcgttgaacgcagcaaagctttcagcaactgttacccttatgatgtgccagattatgcctcccttaggtcactagttgcctcgtcaggcactctggagtttatcactgagggtttcacttggactggggtcactcagaatgggggaagcaatgcttgcaaaaggggacctggtagcggttttttcagtagactgaactggttgaccaaatcaggaagcacatatccagtgctgaacgtgactatgccaaacaatgacaattttgacaaactatacatttggggggttcaccacccgagcacgaaccaagaacaaaccagcctgtatgttcaagcatcagggagagtcacagtctctaccaggagaagccagcaaactataatcccgaatatcgggtccagaccctgggtaaggggtctgtctagtagaataagcatctattggacaatagttaagccgggagacgtactggtaattaatagtaatgggaacctaatcgctcctcggggttatttcaaaatgcgcactgggaaaagctcaataatgaggtcagatgcacctattgatacctgtatttctgaatgcatcactccaaatggaagcattcccaatgacaagccctttcaaaacgtaaacaagatcacatatggagcatgccccaagtatgttaagcaaaacaccctgaagttggcaacagggatgcggaatgtaccagagaaacaaactagaggcctattcggtgcaatagcaggtttcatagaaaatggttgggagggaatgatagacggttggtacggtttcaggcatcaaaattctgagggcacaggacaagcagcagatcttaaaagcactcaagcagccatcgaccaaatcaatgggaaattgaacagagtaatcgagaagatgaacgagaaattccatcaaatcgaaaaggaattctcagaagtagaagggagaattcaggacctcgagaaatacgttgaagacactaaaatagatctctggtcttacaatgcggaacttcttgtcgctctggagaatcaacatacaattgacctgactgactcggaaatgaacaagctgtttgaaaaaacaaggaggcaactgagggaaaatgctgaagacatgggcaatggttgcttcaaaatataccacaaatgtgacaacgcttgcatagagtcaatcagaaatgggacttatgaccatgatgtatacagagacgaagcattaaacaaccggtttcagatcaaaggtgttgaactgaagtctggatacaaagactggatcctgtggatttcctttgccatatcatgctttttgctttgtgttgttttgctggggttcatcatgtgggcctgccagagaggcaacattaggtgcaacatttgcatttga

SEQ ID NO: 32060 - RNA, 1701 nt, synthetic construct
  misc_feature 1..1701: note = hemagglutinin__InfluenzaA__ABN51110
  source 1..1701: mol_type = other RNA
atgaagaccatcattgctttgagctacattttctgtctggctctcggccaagaccttccaggaaatgacaacagcacagcaacgctgtgcctgggacatcatgcggtgccaaacggaacactagtgaaaacaatcacagatgatcagattgaagtgactaatgctactgagctagttcagagctcctcaacggggaaaatatgcaacaatcctcatcgaatccttgatggaataaactgcacactgatagatgctctattgggggaccctcattgtgatgtttttcaagatgagacatgggaccttttcgttgaacgcagcaaagctttcagcaactgttacccttatgatgtgccagattatgcctcccttaggtcactagttgcctcgtcaggcactctggagtttatcactgagggtttcacttggactggggtcactcagaatgggggaagcaatgcttgcaaaaggggacctggtagcggttttttcagtagactgaactggttgaccaaatcaggaagcacatatccagtgctgaacgtgactatgccaaacaatgacaattttgacaaactatacatttggggggttcaccacccgagcacgaaccaagaacaaaccagcctgtatgttcaagcatcagggagagtcacagtctctaccaggagaagccagcaaactataatcccgaatatcgggtccagaccctgggtaaggggtctgtctagtagaataagcatctattggacaatagttaagccgggagacgtactggtaattaatagtaatgggaacctaatcgctcctcggggttatttcaaaatgcgcactgggaaaagctcaataatgaggtcagatgcacctattgatacctgtatttctgaatgcatcactccaaatggaagcattcccaatgacaagccctttcaaaacgtaaacaagatcacatatggagcatgccccaagtatgttaagcaaaacaccctgaagttggcaacagggatgcggaatgtaccagagaaacaaactagaggcctattcggcgcaatagcaggtttcatagaaaatggttgggagggaatgatagacggttggtacggtttcaggcatcaaaattctgagggcacaggacaagcagcagatcttaaaagcactcaagcagccatcgaccaaatcaatgggaaattgaacagggtaatcgagaagacgaacgagaaattccatcaaatcgaaaaggaattctcagaagtagaagggagaattcaggacctcgagaaatacgttgaagacactaaaatagatctctggtcttacaatgcggagcttcttgtcgctctggagaatcaacatacaattgacctgactgactcggaaatgaacaagctgtttgaaaaaacaagaaggcaactgagggaaaatgctgaagacatgggcaatggttgcttcaaaatataccacaaatgtgacaacgcttgcatagagtcaatcagaaatgggacttatgaccatgatgtatacagagacgaagcattaaacaaccggtttcagatcaaaggtgttgaactgaagtctggatacaaagactggatcctgtggatttcctttgccatatcatgctttttgctttgtgttgttttgctggggttcatcatgtgggcctgccagagaggcaacattaggtgcaacatttgcatttga

SEQ ID NO: 32061 - RNA, 1701 nt, synthetic construct
  misc_feature 1..1701: note = hemagglutinin__InfluenzaA__ABN51121
  source 1..1701: mol_type = other RNA
atgaagaccatcattgctttgagctacattttctgtctggctctcggccaagaccttccaggaaatgacaacagcacagcaacgctgtgcctgggacatcatgcggtgccaaacggaacactagtgaaaacaatcacagatgatcagattgaagtgactaatgctactgagctagttcagagctcctcaacggggaaaatatgcaacaatcctcatcgaatccttgatggaataaactgcacactgatagatgctctattgggggaccctcattgtgatgtttttcaagatgagacatgggaccttttcgttgaacgcagcaaagctttcagcaactgttacccttatgatgtgccagattatgcctcccttaggtcactagttgcctcgtcaggcactctggagtttatcactgagggtttcacttggactggggtcactcagaatgggggaagcaatgcttgcaaaaggggacctggtagcggttttttcagtagactgaactggttgaccaaatcaggaagcacatatccagtgctgaacgtgactatgccaaacaatgacaattttgacaaactatacatttggggggttcaccacccgagcacgaaccaagaacaaaccagcctgtatgttcaagcatcagggagagtcacagtctctaccagaagaagccagcaaactataatcccgaatatcgggtccagaccctgggtaaggggtctgtctagtagaataagcatctattggacaatagttaagccgggagacgtactggtaattaatagcaatgggaacctaatcgctcctcggggttatttcaaaatgcgcactgggaaaagctcaataatgaggtcagatgcacctattgatacctgtatttctgaatgcatcactccaaatggaagcattcccaatgacaagccctttcaaaacgtaaacaagatcacatatggaacatgccccaagtatgttaagcaaaacaccctgaagttggcaacagggatgcggaatgtaccagagaaacaaactagaggcctattcggcgcaatagcaggcttcatagaaaatggttgggagggaatgatagacggttggtacggtttcaggcatcaaaattctgagggcacaggacaagcagcagatcttaaaagcactcaagcagccatcgaccaaatcaatgggaaattgaacagggtaatcgagaagacgaacgagaaattccatcaaatcgaaaaggaattctcagaagtagaagggagaattcaggacctcgagaaatacgttgaagacactaaaatagatctctggtcttacaatgcggagcttcttgtcgctctggagaatcaacatacaattgacctgactgacttggaaatgaacaagctgtttgaaaaaacaaggaggcaactgagggaaaatgctgaagacatgggcaatggttgcttcaaaatataccacaaatgtgacaacgcttgcatagagtcaatcagaaatgggacttatgaccatgatgtatacagagacgaagcattaaacaaccggtttcagatcaaaggtgttgaactgaagtctggatacaaagactggatcctgtggatttcctttgccatatcatgctttttgctttgtgttgttttgctggggttcatcatgtgggcctgccagagaggcaacattaggtgcaacatttgcatttga

SEQ ID NO: 32062 - RNA, 1701 nt, synthetic construct
  misc_feature 1..1701: note = hemagglutinin__InfluenzaA__ABN51132
  source 1..1701: mol_type = other RNA
atgaagaccatcattgctttgagctacattttctgtctggctctcggccaagaccttccaggaaatgacaacagcacagcaacgctgtgcctgggacatcatgcggtgccaaacggaacactagtgaaaacaatcacagatgatcagattgaagtgactaatgctactgagctagttcagagctcctcaacggggaaaatatgcaacaatcctcatcgaatccttgatggaataaactgcacactgatagatgctctattgggggaccctcattgtgatgtttttcaagatgagacatgggaccttttcgttgaacgcagcaaagctttcagcaactgttacccttatgatgtgccagattatgcctcccttaggtcactagttgcctcgtcaggcactctggagtttatcactgagggtttcacttggactggggtcactcagaatgggggaagcaatgcttgcaaaaggggacctggtagcggttttttcagtagactgaactggttgaccaaatcaggaagcacatatccagtgctgaacgtgactatgccaaacaatgacaattttgacaaactatacatttggggggttcaccacccgagcacgaaccaagaacaaaccagcctgtatgttcaagcatcagggagagtcacagtctctaccaggagaagccagcaaactataatcccgaatatcgggtccagaccctgggtaaggggtctgtctagtagaataagcatctattggacaatagttaagccgggagacgtactggtaattaatagtaatgggaacctaatcgctcctcggggttatttcaaaatgcgcactgggaaaagctcaataatgaggtcagatgcatctattgatacctgtatttctgaatgcatcactccaaatggaagcattcccaatgacaagccctttcaaaacgtaaacaagatcacatatggagcatgccccaagtatgttaagcaaaacaccctgaagttggcaacagggatgcggaatgtaccagagaaacaaactagaggcctattcggcgcaatagcaggtttcatagaaaatggttgggagggaatgatagacggttggtacggtttcaggcatcaaaattctgagggcacaggacaagcagcagatcttaaaagcactcaagcagccatcgaccaaatcaatgggaaattgaacagggtaatcgagaagacgaacgagaaattccatcaaatcgaaaaggaattctcagaagtagaagggagaattcaggacctcgagaaatacgttgaagacactaaaatagatctctggtcttacaatgcggagcttcttgtcgctctggagaatcaacatacaattgacctgactgactcggaaatgaacaagctgtttgaaaaaacaaggaggcaactgagggaaaatgctgaagacatgggcaatggttgcttcaaaatataccacaaatgtgacaacgcttgcatagagtcaatcagaaatgggacttatgaccatgatgtatacagagacgaagcattaaacaaccggtttcagatcaaaggtgttgaactgaagtctggatacaaagactggatcctgtggatttcctttgccatatcatgctttttgctttgtgttgttttgctggggttcatcatgtgggcctgccagagaggcaacattaggtgcaacatttgcatttga

SEQ ID NO: 32063 - RNA, 1698 nt, synthetic construct
  misc_feature 1..1698: note = hemagglutinin__InfluenzaA__ABN51143
  source 1..1698: mol_type = other RNA
atgaaagcaaaactactggtcctgttatgtacatttacagccacatacgcagacacaatatgtataggctaccatgccaacaactcaaccgacactgttgacacagtacttgagaagaatgtgacagtgacacactctgtcaacctacttgaggacagtcacaatggaaaactatgtctactaaaaggaatagccccactacaattgggtaattgcagcgttgccggatggatcttaggaaacccagaatgcgaattactgatttccaaggaatcatggtcctacattgtagaaacaccaaatcccgagaatggaacatgttacccagggtatttcgccgactatgaggaactgagggagcaattgagttcagtatcttcatttgagagattcgaaatattccccaaaggaagctcatggcccaaccacaccgtgaccggagtatcagcatcatgctcccataatgggaaaagcagtttttacagaaatttactatggctgacggggaagaatggtttgtacccaaacctgagcatgtcctatgtaaacaacaaagagaaagaagtccttgtgctatggggtgttcatcacccacctaacataggggaccaaagggccctctaccatacagaaaatgcttatgtctctgtagtgtcttcacattatagcagaagattcaccccagaaatagccaaaagacccaaagtaagagatcaggaaggaagaatcaactactactggactctgctggaacccggggacacaataatatttgaggcaaatggaaatctaatagcgccatggtatgctttcgcactgagtagaggctttggatcaggaatcatcacctcaaatgcaccaatgggtgaatgtgatgcgaagtgtcaaacacctcagggagctataaacagtagtcttcctttccagaatgtacacccagttacaataggagagtgtccaaagtatgtcaggagtgcaaaattaaggatggttacaggactaaggaacatcccatccattcaatccagaggtttgtttggagccattgccggtttcattgaaggggggtggactggaatggtagatgggtggtatggttatcatcatcagaatgagcaaggatctggctatgctgcagatcaaaaaagcacacaaaatgccattaacgggattacaaacaaggtgaattctgtaattgagaaaatgaacactcaattcacagctgtgggcaaagaattcaacaaattagaaagaaggatggaaaacttaaataaaaaagttgatgatgggtttctagacatttggacttataatgcagaattgttggttctactggaaaatgaaaggactttggatttccatgactccaatgtgaagaatctgtatgagaaagtaaaaagccaattaaagaataatgccaaagaaataggaaacgggtgttttgaattctatcacaagtgtaacaatgaatgcatggaaagtgtgaaaaatggaacttatgactatccaaaatattccgaagaatcaaagttaaacagggagaaaattgatggagtaaaattggaatcaatgggagtctatcagattctggcgatctactcaactgtcgccagttccctggttcttttggtctccctgggggcaatcagcttctggatgtgttccaatgggtctttgcagtgtagaatatgcatctga

SEQ ID NO: 32064 - RNA, 1701 nt, synthetic construct
  misc_feature 1..1701: note = hemagglutinin__InfluenzaA__ABN51154
  source 1..1701: mol_type = other RNA
atgaagactatcattgctttgagctacattttatgtctggttttcactcaaaaacttcccggaaatgacaacagcacggcaacgctgtgcctggggcaccatgcagtgccaaacggaacgctagtgaaaacaatcacgaatgaccaaattgaagtgactaatgctactgagctggttcagagttcctcaacaggtagaatatgcgacagtcctcaccaaatccttgatggagaaaactgcacactaatagatgctctattgggagaccctcattgtgatggcttccaaaataaggaatgggacctttttgttgaacgcagcaaagcctacagcaactgttacccttatgatgtgccggattatgtctcccttaggtcactagttgcctcatcaggcacgctggagtttaacaatgaaagcttcaattggactggagtcgctcagaatggaacaagctctgcttgcaaaaggagatctgataaaagtttctttagtagattgaattggttgcaccaattaaaatacaaatatccagcactgaacgtgactatgccaaacaatgaaaaatttgacaaattgtacatttggggggttcaccacccgggtacagacagtgaccaaatcagcctatatgctcaagcatcagggagagtcacagtctctaccaaaagaagccaacaaactgtaatcccgaatatcggatctggaccctgggtaaggggtgtctccagcagaataagcatctattggacaatagtaaaacctggagacatacttttgattaacagcacagggaatctaattgctcctcggggttacttcaaaatacgaagtgggaaaagctcaataatgaggtcagatgcacccattggcaaatgcaattctgaatgcatcactccaaatggaagcattcccaatgacaaaccatttcaaaatgtaaacaggatcacatatgggccctgtcccagatatgttaagcaaaacactctgaaattggcaacagggatgcggaatgtgccagagaaacaaactagaggcatattcggtgcaatcgcgggcttcatagaaaatggttgggagggaatgatggacggttggtacggtttcaggcatcaaaattctgagggcacagggcaagcagcagatcttaaaagcactcaagcagcaatcaaccaaatcaacgggaaactgaataggttaatcgagaaaacgaacgagaaattccatcaaattgaaaaagaattctcagaagtagaagggagaattcaggacctcgagaaatatgttgaggacactaaaatagatctctggtcgtacaatgcggagcttcttgttgccctggagaaccaacatacaattgatctaactgactcagaaatgaacaaactgtttgaaagaacaaagaagcaactgagggaaaatgctgaggatatgggcaatggttgttttaaaatataccacaaatgtgacaatgcctgcatagggtcaatcagaaatggaacttatgaccatgatgtatacagagacgaagcattgaacaaccggttccagatcaaaggtgttgagctgaagtcaggatacaaagattggatcctatggatttcctttgccatatcatgttttttgctttgtattgttttgctggggttcatcatgtgggcctgccaaaaaggcaacattaggtgcaacatttgcatttga

SEQ ID NO: 32065 - RNA, 1701 nt, synthetic construct
  misc_feature 1..1701: note = hemagglutinin__InfluenzaA__ABN59390
  source 1..1701: mol_type = other RNA
atgaagactatcattgctttgagctacattatatgtctggttttcgctcaaaaacttcccggaaatgacaacagcacggcaacgctgtgccttgggcaccatgcagtaccaaacggaacgatagtgaaaacaatcacgaatgaccaaattgaagttactaatgctactgagttggttcagagttcctcaacaggtgaaatatgcgacagtcctcatcagatccttgatggagaaaactgcacactaatagatgctctattgggagaccctcagtgtgatggcttccaaaataagaaatgggacctttttgttgaacgcagcaaagcctacagcaactgttacccttatgatgtgccggattatgcctcccttaggtcactagttgcctcatccggcacactggagtttaacaatgaaagcttcaattggactggagtcactcaaaatggaacaagctctgcttgcaaaaggagatctaataacagtttctttagtagattgaattggttgacccacttaaaattcaaatacccagcattgaacgtgactatgccaaacaatgaaaaatttgacaaattgtacatttggggggttcaccacccgggtacggacaatgaccaaatcttcctgtatgctcaagcatcaggaagaatcacagtctctaccaaaagaagccaacaaactgtaatcccgaatatcggatctagacccagagtaaggaatatccccagcagaataagcatctattggacaatagtaaaaccgggtgacatacttttgattaacagcacagggaatctaattgctcctaggggttacttcagaatacgaagtgggaaaagctcaataatgagatcagatgcacccattggcaaatgcaattctgaatgcatcactccaaatggaagcattcccaatgacaaaccatttcaaaatgtaaacaggatcacatatggggcctgtcccagatatgttaagcaaaacactctgaaattggcaacagggatgcgaaatgtaccagagaaacaaactagaggcatatttggcgcaatcgcgggtttcatagaaaatggttgggagggaatggtggatggttggtacggtttcaggcatcaaaattctgagggaataggacaagcagcagatctcaaaagcactcaagcagcaatcaatcaaatcaatgggaagctgaataggttgatcgggaaaaccaacgagaaattccatcagattgaaaaagaattctcagaagtagaggggagaattcaggacctcgagaaatatgttgaggacactaaaatagatctctggtcatacaacgcggagcttcttgttgccctggagaaccaacatacaattgatctaactgactcagaaatgaacaaactgtttgaaagaacaaagaagcaactgagggaaaatgctgaggatatgggcaatggttgtttcaaaatataccacaaatgtgacaatgcctgcataggatcaatcagaaatggaacttatgaccatgatgtatacagagatgaagcattaaacaaccggttccagatcaaaggcgttgagctgaagtcaggatacaaagattggatcctatggatttcctttgccatatcatgttttttgctttgtgttgctttattggggttcatcatgtgggcctgccaaaaaggcaacattaggtgcaacatttgcatttga

SEQ ID NO: 32066 - RNA, 1701 nt, synthetic construct
  misc_feature 1..1701: note = hemagglutinin__InfluenzaA__ABN59401
  source 1..1701: mol_type = other RNA
atgaaagcaaaactactggtcctgttatgtgcactttcagctacagatgcagacacaatatgtataggctaccatgcgaacaactcaaccgacactgttgacacagtactcgaaaagaacgtgacagtgacacactctgtcaacctactcgaggacagccacaacgggaaactatgcagactaaaaggaatagccccactacaattggggaaatgcaacattgccggatggatcttaggaaacccagaatgcgaatcactgttttctaagaaatcatggtcctacattgcagaaacaccaaactctgagaatggaacatgttacccaggatatttcgccgactatgaggaactgagggagcaattgagctcagtatcatcattcgagagattcgaaatattccccaaggaaaggtcatggcccaaacacaacataaccagaggagtaacggcagcatgctcccataaggggaaaagcagtttttacagaaatttgctatggctgacggagaaaaatggctcgtacccaaatctgaacaagtcctatgtgaacaataaagagaaagaagtccttgtactatggggtgttcatcacccgtctaacatagaggaccaaaagaccctctatcggaaagaaaatgcttatgtctctgtagtgtcttcaaattataacaggagattcaccccagaaatagcagaaagacccaaagtaagaggtcaagcagggagaattaactactactggactctgctggaacccggggacacaataatatttgaggcaaatggaaatctaatagcgccatggcatgctttcgcactgagtagaggctttgggtcaggaatcatcacctcaaacgcatcgatggatgaatgtgacacgaagtgtcaaacaccccagggagctataaacagtagtctccctttccagaatatacacccagtcacaataggagagtgcccaaaatacgtcaggagtacaaaattgaggatggttacaggactaaggaacatcccatccattcaatccagaggtctgtttggggccattgccggtttcattgaagggggatggactggaatgatagatggatggtatggttatcatcatcagaatgaacagggatctggctatgctgcggatcaaaaaagcacacaaaatgccattaacgggattacaaacaaggtgaactctgttatcgagaaaatgaacactcaattcacagctgtgggtaaagaattcaacaaattagaaaaaaggatggaaaacttaaataaaaaagttgatgatggatttctggacatttggacatataatgcagaattgttggttctactggaaaatgaaaggactttggattttcatgactcaaatgtgaagaatctgtatgagaaagtaaaaagccaattaaagaataatgccaaagaaataggaaacggatgttttgaattctaccacaagtgtaacaatgaatgcatggaaagtgtaaaaaatggaacttatgattatccaaaatattcagaggaatcaaagttaaacagggaaaaaattgatggagtgaaattggaatcaatgggagtctatcagattctggcgatctactcaactgtcgccagttcactggtgcttctggtctccctgggggcaatcagcttctggatgtgttctaatgggtctttgcagtgcagaatatgcatctga

SEQ ID NO: 32067 - RNA, 1698 nt, synthetic construct
  misc_feature 1..1698: note = hemagglutinin__InfluenzaA__ABN59412
  source 1..1698: mol_type = other RNA
atgaaggcaaacctactggtcctgttatgtgcacttgcagctgcagatgcagacacaatatgtataggctaccatgcgaacaattcaaccgacactgttgacacagtactcgagaagaatgtgacagtgacacactctgttaacctgctcgaagacagccacaacggaaaactatgtagattaaaaggaatagccccactacaattggggaaatgtaacatcgccggatggctcttgggaaacccagaatgcgacccactgcttccagtgagatcatggtcctacattgtagaaacaccaaactctgagaatggaatatgttatccaggagatttcatcgactatgaggagctgagggagcaattgagctcagtgtcatcattcgaaagattcgaaatatttcccaaagaaagctcatggcccaaccacaacacaaacggagtaacggcagcatgctcccatgaggggaaaagcagtttttacagaaatttgctatggctgacggagaaggagggctcatacccaaagctgaaaaattcttatgtgaacaaaaaagggaaagaagtccttgtactgtggggtattcatcacccgcctaacagtaaggaacaacagaatctctatcagaatgaaaatgcttatgtctctgtagtgacttcaaattataacaggagatttaccccggaaatagcagaaagacccaaagtaagagatcaagctgggaggatgaactattactggaccttgctaaaacccggagacacaataatatttgaggcaaatggaaatctaatagcaccaatgtatgctttcgcactgagtagaggctttgggtccggcatcatcacctcaaacgcatcaatgcatgagtgtaacacgaagtgtcaaacacccctgggagctataaacagcagtctcccttaccagaatatacacccagtcacaataggagagtgcccaaaatacgtcaggagtgccaaattgaggatggttacaggactaaggaacattccgtccattcaatccagaggtctatttggagccattgccggttttattgaagggggatggactggaatgatagatggatggtatggttatcatcatcagaatgaacagggatcaggctatgcagcggatcaaaaaagcacacaaaatgccattaacgggattacaaacaaggtgaacactgttatcgagaaaatgaacattcaattcacagctgtgggtaaagaattcaacaaattagaaaaaaggatggaaaatttaaataaaaaagttgatgatggatttctggacatttggacatataatgcagaattgttagttctactggaaaatgaaaggactctggaattccatgactcaaatgtgaagaatctgtatgagaaagtaaaaagccaattaaagaataatgccaaagaaatcggaaatggatgttttgagttctaccacaagtgtgacaatgaatgcatggaaagtgtaagaaatgggacttatgattatcccaaatattcagaagagtcaaagttgaacagggaaaaggtagatggagtgaaattggaatcaatggggatctatcagattctggcgatctactcaactgtcgccagttcactggtgcttttggtctccctgggggcaatcagtttctggatgtgttctaatggatctttgcagtgcagaatatgcatctga

SEQ ID NO: 32068 - RNA, 1701 nt, synthetic construct
  misc_feature 1..1701: note = hemagglutinin__InfluenzaA__ABN59423
  source 1..1701: mol_type = other RNA
atgaaagcaaaactactggtcctgttatgtgcactttcagctacagatgcagacacaatatgtataggctaccatgcgaacaactcaaccgacactgttgacacagtgctcgaaaagaacgtgacagtgacacactctgtcaacctacttgaggacagtcacaacggaaaactatgcagactaaaaggaatagccccactacaattggggaaatgcagcattgccggatggatcttaggaaacccagaatgcgaatcactgttttctaagaaatcatggtcctacattgcagaaacaccaaactccgagaatggaacatgttacccaggatatttcgccgactatgaggaactgagggagcaattgagttcagtatcatcattcgagagattcgaaatattccccaaggaaagatcatggcccaaacacaacgtaaccagaggagtaacggcatcatgctcccataaggggaaaagcagtttttacagaaatttgctatggctgacggagaaaaatggctcgtacccaaatctgagcaagtcctatgtgaacaacaaagagaaagaagtccttgtactatggggtgttcatcacccgtctaacatagagaaccaaaagaccatctatcggaaagaaaatgcttatgtctctgtagtgtcttcaaattataacaggagattcaccccagaaatagcagaaagacccaaagtaagagatcaagaagggagaattaactactactggactctgctggaacccggggacacaataatatttgaggcaaatggaaatctaatagcgccatggtatgctttcgcactgagtagaggctttgggtcaggaatcatcacctcaaacgcatcgatggatgaatgtgacacgaagtgtcaaacaccccagggagctataaacagtagtcttcctttccagaatgtacacccagtcacaataggagagtgcccaaaatacgtcaggagtacaaaattaaggatggttacaggactaaggaacatcccatccattcaatccagaggtctgtttggagccattgccggtttcattgaagggggatggactggaatgatagatggatggtatggttatcatcatcagaatgaacagggatctggctatgctgcggatcaaaaaagcacacaaaatgccattaacgggattacaaacaaggtgaactctgttatcgagaaaatgaacactcaattcacagctgtgggtaaagaattcaacaaattagaaaaaaggatggaaaacttaaataaaaaagttgatgatggatttctggacatttggacatataatgcagaattgttggttctactggaaaatgaaaggactttggattttcatgactcaaatgtgaagaatctgtatgagaaagtaaaaagccaattaaagaataatgccaaagaaataggaaacgggtgttttgaattctaccacaagtgtaacaatgaatgcatggaaagtgtaaaaaatggaacttatgactatccaaaatattcagaggaatcaaagttaaacagggaaaaaattgatggagtgaaattggaatcaatgggagtctatcagattctggcgatctactcaactgtcgccagttcactagtgcttttggtctccctgggggcaatcagcttctggatgtgttctaatgggtctttgcagtgcagaatatgcatctga

SEQ ID NO: 32069 - RNA, 1701 nt, synthetic construct
  misc_feature 1..1701: note = hemagglutinin__InfluenzaA__ABO32656
  source 1..1701: mol_type = other RNA
atgaagactatcattgctttgagctacattttatgtctggttttcgctcaaaaacttcccgtaaatgacaacagcacggcaacgctgtgcctgggacaccatgcagtgccaaacggaacgctagtgaaaacaatcacgaatgaccacattgaagtgactaatgctactgagctggttcagagttccccaacaggtagaatatgcgacagtcctcaccaaatccttgatggagaaaactgcacactaatagatgctctattgggagaccctcattgtgatggcttccaaaataaggaatgggacctttttgttgaacgcagcacagcctacagcaactgttacccttatgatgtgccggattatgcctcccttaggtcactagttgcctcatccggcacactggagtttaacaatgaaagcttcaattggactggagtcgctcagaatggaacaagctctgcttgcaaaaggagatctattaaaagtttctttagtagattgaattggttgcaccaattaaaatacaaatatccagcactgaacgtgactatgccaaacaatgaaaaatttgacaaattgtacatttggggggttcatcacccgagtacggacagtgaccaaatcagcctatatgctcaagcatcagggagagtcacagtctctaccaaaagaagccaacaaactgtaatcccgaatatcggatctagaccctgggtaaggggtgtctccagcagaataagcatctattggacaatagtaaaaccgggagacatacttttgattaacagcacagggaatctaattgctcctcggggttacttcaaaatacgaagtgggaaaagctcaataatgaggtcaaatgcacccattggcaaatgcaattctgaatgcatcactccaaatggaagcattcccaatgacaaaccatttcaaaatgtaaacaggatcacatatggggcctgtcccagatatgttaagcaaaacactctgaaattggcaacagggatgcggaatgtaccagagaaacaaactagaggcatattcggcgcaattgcgggtttcatagaaaatggttgggaaggaatggtggacggttggtacggtttcaggcatcaaaattctgagggcacaggacaagcagcagatcttaaaagcactcaagctgcaatcaaccaaatcaacgggaaactgaataggttaatcgagaaaacaaacgagaaattccatcaaattgaaaaagaattctcagaagtagaagggagaattcaggacctcgagaaatatgttgaggacactaaaatagatctctggtcgtacaacgcggagcttcttgttgccctggagaaccaacatacaattgatctaactgactcagaaatgaacaaactgtttgaaagaacaaggaagcaactgagggaaaatgctgaggatatgggcaatggttgtttcaaaatataccacaaatgtgacaatgcctgcatagggtcaatcagaaatggaacttatgaccatgatgtatacagagacgaagcattaaacaaccggttccagatcaaaggtgttgagctgaagtcaggatacaaagattggatcctatggatttcctttgccatatcatgttttttgctttgtgttgttttgctggggttcatcatgtgggcctgccaaaaaggcaacattaggtgcaacatttgcatttga

SEQ ID NO: 32070 - RNA, 1701 nt, synthetic construct
  misc_feature 1..1701: note = hemagglutinin__InfluenzaA__ABO32667
  source 1..1701: mol_type = other RNA
atgaagactatcattgctttgagctacattttatgtctggttttcgctcaaaaacttcccggaaatgacaacagcacggcaacgctgtgcctggggcaccatgcagtaccaaacggaacgctagtgaaaacaatcacgaatgaccaaattgaagtgactaatgctactgagctggttcagagttcctcaacaggtggaatatgcgacagtccccaccaaatccttgatggagaaaactgcacactaatagatgctctattgggagaccctcattgtgatggcttccaaaataaggaatgggacctttttgttgaacgcagcaaagcctacagcaactgttacccttatgatgtgccggattatgcctcccttaggtcactagttgcctcatccggcacactggagtttaacaatgaaagcttcaattggactggagtcgctcagaatggaacaagctctgcttgcaaaaggagatctaataaaagtttctttagtagattgaattggttgcaccaattaaaatacaaatacccagcactgaacgtgactatgccaaacaatgaaaaatttgacaaattgtacatttggggggttcaccacccgagtacggacagtgaccaaatcagcctatatgctcaagcatcagggagagtcacagtctctaccaaaagaagccaacaaactgtaatcccgaatatcggatctagaccctgggtaagggatgtctccagcagaataagcatctattggacaatagtaaaaccgggagacatacttttgattaacagcacagggaatctaattgctcctcggggttacttcaaaatacgaagtgggaaaagctcaataatgagatcagatgcacccattggcaaatgcaattctgaatgcatcactccaaatggaagcattcccaatgacaaaccatttcaaaatgtaaacaggatcacatatggggcctgtcccagatatgttaagcaaaacactctgaaattggcaacagggatgcggaatgtaccagagaaacaaactagaggcatattcggcgcaatcgcgggtttcatagaaaatggttgggagggaatggtggacggttggtacggtttcaggcatcaaaattctgagggcacaggacaagcagcagatcttaaaagcactcaagcagcaatcaaccaaatcaacgggaaactgaataggttaatcgggaaaacgaacgagaaattccatcagattgaaaaagaattctcagaagtagaagggagaattcaggacctcgagaaatatgttgaggacactaaaatagatctctggtcgtacaacgcggagcttcttgttgccctggagaaccaacatacaattgatctaactgactcagaaatgaacaaactgtttgaaagaacaaagaagcaactgagggaaaatgctgaggatatgggcaatggttgtttcaaaatataccacaaatgtgacaatgcctgcatagggtcaatcagaaatggaacttatgaccatgatgtatacagagacgaagcattaaacaaccggttccagatcaaaggtgttgagctgaagtcaggatacaaagattggatcctatggatttcctttgccatatcatgttttttgctttgtgttgttttgctggggttcatcatgtgggcctgccaaaaaggcaacattaggtgcaacatttgcatttga

SEQ ID NO: 32071 - RNA, 1698 nt, synthetic construct
  misc_feature 1..1698: note = hemagglutinin__InfluenzaA__ABO32678
  source 1..1698: mol_type = other RNA
atgaaagtaaaactactggttctgttatgtacatttacagctacatatgcagacacaatatgtataggctaccatgccaacaactcaaccgacactgttgacacagtacttgagaagaatgtgacagtgacacactctgtcaacctacttgaggacagtcacaatggaaaactatgtctactaaaaggaatagccccattacaattgggtaattgcagcgttgccggatggatcttaggaaacccagaatgcgaattactgatttccaaggaatcatggtcctacattgtagaaacaccaaatcctgagaatggaacatgttacccagggtatttcgccgactatgaggaactgagggagcaattgagttcagtatcttcatttgagaggttcgaaatattccccaaagagagctcatggcccaaccacaccgtaaccggagtatcagcatcatgctcccataacgggaaaagcagtttttacagaaatttgctatggctgacggggaagaatggtttgtacccaaacctgagcaagtcttatgcaaacaacaaagaaaaagaagtccttgtactatggggtgttcatcacccgcctaacataggggaccaaagggctctctatcatacagaaaatgcttatgtctctgtagtgtcttcacattatagcagaagattcaccccagaaatagccaaaagacccaaggtgagagatcaggaaggaagaatcaactactactggacactgctggaacccggggatacaataatatttgaggcaaatggaaatctaatagcgccaaggtttgctttcgcactgagtagaggctttggatcaggaatcatcacctcaaatgcaccaatggatgaatgtgatgcaaagtgtcaaacacctcaaggagctataaacagcagtcttcctttccagaatgtacacccagtcacaataggggagtgtccaaagtatgtcaggagtgcaaaattaaggatggctacaggactaaggaacatcccatccattcaatccagaggtttgtttggagccattgccggtttcattgaaggggggtggactggaatggtagatggttggtatggttatcatcatcagaatgagcaaggatctgggtatgctgcagatcaaaaaagcacacaaaatgccattaacgggattacaaacaaggtgaattctgtaattgaaaaaatgaacactcaattcacagctgtgggcaaagaattcagcaaattggagagaaggatggaaaacttacataaaaaagttgatgatgggtttctagacatttggacatataatgcagaattgttggttctactggaaaatgaaaggactttggatttccacgactccaacgtgaagaatctgtatgagaaagtgaaaagccaattaaagaataatgccaaagaaataggaaacgggtgttttgaattctatcacaaatgtaacgatgaatgcatggagagtgtgaaaaatggaacttatgactatccaaaatattccgaagaatcaaagttaaacagggagaaaattgatggagtgaaattggaatcaatgggagtctatcagattctggcgatctactcaacagtcgccagttccctggttcttttggtctccctgggggcaatcagcttctggatgtgttccaatgggtctttgcagtgtagaatatgcatctaa

SEQ ID NO: 32072 - RNA, 1701 nt, synthetic construct
  misc_feature 1..1701: note = hemagglutinin__InfluenzaA__ABO32692
  source 1..1701: mol_type = other RNA
atgaagactatcattgctttgagctacattctatgtctggttttcgctcaaaaacttcccggaaatgacaacagcacggcaacgctgtgccttgggcaccatgcagtaccaaacggaacgatagtgaaaacaatcacgaatgaccaaattgaagttactaatgctactgagctggttcagagttcctcaacaggtggaatatgcgacagtcctcatcagatccttgatggagaaaactgcacactaatagatgctctattgggagaccctcagtgtgatggcttccaaaataagaaatgggacctttttgttgaacgcagcaaagcctacagcaactgttacccttatgatgtgccggattatgcctcccttaggtcactagttgcctcatccggcacactggagtttaacaatgaaagcttcaattggactggagtcactcaaaatggaacaagctctgcttgcaaaaggagatctaataacagtttctttagtagattgaattggttgacccacttaaaattcaaatacccagcattgaacgtgactatgccaaacaatgaaaaatttgacaaattgtacatttggggggttcaccacccgggtacggacaatgaccaaatcttcctgtatgctcaagcatcaggaagaatcacagtctctaccaaaagaagccaacaaactgtaatcccgaatatcggatctagacccagagtaaggaatatccccagcagaataagcatctattggacaatagtaaaaccgggagacatacttttgattaacagcacagggaatctaattgctcctaggggttacttcaaaatacgaagtgggaaaagctcaataatgagatcagatgcacccattggcaaatgcaattctgaatgcatcactccaaatggaagcattcccaatgacaaaccatttcaaaatgtaaacaggatcacatatggggcctgtcccagatatgttaagcaaaacactctgaaattggcaacagggatgcgaaatgtaccagagaaacaaactagaggcatatttggcgcaatcgcgggtttcatagaaaatggttgggagggaatggtggatggttggtacggtttcaggcatcaaaattctgagggaataggacaagcagcagatctcaaaagcactcaagcagcaatcaatcaaatcaatgggaagctgaataggttgatcgggaaaaccaacgagaaattccatcagattgaaaaagaattctcagaagtagaagggagaattcaggacctcgagaaatatgttgaggacactaaaatagatctctggtcatacaacgcggagcttcttgttgccctggagaaccaacatacaattgatctaactgactcagaaatgaacaaactgtttgaaagaacaaagaagcaactgagggaaaatgctgaggatatgggcaatggttgtttcaaaatataccacaaatgtgacaatgcctgcataggatcaatcagaaatggaacttatgaccatgatgtatacagagatgaagcattaaacaaccggttccagatcaaaggcgttgagctgaagtcaggatacaaagattggatcctatggatttcctttgccatatcatgttttttgctttgtgttgttttgttggggttcatcatgtgggcctgccaaaaaggcaacattaggtgcaacatttgcatttga

SEQ ID NO: 32073 - RNA, 1701 nt, synthetic construct; identical to SEQ ID NO: 31937
  misc_feature 1..1701: note = hemagglutinin__InfluenzaA__ABO32751
  source 1..1701: mol_type = other RNA

SEQ ID NO: 32074 - RNA, 1701 nt, synthetic construct; identical to SEQ ID NO: 31937
  misc_feature 1..1701: note = hemagglutinin__InfluenzaA__ABO32762
  source 1..1701: mol_type = other RNA

SEQ ID NO: 32075 - RNA, 1701 nt, synthetic construct; identical to SEQ ID NO: 31959
  misc_feature 1..1701: note = hemagglutinin__InfluenzaA__ABO32775
  source 1..1701: mol_type = other RNA

SEQ ID NO: 32076 - RNA, 1701 nt, synthetic construct; identical to SEQ ID NO: 30822
  misc_feature 1..1701: note = hemagglutinin__InfluenzaA__ABO32790
  source 1..1701: mol_type = other RNA

SEQ ID NO: 32077 - RNA, 1701 nt, synthetic construct
  misc_feature 1..1701: note = hemagglutinin__InfluenzaA__ABO32803
  source 1..1701: mol_type = other RNA
atgaagactatcattgctttgagctacattctatgtctggttttcgctcaaaaacttcccggaaatgacaacagcacggcaacgctgtgccttgggcaccatgcagtaccaaacggaacgatagtgaaaacaatcacgaatgaccaaattgaagttactaatgctactgagctggttcagagttcctcaacaggtggaatatgcgacagtcctcatcagatccttgatggagaaaactgcacactaatagatgctctattgggagaccctcagtgtgatggcttccaaaataagaaatgggacctttttgttgaacgcagcaaagcctacagcaactgttacccttatgatgtgccggattatgtctcccttaggtcactagttgcctcatccggcacactggagtttaacaatgaaagcttcaattggactggagtcactcaaaatggaacaagctctgcttgcaaaaggagatctaataacagtttctttagtagattgaattggttgacccatttaaaattcaaatacccagcattgaacgtgactatgccaaacaatgaaaaatttgacaaattgtacatttggggggttcaccacccgggtacggacaatgaccaaatcagcctatatgctcaagcatcaggaagaatcacagtctctaccaaaagaagccaacaaactgtaatcccgaatatcggatctagacccagggtaagggatatccccagcagaataagcatctattggacaatagtaaaaccgggagacacacttttgattaacagcacagggaatctaattgctcctcggggttacttcaaaatacgaagtgggaaaagctcaataatgagatcagatgcacccattgacaaatgcaattctgaatgcatcactccaaatggaagcattcccaatgacaaaccatttcaaaatgtaaacaggatcacatatggggcctgtcccagatatgttaagcaaaacactctgaaattggcaacagggatgcgaaatgtaccagagaaacaaactagaggcatatttggcgcaatcgcgggtttcatagaaaatggttgggagggaatggtggatggttggtacggtttcaggcatcaaaattctgagggaataggacaagcagcagatctcaaaagcactcaagcagcaatcaaccaaatcaatgggaagctgaataggttgatcgggaaaaccaacgagaaattccatcagattgaaaaagaattctcagaagtagaaggaagaattcaggacctcgagaaatatgttgaggacactaaaatagatctctggtcatacaacgcggagcttcttgttgccctggagaaccaacatacaattgatctaactgactcagaaatgaacaaactgtttgaaagaacaaagaagcaactgagggaaaatgctgaggatatgggcaatggttgtttcaaaatataccacaaatgtgacaatgcctgcatagggtcaatcagaaatggaacttatgaccatgatgtatacagagatgaagcattaaacaaccggttccagatcaaaggtgttgagctgaagtcaggatacaaagattggatcctatggatttcctttgccatatcatgttttttgctttgtgttgctttgttgggattcatcatgtgggcctgccaaaaaggcaacattaggtgcaacatttgcatttga

SEQ ID NO: 32078 - RNA, 1701 nt, synthetic construct; identical to SEQ ID NO: 31161
  misc_feature 1..1701: note = hemagglutinin__InfluenzaA__ABO32816
  source 1..1701: mol_type = other RNA

SEQ ID NO: 32079 - RNA, 1701 nt, synthetic construct; identical to SEQ ID NO: 30783
  misc_feature 1..1701: note = hemagglutinin__InfluenzaA__ABO32827
  source 1..1701: mol_type = other RNA

SEQ ID NO: 32080 - RNA, 1701 nt, synthetic construct
  misc_feature 1..1701: note = hemagglutinin__InfluenzaA__ABO32838
  source 1..1701: mol_type = other RNA
atgaagactatcattgctttgagctacattctatgtctggttttcgctcaaaaacttcccggaaatgacaacagcacggcaacgctgtgccttgggcaccatgcagtaccaaacggaacgatagtgaaaacaatcacgaatgaccaaattgaagttactaatgctactgagctggttcagagttcctcaacaggtggaatatgcgacagtcctcatcagatccttgatggagaaaactgcacactaatagatgctctattgggagaccctcagtgtgatggcttccaaaataagagatgggacctttttgttgaacgcagcaaagcctacagcaactgttacccttatgatgtgccggattatgcctcccttaggtcactagttgcctcatccggcacactggagtttaacaatgaaagcttcaattggactggagtcactcaaaatggaacaagctctgcttgcaaaaggagatctaataacagtttctttagtagattgaattggttgacccacttaaaattcaaatacccagcattgaacgtgactatgccaaacaatgaaaaatttgacaaattgtacatttggggggttcaccacccgggtacggacaatgaccaaatcttcctgtatgctcaagcatcaggaagaatcacagtctctaccaaaagaagccaacaaactgtaatcccgaatatcggatctagacccagagtaaggaatatccccagcagaataagcatctattggacaatagtaaaaccaggagacatacttttgattaacagcacagggaatctaattgctcctaggggttacttcaaaatacgaagtgggaaaagctcaataatgagatcagatgcacccattggcaaatgcaattctgaatgcatcactccaaatggaagcattcccaatgacaaaccatttcaaaatgtaaacaggatcacatatggggcctgtcccagatatgttaagcaaaacactctgaaattggcaacagggatgcgaaatgtaccagagaaacaaactagaggcatatttggcgcaatcgcgggtttcatagaaaatggttgggagggaatggtggatggttggtacggtttcaggcatcaaaattctgagggaataggacaagcagcagatctcaaaagcactcaagcagcaatcaatcaaatcaatgggaagctgaataggttgatcgggaaaaccaacgagaaattccatcagattgaaaaagaattctcagaagtagaagggagaattcaggacctcgagaaatatgttgaggacactaaaatagatctctggtcatacaacgcggagcttcttgttgccctggagaaccaacatacaattgatctaactgactcagaaatgaacaaactgtttgaaagaacaaagaagcaactgagggaaaatgctgaggatatgggcaatggttgtttcaaaatataccacaaatgtgacaatgcctgcataggatcaatcagaaatggaacttatgaccatgatgtatacagagatgaagcattaaacaaccggttccagatcaaaggcgttgagctgaagtcaggatacaaagattggatcctatggatttcctttgccatatcatgttttttgctttgtgttgctttgttggggttcatcatgtgggcctgccaaaaaggcaacattaggtgcaacatttgcatttga

SEQ ID NO: 32081 - RNA, 1701 nt, synthetic construct; identical to SEQ ID NO: 32080
  misc_feature 1..1701: note = hemagglutinin__InfluenzaA__ABO32849
  source 1..1701: mol_type = other RNA

SEQ ID NO: 32082 - RNA, 1701 nt, synthetic construct
  misc_feature 1..1701: note = hemagglutinin__InfluenzaA__ABO32860
  source 1..1701: mol_type = other RNA
atgaagactatcattgctttgagctacattctatgtctggttttcgctcaaaaacttcccggaaatgacaacagcacggcaacgctgtgccttgggcaccatgcagtaccaaacggaacgatagtgaaaacaatcacgaatgaccaaattgaagttactaatgctactgagctggttcagagttcctcaacaggtggaatatgcgacagtcctcatcagatccttgatggagaaaactgcacactaatagatgctctattgggagaccctcagtgtgatggcttccaaaataagagatgggacctttttgttgaacgcagcaaagcctacagcaactgttacccttatgatgtgccggattatgcctcccttaggtcactagttgcctcatccggcacactggagtttaacaatgaaagcttcaattggactggagtcactcaaaatggaacaagctctgcttgcaaaaggagatctaataacagtttctttagtagattgaattggttgacccacttaaaattcaaatacccagcattgaacgtgactatgccaaacaatgaaaaatttgacaaattgtacatttggggggttcaccacccgggtacggacaatgaccaaatcttcctgtatgctcaagcatcaggaagaatcacagtctctaccaaaagaagccaacaaactgtaatcccgaatatcggatctagacccagagtaagggatatccccagcagaataagcatctattggacaatagtaaaaccaggagacatacttttgattaacagcacagggaatctaattgctcctaggggttacttcaaaatacgaagtgggaaaagctcaataatgagatcagatgcacccattggcaaatgcaattctgaatgcatcactccaaatggaagcattcccaatgacaaaccatttcaaaatgtaaacaggatcacatatggggcctgtcccagatatgttaagcaaaacactctgaaattggcaacagggatgcgaaatgtaccagagaaacaaactagaggcatatttggcgcaatcgcgggtttcatagaaaatggttgggagggaatggtggatggttggtacggtttcaggcatcaaaattctgagggaataggacaagcagcagatctcaaaagcactcaagcagcaatcaatcaaatcaatgggaagctgaataggttgatcgggaaaaccaacgagaaattccatcagattgaaaaagaattctcagaagtagaagggagaattcaggacctcgagaaatatgttgaggacactaaaatagatctctggtcatacaacgcggagcttcttgttgccctggagaaccaacatacaattgatctaactgactcagaaatgaacaaactgtttgaaagaacaaagaagcaactgagggaaaatgctgaggatatgggcaatggttgtttcaaaatataccacaaatgtgacaatgcctgcataggatcaatcagaaatggaacttatgaccatgatgtatacagagatgaagcattaaacaaccggttccagatcaaaggcgttgagctgaagtcaggatacaaagattggatcctatggatttcctttgccatatcatgttttttgctttgtgttgctttgttggggttcatcatgtgggcctgccaaaaaggcaacattaggtgcaacatttgcatttga

SEQ ID NO: 32083 - RNA, 1701 nt, synthetic construct; identical to SEQ ID NO: 32065
  misc_feature 1..1701: note = hemagglutinin__InfluenzaA__ABO32871
  source 1..1701: mol_type = other RNA

SEQ ID NO: 32084 - RNA, 1701 nt, synthetic construct
  misc_feature 1..1701: note = hemagglutinin__InfluenzaA__ABO32882
  source 1..1701: mol_type = other RNA
atgaagactatcattgctttgagctacattatatgtctggttttcgctcaaaaacttcccggaaatgacaacagcacggcaacgctgtgccttgggcaccatgcagtaccaaacggaacgatagtgaaaacaatcacgaatgaccaaattgaagttactaatgctactgagttggttcagagttcctcaacaggtgaaatatgcgacagtcctcatcagatccttgatggagaaaactgcacactaatagatgctctattgggagaccctcagtgtgatggcttccaaaataagaaatgggacctttttgttgaacgcagcaaagcctacagcaactgttacccttatgatgtgccggattatgcctcccttaggtcactagttgcctcatccggcacactggagtttaacaatgaaagcttcaattggactggagtcactcaaaatggaacaagctctgcttgcaaaaggagatctaataacagtttctttagtagattgaattggttgacccacttaaaattcaaatacccagcattgaacgtgactatgccaaacaatgaaaaatttgacaaattgtacatttggggggttcaccacccgggtacggacaatgaccaaatcttcccgtatgctcaagcatcaggaagaatcacagtctctaccaaaagaagccaacaaactgtaatcccgaatatcggatctagacccagagtaaggaatatccccagcagaataagcatctattggacaatagtaaaaccgggtgacatacttttgattaacagcacagggaatctaattgctcctaggggttacttcagaatacgaagtgggaaaagctcaataatgagatcagatgcacccattggcaaatgcaattctgaatgcatcactccaaatggaagcattcccaatgacaaaccatttcaaaatgtaaacaggatcacatatggggcctgtcccagatatgttaagcaaaacactctgaaattggcaacagggatgcgaaatgtaccagagaaacaaactagaggcatatttggcgcaatcgcgggtttcatagaaaatggttgggagggaatggtggatggttggtacggtttcaggcatcaaaattctgagggaataggacaagcagcagatctcaaaagcactcaagcagcaatcaatcaaatcaatgggaagctgaataggttgatcgggaaaaccaacgagaaattccatcagattgaaaaagaattctcagaagtagaggggagaattcaggacctcgagaaatatgttgaggacactaaaatagatctctggtcatacaacgcggagcttcttgttgccctggagaaccaacatacaattgatctaactgactcagaaatgaacaaactgtttgaaagaacaaagaagcaactgagggaaaatgctgaggatatgggcaatggttgtttcaaaatataccacaaatgtgacaatgcctgcataggatcaatcagaaatggaacttatgaccatgatgtatacagagatgaagcattaaacaaccggttccagatcaaaggcgttgagctgaagtcaggatacaaagattggatcctatggatttcctttgccatatcatgttttttgctttgtgttgctttattggggttcatcatgtgggcctgccaaaaaggcaacattaggtgcaacatttgcatttga

SEQ ID NO: 32085 - RNA, 1701 nt, synthetic construct
  misc_feature 1..1701: note = hemagglutinin__InfluenzaA__ABO32893
  source 1..1701: mol_type = other RNA
atgaagactatcattgctttgagctacattctatgtctggttttcgctcaaaaacttcccggaaatgacaacagcacggcaacgctgtgccttgggcaccatgcagtaccaaacggaacgatagtgaaaacaatcacgaatgaccaaattgaagttactaatgctactgagctggttcagagttcctcaacaggtgaaatatgcgacagtcctcatcagatccttgatggagaaaactgcacactaatagatgctctattgggagaccctcagtgtgatggcttccaaaataagaaatgggacctttttgttgaacgcagcaaagcctacagcaactgttacccttatgatgtgccggattatgcctcccttaggtcactagttgcctcatccggcacactggagtttaacaatgaaagcttcaattggactggagtcactcaaaatggaacaagctctgcttgcaaaaggagatctaataacagtttctttagtagactgaattggttgacccacttaaaattcaaatacccagcattgaacgtgactatgccaaacaatgaaaaatttgacaaattgtacatttggggggttcaccacccgggtacggacaatgaccaaatcttcttgtatgctcaagcatcaggaagaatcacagtctctaccaaaagaagccaacaaactgtaatcccgaatatcggatccagacctagagtaaggaatatccccagcagaataagcatctattggacaatagtaaaaccgggagacatacttttgattaacagcacagggaatctaattgctcctaggggttacttcaaaatacgaagtgggaaaagctcaataatgagatcagatgcacccattggcaaatgcaattctgaatgcatcactccaaatggaagcattcccaatgacaaaccatttcaaaatgtaaacagaatcacatatggggcctgtcccagatatgttaagcaaaacactctgaaattggcaacagggatgagaaatgtaccagagaaacaaactagaggcatatttggcgcaatcgcgggtttcatagaaaatggttgggagggaatggtggatggttggtacggtttcaggcatcaaaattctgagggaataggacaagcagcagatctcaaaagcactcaagcagcaatcaatcaaatcaatgggaagctgaataggttgatcgggaaaaccaacgagaaattccatcagattgaaaaagaattctcagaagtagaagggagaattcaggacctcgagaaatatgttgaggacactaaaatagatctctggtcatacaacgcggagcttcttgttgccctggagaaccaacatacaattgatctaactgactcagaaatgaacaaactgtttgaaagaacaaagaagcaactgagggaaaatgctgaggatatgggcaatggttgtttcaaaatataccacaaatgtgacaatgcctgcataggatcaatcagaaatggaacttatgaccatgatgtatacagagatgaagcattaaacaaccggttccagatcaaaggcgttgagctgaagtcaggatacaaagattggatcctatggatttcctttgccatatcatgttttttgctttgtgttgttttgttggggttcatcatgtgggcctgccaaaaaggcaacattaggtgcaacatttgcatttga

SEQ ID NO: 32086 - RNA, 1701 nt, synthetic construct; identical to SEQ ID NO: 32085
  misc_feature 1..1701: note = hemagglutinin__InfluenzaA__ABO32904
  source 1..1701: mol_type = other RNA

SEQ ID NO: 32087 - RNA, 1701 nt, synthetic construct; identical to SEQ ID NO: 32055
  misc_feature 1..1701: note = hemagglutinin__InfluenzaA__ABO32915
  source 1..1701: mol_type = other RNA

SEQ ID NO: 32088 - RNA, 1701 nt, synthetic construct; identical to SEQ ID NO: 32055
  misc_feature 1..1701: note = hemagglutinin__InfluenzaA__ABO32926
  source 1..1701: mol_type = other RNA

SEQ ID NO: 32089 - RNA, 1701 nt, synthetic construct
  misc_feature 1..1701: note = hemagglutinin__InfluenzaA__ABO32937
  source 1..1701: mol_type = other RNA
atgaagactatcattgctttgagctacattctatgtctggttttcgctcaaaaacttcccggaaatgacaacagcacggcaacgctgtgccttgggcaccatgcagtaccaaacggaacgatagtgagaacaatcacgaatgaccaaattgaagttactaatgctactgagctggttcagagttcctcaacaggtgaaatatgcgacagccctcatcagatccttgatggagaaaactgcacactaatagatgctctattgggagaccctcagtgtgatggcttccaaaataagaaatgggacctttttgttgaacgcagcaaagcctacagcaactgttacccttatgatgtgccggattatgcctcccttaggtcactagttgcctcatccggcacactggagtttaacaatgaaagcttcaattggactggagtcactcaaaatggaacaagctcttcttgcaaaaggagatctaataacagtttctttagtagattgaattggttgacccacttaaaattcaaatacccagcattgaacgtgactatgccaaacaatgaaaaatttgacaaattgtacatttggggggttcaccacccgggtacggacaatgaccaaatcttcctgtatgctcaagcatcaggaagaatcacagtctctaccaaaaggagccaacaaactgtaatcccgaatatcggatctagacccagagtaaggaatatccccagcagaataagcatctattggacaatagtaaaaccgggagacatacttttgattaacagcacagggaatctaattgctcctaggggttacttcaaaatacgaagtgggaaaagctcaataatgagatcagatgcacccattggcaaatgcaattctgaatgcatcactccaaatggaagcattcccaatgacaaaccatttcaaaatgtaaacaggatcacatatggggcctgtcccagatatgttaagcaaaacactctgaaattggcaacagggatgcgaaatgtaccagagaaacaaactagaggcatatttggcgcaatcgcgggtttcatagaaaatggttgggagggaatggtggatggttggtacggtttcaggcatcaaaattctgagggaataggacaagcagcagatctcaaaagcactcaagcagcaatcaatcaaatcaatgggaagctgaataggttgatcgggaaaaccaacgagaaattccatcagattgaaaaagaattctcagaagtagaagggagaattcaggacctcgagaaatatgttgaggacactaaaatagatctctggtcatacaacgcggagcttcttgttgccctggagaaccaacatacaattgatctaactgactcagaaatgaacaaactgtttgaaagaacaaagaagcaactgagggaaaatgctgaggatatgggcaatggttgtttcaaaatataccacaaatgtgacaatgcctgcataggatcaatcagaaatggaacttatgaccatgatgtatacagagatgaagcattaaacaaccggttccagatcaaaggcgttgagctgaagtcaggatacaaagattggatcctatggatttcctttgccatatcatgttttttgctttgtgttgctttgttggggttcatcatgtgggcctgccaaaaaggcaacattaggtgcaacatttgcatttga

SEQ ID NO: 32090 - RNA, 1698 nt, synthetic construct
  misc_feature 1..1698: note = hemagglutinin__InfluenzaA__ABO32948
  source 1..1698: mol_type = other RNA
atgagagcaaaactactggtcctgttatgtacatttacagctacatacgcagacacaatatgtataggctaccatgccaacaactcaaccgacactgttgacacagtacttgagaagaatgtgacagtgacacattctgtcaacctacttgaggacagtcacaatggaaaactatgtctactaaaaggaatagccccactacaattgggtaattgcagcgttgccggatggatcttaggaaacccagaatgcgaattactgatttccaaggaatcatggtcctacattgtagaaacaccaaatcctgagaatgggacatgttacccaggatatttcgccgactatgaggaactgagggagcaattgagttcagtatcttcatttgagagattcgaaatattccccaaaggaagctcatggcccaaccacactgtaaccggagtatcagcatcatgctcccataatgggaaaagcagtttttacagaaatttgctatggctgacggggaagaatggtttgtacccaaacctgagcatgtcctatgtaaacaacaaagagaaagaagtccttgtgctatggggtgttcatcacccacctaacataggggaccaaagggccctctaccatacagaaaatgcttatgtctctgtagtgtcttcacattatagcagaagattcaccccagaaatagccaaaagacccaaagtaagagatcaggaaggaagaatcaactactactggactctgctggaacccggggacacaataatatttgaggcaaatggaaatctaatagcgccatggtatgctttcgcactgagtagaggctttggatcaggaatcatcacctcgaatgcaccaatggatgaatgtgatgcgaagtgtcaaacacctcagggagctataaacagtagtcttcctttccagaatgtacacccagttacaataggagagtgtccaaagtatgtcaggagtgcaaaattaaggatggttacaggactaaggaacatcccatccattcaatccagaggtttgtttggagccattgccggtttcattgaaggggggtggactggaatggtagatgggtggtatggttatcatcatcagaatgagcaaggatctggctatgctgcagaccaaaaaagcacacaaaatgccattaacgggattacaaacaaggtgaattctgtaattgagaaaatgaacactcaattcacagctgtgggcaaagaattcaacaaattagaaagaaggatggaaaacttaaataaaaaagttgatgatgggtttctagacatttggacatataatgcagaattgttggttctactggaaaatgaaaggactttggatttccatgactccaatgtgaagaatctgtatgagaaagtaaaaagccaattaaagaataatgccaaagaaataggaaacgggtgttttgaattctatcacaagtgtaacaatgaatgcatggaaagtgtgaaaaatggaacttatgactatccaaaatattccgaagaatcaaagttaaacagggagaaaattgatggagtaaaattggaatcaatgggagtctatcagattctggcgatctactcaactgtcgccagttccctggttcttttggtctccctgggggcaatcagcttctggatgtgttccaatgggtctttgcagtgtagaatatgcatctga

SEQ ID NO: 32091 - RNA, 1698 nt, synthetic construct
  misc_feature 1..1698: note = hemagglutinin__InfluenzaA__ABO32959
  source 1..1698: mol_type = other RNA
atgaaagcaaaactactggtcctgttatgtacatttacagctacatacgcagacacaatatgtataggctaccatgccaacaactcaaccgacactgttgacacagtacttgagaagaatgtgacagtgacacactctgtcaacctacttgaggacagtcacaatggaaaactatgtctactaaaaggaatagccccactacaattgggtaattgcagcgttgccggatggatcttaggaaacccagaatgcgaattactgatttccaaggaatcatggtcctacattgtagaaacaccaaatcctgagaatggaacatgttacccagggtatttcgctgactatgaggaactgagggagcaattgagttcagtatcttcatttgagagattcgaaatattccccaaagaaagctcatggcccaaccacaccgtaaccggagtatcagcatcatgctcccataatgggaaaagcagtttttacagaaatttgctatggctgacggggaagaatggtttgtacccaaacctgagcaggtcctatgtaaacaacaaagagaaagaagtccttgtgctatggggtgttcatcacccacctaacataggggaccaaagggccctctaccatacagaaaatgcttatgtctctgtagtgtcttcacattatagcagaagattcaccccagaaatagccaaaagacccaaagtaagagatcaggaaggaagaatcaactactactggactctgctggaacccggggacacattaatatttgaggcaaatggaaatctaatagcgccatggtatgctttcgcactgagtagaggctttggatcaggaatcatcacctcaaatgcaccaatggatgaatgtgatgcgaagtgtcaaacacctcagggagctataaacagcagtcttcctttccagaatgtacacccagttacaataggagagtgtccaaagtatgtcaggagtacaaaattaaggatggttacaggactaaggaacatcccatccattcaatccagaggtttgtttggagccattgccggtttcattgaaggggggtggactggaatggtagatgggtggtatggttatcatcatcagaatgagcaaggatctggctatgctgcagatcaaaaaagcacacaaaatgccattaacgggattacaaacaaggtgaattctgtaattgagaaaatgaacactcaattcacagctgtgggcaaagaattcaacaaattagaaagaaggatggaaaacttaaataaaaaagttgatgatgggtttctagacatttggacatataatgcagaattgttggttctactggaaaatgaaaggactttggatttccatgactccaatgtgaagaatctgtatgagaaagtaaaaagccaattaaagaataatgccaaagaaataggaaacgggtgttttgaattctatcacaagtgtaacaatgaatgcatggaaagtgtgaaaaatggaacttatgactatccaaaatattccgaagaatcaaagttaaacagggagaaaattgatggagtaaaattggaatcaatgggagtctatcagattctggcgatctactcaactgtcgccagttccctggttcttttggtctccctgggggcaatcagcttctggatgtgttccaatgggtctttgcaatgtagaatatgcatctga

SEQ ID NO: 32092 - RNA, 1698 nt, synthetic construct; identical to SEQ ID NO: 31888
  misc_feature 1..1698: note = hemagglutinin__InfluenzaA__ABO32970
  source 1..1698: mol_type = other RNA

SEQ ID NO: 32093 - RNA, 1701 nt, synthetic construct
  misc_feature 1..1701: note = hemagglutinin__InfluenzaA__ABO32981
  source 1..1701: mol_type = other RNA
atgaaagcaaaactactggtcctgttatgtgcactttcagctacagatgcagacacaatatgtataggctaccatgcgaacaactcaaccgacactgttgacacagtactcgaaaagaacgtgacagtgacacactctgtcaacctacttgaggacagtcacaacggaaaactatgcagactaaaaggaatagccccactacaattggggaaatgcagcattgccggatggatcttaggaaacccagaatgcgaatcactgttttctaagaaatcatggtcctacattgcagaaacaccaaactccgagaatggaacatgttacccaggatatttcgccgactatgaggaactgagggagcaattgagttcagtatcatcattcgagagattcgaaatattccccaaggaaagatcatggcccaaacacaacgtaaccagaggagtaacggcatcatgctcccataaggggaaaagcagtttttacagaaatttgctatggctgacggagaaaaatggctcgtacccaaatctgagcaagtcctatgtgaacaacaaagagaaagaagtccttgtcctatggggtgttcatcacccgtctaacataaaggaccaaaagaccatctatcggaaagaaaatgcttatgtctctgtagtgtcttcaaattataacaggagattcaccccagaaatagcagaaagacccaaagtaagagatcaagcagggagaattaactactactggactctgctggaacccggggacacaataatatttgaggcaaatggaaatctaatagcgccatggtatgctttcgcactgagtagaggctttgggtcaggaatcatcacctcaaacgcatcgatggatgaatgtgacacgaagtgtcaaacaccccagggagctataaacagtagtcttcctttccagaatgtacacccagtcacaataggagagtgcccaaaatacgtcaggagtacaaaattaaggatggttacaggactaaggaacatcccatccattcaatccagaggtctgtttggagccattgccggtttcattgaagggggatggactggaatgatagatggatggtatggttatcatcatcagaatgaacagggatctggctatgctgcggatcaaaaaagcacacaaaatgccattaacgggattacaaacaaggtgaactctgttatcgagaaaatgaacactcaattcacagctgtgggtaaagaattcaacaaattagaaaaaaggatggaaaacttaaataaaaaagttgatgatggatttctggacatttggacatataatgcagaattgttggttctactggaaaatgaaaggactttggattttcatgactcaaatgtgaagaatctgtatgagaaagtaaaaagccaattaaagaataatgccaaagaaataggaaacgggtgttttgaattctaccacaagtgtaacaatgaatgcatggaaagtgtaaaaaatggaacttatgactatccaaaatattcagaggaatcaaagttaaacagggaaaaaattgatggagtgaaattggaatcaatgggagtctatcagattctggcgatctactcaactgtcgccagttcactggtgcttttggtctccctgggggcaatcagcttctggatgtgttctaatgggtctttgcagtgcagaatatgcatctga

SEQ ID NO: 32094 - RNA, 1701 nt, synthetic construct
  misc_feature 1..1701: note = hemagglutinin__InfluenzaA__ABO32992
  source 1..1701: mol_type = other RNA
atgaaagcaaaactactggtcctgttatgtgcactttcagctacagatgcagacacaatatgtataggctaccatgcgaacaactcaaccgacactgttgacacagtactcgaaaagaacgtgacagtgacacactctgtcaacctacttgaggacagtcacaacggaaaactatgcagactaaaaggaatagccccactacaattggggaaatgcagcattgccggatggatcttaggaaacccagaatgcgaatcactgttttctaagaaatcatggtcctacattgcagaaacaccaaactccgagaatggaacatgttacccaggatatttcgccgactatgaggaactgagggagcaattgagttcagtatcatcattcgagagattcgaaatattccccaaggaaagatcatggcccaaacacgacgtaaccagaggagtaacggcatcatgctcccataaggggaaaagcagtttttacagaaatttgctatggctgacggagaaaaatggctcgtacccaaatctgagcaagtcctatgtgaacaacaaagagaaagaagtccttgtactatggggtgttcatcacccgtctaacatagaggaccaaaagaccatctatcggaaagaaaatgcttatgtctctgtagtgtcttcaaattataacaggagattcaccccagaaatatcagaaagacccaaagtaagagatcaaaaagggagaattaactactactggactctgctggaacccggggacacaataatatttgaggcaaatggaaatctaatagcgccatggtatgctttcgcactgagtagaggctttgggtcaggaatcatcacctcaaacgcatcgatggatgaatgtgacacgaagtgtcaaacaccccagggagctataaacagtagtcttcctttccagaatgtacacccagtcacaataggagagtgcccaaaatacgtcaggagtacaaaattaaggatggttacaggactaaggaacatcccatccattcaatccagaggtctgtttggagccattgccggtttcattgaagggggatggactggaatgatagatggatggtatggttatcatcatcagaatgaacagggatctggctatgctgcggatcaaaaaagcacacaaaatgccattaacgggattacaaacaaggtgaactctgttatcgagaaaatgaacactcaattcacagctgtgggtaaagaattcaacaaattagaaaaaaggatggaaaacttaaataaaaaagttgatgatggatttctggacatttggacatataatgcagaattgttggttctactggaaaatgaaaggactttggattttcatgactcaaatgtgaagaatctgtatgagaaagtaaaaagccaattaaagaataatgccaaagaaataggaaacgggtgttttgaattctaccacaagtgtaacaatgaatgcatggaaagtgtaaaaaatggaacttatgactatccaaaatattcagaggaatcaaagttaaacagggaaaaaattgatggagtgaaattggaatcaatgggagtctatcagattctggcgatctactcaactgtcgccagttcactggtgcttttggtctccctgggggcaatcagcttctggatgtgttctaatgggtctttgcagtgcagaatatgcatctga

SEQ ID NO: 32095 - RNA, 1701 nt, synthetic construct
  misc_feature 1..1701: note = hemagglutinin__InfluenzaA__ABO33006
  source 1..1701: mol_type = other RNA
atgaaagcaaaaatactggtcctgttatgtgcactttcagctacagatgcagacacaatatgtataggctaccatgcgaacaactcaaccgacactgttgacacagtactcgaaaagaacgtgacagtgacacactctgtcaacctacttgaggacagtcacaacggaaaactatgcagactaaaaggaatagccccactacaattggggaaatgcagcattgccggatggatcttaggaaacccagaatgtgaatcactgttttctaagaaatcttggtcctacattgcagaaacaccaaactccgagaatggaacatgttacccaggatatttcgctgactatgaggaactgagggagcaattgagttcagtgtcatcattcgagagattcgaaatattccccaaggaaaggtcatggcccaaacacaacgtaaccaggggagtaacggcatcatgctcccataaggggaaaagcagtttttacagaaatttgctatggctgacggagaaaaatggctcgtacccaaatctgagcaagtcctatgtgaacaacaaagagaaagaagtccttgtactatggggtgttcatcacccgtctaacatagaggaccaaaagaccatctatcggaaagaaaatgcttatgtctctgtagtgtcttcaaattataacaggagattcaccccagaaatatcaaaaagacccaaagtaagagatcaagaagggagaattaactactactggactctgctggaacccggggacacaataatatttgaggcaaatggaaatctaatagcgccatggtatgctttcgcactgagtagaggctttgggtcaggaatcatcacctcaaacgcatcgatggatgaatgtgacacgaagtgtcaaacaccccagggagctataaacagtagtcttcctttccagaatgtacacccagtcacaataggagagtgcccaaaatacgtcaggagtacaaaattaaggatggttacaggactaaggaacatcccatctattcaatccagaggtctgtttggagccattgccggtttcattgaagggggatggactggaatgatagatggatggtatggttatcatcatcagaatgaacagggatctggctatgctgcggatcaaaaaagcacacaaaatgccattaacgggattacaaacaaggtgaactctgttatcgagaagatgaacactcaattcacagctgtgggtaaagaattcaacaaattagaaaaaaggatggaaaacttaaataaaaaagttgatgatggatttctggacatttggacatataatgcagaattgttggttctactggaaaatgaaaggactttggattttcatgactcaaatgtgaagaatctgtatgagaaagtaaaaagccaattaaagaataatgccaaagaaataggaaacgggtgttttgaattctaccacaagtgtaacaatgaatgcatggaaagtgtaaaaaatggaacttatgactatccaaaatattcagaggaatcaaagttaaacagggaaaaaattgatggagtgaaattggaatcaatgggagtctatcagattctggcgatctactcaactgtcgccagttcactggtgcttttggtctcccttggggcaatcagcttctggatgtgttctaatgggtctttgcagtgcagaatatgcatctga

SEQ ID NO: 32096 - RNA, 1701 nt, synthetic construct
  misc_feature 1..1701: note = hemagglutinin__InfluenzaA__ABO33025
  source 1..1701: mol_type = other RNA
atgaaagcaaaactactggtcctgttatgtgcactctcagctacagatgcagacacaatatgtataggctaccatgcgaacaactcaaccgacactgttgacacagtactcgaaaagaacgtgacagtgacacactctgtcaacctacttgaggacaatcacaacgggaaactatgcaaactaaaaggaatagcgccactacaattggggaaatgcagcattgccggatggatcttaggaaacccagaatgcgaatcactgttttctaagaaatcatggtcctacattgcagaaacaccaaactccgagaatggaacatgttacccagggtatttcgccgactatgaagaactgagggaacaattgagttcagtatcatcattcgagagattcgaaatattccccaaggaaagttcatggcccaaccacaacgtaaccaaaggagtaacggcatcatgctcccataaggggaaaagcagtttttacagaaatttgctatggctgacggagaaaaatggctcgtacccaaatctgagcaagtcctatgtgaacaacaaagagaaagaagtccttgtactatggggtgttcatcacccgtctaacataaaggaccaaaggaccatctatcgtaaagaaaatgcttatgtctctgtagtgtcttcacattataacaggagattcaccccagaaatagcaaaaagacccaaagtaagagatcaagaagggagaattaactactactggactctgctggaacccggggacacaataatatttgaggcaaatggaaatctaatagcgccatggtatgctttcgcactgagtagaggctttgggtcaggaatcatcacctcaaacgcatcgatggatgaatgtgacgcgaagtgtcaaacaccccagggagctataaacagtagtcttccttttcagaatgtacacccagtcacaataggagagtgcccaaagtacgtcaggagtacaaaattaaggatggttacaggactaaggaacatcccatccattcaatccagaggtttgtttggagccattgccggtttcattgaagggggatggactggaatgattgatggatggtatggttatcatcatcagaatgaacagggatctggctatgctgcggatcaaaaaagcacacaaagtgccattaacgggattacaaacaaggtgaactctataatcgagaaaatgaacactcaattcacagctgtgggtaaagaattcaacaaactagaaaaaaggatggaaaacttaaataaaaaagttgatgatggatttctggacatttggacatataatgcagaattgttggttctactggaaaatgaaaggactttggatttccatgactcaaatgtgaagaacctgtatgagaaagtaaaaagccaattaaagaataatgccaaagaaataggaaacgggtgttttgaattctaccacaagtgtaacaatgaatgcatggaaagtgtaaaaaatggaacttatgactatccaaaatattcagaggaatcaaaattaaacagggaaaaaattgatggagtgaaattggaatcaatgggagtctatcagattctggcgatctactcaactgtcgccagttcactggtgcttttggtctccctgggggcaatcagcttctggatgtgttctaatgggtctttgcagtgcagaatatgcatctga

SEQ ID NO: 32097 - RNA, 1701 nt, synthetic construct
  misc_feature 1..1701: note = hemagglutinin__InfluenzaA__ABO33036
  source 1..1701: mol_type = other RNA
atgaagactatcattgctttgagctacattttatgtctggttttcgctcaaaaacttcccggaaatgacaacagcacggcaacgctgtgcctgggacaccatgcagtgccaaacggaacgctagtgaaaacaatcacgaatgaccaaattgaagtgactaatgctactgagctggttcagagttcctcaacaggtagaatatgcaacagtcctcaccaaatccttgatggagaaaactgcacactaatagatgctctattgggagaccctcattgtgatggcttccaaaataaggaatgggacctttttgttgaacgcagaaaagcctacagcaactgttacccttatgatgtgccggattatgcctcccttaggtcactagttgcctcatctggcacactggagtttaacaatgaaagcttcaactggactggagtcgctcagaatggaacaagctctgcttgcaaaaggagatctattaaaagtttctttagtagattgaattggttgcaccaattaaaatacaaatatccagcactgaacgtgactatgccaaacaatgaaaaatttgacaaattgtacatttggggggttcaccacccgagtacggacagtgaccaaatcagcctgtatgctcaagcatcagggagagtcacagtctctaccaaaagaagccaacaaactgtaatcccgaatatcggatctagaccctgggtaaggggtgtctccagcagaataagcatctattggacaatagtaaaaccgggagacatacttttgattaacagcacagggaatctaattgctcctcggggttacttcaaaatacgaagtgggaaaagctcaataatgaggtcagatgcacccattggcaaatgcaattctgaatgcatcactccaaatggaagcattcccaatgacaaaccatttcaaaatgtaaacaggatcacatatggggcctgtcccagatatgttaagcaaaacactctgaaattggcaacagggatgcggaatgtaccagagaaacaaactagaggcatattcggcgcaatcgcgggtttcatagaaaatggttgggagggaatggtggacggttggtacggtttcaggcatcaaaattctgagggcacaggacaagcagcagatcttaaaagcactcaagcagcaatcaaccaaatcaacgggaaactgaataggttaatcgagaaaacgaacgagaaattccatcaaattgaaaaagaattctcagaagtagaagggagaattcaggacctcgagaaatatgttgaggacactaaaatagatctctggtcgtacaacgcggagcttcttgttgccctggagaaccaacatacaattgatctaactgactcagaaatgaacaaactgtttgaaagaacaaagaagcaactgagggaaaatgctgaggatatgggcaatggttgtttcaaaatataccacaaatgtgacaatgcctgcatagggtcaatcagaaatggaacttatgaccatgatgtatacagagacgaagcattaaacaaccggttccagatcaaaggtgttgagctgaagtcaggatacaaagattggatcctatggatttcctttgccatatcatgttttttgctttgtgttgttttgctggggttcatcatgtgggcctgccaaaaaggcaacattaggtgcaacatttgcatttga

SEQ ID NO: 32098 - RNA, 1701 nt, synthetic construct; identical to SEQ ID NO: 31875
  misc_feature 1..1701: note = hemagglutinin__InfluenzaA__ABO33047
  source 1..1701: mol_type = other RNA

SEQ ID NO: 32099 - RNA, 1701 nt, synthetic construct
  misc_feature 1..1701: note = hemagglutinin__InfluenzaA__ABO33058
  source 1..1701: mol_type = other RNA
atgaagactatcattgctttgagctacattttatgtctggttttcgctcaaaaacttcccggaaatgacaacagcacggcaacgctgtgcctggggcatcatgcagtgccaaacggaacgctagtgaaaacaatcacgaatgaccaaattgaagtgactaatgctactgagctggttcagagttcctcaacaggtggaatatgcgacagtcctcaccaaatccttgatggagaaaactgcacactaatagatgctctattgggagaccctcattgtgatggcttccaaaataaggaatgggacctttttgttgaacgcagcaaagcctacagcaactgttacccttatgatgtgccggattatgcctcccttaggtcactagttgcctcatccggcacactggagtttaacaatgaaagcttcaattggactggagtcgctcagaatggaacaagctctgcttgcaaaaggagatctaataaaagtttctttagtagattgaattggttgcaccaattaaaatacaaatacccagcactgaacgtgactatgccaaacaatgaaaaatttgacaaattgtacatttggggggttcaccacccgagtacggacagtgaccaaatcagcctatatgctcaagcaccagggagagtcacagtctctaccaaaagaagccaacaaactgtaatcccgaatatcggatctagaccctgggtaaggggtgtctccagcagaataagcatctattggacaatagtaaaaccgggagacatacttttgattaactgcacagggaatctaattgctcctcggggttacttcaaaatacgaagtgggaaaagctcaataatgaggtcagatgcatccattggcaaatgcaattctgaatgcatcactccaaatggaagcattcccaatgacaaaccatttcaaaatgtaaacaggatcacatatggggcctgtcccagatatgttaagcaaaacactctgaaattggcaacagggatgcggaatgtaccagagaaacaaactagaggcatattcggcgcaatcgcgggtttcatagaaaatggttgggagggaatggtggacggttggtacggtttcaggcatcaaaattctgagggcacaggacaagcagcagatctcaaaagcactcaagcagcaatcaaccaaatcaacgggaaactgaataggttaatcgagaaaacgaacgagaaattccatcaaattgaaaaagaattctcagaagtggaagggagaattcaggacctcgagaaatatgttgaggacactaaaatagatctctggtcgtacaacgcggagcttcttgttgccctggagaaccagcatacaattgatctaactgactcagaaatgaacaaactgtttgaaagaacaaagaagcaactgagggaaaatgctgaggatatgggcaatggttgtttcaaaatataccacaaatgtgacaatgcctgcatagggtcaatcagaaatgggacttatgaccatgatgtatacagagacgaagcattaaacaaccggttccagatcaaaggtgttgagctgaagtcaggatacaaagattggatcctatggatttcctttgccatatcatgttttttgctttgtgttgtcttgctggggttcatcatgtgggcctgccaaaaaggcaacattaggtgcaacatttgcatttga

SEQ ID NO: 32100 - RNA, 1701 nt, synthetic construct
  misc_feature 1..1701: note = hemagglutinin__InfluenzaA__ABO33069
  source 1..1701: mol_type = other RNA
atgaagactatcattgctttgagctacattttctgtctggttttcgcccaaaaccttcccggaaatgacaacagcacagcaacgctgtgcctgggacatcatgcagtgccaaacggaacgctagtgaaaacaatcacgaatgatcagattgaagtgactaatgctactgagctggttcagagttcctcaacaggtagaatatgcgacagtcctcatcgaatccttgatggaaaaaactgcacactgatagatgctctattgggagaccctcattgtgatggctttcaaaatgagaaatgggacctttttgttgaacgcagcaaagctttcagcaactgttacccttatgatgtgccagattatgcctcccttaggtcactagttgcctcgtcaggcaccctggagtttatcaatgaaggcttcaattggactggggtcactcagaatggaggaagctatgcttgcaaaaggggacctgataacagtttcttcagtagactgaactggttgtacgaatcagaaagcaaatatccagtgctgaacgtgactatgccaaacaatgacaattttgacaaactgtacatttggggggttcaccacccgagcacggacaaagaacaaaccaacctatatgttcaagcatcagggagagtcacagtctctaccaagaaaagccagcagactataatcccgaatgtcgggtctagaccctgggtaaggggtctgtctagtagaataagtatctattggacaatagtaaaaccgggagacatactgttaattaatagtaatgggaacctaattgctcctcggggttacttcaaaatacgcactgggaaaagctcaataatgaggtcagatgcacctattggcacctgcagttctgaatgcatcactccaaatggaagcattcccaatgacaagccctttcaaaacgtaaacaagatcacatatggagcatgtcccaagtatgttaagcaaaacactctgaagttggcaacagggatgcggaatgtaccagagaaacaaactagaggcatattcggcgcaatagcaggtttcatagaaaatggttgggagggaatggtagacggttggtacggtttcaggcatcaaaattctgagggcacaggacaagcagcagatcttaaaagcactcaagcagccatcgaccaaatcaatgggaaactgaatagggtaatcgagaaaacgaacgagaaattccatcaaatcgaaaaggaattctcagaagtagaagggagaattcaggacctcgagaaatacattgaagacactaaaatagatctctggtcttacaatgcggagcttcttgtcgctttggagaaccaacatacaattgatctgactgactcgaaaatgaacaaactgtttgaaaaaacaaggaggcaactgagggaaaatgctgaggacatgggcaatggttgcttcaaaatataccacaaatgtgacaatgcttgcatagggtcaatcagaaatggaacttatgaccatgatgtatacagagacgaagcattaaacaaccggtttcagatcaaaggtgttgagctgaagtcaggatacaaagactggatcctgtggatttcctttgccatatcatgctttttgctttgtgttgttttgctggggttcatcatgtgggcctgccagaaaggcaacattaggtgcaacatttgcatttga

SEQ ID NO: 32101 - RNA, 1701 nt, synthetic construct
  misc_feature 1..1701: note = hemagglutinin__InfluenzaA__ABO37988
  source 1..1701: mol_type = other RNA
atgaaagcaaaactactggtcctgttatgtgcactttcagctacagatgcagacacaatatgtataggctaccatgcgaacaactcaaccgacactgttgacacagtactcgaaaagaacgtgacagtgacacactctgtcaacctacttgaggacaatcacaacgggaaactatgcaaactaaaaggaatagccccactacaattggggaaatgcagcattgccggatggatcttaggaaacccagaatgcgaatcactgttttctaagaaatcatggtcctacattgcagaaacaccaaactccgagaatggaacatgttacccagggtatttcgccgactatgaggaactgagggaacaattgagttcagtatcatcattcgagagattcgaaatattccccaaggaaagttcatggcccaaacacaacgtaaccaaaggagtaacggcatcatgctcccataaggggaaaagcagtttttacagaaatttgctatggctgacggagaaaaatggctcgtacccaaatctgagcaagtcctatgtgaacaacaaagagaaagaagtccttgtactatggggtgttcatcacccgtctaacatagaggaccaaaagaccatctatcgtaaagaaaatgcttatgtctctgtagtgtcttcacattataacaggagattcaccccagaaatagcaaaaagacccaaagtaagaaatcaagaagggagaattaactactactggactctgctggaacccggggacacaataatatttgaggcaaatggaaatctaatagcgccatggtatgctttcgcattgagtagaggctttgggtcaggaatcatcacctcaaacgcatcgatggatgaatgtgacgcgaagtgtcaaacaccccagggagctataaacagtagtcttccttttcagaatgtacacccagtcacaataggagagtgcccaaagtacgtcaggagtacaaaattaaggatggttacaggactaaggaacatcccatccattcaatccagaggtttgtttggagccattgccggtttcattgaagggggatggactggaatgattgatggatggtatggttatcatcatcagaatgaacagggatctggctatgctgcggatcaaaaaagcacacaaaatgccattaacgggattacaaacaaggtgaactctataatcgagaaaatgaacactcaattcacagctgtgggtaaagaattcaacaaactagaaaaaaggatggaaaacttaaataaaaaagttgatgatgggtttctggacatttggacatataatgcagaattgttggttctactggaaaatgaaaggactttggatttccatgactcaaatgtgaagaacctgtatgagaaagtaaaaagccaattaaagaataatgccaaagaaataggaaacgggtgttttgaattctaccacaagtgtaacaatgaatgcatggaaagtgtaaaaaatgggacttatgactatccaaaatattcagaagaatcaaagttaaacagggaaaaaattgatggagtgaaattggaatcaatgggagtctatcagattctggcgatctactcaactgtcgccagttcactggtgcttttggtctccctgggggcaatcagcttctggatgtgttctaatgggtctttgcagtgcagaatatgcatctga

SEQ ID NO: 32102 - RNA, 1701 nt, synthetic construct
  misc_feature 1..1701: note = hemagglutinin__InfluenzaA__ABO38010
  source 1..1701: mol_type = other RNA
atgaaagcaaaactactagtcctgttgtgtgcatttacagctacatatgcagacacaatatgtataggctaccatgcgaacaactcaaccgacactgttgacacagtacttgagaagaacgtgacagtgacacactctgtcaacctacttgaggacagtcacaacggaaaactatgccgactaaaaggaacagccccactacaattgggtaattgcagcgttgccggatggatcttaggaaacccagaatgcgaatcacttttttctaaggaatcatggtcctacattgcagaaacaccaaaccctgagaatggaacatgttacccagggtatttcgccgactatgaggaactgagggagcaattgagctcagtatcatcattcgagagattcgaaatattccccaaggaaagctcatggcccaaccacacagtaaccaaaggagtgacggcatcatgctcccataatgggaaaagcagtttttacaaaaatttgctatggctgacggaaaagaatggcttgtacccaaatctgagcaagtcctatgtaaacaacaaggagaaagaagtccttgtactatggggtgttcatcacccgtctaacataggggaccaaagggccatctatcatacagaaaatgcttatgtctctgtggtgtcttcacattatagcagaagattcaccccagaaatagcaaaaagacccaaagtaagagatcaagaagggagaattaactactactggactctgctggaacccggggacacaataatatttgaggcaaatggaaatctaatagcgccatggtacgctttcgcattgagtagaggcgttgggtcaggaatcatcacctcaaacgcatcaatgggtgactgtgacgctaagtgtcaaacaccccaaggagctataaacagtagtcttcctttccagaatgtacacccagtcacaataggagagtgtcccaagtatgtcaggagtacaaaattaaggatggttacaggactaagaaacatcccatccattcaatctagaggtttgtttggagccattgccggtttcattgaaggggggtggactggaatgatagatggatggtatggttatcatcatcagaatgaacaaggatctggctatgctgcagacaaaaaaagcacacaaaatgccattgatgggattacaaacaaggtgaattctgtaatcgagaaaatgaacactcaattcacagctgtaggcaaagaattcaacaaattagagagaaggatggaaaacttaaataagaaagttgatgatggatttctggacatttggacatataatgcagagttgttggttctcctggaaaatgaaaggactttggattttcatgactcaaatgtgaagaatctgtatgagaaagtaaaaaaccaattgaagaataatgccaaagaaatcgggaacgggtgttttgaattctatcacaagtgtaacaatgaatgcatggaaagtgtgaaaaatggaacttatgactatccaaaatattccgaagaatcaaagttaaaaagggaaaaaattgatggagtgaaattggaatcaatgggagtctatcagattctggcgatctactcaactgtcgccagttcactggtgcttttggtctccctgggggcaatcagtttctggatgtgttctaatgggtctttgcagtgtagaatatgcatctga

SEQ ID NO: 32103 - RNA, 1698 nt, synthetic construct
  misc_feature 1..1698: note = hemagglutinin__InfluenzaA__ABO38021
  source 1..1698: mol_type = other RNA
atgaaagcaaaactactggtcctgttatgtacatttacagctacatatgcagacacaatatgtataggctaccatgccaacaactcaaccgacactgttgacacagtacttgagaagaatgtgacagtgacacactctgtcaacctacttgaggacagtcacaatggaaaactatgtctactaaaaggaatagccccactacaattgggtaattgcagcgttgccggatggatcttaggaaacccagaatgcgaattactgattcccaaggaatcatggtcctacattgtagaaacaccaaatcctgagaatggaacatgttacccagggtatttcgccgactatgaggaactgagggagcaattgagttcagtatcttcatttgagagattcgaaatattccccaaagaaagctcatggcccaaccacaccgtaaccggagtatcagcatcatgctcccataatgggaaaagcagtttttacagaaatttgctatggctgacggggaagaatggtttgtacccaaacctgagcaagtcctatgcaaacaacaaagagaaagaagtccttgtactatggggtgttcatcacccgcctaacataggggaccaaagggccctctatcatacagaaaatgcttatgtctctgtagtgtcttcacattatagcagaagattcatcccagaaatggccaaaagacccaaagtaagagatcaggaaggaagaatcaactactactggactctgctggaacccggagatacaataatatttgaggcaaatggaaatctaatagcgccatggtatgctttcgcactgagtagaggctttggatcaggaatcatcacctcaaatgcaccaatgggtgaatgtgatgcgaagtgtcaaacacctcagggagctataaacagcagtcttcctttccagaatgtacacccagtcacaataggagagtgtccaaagtatgtcaggagtgcaaaattaaggatggttacaggactaaggaacatcccatccattcaatccagaggtttgtttggagccattgccggtttcattgaaggggggtggactggaatggtagatgggtggtatggttatcatcatcagaatgagcaaggatctggctatgctgcagatcaaaaaagcacacaaaatgccattaacgggattacaaacaaggtgaattctgtaattgagaaaatgaacactcaattcacagctgtgggcaaagaattcaacaaattggaaagaaggatggaaaacttaaataaaaaagttgatgatgggtttctagacatttggacatataatgcagaattgttggttctactggaaaatgaaaggactttggatttccatgactccaatgtgaagaatctgtatgagaaagtaaaaagccaattaaagaataatgccaaagaaataggaaacgggtgttttgaattctaccacaagtgcaacaatgaatgcatggagagtgtgaaaaatggaacttatgactatccaaaatattccgaagaatcaaagttaaacagggagaaaattgatggagtgaaattggaatcaatgggagtctatcagattctggcgatctactcaactgtcgccagttccctggttcttttggtctccctgggggcaatcagcttctggatgtgttccaatgggtctttgcagtgtagaatatgcatctga

SEQ ID NO: 32104 - RNA, 1698 nt, synthetic construct
  misc_feature 1..1698: note = hemagglutinin__InfluenzaA__ABO38032
  source 1..1698: mol_type = other RNA
atgaaagtaaaactactggtcctgctatgtacatttacagctacatatgcagacacaatatgtataggctaccatgccaacaactcaaccgacactgttgacacagtgcttgagaagaatgtgacagtgacacactctgtcaacctacttgaggacagtcacaatggaaaactatgtctactaaaaggaatagccccactacaattgggtaattgcagcgttgccggatggatcttaggaaacccagaatgcgaattactgatttccaaggaatcatggtcctacattgtagaaacaccagatcctgagaatggaacatgttacccagggtatttcgccgactatgaggaactgagggagcaattgagttcagtatcttcatttgagagattcgaaatattccccaaagaaagctcatggcccaaccacaccgtaaccggagtatcagcatcatgctcccataatgggaaaagcagtttttacagaaatttgctatggctgacggggaagaatggtttgtacccaaacctgagcaagtcctatgcaaacaacaaagagaaagaagtccttgtactatggggtgttcatcacccgcctaacataggggaccaaagggccctctatcatacagaaaatgcttatgtctctgtagtgtcttcacattatagcagaagattcaccccagaaatagccaaaagacccaaagtaagagatcaggaaggaagaatcaactactactggactctgctggaacccggggatacaataatatttgaggcaaatggaaatctaatagcgccaaggtatgctttcgcactgagtagaggctttggatcaggaatcatcacctcaaatgcaccaatggatgaatgtgatgcgaagtgtcaaacacctaagggagctataaacagcagtcttcctttccagaatgtgcacccagtcacaataggagagtgtccaaagtatgtcaggagtgcaaaattaaggatggttacaggactaaggaacatcccatccattcaatccagaggtttgtttggagccattgccggtttcattgaaggggggtggactggaatggtagatgggtggtatggttatcatcatcagaatgagcaaggatctggctatgctgcagatcaaaaaagcacacaaaatgccattaacgggattacaaacaaggtgaattctgtaattgagaaaatgaacactcaattcacagctgtgggcaaagaattcaacaaattggaaagaaggatggaaaacttaaataaaaaagttgatgatgggttcctagacatttggacatataatgcagaattgttggttctactggaaaatgaaaggactttggatttccatgactccaatgtgaagaatctgtatgagaaagtaaaaagccaattaaagaataatgccaaagaaataggaaacgggtgttttgaattctatcacaagtgtaacaatgaatgcatggagagtgtgaaaaatggaacttatgactatccaaaatattccgaagaatcaaagttaaacagggagaaaattgatggagtgaaattggaatcaatgggaatctatcagattctggcgatctactcaactgtcgccagttccttggttcttttggtctccctgggggcaatcagcttctggatgtgttccaatgggtctttgcagtgtagaatatgcatctga

SEQ ID NO: 32105 - RNA, 1698 nt, synthetic construct
  misc_feature 1..1698: note = hemagglutinin__InfluenzaA__ABO38043
  source 1..1698: mol_type = other RNA
atgaaagcaaaactactggtcctgttatgtacatttacagctacatacgcagacacaatatgtataggctaccatgccaacaactcaaccgacactgttgacacagtacttgagaagaatgtgacagtgacacactctgtcaacctacttgaggacagtcacaatggaaaactatgtctactaaaaggaatagccccactacaattgggtaattgcagcgttgccggatggatcttaggaaacccagaatgcgaattactgatttccaaggaatcatggtcctacattgtagaaacaccaaatcccgagaatggaacatgttacccagggtatttcgccgactatgaggaactgagggagcaattgagttcagtatcttcatttgagagattcgaaatattccccaaaggaagctcatggcccaaccacaccgtgaccggagtatcagcatcatgctcccataatgggaaaagcagtttttacagaaatttgctatggctgacggggaagaatggtttgtacccaaacctgagcatgtcctatgtaaacaacaaagagaaagaagtccttgtgctatggggtgttcatcacccacctaacataggggaccaaagggccctctaccatacagaaaatgcttatgtctctgtagtgtcttcacattatagcagaagattcaccccagaaatagccaaaagacccaaagtaagagatcaggaaggaagaatcaactactactggactctgctggaacccggggacacaataatatttgaggcaaatggaaatctaatagcgccatggtatgctttcgcactgagtagaggctttggatcaggaatcatcacctcaaatgcaccaatgggtgaatgtgatgcgaagtgtcaaacacctcagggagctataaacagtagtcttcctttccagaatgtacacccagttacaataggagagtgtccaaagtatgtcaggagtgcaaaattaaggatggttacaggactaaggaacatcccatccattcaatccagaggtttgtttggagccattgccggtttcattgaaggggggtggactggaatggtagatgggtggtatggttatcatcatcagaatgagcaaggatctggctatgctgcagatcaaaaaagcacacaaaatgccatcaacgggattacaaacaaggtgaattctgtaattgagaaaatgaacactcaattcacagctgtgggcaaagaattcaacaaattagaaagaaggatggaaaacttaaataaaaaagttgatgatgggtttctagacatttggacatataatgcagaattgttggttctactggaaaatgaaaggactttggatttccatgactccaatgtgaagaatctgtatgagaaagtaaaaagccaattaaagaataatgccaaagaaataggaaacgggtgttttgaattctatcacaagtgtaacaatgaatgcatggaaagtgtgaaaaatggaacttatgactatccaaaatattccgaagaatcaaagttaaacagggagaaaattgatggagtaaaattggaatcaatgggagtctatcagattctggcgatctactcaactgtcgccagttccctggttcttttggtctccctgggggcaatcagcttctggatgtgttccaatgggtctttgcagtgtagaatatgcatctga

SEQ ID NO: 32106 - RNA, 1701 nt, synthetic construct
  misc_feature 1..1701: note = hemagglutinin__InfluenzaA__ABO38054
  source 1..1701: mol_type = other RNA
atgaaagcaagactactggtcctgttatgtgcacttgcagctacagatgcagacacaatatgtataggctaccatgcaaacaactcaaccgacactgttgacacagtactcgaaaagaatgtgacagtgacacactctgtcaacctactcgaagacagccacaacgggaaattatgtagattaaaaggaatagccccactacaattggggaaatgtaacattgccggatggatcttgggaaacccagaatgcgaatcactgctttcagagagatcatggtcctacattgtagaaacaccaaactctgaaaatggaacatgttacccaggagatttcatcgactatgaggaactgagggagcaattgagctcagtatcatcattcgaaagattcgaaatattctccaaggaaagctcatggcccaaacacaacacaaccagaggagtaacggcagcatgctcccatgcgggaaaaagtagtttttacagaaatttgctatggctgacggagaaggatggctcatacccgaatctgaacaattcctatgtgaacaagaaagggaaagaagtccttgtactatggggtgttcatcacccgtctaacataaaggatcaacagaccctctatcagaaagaaaatgcttatgtctctgtagtgtcttcaaactataacaggagattcaccccggaaatagcagaaagacccaaagtaagaggtcaagcagggaggatgaactattactggaccttgctaaaacccggagacacaataatgtttgaggcaaatggaaatctaatagcgccatggtatgctttcgcactaagtagaggctttgggtcaggcatcatcacctcaaacgcatcgatgcatgagtgtgacacgaagtgtcaaacaccccagggagctataaacagcagtctccctttccagaatatacacccagtcacaataggagagtgcccaaaatacgtcaggagtaccaaattgaggatggttacaggactaaggaacatcccatccattcaatccagaggtctatttggagccattgccggtttcattgaagggggatggactggaatgatagatggatggtatggttatcatcatcagaatgaacagggatcaggctatgctgcggatcaaaaaagcacacaaaatgccattaacgggattacaaacaaggtgaactctgttatcgagaaaatgaacactcaattcacagctgtgggtaaagaattcaacaacttagaaaaaaggatggaaaacttaaacaaaaaagttgatgatggatttctggacatttggacatataatgcagaattgttggttctactggaaaatgaaaggactctggatttccatgactcaaatgtgaagaatctgtatgaaaaagtaaaaaaccaattaaggaataatgccaaagaaataggaaacggatgttttgagttctaccacaagtgtaacaatgaatgcatggaaagtgtaaaaaatggaacttatgattatccaaaatattcagaagaatcaaagttgaacagggaaaaaatagatggagtgaaattggaatcaatgggggtctatcagattctggcgatctactcaactgtcgccagttcactggtgcttctggtctccctgggggcaatcagcttctggatgtgttctaatgggtctttgcagtgcagaatatgcatctga

SEQ ID NO: 32107 - RNA, 1701 nt, synthetic construct
  misc_feature 1..1701: note = hemagglutinin__InfluenzaA__ABO38065
  source 1..1701: mol_type = other RNA
atgaaagcaaaactactggtcctgttatgtgcactttcagctacagatgcagacacaatatgtataggctaccatgcgaacaactcaaccgacactgttgacacagtactcgaaaagaacgtgacagtgacacactctgtcaacctacttgaggacagtcacaacggaaaactatgcagactaaaaggaatagccccactacaattggggaaatgcagcattgccggatggatcttaggaaacccagaatgcgaatcactgttttctaagaaatcatggtcctacattgcagaaacaccaaactccgagaatggaacatgttacccaggatatttcgccgactatgaggaactgagggagcaattgagttcagtatcatcattcgagagattcgaaatattccccaaggaaagatcatggcccaaacacaacataaccagaggagtaacggcatcatgctcccataaggggaaaagcagtttttacagaaacttgctatggctgacggagaaaaatggctcgtacccaaatctgagcaagtcctatgtgaacaacaaagagaaagaagtccttgtactatggggtgttcatcacccgtctaacatagaggaccaaaagaccatctatcggaaagaaaatgcttatgtctctgtagtgtcttcaaattataacaggagattcaccccagaaatagcaaaaagacccaaagtaagaggtcaagaagggagaattaactactactggactctgctggaacccggggacacaataatatttgaggcaaatggaaatctaatagcgccatggtatgctttcgcactgagtagaggctttgggtcaggaatcatcacctcaaacgcatcgatggatgaatgtgacacgaagtgtcaaacaccccagggagctataaacagtagtcttcctttccagaatgtacacccagtcacaataggagagtgcccaaaatacgtcaggagtacaaaattaaggatggttacaggactaaggaacatcccatccattcaatccagaggtctgtttggagccattgccggtttcattgaagggggatggactggaatgatagatggatggtatggttatcatcatcagaatgaacagggatctggctatgctgcggatcaaaaaagcacacaaaatgccattaacgggattacaaacaaggtgaactctgttatcgagaaaatgaacactcaattcacagctgtgggtaaagaattcaacaaattagaaaaaaggatggaaaacttaaataaaaaagttgatgatggatttctggacatttggacatataatgcagaattgttggttctactggaaaatgaaaggactttggattttcatgactcaaatgtgaagaatctgtatgagaaagtaaaaagccaattaaagaataatgccaaagaaataggaaacgggtgttttgaattctaccacaagtgtaacaatgaatgcatggaaagtgtaaaaaatggaacttatgactatccaaaatattcagaggaatcaaagttaaacagggaaaaaattgatggagtgaaattggaatcaatgggagtctatcagattctggcgatctactcaactgtcgccagttcactggtgcttttggtctccctgggggcaatcagcttctggatgtgctctaatgggtctttgcagtgcagaatatgcatctga

SEQ ID NO: 32108 - RNA, 1701 nt, synthetic construct
  misc_feature 1..1701: note = hemagglutinin__InfluenzaA__ABO38076
  source 1..1701: mol_type = other RNA
atgaagactatcattgctttgagctacattctatgtctggttttcgctcaaaaacttcccggaaatgacaacagcacggcaacgctgtgccttgggcaccatgcagtaccaaacggaacgatagtgaaaacaatcacgaatgaccaaattgaagttactaatgctactgagctggttcagagttcctcaacaggtggaatatgcgacagtcctcatcagatccttgatggagaaaactgcacactaatagatgctctattgggagaccctcagtgtgatggctttcaaaataagaaatgggacctttttgttgaacgcagcaaagcctacagcaactgttacccttatgatgtgccggattatgcctcccttaggtcactagttgcctcatccggcacactggagtttaacaatgaaagcttcaattggactggagtcactcaaaatggaacaagctctgcttgcaaaaggagatctaataacagtttctttagtagattgaattggttgacccatttaaaattcaaatacccagcattgaacgtgactatgccaaacaatgaaaaatttgacaaattgtacatttggggggttcaccacccgggtacggacaatgaccaaatcagcctatatgctcaagcatcaggaagaatcacagtctctaccaaaagaagccaacaaactgtaatcccgaatatcggatctagacccagggtaagggatatccccagcagaataagcatctattggacaatagtaaaaccgggagacatacttttgattaacagcacagggaatctaattgctcctcggggttacttcaaaatacgaagtgggaaaagctcaataatgagatcagatgcacccattggcaaatgcaattctgaatgcatcactccaaatggaagcattcccaatgacaaaccatttcaaaatgtaaacaggatcacatatggggcctgtcccagatatgttaagcaaaacactctgaaattggcaacaggaatgcgaaatgtaccagagaaacaaactagaggcatatttggcgcaatcgcgggtttcatagaaaatggttgggagggaatggtggatggttggtacggtttcaggcatcaaaattctgagggaataggacaagcagcagatctcaaaagcactcaagcagcaatcaaccaaatcaatgggaagctgaataggttgatcgggaaaaccaacgagaaattccatcagattgaaaaagaattctcagaagtagaagggagaattcaggacctcgagaaatatgttgaggacactaaaatagatctctggtcatacaacgcggagcttcttgttgccctggagaaccaacatacaattgatctaactgactcagaaatgaacaaactgtttgaaagaacaaagaagcaactgagggaaaatgctgaggatatgggcaatggttgtttcaaaatataccacaaatgtgacaatgcctgcatagggtcaatcagaaatggaacttatgaccatgatgtatacagagatgaagcactaaacaaccggttccagatcaaaggtgttgagctgaagtcaggatacaaagattggatcctatggatttcctttgccatatcatgttttttgctttgtgttgctttgttggggttcatcatgtgggcctgccaaaaaggcaacattaggtgcaacatttgcatttga

SEQ ID NO: 32109 - RNA, 1701 nt, synthetic construct
  misc_feature 1..1701: note = hemagglutinin__InfluenzaA__ABO38087
  source 1..1701: mol_type = other RNA
atgaagactatcattgctttgagctacattttatgtctggttttcgctcaaaaacttcccgtaaatgacaacagcacggcaacgctgtgcctgggacaccatgcagtgccaaacggaacgctagtgaaaacaatcacgaatgaccacattgaagtgactaatgctactgagctggttcagagttcctcaacgggtagaatatgcgacagtcctcaccaaatccttgatggagaaaactgcacactaatagatgctctattgggagaccctcattgtgatggcttccaaaataaggaatgggacctttttgttgaacgcagcacagcctacagcaactgttacccttatgatgtgccggattatgcctcccttaggtcactagttgcctcatccggcacactggagtttaacaatgaaagcttcaattggactggagtcgctcagaatggaacaagctctgcttgcaaaaggagatctattaaaagtttctttagtagattgaattggttgcaccaattaaaatacaaatatccagcactgaacgtgactatgccaaacaatgaaaaatttgacaaattgtacatttggggggttcaccacccgagtacggacagtgaccaaatcagcctatatgctcaagcatcagggagagtcacagtctctaccaaaagaagccaacaaactgtaatcccgaatatcggatctagaccctgggtaaggggtgtctccagcagaataagcatctattggacaatagtaaaaccgggagacatacttttgattaacagcacagggaatctaattgctcctcggggttactttaaaatacgaagtggaaaaagctcaataatgaggtcaaatgcacccattggcaaatgcaattctgaatgcatcactccaaatggaagcattcccaatgacaaaccatttcaaaatgtaaacaggatcacatatggggcctgtcccagatatgttaagcaaaacactctgaaattggcaacagggatgcggaatgtaccagagaaacaaactagaggcatattcggcgcaatcgcgggtttcatagaaaatggttgggaggggatggtggacggttggtacggtttcaggcatcaaaattctgagggcacaggacaagcagcagatcttaaaagcactcaagcagcaatcaaccaaatcaacgggaaactgaataggttaatcgagaaaacaaacgagaaattccatcaaattgaaaaagaattctcagaagtagaagggagaattcaggacctcgagaaatatgttgaggacactaaaatagatctctggtcgtacaacgcggagcttcttgttgccctggagaaccaacatacaattgatctaactgactcagaaatgaacaaactgtttgaaagaacaaggaagcaactgagggaaaatgctgaggatgtgggcaatggttgtttcaaaatataccacaaatgtgacaatgcctgcatagggtcaatcagaaatggaacttatgaccatgatgtatacagagacgaagcattaaacaaccggttccagatcaaaggtgttgagctgaagtcaggatacaaagattggatcctatggatttcctttgccatatcatgttttttgctttgtgttgttttgctggggttcatcatgtgggcctgccaaaaaggcaacattaggtgcaacatttgcatttga

SEQ ID NO: 32110 - RNA, 1689 nt, synthetic construct
  misc_feature 1..1689: note = hemagglutinin__InfluenzaA__ABO38098
  source 1..1689: mol_type = other RNA
atggccatcatttatctcattctcctgttcacagcagtgagaggggaccagatatgcattggataccatgccaataattccacagagaaggtcgacacaattctagagcggaacgtcactgtgactcatgccaaggacattcttgagaagacccataacggaaagttatgcaaactaaacggaatccctccacttgaactaggggactgtagcattgccggatggctccttggaaatccagaatgtgataggcttctaagtgtgccagaatggtcctatataatggagaaagaaaacccgagagacggtttgtgttatccaggcagcttcaatgattatgaagaattgaaacatctcctcagcagcgtgaaacatttcgagaaagtaaagattctgcccaaagatagatggacacagcatacaacaactggaggttcacgggcctgcgcggtgtctggtaatccatcattcttcaggaacatggtctggctgacaaagaaaggatcaaattatccggttgccaaaggatcgtacaacaatacaagcggagaacaaatgctaataatttggggggtgcaccatcccaatgatgagacagaacaaagaacattgtaccagaatgtgggaacctatgtttccgtaggcacatcaacattgaacaaaaggtcaaccccagacatagcaacaaggcctaaagtgaatggacaaggaggtagaatggaattctcttggaccctattggatatgtgggacaccataaattttgagagtactggtaatctaattgcaccagagtatggattcaaaatatcgaaaagaggtagttcagggatcatgaaaacagaaggaacacttgggaactgtgagaccaaatgccaaactcctttgggagcaataaatacaacattgccttttcacaatgtccacccactgacaataggtgagtgccccaaatatgtaaaatcggagaagttggtcttagcaacaggactaaggaatgttccccagattgaatcaagaggattgtttggggcaatagctggttttatagaaggaggatggcaaggaatggttgatggttggtatggataccatcacagcaatgaccagggatcagggtatgcagcggacaaagaatccactcaaaaggcatttgatggaatcaccaacaaggtaaattctgtgattgaaaagatgaacacccaatttgaagctgttgggaaagaattcagtaacttagagagaagactggagaacttgaacaaaaagatggaagacgggtttctagatgtgtggacatacaatgctgagcttctagttctgatggaaaatgagaggacacttgactttcatgattctaatgtcaagaatctgtatgataaagtcagaatgcagctgagagacaacgtcaaagaactaggaaatggatgttttgaattttatcacaaatgtgatgatgaatgcatgaatagtgtgaaaaacgggacgtatgattatcccaagtatgaagaagagtctaaactaaatagaaatgaaatcaaaggggtaaaattgagcagcatgggggtttatcaaatccttgccatttatgctacagtagcaggttctctgtcactggcaatcatgatggctgggatctctttctggatgtgctccaacgggtctctgcagtgcaggatctgcatatga

SEQ ID NO: 32111 - RNA, 1701 nt, synthetic construct
  misc_feature 1..1701: note = hemagglutinin__InfluenzaA__ABO38230
  source 1..1701: mol_type = other RNA
atgaagactatcattgctttgagctacattttctgtcaggttttcgcccaaaaccttccaggaaatgacaacagcacagcaacgctgtgcctgggacatcatgcagtgccaaacggaacgctagtgaaaacaatcacgaatgatcagattgaagtgactaatgctactgagctggttcagagttcctcaacaggtagaatatgcgacaatcctcatcgaatccttgatggaaaaaactgcacactgatagatgctctattgggggaccctcattgtgatggctttcaaaatgagaaatgggacctttttgttgaacgcagcaaagctttcagcaactgttacccttatgatgtgccagattatgcctcccttaggtcactagttgcctcgtcaggcaccctggagtttttcaatgaaggcttcaattggactggggtcactcagaatgggggaagctatgcttgtaaaaggggacctgataacagtttcttcagtagactgaactggttgtacaaatcagaaagcacatatccagtgctgaacgtgactatgccaaacaatgacaattttgacaaactgtacatttggggagttcaccacccgagcacggacaaagaacaaaccaacctatatgttcaagcatcagggagagtcacagtctccaccaagagaagccagcaaactataatcccgagtgtcgggtctagaccctgggtaaggggtctgtctagtagaataagcatctattggacaatagtgaaaccgggagacgtactgttaattaatagtaatgggaacctaattgctcctcggggttacttcaaaatacgcactgggaaaagctcaataatgaggtcagatgcacccattggcacctgcagttctgaatgcatcactccaaatggaagcattcccaatgacaagccctttcaaaacgtagacaagatcacatatggggcatgtcccaagtatgttaagcaaaacactctgaagttggcaacagggatgcggaatgtaccagagaaacaaactagaggcatattcggcgcaatagcaggtttcatagaaaatggttgggagggaatgatagacggttggtacggtttcaggcatcaaaattctgagggcacaggacaagcagcagatcttaaaagcactcaagcagccatcgaccaaatcaatgggaaactgaatagggtaatcgagaaaacaaacgagaaattccatcaaatcgaaaaggaattctcagaagtagaagggagaattcaggacctcgagaaatacgttgaagacactaaaatagatctctggtcttacaatgcggagcttcttgtcgctctggagaaccaacatacaattgatctgactgactcggaaatgaacaaactgtttgaaaaaacaaggaggcaactgagggaaaatgctgaggacatgggcaatggttgcttcaaaatataccacaaatgtgacaatgcttgcatagggtcaatcagaaatggaacttatgaccatgatgtatacagagacgaagcattaaacaaccggtttcagatcaaaggtgttgagctgaagtcaggatacaaagactggatcctgtggatttcctttgccatatcatgctttttgctttgtgttgttttgctggggttcatcatgtgggcctgccaaaaaggcaacattaggtgcaacatttgcatttga

SEQ ID NO: 32112 - RNA, 1701 nt, synthetic construct
  misc_feature 1..1701: note = hemagglutinin__InfluenzaA__ABO38241
  source 1..1701: mol_type = other RNA
atgaagactatcattgctttgagctacatttcctgtctggttttcgcccaaaaacttcccggaaatgacaacagcacagcaacgctgtgcctgggacatcatgcagtaccaaacggaacgctagtgaaaacaatcacgaatgatcagattgaagtgactaatgctactgagctggtccaaagttcctcaacaggtagaatatgcgacagtcctcaccgaatccttgatggaaaaaactgcacactgatagatgctctattgggagaccctcattgtgatggcttccaaaatgagaaatgggatctttttgttgaacgcagcaaagctttcagcaactgctacccttatgatgtgccggattatgcctcccttaggtcactagttgcctcatcaggcaccctggagtttatcaatgaaggcttcaattggactggagtcactcagagtgggggaagctatacttgcaaaaggggatctgttaacagtttcttcagtagattgaattggttgtatgagtcagaaagcaaatatccagcgctgaacgtgactatgccaaacaatggcaaatttgacaaattgtacatttggggggttcaccaccctagcacggacaaagaacaaaccaacctatatgttcgagcatcagggagagtcacagtctctaccaagaggagccagcaaactgtaatcccgaatatcgggcctagaccctgggtaaggggtctgtctagtagaataagtatctattggacaatagtaaaaccgggagacatactgttaattaatagcactgggaacctaattgctccccggggttacttcaaaatacgcactgggaaaagctcaataatgaggtcagatgcacctattggcacctgcagttctggatgcatcactccaaatggaagcattcccaatgacaaaccctttcaaaatgtgaacaagatcacatatggggcatgtcccaggtatgttaagcagaacactctgaagttggcaacagggatgcggaatgtacctgaaaaacaaactagaggcatattcggcgcaatagcaggtttcatagaaaatggttgggagggaatggtagacggttggtacggtttcaggcatcaaaattctgagggcacaggacaagcagcagatcttaaaagcactcaagcagcaatcgaccaaatcaacgggaaactgaataggttaatcgagaaaacgaacgagaaattccatcaaatcgaaaaggaattctcagaagtagaagggagaattcaggacctcgagaagtatgttgaagacactaaaatagatctctggtcttacaacgcggagcttcttgttgccctggagaaccaacatacaattgatatgactgactcagaaatgaacaaactgtttgaaaaaacaaggaagcaactgagggaaaatgctgaggacatgggcaatggttgcttcaaaatataccacaaatgtgacaatgcttgcatagggtcaatcagaaatggaacttatgaccatgatgtatacagagacgaagcattaaacaaccggtttcagatcaaaggtgttgagctgaagtcaggatacaaagactggatcctatggatttcctttgccatatcatgctttttgctctgtgttgttttgctggggttcataatgtgggcctgccaaaaaggcaacattaggtgcaacatttgcatttga

SEQ ID NO: 32113 - RNA, 1701 nt, synthetic construct
  misc_feature 1..1701: note = hemagglutinin__InfluenzaA__ABO38252
  source 1..1701: mol_type = other RNA
atgaagactatcattgctttgagctacattctatgtctggttttcgctcaaaaacttcccggaaatgacaacagcacggcaacgctgtgccttgggcaccatgcagtaccaaacggaacgatagtgaaaacaatcacgaatgaccaaattgaagttactaatgctactgagctggttcagagttcctcaacaggtggaatatgcgacagtcctcatcagatccttgatggagaaaactgcacactaatagatgctctattgggagaccctcagtgtgatggcttccaaaataagaaatgggacctttttgttgaacgcagcaaagcctacagcaactgttacccttatgatgtgccggattatgcctcccttaggtcactagttgcctcatccggcacactggagtttaacaatgaaagcttcaattggactggagtcactcaaaatggaacaagctctgcttgcaaaaggagatctaataacagtttctttagtagattgaattggttgacccatttaaaattcaaatacccagcattgaacgtgactatgccaaacaatgaaaaatttgacaaattgtacatttggggggttcaccacccgggtacgaacaatgaccaaatcagcctatatgctcaagcatcaggaagaatcacagtctctaccaaaagaagccaacaaactgtaatcccgaatatcggatctagacccagggtaagggatatccccagcagaataagcatctattggacaatagtaaaaccgggagacatacttttgattaacagcacagggaatctaattgctcctcggggttacttcaaaatacgaagtgggaaaagctcaataatgagatcagatgcacccattggcaaatgcaattctgaatgcatcactccaaatggaagcattcccaatgacaaaccatttcaaaatgtaaacaggatcacatatggggcctgtcccagatatgttaagcaaaacactctgaaattggcaacagggatgcgaaatgtaccagagaaacaaactagaggcatatttggcgcaatcgcgggtttcatagaaaatggttgggagggaatggtggatggttggtacggtttcaggcatcaaaattctgagggaataggacaagcagcagatctcaaaagcactcaagcagcaatcaaccaaatcaatgggaagctgaataggttgatcgggaaaaccaacgagaaattccatcagattgaaaaagaattctcagaagtagaagggagaattcaggacctcgagaaatatgttgaggacactaaaatagatctctggtcatacaacgcggagcttcttgttgccctggagaaccaacatacaattgatctaactgactcagaaatgaacaaactgtttgaaagaacaaagaagcaactgagggaaaatgctgaggatatgggcaatggttgtttcaaaatataccacaaatgtgacaatgcctgcatagggtcaatcagaaatggaacttatgaccatgatgtatacagagatgaagcattaaacaaccggttccagatcaaaggtgttgagctgaagtcaggatacaaagattggatcctatggatttcctttgccatatcatgttttttgctttgtgttgctttgttggggttcatcatgtgggcctgtcaaaaaggcaacattaggtgcaacatttgcatttga

SEQ ID NO: 32114 - RNA, 1689 nt, synthetic construct
  misc_feature 1..1689: note = hemagglutinin__InfluenzaA__ABO38296
  source 1..1689: mol_type = other RNA
atggtcatcatttatctcattctcctgttcacagcagtgagaggggaccagatatgcattggataccatgccaataattccacagagaaggtcgacacaattctagagcggaacgtcactgtgactcatgccaaggacattcttgagaagacccataacggaaagttatgcaaactaaacggaatccctccacttgaactaggggactgtagcattgccggatggctccttggaaatccagaatgtgataggcttctaagtgtgccagaatggtcctatataatggagaaagaaaacccgagagacggtttgtgttatccaggcagcttcaatgattatgaagaattgaaacatttcctcagcagcgtgaaacatttcgagaaagtaaagattctgcccaaagatagatggacacagcatacaacaactggaggttcacgggcctgcgcggtgtctggtaatccatcattcttcaggaacatggtctggctgacaaagaaaggatcaaattatccggttgccaaaggatcgtacaacaatacaagcggagaacaaatgctaataatttggggggtgcaccatcccaatgatgagacagaacaaagaacattgtaccagaatgtgggaacctatgtttccgtaggcacatcaacattgaacaaaaggtcaaccccagacatagcaacaaggcctaaagtgaatggactaggaggtagaatggaattctcttggaccctattggatatgtgggacaccataaattttgagagtactggtaatctaattgcaccagagtatggattcaaaatatcgaaaagaggtagttcagggatcatgaaaacagaaggaacacttgggaactgtgagaccaaatgccaaactcctttgggagcaataaatacaacattgccttttcacaatgtccacccactgacaataggtgagtgccccaaatatgtaaaatcggagaagttggtcttagcaacaggactaaggaatgttccccagattgaatcaagaggattgtttggggcaatagctggttttatagaaggaggatggcaaggaatggttgatggttggtatggataccatcacagcaatgaccagggatcagggtatgcagcagacaaagaatccactcaaaaggcatttgatggaatcaccaacaaggtaaattctgtgattgaaaagatgaacacccaatttgaagctgttgggaaagaattcagtaacttagagagaagactggaaaacttgaacaaaaagatggaagacgggtttctagatgtgtggacatacaatgctgagcttctagttctgatggaaaatgagaggacacttgactttcatgattctaatgtcaagaatctgtatgataaagtcagaatgcagctaagagacaacgccaaagaactaggaaatggatgttttgaattttatcacaaatgtgatgatgaatgcatgaatagtgtgaaaaacgggacgtattattatcccaagtatgaagaagagtctaaactaaatagaaatgaaatcaaaggggtaaaattgagcagcatgggggtttatcaaatccttgccatttatgctacagtagcaggttctctgtcactggcaatcatgatggctgggatctctttctggatgtgctccaacgggtctctgcagtgcaggatctgcatatga

SEQ ID NO: 32115 - RNA, 1698 nt, synthetic construct
  misc_feature 1..1698: note = hemagglutinin__InfluenzaA__ABO38318
  source 1..1698: mol_type = other RNA
atgaaagcaaaactactggtcctgttatgtacatttacagctacatacgcagacacaatatgtataggctaccatgccaacaactcaaccgacactgttgacacagtacttgagaagaatgtgacagtgacacactctgtcaacctacttgaggacagtcacaatggaaaactatgtctactaaaaggaatagccccactacaattgggtaattgcagcgttgccggatggatcttaggaaacccagaatgcgaattactgatttccaaggaatcatggtcctacattgtagaaacaccaaatcccgagaatggaacatgttacccagggtatttcgccgactatgaggaactgagggagcaattgagttcagtatcttcatttgagagattcgaaatattccccaaaggaagctcatggcccaaccacaccgtgaccggagtatcagcatcatgctcccataatgggaaaagcagtttttacagaaatttactatggctgacggggaagaatggtttgtacccaaacctgagcatgtcctatgtaaacaacaaagagaaagaagtccttgtgctatggggtgttcatcacccacctaacatagggaaccaaagggccctctaccatacagaaaatgcttatgtctctgtagtgtcttcacattatagcagaagattcaccccagaaatagccaaaagacccaaagtaagagatcaggaaggaagaatcaactactactggactctgctggaacccggggacacaataatatttgaggcaaatggaaatctaatagcgccatggtatgctttcgcactgagtagaggctttggatcaggaatcatcacctcaaatgcaccaatgggtgaatgtgatgcgaagtgtcaaacacctcagggagctataaacagtagtcttcctttccagaatgtacacccagttacaataggagagtgtccaaagtatgtcaggagtgcaaaattaaggatggttacaggactaaggaacatcccatccattcaatccagaggtttgtttggagccattgccggtttcattgaaggggggtggactggaatggtagatgggtggtatggttatcatcatcagaatgagcaaggatctggctatgctgcagatcaaaaaagcacacaaaatgccattaacgggattacaaacaaggtgaattctgtaattgagaaaatgaacactcaattcacagctgtgggcaaagaattcaacaaattagaaagaaggatggaaaacttaaataaaaaagttgatgatgggtttctagacatttggacatataatgcagaattgttggttctactggaaaatgaaaggactttggatttccatgactccaatgtgaagaatctgtatgagaaagtaaaaagccaattaaagaataatgccaaagaaataggaaacgggtgttttgaattctatcacaagtgtaacaatgaatgcatggaaagtgtgaaaaatggaacttatgactatccaaaatattccgaagaatcaaagttaaacagggagaaaattgatggagtaaaattggaatcaatgggagtctatcagattctggcgatctactcaactgtcgccagttccctggttcttttggtctccctgggggcaatcagcttctggatgtgttccaatgggtctttgcagtgtagaatatgcatctga

SEQ ID NO: 32116 - RNA, 1698 nt, synthetic construct; identical to SEQ ID NO: 31304
  misc_feature 1..1698: note = hemagglutinin__InfluenzaA__ABO38329
  source 1..1698: mol_type = other RNA

SEQ ID NO: 32117 - RNA, 1701 nt, synthetic construct
  misc_feature 1..1701: note = hemagglutinin__InfluenzaA__ABO38351
  source 1..1701: mol_type = other RNA
atgaaggcaagactactggtcctgttatgtgcacttgcagctacagatgcagacacaatatgtataggctaccatgcgaacaattcaaccgacactgttgacacagtactcgagaagaatgtgacagtgacacactctgttaacctgctcgaagacagccacaacgggaaattatgtagattaaaaggaatagccccactacaattggggaaatgtaacatcgccggatggctcttgggaaacccagaatgcgacccactgcttccagcgagatcatggtcctacattgtagaaacaccaaactctgagaatggaatatgttatccaggagctttcatcgactatgaggaactgagggagcaattgagctcagtgtcatcattcgaaagattcgaaatatttcccaaagaaagctcatggcccaaccacaacacaaacataggagtaacggcagcatgctcccatgcggggaaaagcagtttttacagaaatttgctatggctgacgaagaaggggggctcatacccaaagctgaaaaattcctatgtgaacaaaaaagggaaagaagtccttgtactatggggtattcatcacccgtctaacagtaaggatcaacagactctctatcagaatgaaaatgcttatgtctctgtagtgtcttcaaattataacaggagattcaccccggaaatagcagaaagacccgaagtaagagatcaagctgggaggatgaactattactggaccttgctagaacccggagacacaataatgtttgaggcaaatggaaatctggtagcaccatggtatgctttcgcactgagtagaggctttgggtccggcatcatcacctcaaacgcatcaatgcatgagtgtaacacgaagtgtcaaacaccccagggagctataaacagcagtctccctttccagaatatacacccagtcacaataggagagtgcccaaaatacgtcaggagtgccaaattgaggatggttacaggactaaggaacatcccgtccattcaatccagaggtctatttggagccattgccggttttattgaagggggatggactggaatgatagatggatggtatggttatcatcatcagaatgaacagggatcaggctatgcagcggatcaaaaaagcacacaaaatgccattaacgggattacaaacaaggtgaactctgttatcgagaaaatgaacactcaattcacagctgtgggtaaagaattcaacaacttagaaaaaaggatggaaaatttaaataaaaaagttgatgatggatttctggacatttggacatataatgcagaattgttagttctactggaaaatgaaaggactctggatttccatgactcaaatgtgaagaatctgtatgagaaagtaaaaagccaattaaagaataatgccaaagaaatcggaaatggatgttttgagttctaccacaagtgtgacaatgaatgcatggaaagtgtaagaaatgggacttatgattatcccaaatattcagaagagtcaaaattgaacagggaaaagatagatggagtgaaattggaatcaatgggggtctatcagattctggcgatctactcaactgtcgccagttcactggtgcttttggtctccctgggggcaatcagtttctggatgtgttctaatggatctttgcagtgcagaatatgcatctga

SEQ ID NO: 32118 - RNA, 1701 nt, synthetic construct
  misc_feature 1..1701: note = hemagglutinin__InfluenzaA__ABO38362
  source 1..1701: mol_type = other RNA
atgaaagcaaaactactggtcctgttatgtgcactttcagctacagatgcagacacaatatgtataggctaccatgcgaacaactcaaccgacactgttgacacagtactcgaaaagaacgtgacagtgacacactctgtcaacctacttgaggacagtcacaacggaaaactatgcagactaaaaggaatagccccactacaattggggaaatgcagcattgccggatggatcttaggaaacccagaatgcgaatcactggtttctaagaaatcatggtcctacattgcagaaacaccaaactccgagaatggaacatgttacccagggtatttcgccgactatgaggaactgagggagcaattgagttcagtatcatcattcgagagattcgaaatattccccaaggaaagttcatggcccaaacacaacgtaaccagaggagtaacggcatcatgctcccataaggggaaaagcagtttttacagaaatttgctatggctgacggagaaaaatggctcgtacccaaatctgagcaagtcctatgtgaacaacaaagagaaagaagtccttgtactatggggtgttcatcacccgtctaacatagagaaccaaaagaccatctatcgtaaagaaaatgcttatgtctctgtagtgtcttcacattataacaggagattcaccccagaaatagcaaaaagacccaaagtaagagatcaagaagggagaattaactactactggactctgctggaacccggggacacaataatatttgaggcaaatggaaatctaatagcgccatggtatgctttcgcactgagtagaggctttgggtcaggaatcatcacctcaaacgcatcaatagatgaatgtgacgcgaagtgtcaaacaccccagggagctataaacagtagtcttcctttccagaatgtacacccagtcacaataggagagtgcccaaagtacgtcaggagtacaaaattaaggatggttacaggactaaggaacatcccatccattcaatccagaggtttgtttggagccattgccggtttcattgaagggggatggactggaatgatagatggatggtatggttatcatcatcagaatgaacagggatctggctatgctgcggatcaaaaaagcacacaaaatgccattaacgggattacaaacaaggtgaactctgtaatcgagaaaatgaacactcaattcacagctgtgggtaaagaattcaacaaattagaaaaaaggatggaaaacttaaataaaaaagttgatgatggatttctggacatttggacatataatgcagaattgttggttctactggaaaatgaaaggactttggattttcatgactcaaatgtgaagaacctgtatgagaaagtaaaaagccaattaaagaataatgccaaagaaataggaaacgggtgttttgaattctaccacaagtgtaacaatgaatgcatggaaagtgtaaaaaatggaacttatgactatccaaaatattcagaggaatcaaagttaaacagggaaaaaattgatggagtgaaattggaatcaatgggagtctatcagattctggcgatctactcaactgtcgccagttcactggtgcttttggtctccctgggggcaatcagcttctggatgtgttctaatgggtctttgcagtgcagaatatgcatctga

SEQ ID NO: 32119 - RNA, 1698 nt, synthetic construct
  misc_feature 1..1698: note = hemagglutinin__InfluenzaA__ABO38373
  source 1..1698: mol_type = other RNA
atgaaagcaagactactggtcctgttatgtgcacttgcagctacagatgcagacacaatatgtataggctaccatgcaaacaactcaaccgacactgttgacacagtactcgaaaagaatgtgacagtgacacactctgtcaacctactcgaagacagccacaacgggaaattatgtagattaaaaggaatagccccactacaattggggaaatgtaacattgccggatggatcttgggaaacccagaatgcgaatcactgctttcagagagatcatggtcctacattgtagaaacaccaaactctgaaaatggaacatgttacccaggagatttcatcgactatgaggaactgagggagcaattgagctcagtatcatcattcgaaagattcgaaatattctccaaggaaagctcatggcccaaacacacaaccggaggagtaacggcagcatgctcccatgcgggaaaaagtagtttttacagaaatttgctatggctgacggagaaggatggctcatacccgaatctgaacaattcctatgtgaacaagaaagggaaagaagtccttgtactatggggtgttcatcacccgtctaacataaaggatcaacagaccctctatcagaaagaaaatgcttatgtctctgtagtgtcttcaaactataacaggagattcaccccggaaatagcagaaagacccaaagtaagaggtcaagcagggaggataaactattactggaccttgctaaaacccggagacacaataatgtttgaggcaaatggaaatctaatagcgccatggtatgctttcgcactaagtagaggctttgggtcaggcatcatcacctcaaacgcatcgatgcatgagtgtgacacgaagtgtcaaacaccccagggagctataaacagcagtctccctttccagaatatacacccagtcacaataggagagtgcccaaaatacgtcaggagtaccaaattgaggatggttacaggactaaggaacatcccatccattcaatccagaggtctatttggagccattgccggtttcattgaagggggatggactggaatgatagatggatggtatggttatcatcatcagaatgaacagggatcaggctatgctgcggatcaaaaaagcacacaaaatgccattaacgggattacaaacaaggtgaactctgttatcgagaaaatgaacactcaattcacagctgtgggtaaagaattcaacaacttagaaaaaaggatggaaaacttaaacaaaaaagttgatgatggatttctggacatttggacatataatgcagaattgttggttctactggaaaatgaaaggactctggatttccatgactcaaatgtgaagaatctgtatgaaaaagtaaaaaaccaattaaggaataatgccaaagaaataggaaacggatgttttgagttctaccacaagtgtaacaatgaatgcatggaaagtgtaaaaaatggaacttatgattatccaaaatattcagaagaatcaaagttgaacagggaaaaaatagatggagtgaaattggaatcaatgggggtctatcagattctggcgatctactcaactgccgccagttccctggtgcttctagtctccctgggggcaatcagcttctggatgtgttctaatgggtctttgcagtgcagaatatgcatctga

SEQ ID NO: 32120 - RNA, 1701 nt, synthetic construct
  misc_feature 1..1701: note = hemagglutinin__InfluenzaA__ABO38384
  source 1..1701: mol_type = other RNA
atgaaggcaagactactggtcctgttatgtgcacttgcagctgcagatgcagacacaatatgtataggctaccatgcgaacaattcaaccgacactgttgacacagtactcgagaagaatgtgacagtgacacactctgttaacctgctcgaagacagccacaacgggaaactatgtagattaaaaggaatacccccactacaattggggaaatgtaacatcgccggatggctcttgggaaacccagaatgcgactcactgcttccagcgagatcatggtcctacattgtagaaacaccaaactctgagaatggagcatgttatccaggagatttcatcaactatgaggaactgagggagcaattgagctcagtgtcatcatttgaaagattcgaaatatttcccaaggaaagctcatggcccaaacacaacacaaccaaaggagtaacggcggcatgctcccatgcgggaaaaagcagtttttacagaaatttgctatggctgacgaagaaggaggactcatacccaaagctgaaaaattcctatgtgaacaagaaagggaaagaagtccttgtactatggggtgttcatcacccgtctagcagtaaggagcaacagactctctatcagaatgaaaatgcttatgtctctgtagtgtcttcaaattataacaggagattcaccccggaaatagcagaaagacccaaagtaagagatcaaactgggaggatgaactattactggaccttgctagaacccggagacacaataatatttgaggcaaatggaaatctaatagcaccatggtatgctttcgcactgagtagaggctttgggtccggcatcatcacctcaaacgcatcaatgcatgagtgtaacacgaagtgtcaaacaccccagggagctataaacagcagtctccctttccagaatatacacccagtcacaataggagagtgcccaaaatacgtcaggagtgccaaattgaggatggttacaggactaaggaacatcccatccattcaatccagaggtctatttggagccattgccgggtttattgaagggggatggactggaatgatagatggatggtatggttatcatcatcagaatgaacagggatcaggctatgcagcagatcaaaaaagcacacaaaatgccattaacgggattacaaacaaggtgaactctgttatcgagaaaatgaacactcaattcacagctgtgggtaaagaattcaacaacttagaaaaaaggatggaaaatttaaataaaaaagttgatgatggatttctggacatttggacatataatgcagaattattagttctactggaaaatgaaaggactctggatttccatgactcaaatgtgaagaatctgtatgagaaagtaaaaagccaattaaagaataatgccaaagaaatcggaaatggatgttttgagttctaccacaagtgtgacaatgaatgcatggaaagtgtaagaaatgggacttatgattatcccaaatattcagaagagtcaaagttgaacagggaaaagatagatggagtgaaattggaatcaatgggggtctatcagattctggcgatctactcaactgtcgccagttcactggtgcttttggtctccctgggggcaatcagtttctggatgtgttctaatggatctttgcagtgcagaatatgcatctga

SEQ ID NO: 32121 - RNA, 1701 nt, synthetic construct
  misc_feature 1..1701: note = hemagglutinin__InfluenzaA__ABO38395
  source 1..1701: mol_type = other RNA
atgaaagcaaaactactagtcctgttatgtgcatttacagctacagatgcagacaccatatgtataggctaccatgcgaacaactcaaccgacactgttgacacagtacttgaaaagaacgtgacagtgacacactctgtcaacctacttgaggacagtcacaacggaaaactatgtcgactaaaaggaatagccccactacaattgggtaattgcagcattgccggatggatcttaggaaacccagaatgcgaatcactgttttctaagaaatcatggtcctacattgcagaaacaccaaactccgagaatggaacatgttacccagggtatttcgccgactatgaggaactgagggagcaattgagttcagtatcatcattcgagagattcgaaatattccccaaagaaagctcatggcccaaccacaccgtaaccaaaggagtaacggcatcatgctcccataaggggagaagcagtttttacagaaatttgctatggctgacgaagaagaatggctcgtacccaaatctgagcaagtcctatgtgaacaacaaagagaaagaagtccttgtactatggggtgttcatcacccgtctaacataggggaccaaagggccatctatcatacagaaaatgcttatgtctctgtagtgtcttcacattataacaggagattcaccccagaaatagcaaaaagacccaaagtaagagatcaagaaggaagaattaactactactggactctgctggaacccggggacacaataatatttgaggcaaatggaaatctaatagcgccatggtatgctttcgcactgagtagaggctttgggtcaggaatcatcacctcaaacgcatcaatggatgaatgtgacgcgaagtgtcaaacaccccagggagctataaacagtagtcttcctttccagaatgtacacccagtcacaataggagagtgcccaaagtatgtcaggagtacaaaattaaggatggttacaggactaaggaacatcccatccattcaatccagaggtttgtttggagccattgccggtttcattgaaggggggtggactggaatgatagatggatggtatggttatcatcatcagaatgaacaaggatctggctatgctgcggatcaaaaaagcacacaaaatgccattaacgggattacaaacaaggtgaattctgtaatcgagaaaatgaacactcaattcacagctgtgggcaaagaattcaacaaattagaaagaaggatggaaaacttaaataaaaaagttgatgatggatttctggacatttggacatataatgcagaattgttggttctactggaaaatgaaaggactttggattttcatgactcaaatgtgaagaatctgtatgagaaagtaaaaagccaattaaagaataatgccaaagaaataggaaacgggtgttttgaattctaccacaagtgtaacaatgaatgcatggaaagtgtgaaaaatggaacttatgactatccaaaatattccgaggaatcaaaattaaacagggaaaaaattgatggagtgaaattggaatcaatgggagtctatcagattctggcgatctactcaactgtcgccagttcactggtgcttttggtctccctgggggcaatcagcttctggatgtgttctaatgggtctttgcagtgtagaatatgcatctga

SEQ ID NO: 32122 - RNA, 1701 nt, synthetic construct
  misc_feature 1..1701: note = hemagglutinin__InfluenzaA__ABO38406
  source 1..1701: mol_type = other RNA
atgaaagcaaaactactggtcctgttatgtgcactctcagctacagatgcagacacaatatgtataggctaccatgcgaacaactcaaccgacactgttgacacagtactcgaaaagaacgtgacagtgacacactctgtcaacctacttgaggacaatcacaacgggaaactatgcaaactaaaaggaatagcgccactacaattggggaaatgcagcattgccggatggatcttaggaaacccagaatgcgaatcactgttttctaagaaatcatggtcctacattgcagaaacaccaaactccgagaatggaacatgttacccagggtatttcgccgactatgaagaactgagggaacaattgagttcagtatcatcattcgagagattcgaaatatttcccaaggaaagttcatggcccaaccacaacgtaaccaaaggagtaacggcatcatgctcccataaggggaaaagcagtttttacagaaatttgctatggctgacggagaaaaaaggctcgtacccaaatctgagcaaatcctatgtgaacaacaaagagaaagaagtccttgtactatggggtattcatcacccgtctaacatagaggaccaaaagaccatctatcgtaaagaaaatgcttatgtctctgtagtgtcttcacattataacaggagattcaccccagaaatagcaaaaagacccaaagtaagagatcaagaagggagaattaactactactggactctgctggaacccggggacacaataatatttgaggcaaatggaaatctaatagcgccatggtatgctttcgcactgagtaggggctttgggtcaggaatcatcacctcaaacgcatcgatggatgaatgtgacgcgaagtgtcaaacaccccggggagctataaacagtagtcttccttttcagaatgtacacccagtcacaataggagagtgcccaaagtacgtcaggagtacaaaattaaggatggttacaggactaaggaacatcccatccattcaatccagaggtttgtttggagctattgccggtttcattgaagggggatggactggaatgattgatggatggtatggttatcatcatcagaatgaacagggatctggctatgctgcggatcaaaaaagcacacaaagtgccattaacgggattacaaacaaggtgaactctataatcgagaaaatgaacactcaattcacagctgtgggtaaagaattcaacaaactagaaaaaaggatggaaaacttaaataaaaaagttgatgatggatttctggacatttggacatataatgcagaattgttggttctactggaaaatgaaaggactttggatttccacgactcaaatgtgaagaacctgtatgagaaagtaaaaagccaattaaagaataatgccaaagaaataggaaacgggtgttttgaattctaccacaagtgtaacaatgaatgcatggaaagtgtaaaaaatggaacttatgactatccaaaatattcagaggaatcaaaattaaacagggaaaaaattgatggagtgaaattggaatcaatgggagtctatcagattctggcgatctactcaactgtcgccagttcactggtgcttttggtctccctgggggcaatcagcttctggatgtgttctaatgggtctttgcagtgcagaatatgcatctga

SEQ ID NO: 32123 - RNA, 1701 nt, synthetic construct
  misc_feature 1..1701: note = hemagglutinin__InfluenzaA__ABO38417
  source 1..1701: mol_type = other RNA
atgaagactatcattgctttgagctacattttatgtctggttttcgctcaaaaacttcccgtaaatgacaacagcacggcaacgctgtgcctgggacaccatgcagtgccaaacggaacgctagtgaaaacaatcacgaatgaccacattgaagtgactaatgctactgagctggttcagagttccccaacaggtagaatatgcgacagtcctcaccaaatccttgatggagaaaactgcacactaatagatgctctgttgggagaccctcattgtgatggcttccaaaataaggaatgggacctttttgttgaacgcagcacagcctacagcaactgttacccttatgatgtgccggattatgcctcccttaggtcactagttgcctcatccggcacactggagtttaacaatgaaagcttcaattggactggagtcgctcagaatggaacaagctctgcttgcaaaaggagatctattaaaagtttctttagtagattgaattggttgcaccaattaaaatacaaatatccagcactgaacgtgactatgccaaacaatgaaaaatttgacaaattgtacatttggggggttcatcacccgagtacggacagtgaccaaatcagcctatatgctcaagcatcagggagagtcacagtctctaccaaaagaagccaacaaactgtaatcccgaatatcggatctagaccctgggtaaggggtgtctccagcagaataagcatctattggacaatagtaaaaccgggagacatacttttgattaacagcacagggaatctaattgctcctcggggttacttcaaaatacgaagtgggaaaagctcaataatgaggtcaaatacacccattggcaaatgcaattctgaatgcatcactccaaatggaagcattcccaatgacaaaccatttcaaaatgtaaacaggatcacatatggggcctgtcccagatatgttaagcaaaacactctgaaattggcaacagggatgcggaatgtaccagagaaacaaactagaggcatattcggcgcaattgcgggtttcatagaaaatggttgggaaggaatggtggacggttggtacggtttcaggcatcaaaattctgagggcacaggacaagcagcagatcttaaaagcactcaagctgcaatcaaccaaatcaacgggaaactgaataggttaatcgagaaaacaaacgagaaattccatcaaattgaaaaagaattctcagaagtagaagggagaattcaggacctcgagaaatatgttgaggacactaaaatagatctctggtcgtacaacgcggagcttcttgttgccctggagaaccaacatacaattgatctaactgactcagaaatgaacaaactgtttgaaagaacaaggaagcaactgagggaaaatgctgaggatatgggcaatggttgtttcaaaatataccacaaatgtgacaatgcctgcatagggtcaatcagaaatggaacttatgaccatgatgtatacagagacgaagcattaaacaaccggttccagatcaaaggtgttgagctgaagtcaggatacaaagattggatcctatggatttcctttgccatatcatgttttttgctttgtgttgttttgctggggttcatcatgtgggcctgccaaaaaggcaacattaggtgcaacatttgcatttga

SEQ ID NO: 32124 - RNA, 1689 nt, synthetic construct
  misc_feature 1..1689: note = hemagglutinin__InfluenzaA__ABO38712
  source 1..1689: mol_type = other RNA
atggccatcatttatttcatactcctgttcacagcagtgaggggggaccagatatgcattggataccatgccaataattccacagaaaaggtcgacacaattctagagcggaatgtcactgtgactcatgccaaggacatccttgagaagacccataacggaaagctatgcaaactaaacggaatccctccacttgaactaggggattgtagcattgccggatggctccttggaaatccagaatgtgataggcttctaagggtgccagaatggtcctatataatggagaaagaaaacccgagatacagtttgtgttatccaggcagcttcaatgactatgaagaattgaaacatctcctcagcagcgtaaaacacttcgagaaagtaaggattctgcccaaagatggatggacacaacatacaacatctggaggttcaaaggcctgcgcagtgtcaggtaaatcatcattcttcaggaacatggtctggctgacaaagaaaggaccaaattatccggttgccaaaagatcgtacaacaatacgagcggagagcaaatgctaataatttggggagtgcaccatcctaaagatgaggcagaacaaagagcattgtaccagaaagtgggaacctatgtttccgcaagcacatcaacattgaacaaaaggtcaaccccagaaatagcagcaaggcctgaagtgaatggactaggaagtagaatggaattctcttggaccctattggatgtgtgggacaccataaattttgagagcactggtaatctagttgcaccagagtatggattcaaaatatcgaaaagaggtagttcaggaatcatgaagacagaaggaacacttggaaactgtgagaccaaatgccaaactcctttgggagcaataaatacaacactaccttttcacaatgtccacccactgacaataggtgaatgccccaaatatgtaaaatcggagaaattggtcttagcaacaggactaaggaatgttcctcagattgaatcaagaggattgtttggggcaatagctggctttatagaaggaggatggcaaggaatggttgatggttggtatggataccatcacagcaatgaccagggatcagggtatgcagcagacaaagaatccactcaaaaggcatttgacagaatcaccaacaaggtaaattctgtgattgaaaagatgaacactcaatttgaagctgttgggaaagaattcagtaacttagagaaaagactggaaaacttgaacaaaaagatggaagacgggtttctagatgtgtggacatacaatgctgagcttctagttctgatggaaaatgagaggacacttgactttcatgattctaatgtcaagaacctgtataataaagtcagaatgcagctgagagacaacgtcaaagaactaggaaatggatgttttgaattttatcacaaatgtgacgatgaatgcatgagtagtgtgaaaaacgggacgtatgattatcccaagtatgaagaagaatctaaactaaagagaaatgaaatcaaaggggtaaaattgagcagcatgggggtttaccaaattcttgccatttatgctacagttgcaggttctctgtcactggcaatcatgatagctgggatctctttatggatgtgctccaacgggtctctgcagtgcagaatctgcatatga

SEQ ID NO: 32125 - RNA, 1689 nt, synthetic construct
  misc_feature 1..1689: note = hemagglutinin__InfluenzaA__ABO38723
  source 1..1689: mol_type = other RNA
atggccatcatttatttcatactcctgttcacagcagtgaggggggaccagatatgcattggataccatgccaataattccacagaaaaggtcgacacaattctagagcggaatgtcactgtgactcatgccaaggacatccttgagaagacccataacggaaagctatgcaaactaaacggaatccctccacttgaactaggggattgtagcattgccggatggctccttggaaatccagaatgtgataggcttctaagggtgccagaatggtcctatataatggagaaagaaaacccgagatacagtttgtgttatccaggcagcttcaatgactatgaagaattgaaacatctcctcagcagcgtaaaacacttcgagaaagtaaggattctgcccaaagatggatggacacaacatacaacatctggaggttcaaaggcctgcgcagtgtcaggtaaatcatcattcttcaggaacatggtctggctgacaaagaaaggaccaaattatccggttgccaaaagatcgtacaacaatacgagcggagagcaaatgctaataatttggggagtgcaccatcctaatgatgaggcagaacaaagagcattgtaccagaaagtgggaacctatgtttccgcaagcacatcaacattgaacaaaaggtcaaccccagaaatagcagcaaggcctgaagtgaatggactaggaagtagaatggaattctcttggaccctattggatgtgtgggacaccataaattttgagagcactggtaatctagttgcaccagagtatggattcaaaatatcgaaaagaggtagttcaggaatcatgaagacagaaggaacacttggaaactgtgagaccaaatgccaaactcctttgggagcaataaatacaacactaccttttcacaatgtccacccactgacaataggtgaatgccccaaatatgtaaaatcggagaaattggtcttagcaacaggactaaggaatgttcctcagattgaatcaagaggattgtttggggcaatagctggctttatagaaggaggatggcaaggaatggttgatggttggtatggataccatcacagcaatgaccagggatcagggtatgcagcagacaaagaatccactcaaaaggcatttgacagaatcaccaacaaggtaaattctgtgattgaaaagatgaacactcaatttgaagctgttgggaaagaattcagtaacttagagaaaagactgggaaacttgaacaaaaagatggaagacgggtttctagatgtgtggacatacaatgctgagcttctagttctgatggaaaatgagaggacacttgactttcatgattctaatgtcaagaacctgtataataaagtcagaatgcagctgagagacaacgtcaaagaactaggaaatggatgttttgaattttatcacaaatgtgacgatgaatgcatgagtagtgtgaaaaacgggacgtatgattatcccaagtatgaagaagaatctaaactaaagagaaatgaaatcaaaggggtaaaattgagcagcatgggggtttaccaaattcttgccatttatgctacagttgcaggttctctgtcactggcaatcatgatagctgggatctctttatggatgtgctccaacgggtctctgcagtgcagaatctgcatatga

SEQ ID NO: 32126 - RNA, 1698 nt, synthetic construct
  misc_feature 1..1698: note = hemagglutinin__InfluenzaA__ABO44046
  source 1..1698: mol_type = other RNA
atgaaagtaaaactactggtcctgttatgtacatttacagctacatatgcagacacaatatgtatagggtaccatgccaacaactcaaccgacactgttgacacagtacttgagaagaatgtgacagtgacacactctgtcaacctacttgaggacagtcacaatggaaaactatgtctactaaaaggaatagccccactacaattgggtaattgcagcgttgccggatggatcttaggaaacccagaatgcgaattactgatttccaaggaatcatggtcctacattgtagaaacaccaaatcctgagaatggaacatgttacccagggtatttcgccgactatgaggaactgagggagcaattgagttcagtatcttcatttgagagattcgaaatattccccaaagaaagctcatggcccaaccacaccgtaaccggagtatcagcatcatgctcccataatgggaaaagcagtttttacagaaatttgctatggctgacggggaagaatggtttgtacccaaacctgagcaagtcctatgcaaacaacaaagagaaagaagtccttgtactatggggtgttcatcacccgcctaacataggggaccaaagggccctctatcatacagaaaatgcttatgtctctgtagtgtcttcacattatagcagaagattcaccccagaaatagccaaaagacccaaagtaagagatcaggaaggaagaatcaactactactggactctgctggaacccggggatacaataatatttgaggcaaatggaaatctaatagcgccacggtatgctttcgcactgagtagaggctttggatcaggaatcatcacctcaaatgcaccaatggatgaatgtgatgcgaagtgtcaaacacctcagggagctataaacagcagtcttcctttccagaacgtacacccagtcacaataggagagtgtccaaagtatgtcaggagtgcaaaattaaggatggttacaggactaaggaacatcccatccattcaatccagaggtttgtttggagccattgccggtttcattgaaggggggtggactggaatggtagatgggtggtatggttatcatcatcagaatgagcaaggatctggctatgccgcagatcaaaaaagcacacaaaatgccattaacgggattacaaacaagatgaattctgtaattgagaaaatgaacactcaattcacagctgtgggcaaagaattcaacaaattggaaagaaggatggaaaacttaaataaaaaagttgatgatgggtttctagacatttggacatataatgcagaattgttggttctactggaaaatgaaaggactttggatttccatgactccaatgtgaagaatctgtatgagaaagtaaaaagccaattaaagaataatgccaaagaaataggaaacgggtgttttgaattctatcacaagtgtaacaatgaatgcatggagagtgtgaaaaatggaacttatgactatccaaaatattccgaagaatcaaagttaaacagggagaaaattgatggagtgaaattggaatcaatgggagtctatcagattctggcgatctactcaactgtcgccagttccctggttcttttggtctccctgggggcaatcagcttctggatgtgttccaatgggtctttgcagtgtagaatatgcatctga

SEQ ID NO: 32127 - RNA, 1689 nt, synthetic construct
  misc_feature 1..1689: note = hemagglutinin__InfluenzaA__ABO44057
  source 1..1689: mol_type = other RNA
atggccatcatttatctcatactcctgttcacagcagtgaggggggaccagatatgcattggataccatgccaataattccacagaaaaggtcgacacaattctagagcggaatgtcactgtgactcatgccaaggacatccttgagaagacccataacggaaagctatgcaaactaaacggaatccctccacttgaactaggggattgtagcattgccggatggctccttggaaatccagaatgtgataggcttctaagggtgccagaatggtcctatataatggagaaagaaaacccgagatacagtttgtgttatccaggcagcttcaatgactatgaagaattgaaacatctcctaagtagcgtaaaacacttcgagaaagtaaagattctgccaaaagatggatggacacagcatgagacagatggaggttcaaaggcctgcgcagtgtcaggtaaagcatcattcttcaggaacatggtctggctgacaaagagaggaccaaattatcaggttgccaaaagatcgtacaacaatacgagcggagagcaaatgctaataatttggggagtgcaccatcctaaggatgaggcagaacaaagagcattgtaccagaaagtgggaacctatgtttccgcaagcacatcaacattgaacaaaaggtcaaccccagaaatagcagcaaggcctgaagtgaatggactagagagtagaatggaattctcttggaccctcttggatgtgtgggacaccataaattttgagagcactggtaatctagttgcaccagagtatggattcaaaatatcgaaaagaggtagttcagggatcatgaagacagaaggaacacttgggaactgtgagaccaaatgccaaactcctttgggagcaataaatacaacactaccttttcacaatgtccacccactgacaataggtgaatgccccaaatatgtaaaatcggagaaattggtcttagcaacaggactaaggaatgttccccagattgaatcaagaggattgtttggggcaatagctggctttatagaaggaggatggcaaggaatggttgatggttggtatggataccatcacagcaatgaccagggatcagggtatgcagcagacaaagaatccactcaaaaggcatttgacagaatcaccaacaaggtaaattctgtgattgaaaagatgaacatccaatttgaagctgttgggaaagaattcagtaacttagagaaaagactggaaaacttgaacaaaaagatggaagacgggtttctagatgtgtggacatacaatgctgagcttctagttctgatggaaaatgagaggacacttgactttcatgattctaatgtcaagaacctgtatgataaagtcagaatgcagctgagagacaacgtcaaagaactaggaaatggatgttttgaattttatcataaatgtgacgatgaatgcatgaatagtgtgaaaaatgggacatatgattatcccaagtatgaagaagaatctaagctaaagagaaatgaaatcaaaggggtaaaattgagcagcatgggggtttaccaaattcttgccatttatgctacagttgcaggttctctgtcattggcaatcatgatagctgggatctctttctggatgtgttccaacgggtctctgcagtgcagagtctgcatatga

SEQ ID NO: 32128 - RNA, 1701 nt, synthetic construct; identical to SEQ ID NO: 32032
  misc_feature 1..1701: note = hemagglutinin__InfluenzaA__ABO44079
  source 1..1701: mol_type = other RNA

SEQ ID NO: 32129 - RNA, 1689 nt, synthetic construct
  misc_feature 1..1689: note = hemagglutinin__InfluenzaA__ABO44090
  source 1..1689: mol_type = other RNA
atggccatcatttatctcattctcctgttcacagcagtgagaggggaccaaatatgcattggataccatgccaataattccacagagaaggtcgacacaattctagagcggaacgtcactgtgactcatgccaaggacattcttgagaagacccataacggaaagttatgcaaactaaacggaatccctccacttgaactaggggactgtagcattgccggatggctccttggaaatccagaatgtgataggcttctaagagtgccagaatggtcctatataatggagaaagaaaacccgagagacggtttgtgttatccaggcagcttcaatgattatgaagaattgaaacatctcctcagcagcgtgaaacatttcgagaaagtaaagattctgcccaaagatagatggacacagcatacaacaactggaggttcacgggcctgcgcggtgtctggtaatccatcattcttcaggaacatgatctggctgacaaagaaaggatcaaattatccggttgccaaaggatcgtacaacaacacaagcggagaacaaatgctaataatttggggggtacaccatcccaatgatgagacagaacaaagaacattgtaccagaatgtgggaacctatgtttccgtagtcacatcaacattgaacaaaaggtcaaccccgaaaatagcaacaaggcctaaagtgaatggactaggaggtagaatggaattctcttggaccctattggatatgtgggacaccataaattttgagagtactggtaatctaattgctccagagtatggattcaaaatatcgaaaagaggcagttcagggatcatgaaaacagaaggaacacttgagaactgtgagaccaaatgccaaactcctttgggagcaataaatacaacattgccttttcacaatgtccacccactgacaataggtgagtgccccaaatatgtaaaatcggagaagttggtcttagcaacaggactaaggaatgttccccagattgaatcaagaggattgtttggggcaatagctggctttatagaaggaggatggcaaggaatggttgatggttggtatggataccatcacagcaatgaccagggatcagggtatgcagcagacaaagaatccactcaaagggcatttgatggaatcactaacaaggtaaattctgtgattgaaaagatgaacacccaatttgaagctgttggaaaagaattcagtaacttagagagaagactggagaacttgaacaaaaagatggaagacgggcttctagatgtgtggacatacaatgctgagcttctagttctgatggaaaatgagaggatacttgactttcatgattctaatgtcaagaatctgtatgataaagtcagaatgcagctgagagacaacgtcaaagaactaggaaatggatgttttgaattttatcacaaatgtgatgatgagtgcatgaatagtgtgaaaaacgggacgtatgattatcccaagtatgaagaagagtctaaactaaatagaaatgaaatcaaaggggtaaaattaagcagcatgggggtttatcaaatccttgccatttatgctacagtagcaggttctctgtcactggcaatcatgatggctgggatctctttctggatgtgctccaacgggtccctgcagtgcaggatctgcatatga

SEQ ID NO: 32130 - RNA, 1689 nt, synthetic construct
  misc_feature 1..1689: note = hemagglutinin__InfluenzaA__ABO44101
  source 1..1689: mol_type = other RNA
atggccatcatttatctcatactcctgttcacagcagtgaggggggaccagatatgcattggataccatgccaataattccacagaaaaggtcgacacaattctagagcggaatgtcactgtgactcatgccaaggacatccttgagaagacccataacggaaagctatgcaaactaaacggaattcctccacttgaactaggggattgtagcattgccggatggctccttggaaatccagaatgtgataggcttctaagggtgccagaatggtcctatataatggagaaagaaaacccgagatacagtttgtgttatccaggcagcttcaatgactatgaagaattgaaacatctcctcagtagcgtaaaacacttcgagaaagtaaagattctgccaaaagatggatggacacagcataagacagatggaggttcaaaggcctgcgcagtgtcaggtaaaccatcattcttcaggaacatggtctggctgacaaagaaaggacctaattatccggttgccaaaagatcgtacaacaatacgagcggagagcaaatgctaataatttggggagtgcaccatcctaatgatgaggcagaacaaagagcattgtaccagaaagtgggaacctatgtttccgcaagcacatcaacattgaacaaaaggtcaaccccagaaatagcagcaaggcctgaagtgagtggactaggaagtagaatggaattctcttggaccctcttggatgtgtgggacaccataagttttgagagcactggtaatctagttgcaccagagtatggattcaaaatatcgaaaagaggtagttcagggatcatgaagacagaaggaacacttgggaactgtgagaccaaatgccaaactcctttgggagcaataaatacaacactaccttttcacaatgtccacccactgacaataggtgaatgccccaaatatgtaaaatcggagaaattggtcttagcaacaggactaaggaatgttccccagattgaatcaagaggattgtttggggcaatagctggctttatagaaggaggatggcaaggaatggttgatggttggtatggataccatcacagcaatgaccagggatcagggtatgcagcagacaaagaatccactcaaaaggcatttgacagaatcaccaacaaggtaaattctgtgattgaaaagatgaacacccaatttgaagctgttgggaaagaattcagtaacttagagaaaagactggaaaacttgaacaaaaagatggaagacgggtttctagatgtgtggacatacaatgctgagcttctagttctgatggaaaatgagaggacacttgactttcatgattctaatgtcaagaacctgtatgataaagtcagaatgcagctgagagacaacgtcaaagaactaggaaatggatgttttgaattttatcataaatgtgacgatgaatgcatgaatagtgtgaaaaatgggacgtatgattatcccaagtatgaagaagaatctaaactaaagagaaatgaaatcaaaggggtgaaattgagcagcatgggggtttaccaaattcttgccatttatgctacagttgcaggttctctgtcactggcaatcatgatagctgggatctctttctggatgtgctccaacgggtctctgcagtgcagaatctgcatatga

SEQ ID NO: 32131 - RNA, 1701 nt, synthetic construct
  misc_feature 1..1701: note = hemagglutinin__InfluenzaA__ABO44123
  source 1..1701: mol_type = other RNA
atgaaagcaaaactactagtcctgttatgtgcatttacagctacagatgcagacacaatatgtataggctaccatgcgaacaactcaaccgacactgttgacacagtacttgaaaagaacgtgacagtgacacactctgtcaacctacttgaggacagtcacaacggaaaactatgtcgactaaaaggaatagccccactacaattgggtaattgcagcattgccggatggattttaggaaacccagaatgcgaatcactgttttctaagaaatcatggtcctacattgcagaaacaccaaactccgagaatggaacatgttacccagggtatttcgccgactatgaggaactgagggagcaattgagttcagtatcatcattcgagagattcgaaatattccccaaagaaagctcatggcccaaccacaccgtaaccaaaggagtaacggcatcatgctcccataaggggaaaagcagtttttacagaaatttgctatggctgacgaagaagaatggctcgtacccaaatctgagcaagtcctatgtgaacaacaaagagaaagaagtccttgtactatggggtgttcatcacccgtctaacataggggaccaaagggccatctatcatacagaaaatgcttatgtctctgtagtgtcttcacattataacaggagattcaccccagaaatagcaaaaagacccaaagtaagagatcaagaaggaagaattaactactactggactctgctggaacccggggacacaataatatttgaggcaaatggaaatctaatagcgccatggtatgctttcgcactgagtagaggctttgggtcaggaatcatcacctcaaacgcatcaatggatgaatgtgacgcgaagtgtcaaacaccccagggagctataaacagtagtcttcctttccagaatgtacacccagtcacaataggagagtgcccaaagtatgtcaggagtacaaaattaagaatggttacaggactaaggaacatcccatccattcaatccagaggtttgtttggagccattgccggtttcattgaaggggggtggactggaatgatagatggatggtatggttatcatcatcagaatgaacaaggatctggctatgctgcggatcaaaaaagcacacaaaatgccattaacgggattacaaacaaggtgaattctgtaatcgagaaaatgaacactcaattcacagctgtgggcaaagaattcaacaaattagaaagaaggatggaaaacttaaataaaaaagttgatgatggatttctggacatttggacatataatgcagaattgttggttctactggaaaatgaaaggactttggattttcatgactcaaatgtgaagaatctgtatgagaaagtaaaaagccaattaaagaacaatgccaaagaaataggaaacgggtgttttgaattctaccacaagtgtaacaatgaatgcatggaaagtgtgaaaaatggaacttatgactatccaaaatattccgaggaatcaaagttaaacagggaaaaaattgatggagtgaaattggaatcaatgggagtctatcagattctggcgatctactcaactgtcgccagttcactggtgcttttggtctccctgggggcaatcagcttctggatgtgttctaatgggtctttgcagtgtagaatatgcatctga

SEQ ID NO: 32132 - RNA, 1701 nt, synthetic construct
  misc_feature 1..1701: note = hemagglutinin__InfluenzaA__ABO44134
  source 1..1701: mol_type = other RNA
atgaaagcaaaactactggtcctgttatgtgcactttcagctacagatgcagacacaatatgtataggctaccatgcgaacaactcaaccgacactgttgacacagtactcgaaaagaacgtgacagtgacacactctgtcaacctactcgaggacagtcacaacggaaaactatgcagactaaaaggaatagccccactacaattggggaaatgcagcattgccggatggatcttaggaaacccagaatgcgaatcactgttttctaagaaatcatggtcctacattgcagaaacaccaaactccgagaatggaacatgttacccaggatatttcgccgactatgaggaactgagggagcaattgagctcagtatcatcattcgagagattcgaaatattccccaaggaaaggtcatggcccaaacacaacgtaaccagaggagtaacggcatcatgctcccataaggggaaaagcagtttttacagaaatttgctatggctgacggagaaaaatggctcgtacccaaatctgagcaagtcctatgtgaacaacaaagagaaagaagtccttgtactatggggtgttcatcacccgtctaacatagaggaccaaaagaccatctatcggaaagaaaatgcttatgtctctgtagtgtcttcaaattataacaggagattcaccccagaaatagcagaaagacccaaagtaagaggtcaagcagggagaattaactactactggactctgctggaacccggggacacaataatatttgaggcaaatggaaatctaatagcgccatggcatgctttcgcactgagtagaggctttgggtcaggaatcatcacctcaaacgcatcgatggatgaatgtgacacgaagtgtcaaacaccccagggagctataaacagtagtcttcctttccagaatatacacccagtcacaataggagagtgcccaaaatacgtcaggagtacaaaattgaggatggttacaggactaaggaacatcccatccattcaatccagaggtctgtttggagccattgccggtttcattgaagggggatggactggaatgatagatggatggtatggttatcatcatcagaatgaacagggatctggctatgctgcagatcaaaaaagcacacaaaatgccattaacgggattacaaacaaggtgaactctgttatcgagaaaatgaacactcaattcacagctgtgggtaaagaattcaacaaattagaaaaaaggatggaaaacttaaataaaaaagttgatgatggatttctggacatttggacatataatgcagaattgttggttctactggaaaatgaaaggactttggattttcatgactcaaatgtgaagaatctgtatgagaaagtaaaaagccaattaaagaataatgccaaagaaataggaaacgggtgttttgaattctaccacaagtgtaacaatgaatgcatggaaagtgtaaaaaatggaacttatgactatccaaaatattcagaggaatcaaagttaaacagggaaaaaattgatggagtgaaattggaatcaatgggagtctatcaaattctggcgatctactcaactgtcgccagttcactggtgcttttggtctccctgggggcaatcagcttctggatgtgttctaatgggtctttgcagtgcagaatatgcatctga

SEQ ID NO: 32133 - RNA, 1701 nt, synthetic construct
  misc_feature 1..1701: note = hemagglutinin__InfluenzaA__ABO52071
  source 1..1701: mol_type = other RNA
atgaagactatcattgctttgagctacattctatgtctggttttcgctcaaaaacttcccggaaatgacaacagcacggcaacgctgtgccttgggcaccatgcagtaccaaacggaacgatagtgaaaacaatcacgaatgaccaaattgaagttactaatgctactgagctggttcagaattcctcaacaggtggaatatgcgacagtcctcatcagatccttgatggagaaaactgcacactaatagatgctctattgggagaccctcagtgtgatggcttccaaaataagaaatgggacctttttgttgaacgcagcaaagcctacagcaactgttacccttatgatgtgccggattatgcctcccttaggtcactagttgcctcatccggcacactggagtttaacaatgaaagcttcaattggactggagtcactcaaaatggaacaagctctgcttgcaaaaggagatctaataacagtttctttagtagattgaattggttgacccatttaaaattcaaatacccagcattgaacgtgactatgccaaacaatgaaaaatttgacaaattgtacatttggggggttcaccacccgagtacggacaatgaccaaatcagcctatatgctcaagcatcaggaagaatcacagtctctaccaaaagaagccaacaaactgtaatcccgaatatcggatctagacccagggtaagggatatccccagcagaataagcatctattggacaatagtaaaaccgggagacatacttttgattaacagcacagggaatctaattgctcctcggggttacttcaaaatacgaagtgggaaaagctcaataatgagatcagatgcacccattggcaaatgcaattctgaatgcatcactccaaatggaagcattcccaatgacaaaccatttcaaaatgtaaacaggatcacatatggggcctgtcccagatatgttaagcaaaacactctgaaattggcaacagggatgcgaaatgtaccagagaaacaaactagaggcatatttggcgcaatcgcgggtttcatagaaaatggttgggagggaatggtggatggttggtacggtttcaggcatcaaaattctgagggaataggacaagcagcagatctcaaaagcactcaagcagcaatcaaccaaatcaatgggaagctgaataggttgatcgggaaaaccaacgagaaattccatcagattgaaaaagaattctcagaagtagaagggagaattcaggacctcgagaaatatgttgaggacactaaaatagatctctggtcatacaacgcggagcttcttgttgccctggagaaccaacatacaattgatctaactgactcagaaatgaacaaactgtttgaaagaacaaagaagcaactgagggaaaatgctgaggatatgggcaatggttgtttcaaaatataccacaaatgtgacaatgcctgcatagggtcaatcagaaatggaacttatgaccatgatgtatacagagatgaagcattaaacaaccggttccagatcaaaggtgttgagctgaagtcaggatacaaagattggatcctatggatttcctttgccatatcatgttttttgctttgtgttgctttgttggggttcatcatgtgggcctgccaaaaaggcaacattaggtgcaacatttgcatttga

SEQ ID NO: 32134 - RNA, 1701 nt, synthetic construct
  misc_feature 1..1701: note = hemagglutinin__InfluenzaA__ABO52225
  source 1..1701: mol_type = other RNA
atgaaagcaaaactactagtcctgttgtgtgcatttacagctacatatgcagacacaatatgtataggctaccatgcgaacaactcaaccgacactgttgacacagtacttgagaagaacgtgacagtgacacactctgtcaacctacttgaggacagtcacaacggaaaactatgccgactaaaaggaacagccccactacaattgggtaattgcagcgttgccggatggatcttaggaaacccagaatgcgaatcactgttttctaaggaatcatggtcctacattgcagaaacaccaaaccctgagaatggaacatgttacccagggtatttcgccgactatgaggaactgaaggagcaattgagctcagtatcatcattcgagagattcgaaatattccccaaggaaagctcatggcccaaccacacagtaaccaaaggagtgacggcatcatgctcccataatgggaaaagcagtttttacaaaaatttgctatggctgacggaaaagaatggcttgtacccaaatctgagcaagtcctatgtaaacaacaaggagaaagaagtccttgtactatggggtgttcatcatccgtctaacataggggaccaaagggccatctatcatacagaaaatgcttatgtttctgtggtgtcttcacattatagcagaagattcaccccagaaatagcaaaaagacccaaagtaagagatcaagaagggagaattaactactactggactctgctggaacccggggacacaataatatttgaggcaaatggaaatctaatagcgccatggtacgctttcgcattgagtagaggctttgggtcagggatcatcacctcaaacgcatcaatgggtgaatgtgacgctaagtgtcaaacaccccaaggagctataaacagtagtcttcctttccagaatgtacacccagtcacaataggagagtgtcccaagtatgtcaggagtacaaaattaaggatggttacaggactaagaaacatcccatccattcaatctagaggtttgtttggagccattgccggtttcattgaaggggggtggactggaatgatagatggatggtatggttatcatcatcagaatgaacaaggatctggctatgctgcagacaaaaaaagcacacaaaatgccattgatgggattacaaacaaggtgaattctgtaatcgagaaaatgaacactcaattcacagctgtaggcaaagaattcaacaaattagagagaaggatggaaaacttaaataagaaagttgatgatggatttctggacatttggacatataatgcagagttgttggttctcctggaaaatgaaaggactttggattttcatgactcaaatgtgaagaatctgtatgagaaagtaaaaaaccaattgaagaataatgccaaagaaatcgggaacgggtgttttgaattctatcacaagtgtaacgatgaatgcatggaaagtgtgaaaaatggaacttatgactatccaaaatattccgaagaatcaaagttaaaaagggaaaaaattgatggagtgaaattggaatcaatgggagtctatcagattctggcgatctactcaactgtcgccagttcactggtgcttttggtctccctgggggcaatcagtttctggatgtgttctaatgggtctttgcagtgtagaatatgcatctga

SEQ ID NO: 32135 - RNA, 1689 nt, synthetic construct
  misc_feature 1..1689: note = hemagglutinin__InfluenzaA__ABO52236
  source 1..1689: mol_type = other RNA
atggccatcatttatctcattctcctgttcacagcagtgagaggggaccagatatgcattggataccatgccaataattccacagagaaggtcgacacaattctagagcggaacgtcactgtgactcatgccaaggacattcttgagaagacccataacggaaagttatgcaaactaaacggaatccctccacttgaactaggggactgtagcattgccggatggctccttggaaatccagaatgtgataggcttctaagtgtgccagaatggtcctatataatggagaaagaaaacccgagagacggtttgtgttatccaggcagcttcaatgattatgaagaattgaaacatttcctcagcagcgtgaaacatttcgagaaagtaaagattctgcccaaagatagatggacacagcatacaacaactggaggttcacgggcctgcgcggtgtctggtaatccatcattcttcaggaacatggtctggctgacaaagaaaggatcaaattatccggttgccaaaggatcgtacaacaatacaagcggagaacaaatgctaataatttggggggtgcaccatcccaatgatgagacagaacaaagaacattgtaccagaatgtgggaacctatgtttccgtaggcacatcaacattgaacaaaaggtcaaccccagacatagcaacaaggcctaaagtgaatggactaggaggtagaatggaattctcttggaccctattggatatgtgggacaccataaattttgagagtactggtaatctaattgcaccagagtatggattcaaaatatcgaaaagaggtagttcagggatcatgaaaacagaaggaacacttgggaactgtgagaccaaatgccaaactcctttgggagcaataaatacaacattgccttttcacaatgtccacccactgacaataggtgagtgccccaaatatgtaaaatcggagaagttggtcttagcaacaggactaaggaatgttccccagattgaatcaagaggattgtttggggcaatagctggttttatagaaggaggatggcaaggaatggttgatggttggtatggataccatcacagcaatgaccagggatcagggtatgcagcagacaaagaatccactcaaaaggcatttgatggaatcaccaacaaggtaaattctgtgattgaaaagatgaacacccaatttgaagctgttgggaaagaattcagtaacttagagagaagactggaaaacttgaacaaaaagatggaagacgggtttctagatgtgtggacatacaatgctgagcttctagttctgatggaaaatgagaggacacttgactttcatgattctaatgtcaagaatctgtatgataaagtcagaatgcagctaagagacaacgccaaagaactaggaaatggatgttttgaattttatcacaaatgtgatgatgaatgcatgaatagtgtgaaaaacgggacgtattattatcccaagtatgaagaagagtctaaactaaatagaaatgaaatcaaaggggtaaaattgagcagcatgggggtttatcaaatccttgccatttatgctacagtagcaggttctctgtcactggcaatcatgatggctgggatctctttctggatgtgctccaacgggtctctgcagtgcaggatctgcatatga

SEQ ID NO: 32136 - RNA, 1689 nt, synthetic construct
  misc_feature 1..1689: note = hemagglutinin__InfluenzaA__ABO52247
  source 1..1689: mol_type = other RNA
atggccatcatttatctcatactcctgttcacagcagtgaggggggaccagatatgcattggataccatgccaataattccacagaaaaggtcgacacaattctagagcggaatgtcactgtgactcatgccaaggacatccttgagaagacccataacggaaagctatgcaaactaaacggaattcctccacttgaactaggggattgtagcattgccggatggctccttggaaatccagaatgtgataggcttctaagggtgccagaatggtcctatataatggagaaagaaaacccgagatacagtttgtgttatccaggcagcttcaatgactatgaagaattgaaacatctcctcagtagcgtaaaacacttcgagaaagtaaagattctgccaaaagatggatggacacagcataagacagatggaggttcaaaggcctgcgcagtgtcaggtaaaccatcattcttcaggaacatggtctggctgacaaagaaaggacctaattatccggttgccaaaagatcgtacaacaatacgagcggagagcaaatgctaataatttggggagtgcaccatcctaatgatgaggcagaacaaagagcattgtaccagaaagtgggaacctatgtttccgcaagcacatcaacattgaacaaaaggtcaaccccagaaatagcagcaaggcctgaagtgagtggactaggaagtagaatggaattctcttggaccctcttggatgtgtgggacaccataagttttgagagcactggtaatctagttgcaccagagtatggattcaaaatatcgaaaagaggtagttcagggatcatgaagacagaaggaacacttgggaactgtgagaccaaatgccaaactcctttgggagcaataaatacaacactaccttttcacaatgtccacccactgacaataggtgaatgccccaaatatgtaaaatcggagaaattggtcttagcaacaggaccaaggaatgttccccagattgaatcaagaggattgtttggggcaatagctggctttatagaaggaggatggcaaggaatggttgatggttggtatggataccatcacagcaatgaccagggatcagggtatgcagcagacaaagaatccactcaaaaggcatttgacagaatcaccaacaaggtaaattctgtgattgaaaagatgaacacccaatttgaagctgttgggaaagaattcagtaacttagagaaaagactggaaaacttgaacaaaaagatggaagacgggtttctagatgtgtggacatacaatgctgagcttctagttctgatggaaaatgagaggacacttgactttcatgattctaatgtcaagaacctgtatgataaagtcagaatgcagctgagagacaacgtcaaagaactaggaaatggatgttttgaattttatcataaatgtgacgatgaatgcatgaatagtgtgaaaaatgggacgtatgattatcccaagtatgaagaagaatctaaactaaagagaaatgaaatcaaaggggtgaaattgagcagcatgggggtttaccaaattcttgccatttatgctacagttgcaggttctctgtcactggcaatcatgatagctgggatctctttctggatgtgctccaacgggtctctgcagtgcagaatctgcatatga

SEQ ID NO: 32137 - RNA, 1701 nt, synthetic construct
  misc_feature 1..1701: note = hemagglutinin__InfluenzaA__ABO52258
  source 1..1701: mol_type = other RNA
atgaaagcaaaactactggtcctgttatgtgcactttcagctacagatgcagacacaatatgtataggctaccatgcgaacaattcaaccgacactgttgacacggtactcgaaaagaacgtgacagtgacacactctgtcaacctacttgaggacagtcacaacggaaaactatgcagactaaaaggaatagccccactacaattggggaaatgcagcattgccggatggatcttaggaaacccagaatgcgaatcactgttttctaagaaatcatggtcctacattgcagaaacaccaaactccgagaatggaacatgttacccagggtatttcgccgactatgaagaactgagggagcaattgagttcagtatcatcattcgagagattcgaaatattccccaaggaaagttcatggcccaaacacaacgtaaccagaggagtaacggcttcatgctcccataaggggaaatgcagtttttacagaaatttgctatggctgacggagaaaaatggctcgtacccaaatctgagcaaatcctatgtgaacaacaaagagaaagaagtccttgtactatggggtgttcatcacccgtctaacatagaggaccaaaagaccatctatcgtaaagaaaatgcttatgtctctgtagtgtcttcacattataacaggagattcaccccagaaatagcaaaaagacccaaagtaagagatcaagaagggagaattaactactactggactctgctggaacccggggacacaataatatttgaggcaaatggaaatctaatagcgccatggtatgctttcgcactgagtagaggatttgggtcaggaatcatcacctcaaacgcatcgatggatgaatgtgacgcgaagtgtcaaacaccccagggagctataaacagtagtcttcctttccagaatgtacacccagtcacaataggagagtgcccaaaatacgtcaggagtacaaaattacggatggttacaggactaaggaacatcccatccattcaatccagaggtttgtttggagccattgccggtttcattgaagggggatggactggaatgatagatggatggtatggttatcatcatcagaatgaacagggatctggctatgctgcagatcaaaaaagcacacaaaatgccattaacgggattacaaacaaggtgaactctgttatcgagaaaatgaacactcaattcacagctgtgggtaaagaattcaacaaattagaaaaaaggatggaaaacttaaataaaaaagttgatgatggatttctggacatttggacatataatgcagaattgttggttctactggaaaatgaaaggactttggattttcatgactcaaatgtgaagaacctgtatgagaaagtaaaaagccaattaaagaataatgccaaagaaataggaaacgggtgttttgaattctaccacaagtgtaacaatgaatgcatggaaagtgtaaaaaatggaacttatgactatccaaaatattcagaggaatcaaagttaaacagggaaaaaattgatggagtgaaattggaatcaatgggagtctatcagattctggcgatctactcaactgtcgccagttcactggtgcttttggtctccctgggggcaatcagcttctggatgtgttctaatgggtctttgcagtgcagaatatgcatctga

SEQ ID NO: 32138 - RNA, 1701 nt, synthetic construct
  misc_feature 1..1701: note = hemagglutinin__InfluenzaA__ABO52280
  source 1..1701: mol_type = other RNA
atgaaagcaagactactgatcctgttatgtgcactttcagctacagatgcagacacaatatgtataggctaccatgcgaacaattcaaccgacactgttgacacagtactcgaaaagaatgtgacagtgacacactctgtaaacctactcgaagacagccacaacgggaaattatgcagattaaaaggaatagccccactacaattggggaaatgtaacattgccggatggatcttgggaaacccagaatgcgaatcattgctctctaatagatcatggtcctacattgcagaaacaccaaactctgagaatggaatatgttacccaggagatttcgccgactatgaggaactgagggagcaattgagctcagtatcatcattcgagagattcgaaatattccccaaggaaagctcatggcccaaacacaacataaccagaggagtaacggtagcatgctcccacgcgaagaaaagcagtttttacaaaaatttgctctggctgacggaggcaaatggcttatacccaagtctgagcaagtcctatgtgaacgacagagagaaagaagtccttgtgctatggggtgttcatcacccgtctaacatagaggatcaaaggaccctctatcggaaagaaaatgcttatgtctctgtggtgtcttcaaattataacaggagattcaccccggaaatagcagaaagacccaaagtaagaggtcaaccagggagaatgaactattactggactttgctagaacccggagacaaaataatatttgaggcaaatggaaacctaatagcgccatggtatgctttcgcactgagtagaggccctggatcaggaatcatcacctccaacgcatcaatggatgaatgtgacacgaagtgtcaaacaccccagggagccataaacagtagcctcccttttcagaacatacacccagtcacaataggagagtgcccaaaatatgtcaggagtaccaaattgaggatggttacaggactaaggaacatcccatccattcaatccagaggtctgtttggagccattgccggtttcattgaagggggatggactggaatggtggatggatggtatggttaccatcatcagaatgagcagggatctggctatgctgcggaccaaaaaagcacacaaaatgccattaacgggattacaaataaggtgaactctgttatcgagaaaatgaacactcaattcacagctgtgggtaaagagttcaacaaattggaaaaaagaatggaaaacttaaataaaaaagttgatgatggatttctggacatttggacatataatgcagaattattggttctactggaaaatgaaaggactttggatttccatgactcaaatgtgaagaatctgtatgagaaagtaaaaaaccaattgagaaataatgcaaaggaaataggaaacgggtgttttgagttctaccacaagtgtgacaatgaatgcatggaaagtgtaaaaaatggaacttatgattacccaaagtattcagaggaatcaaagttaaacagggcaaaaattgatggagtaaaactggaatcaatgggggtctatcagattctggcgatctactcaactgtcgccagttcactggtgcttctggtctccctgggggcaatcagcttttggatgtgttccaatgggtctttgcaatgcagaatatgcatctga

SEQ ID NO: 32139 - RNA, 1689 nt, synthetic construct
  misc_feature 1..1689: note = hemagglutinin__InfluenzaA__ABO52302
  source 1..1689: mol_type = other RNA
atggccatcatttatctcattctcctgttcacagcagtgagaggggaccagatatgcattggataccatgccaataattccacagagaaggtcgacacaattctagagcggaacgtcactgtgactcatgccaaggacattcttgagaagacccataacggaaagttatgcaaactaaacggaatccctccacttgaactagggaactgtagcattgccggatggctccttggaaatccagaatgtgataggcttctaagtgtgccagaatggtcctatataatggagaaagaaaacccgagagacggtttgtgttatccaggcagcttcaacgattatgaagaattgaaacatctcctcagcagcgtgaaacatttcgagaaagtaaagattctgcccaaagatagatggacacagcatacaacaactggaggttcacgggcctgcgcggtgtctggtaatccatcattcttcaggaacatggtctggctgacaaagaaaggatcaaattatccggttgccaaaggatcgtacaacaatacaagcggagaacaaatgctaataatttggggggtgcaccatcccaatgatgagacagaacaaagaacattgtaccagaatgtgggaacctatgtttccgtaggcacatcaacattgaacaaaaggtcaaccccagacatagcaacaaggcctaaagtgaatggactaggaggtagaatggaattctcttggaccctattggatatgtgggacaccataaattttgagagtactggtaatctaattgcaccagagtatggattcaaaatatcgaaaagaggtagttcagggatcatgaaaacagaaggaacacttgggaactgtgagaccaaatgccaaactcctttgggagcaataaatacaacattgccttttcacaatgtccacccactgacaataggtgagtgccccaaatatgtaaaatcggagaagttggtcttagcaacaggactaaggaatgttccccagattgaatcaagaggattgtttggggcaatagctggttttatagaaggaggatggcaaggaatggttgatggttggtatggataccatcacagcaatgaccagggatcagggtatgcagcagacaaagaatccactcaaaaggcatttgatggaatcaccaacaaggtaaattctgtgattgaaaagatgaacacccaatttgaagctgttgggaaagaattcagtaacttagagagaagactggagaacttgaacaaaaagatggaagacgggtttctagatgtgtggacatacaatgctgagcttctagttctgatggaaaatgagaggacacttgactttcatgattctaatgtcaagaatctgtatgataaagtcagaatgcagctgagagacaacgtcaaagaactaggaaatggatgttttgaattttatcacaaatgtgatgatgaatgcatgaatagtgtgaaaaacgggacgtatgattatcccaagtatgaagaagagtctaaactaaatagaaatgaaatcaaaggggtaaaattgagcagcatggggatttatcaaatccttgccatttatgctacagtagcaggttctctgtcactggcaatcatgatggctgggatctctttctggatgtgctccaacgggtctctgcagtgcaggatctgcatatga

SEQ ID NO: 32140 - RNA, 1701 nt, synthetic construct
  misc_feature 1..1701: note = hemagglutinin__InfluenzaA__ABO52313
  source 1..1701: mol_type = other RNA
atgaagactatcattgctttgagctacattttctgtctggttttcgcccaaaaccttccaggaaatgacaacagcacagcaacgctgtgcctgggacatcatgcggtgccaaacggaacgctagtgaaaacaatcacgaatgatcagattgaagtgactaatgctactgagctggttcagagctcctcaacgggtaaaatatgcaacaatcctcatcgaatccttgatggaataaactgcacactgatagatgctctattgggggaccctcattgtgatggctttcaaaatgagaaatgggaccttttcgttgaacgcagcaaagctttcagcaactgttacccttatgatgtgccagactatgcctcccttaggtcactagttgcctcgtcaggcactctggagtttatcaatgaaggcttcaattggactggggtcactcagaatgggggaagcaatgcttgcaaaaggggacctgatagcggttttttcagtagactgaactggttgtacaaatcaggaagcacatatccagtgctgaacgtgactatgccaaacaatgacaattttgacaaactatacatttggggggttcaccacccgagcacggaccaagaacaaaccaacctatatgttcaagcatcagggagagtcacagtctccaccaagagaagccagcaaactataatcccgaatgttgggtctagaccctgggtaaggggtctgtctagtagaataagcatctattggacaatagttaaaccgggagacatactggtaattaatagtaatgggaacctaattgctcctcggggtcacttcaaaatgcgcactgggaagagctcaataatgaggtcagatgcacctattggcacctgcagttctgaatgcatcactccaaatggaagcattcccaatgacaagccctttcaaaacgtaaacaagatcacatatggggcatgtcccaagtacgtcaagcaaaacactctgaagttggcaacagggatgcggaatgtaccagagaaacaaactagaggcatattcggcgcaatagcaggtttcatagaaaatggttgggagggaatgatagacggttggtacggtttcaggcatcgaaattctgagggcacaggacaagcagcagatcttaaaagcactcaagcagctatcgaccaaatcaatgggaaactgaatagggtaatcgagaagacgaacgagaaattccatcaaatcgaaaaggaattctcagaagtagaagggagaattcaggacctcgagaaatacgttgaagacactaaaatagatctctggtcttacaatgcggagcttcttgtcgctctggagaaccaacatacaattgatctgactgactcggaaatgaacaaactgtttgaaaaaacaaggaggcaactgagggaaaatgctgaggacatgggcaatggttgcttcaaaatataccacaaatgtgacaatgcttgcatagggtcaatcagaaatgggacttatgaccatgatgtatacagagacgaagcattaaacaaccggtttcagatcaaaggtgttgaactgaagtcaggatacaaagactggatcctgtggatttcctttgccatatcatgctttttgctttgtgttgttttgctggggttcatcatgtgggcctgccaaaaaggcaacattaggtgcaacatttgcatttga

SEQ ID NO: 32141 - RNA, 1701 nt, synthetic construct
  misc_feature 1..1701: note = hemagglutinin__InfluenzaA__ABO52335
  source 1..1701: mol_type = other RNA
atgaagactatcattgctttgagctacattttctgtctggttctcggccaagactttccaagaaatgacaacagcacagcaacgctgtgcctgggacatcatgcggtgccaaacggaacactagtgaaaacaatcacaaatgatcagattgaagtgactaatgctactgagctggttcagagttcctcaacggggaaaatatgcaacaatcctcatcgaatcctcgatggaatagactgcacactgatagatgctctattgggggaccctcattgtgatggctttcaaaatgagacatgggaccttttcgttgaacgcagcaaagctttcagcaactgttacccttatgatgtgccagattatgcctcccttaggtcactagttgcctcgtctggcactctggagtttatcaatgaaggcttcacttggactggggtcactcagaatgggggaagcaatgcttgcaaaaggggacctgatagcggttttttcagtagactgaactggttgtacaaatcaggaaacacatatccagtactgaacgtgactatgccaaacaatgacaattttgacaaactatacatttggggggttcaccacccgagcacggaccaagaccaaaccagcctatatgttcaagcatcagggagagtcacagtctccactaagagaagccagcaaactgtaatcccgaatatcgggcctagaccctgggtaaggggtctgtctagtagaataagcatctattggacaatagttaaaccgggagacatactgttaattaatagtaatgggaacctaattgctcctcggggttatttcaaaatgcgcactgggaaaagctcaataatgaggtcagatgcacctattggcacctgcatttctgaatgcatcactccaaatggaagcattcccaatgacaagccctttcaaaacgtaaacaagatcacatatggggcatgtcctaagtatgttaagcaaaacaccctgaagttggcaacagggatgcggaatgtaccagagaaacaaactagaggcatattcggcgcaatagcaggtttcatagaaaatggttgggagggaatgatagacggttggtacggtttcaggcatcaaaattctgagggcacagggcaagcagcagatcttaaaagcactcaagcagccatcgaccaaatcaatggaaaactgaatagggtaatcgagaagacgaacgagaaattccatcaaatcgaaaaggagttctcagaagtagaagggagaattcaggacctcgagaaatacgttgaagacactaaaatagatctctggtcttacaatgcggagcttcttgtcgctctggagaaccaacatacaattgatctgactgactcggaaatgaacaaactgtttgaaaaaacaaggaggcaactgagggaaaatgctgaggacatgggcaatggttgcttcaaaatataccacagatgtgacaatgcttgcatagggtcaatcagaaatgggacttatgaccatgatgtatacagagacgaagcattaaacaaccggtttcagatcaaaggtgttgaactgaagtcaggatacaaagactggatcctgtggatttcctttgccatatcatgctttttgctttgtgttgttttgctggggttcatcatgtgggcctgccagaaaggcaacattaggtgcaacatttgcatttga

SEQ ID NO: 32142 - RNA, 1701 nt, synthetic construct
  misc_feature 1..1701: note = hemagglutinin__InfluenzaA__ABO52346
  source 1..1701: mol_type = other RNA
atgaagactatcattgctttgagctacattttctgtctggttttcgcccaagaccttccaggaaatgacaacagcacagcaactctgtgcctgggacatcatgcggtgccaaacggaacgctagtgaaaacaatcacgaatgatcagattgaagtgactaatgctactgaactggttcagagttcctcaacgggtaaaatatgcgacaatcctcatcgaatccttgatggaataaactgcacactgatagatgctctattgggggaccctcattgtgatggctttcaaaatgagaaatgggaccttttcgttgaacgcagcaaagctttcagcgactgttacccttatgatgtgccagattatgcctcccttaggtcactagttgcctcgtcaggcactctggagtttatcaatgaaggcttcaattggactggggtcactcagaatgggggaagcagtgcttgcaaaaggggacctgataacggttttttcagtagactgaactggttgtacaaatcaggaagcacatatccagtgcagaacgtgaccatgccaaacaatgacaactctgacaaactatacatttggggggttcaccacccgagcacggacaaagaacaaaccgacctatatgttcaagcatcagggaaagtcacagtctccaccaagagaagccagcaaactgtaatcccgaatgtcgggtctagaccctgggtaaggggtctgtctagtagagtaagcatctattggacaatagttaaaccgggagacatactggtaattaatagtaatggaaacctaattgctcctcggggttacttcaaaatgcgcactgggaagagctcaataatgaggtcagatgcacctattggcacctgcagctctgaatgcatcactccaaatggaagcattcccaatgacaagccctttcaaaacgtaaacaagatcacatatggggcatgtcccaagtatgttaagcaaaacactctgaagttggcaacaggaatgcggaatgtaccagagaaacaaactagaggcatattcggcgcaatagcaggtttcatagaaaatggttgggagggaatgatagacggttggtacggtttcaggcatcaaaattctgagggcacaggacaagcagcagatcttaaaagcactcaagcagccatcgaccaaatcaatgggaaactgaatagggtaatcgagaagacgaacgagaaattccatcaaatcgaaaaggaattctcagaagtagaagggagaattcaggacctcgagaaatacgttgaagacactaaaatagatctctggtcttacaatgcggagcttcttgtcgctctggagaaccaacatacaattgatctgactgactcggaaatgaacaaactgtttgaaaaaacaaggaggcaactgagggaaaatgctgaggacatgggcaatggttgcttcaaaatataccacaaatgtgacaatgcttgcatagggtcaatcagaaatgggacttatgaccatgatgtatacagagacgaagcattaaacaaccggtttcagatcaaaggtgttgaactgaagtcaggatacaaagactggatcctgtggatttcctttgccatatcatgctttttgctttgtgttgttttgctggggttcatcatgtgggcctgccagaaaggcaacattaggtgcaacatttgcatttga

SEQ ID NO: 32143 - RNA, 1701 nt, synthetic construct
  misc_feature 1..1701: note = hemagglutinin__InfluenzaA__ABO52357
  source 1..1701: mol_type = other RNA
atgaagaccatcattgctttgagctacattttctgtctggctctcggccaagaccttccaggaaatgacaacagcacagcaacgctgtgcctgggacatcatgcggtgccaaacggaacactagtgaaaacaatcacagatgatcagattgaagtgactaatgctactgagctagttcagagctcctcaacggggaaaatatgcaacaatcctcatcgaatccttgatggaatagactgcacactgatagatgctctattgggggaccctcattgtgatgtttttcaaaatgagacatgggaccttttcgttgaacgcagcaaagctttcagcaactgttacccttatgatgtgccagattatgcctcccttaggtcactagttgcctcgtcaggcactctggagtttatcactgagggtttcacttggactggggtcactcagaatgggggaagcaatgcttgcaaaaggggacctggtagcggttttttcagtagactgaactggttgaccaaatcaggaagcacatatccagtgctgaacgtgactatgccaaacaatgacaattttgacaaactatacatttggggggttcaccacccgagcacgaaccaagaacaaaccagcctgtatgttcaagcatcagggagagtcacagtctctaccaggagaagccagcaaaccataatcccgaatatcgggtccagaccctgggtaaggggtctgtctagtagaataagcatctattggacaatagttaagccgggagacgtactggtaattaatagtaatgggaacctaatcgctcctcggggttatttcaaaatgcgcactgggaaaagctcaataatgaggtcagatgcacctattgatacctgtatttttgaatgcatcactccaaatggaagcattcccaatgacaagccctttcaaaacgtaaacaagatcacatatggagcatgccccaagtatgttaagcaaaacaccctgaagttggcaacagggatgcggaatgtaccagagaaacaaactagaggcatattcggcgcaatagcaggtttcatagaaaatggttgggagggaatgatagacggttggtacggtttcaggcatcaaaattctgagggcacaggacaagcagcagatcttaaaagcactcaagcagccatcgaccaaatcaatgggaaattgaacagggtaatcgagaagacgaacgagaaattccatcaaatcgaaaaggaattctcagaagtagaagggagaattcaggacctcgagaaatacgttgaagacactaaaatagatctctggtcttacaatgcggagcttcttgtcgctctggagaatcaacatacaattgacctgactgactcggaaatgaacaagctgtttgaaaaaacaaggaggcaactgagggaaaatgctgaagacatgggcaatggttgcttcaaaatataccacaaatgtgataacgcttgcatagagtcaatcagaaatgggacttatgaccatgatgtatacagagacgaagcattaaacaaccggtttcagatcaaaggtgttgaactgaagtctggatacaaagactggatcctgtggatttcctttgccatatcatgctttttgctttgtgttgttttgctggggttcatcatgtgggcctgccagagaggcaacattaggtgcaacatttgcatttga

SEQ ID NO: 32144 - RNA, 1701 nt, synthetic construct
  misc_feature 1..1701: note = hemagglutinin__InfluenzaA__ABO52368
  source 1..1701: mol_type = other RNA
atgaagaccatcattgctttgagctacattttctgtctggctctcggccaagaccttccaggaaatgacaacagtacagcaacgctgtgcctgggacatcatgcggtgccaaacggaacactagtgaaaacaatcacaaatgatcagattgaagtgactaatgctactgagctagttcagagttcctcaacggggaaaatatgcaacaatcctcatcgaatccttgatggaataaactgcacactgatagacgctctattgggggaccctcattgtgatgttttccaagatgagacatgggaccttttcgttgaacgcagcaaagctttcagcaactgttacccttatgatgtgccagattatgcctcccttaggtcactagttgcctcgtcaggcactctggagtttatcactgagggtttcacttggactggggtcactcagaatgggggaagcaatgcttgcaaaaggggacctggtagcggttttttcagtagactgaactggttgaccaaatcaggaagcacatatccagtgctgaacgtgactatgccaaacaatgacaattttgacaaactatacatttggggggttcaccacccgagcacgaaccaagaacaaaccagcctgtatgttcaagcatcagggagagtcacagtctctaccaggagaagccagcaaactataatcccgaatatcgggtccagaccctgggtaaggggtctgtctagtagaataagcatctattggacaatagttaaaccgggagacgtactggtaattaatagtaatgggaacctaatcgctcctcggggttatttcaaaatgcgcactgggaaaagctcaataatgaggtcagatgcacctattgatacctgtatttctgaatgcatcactccaaatggaagcattcccaatgacaagccctttcaaaacgtaaacaagatcacatatggagcatgccccaagtatgttaagcaaaacaccctgaaattggcaacagggatgcggaatgtaccagagaaacaaactagaggcctattcggcgcaatagcaggcttcatagaaaatggttgggagggaatgatagacggttggtacggtttcaggcatcaaaattctgagggcacaggacaagcagcagatcttaaaagcactcaagcagccatcgaccaaatcaatgggaaattgaacagagtaatcgagaagacgaacgagaaattccatcaaatcgaaaaggaattctctgaagtagaagggagaattcaggacctcgagaaatacgttgaagacactaaaatagatctctggtcttacaatgcggagcttcttgtcgctctggagaatcaacatacaattgacctgactgactcggaaatgaacaagctgtttgaaaaaacaaggaggcaactgagggaaaatgctgaagacatgggcaatggttgcttcaaaatataccacaaatgtgacaacgcttgcatagagtcaatcagaaatgggacttatgaccatgatgtatacagagacgaagcattaaacaaccggtttcagatcaaaggtgttgaactgaagtctggatacaaagactggatcctgtggatttcctttgccatatcatgctttttgctttgtgttgttttgctggggttcatcatgtgggcctgccagagaggcaacattaggtgcaacatttgcatttga

SEQ ID NO: 32145 - RNA, 1701 nt, synthetic construct
  misc_feature 1..1701: note = hemagglutinin__InfluenzaA__ABO52797
  source 1..1701: mol_type = other RNA
atgaaagcaaaactactggtcctgttatgtgcactctcagctacagatgcagacacaatatgtataggctaccatgcgaacaactcaaccgacactgttgacacagtactcgaaaagaacgtgacagtgacacactctgtcaacctacttgaggacaatcacaacgggaaactatgcaaactaaaaggaatagcgccactacaattggggaaatgcagcattgccggatggatcttaggaaacccagaatgcgaatcactgttttctaagaaatcatggtcctacattgcagaaacaccaaactccgagaatggaacatgttacccagggtatttcgccgactatgaagaactgagggaacaattgagttcagtatcatcattcgagagattcgaaatattccccaaggaaagttcatggcccaaccacaacgtaaccaaaggagtaacggcatcatgctcccataaggggaaaagcagtttttacagaaatttgctatggctgacggagaaaaatggctcgtacccaagtctgagcaagtcctatgtgaacaacaaagagaaagaagtccttgtactatggggtgttcatcacccgtctaacataaaggaccaaaagaccatctatcgtaaagaaaatgcttatgtctctgtagtgtcttcacattataacaggagattcaccccagaaatagcaaaaagacccaaagtaagagatcaagaagggagaattaactactactggactctgctggaacccggggacacaataatatttgaggcaaatggaaatctaatagcgccatggtatgctttcgcactgagtagaggctttgggtcaggaatcatcacctcaaacgcatcgatggatgaatgtgacgcgaagtgtcaaacaccccagggagctataaacagtagtcttccttttcagaatgtacacccagtcacaataggagagtgcccaaagtacgtaaggagtacaaaattaaggatggttacaggactaaggaacatcccatccattcaatccagaggtttgtttggagccattgccggtttcattgaagggggatggactggaatgattgatggatggtatggttatcatcatcagaatgaacagggatctggctatgctgcggatcaaaaaagcacacaaagtgccattaacgggattacaaacaaggtgaactctataatcgagaaaatgaacactcaattcacagctgtgggtaaagaattcaacaaactagaaaaaaggatggaaaacttaaataaaaaagttgatgatggatttctggacatttggacatataatgcagaattgttggttctactggaaaatgaaaggactttggatttccatgactcaaatgtgaagaacctgtatgagaaagtaaaaagccaattaaagaataatgccaaagaaataggaaacgggtgttttgaattctaccacaagtgtaacaatgaatgcatggaaagtgtaaaaaatggaacttatgactatccaaaatattcagaggaatcaaaattaaacagggaaaaaattgatggagtgaaattggaatcaatgggagtctatcagattctggcgatctactcaactgtcgccagttcactggtgcttttggtctccctgggggcaatcagcttctggatgtgttctaatgggtctttgcagtgcagaatatgcatctga

SEQ ID NO: 32146 - RNA, 1698 nt, synthetic construct; identical to SEQ ID NO: 31246
  misc_feature 1..1698: note = hemagglutinin__InfluenzaA__ABP49217
  source 1..1698: mol_type = other RNA

SEQ ID NO: 32147 - RNA, 1698 nt, synthetic construct
  misc_feature 1..1698: note = hemagglutinin__InfluenzaA__ABP49305
  source 1..1698: mol_type = other RNA
atgaaagcaaaactaatggtcctgttatgtacatttacagctacatatgcagacacaatatgtatcggctaccatgccaacaactcaaccgacactgttgacacagtacttgagaagaatgtgacagtgacacactctgtcaacctacttgaggacagtcacaatggaaaactatgtctactaaaaggaatagccccactacaattgggtaactgcagcgttgccggatggatcttaggaaacccagaatgcgaattactgatttccaaggaatcatggtcctacattgtagaaacaccaaatcctgaaaatggaacatgttacccagggtatttcgccgactatgaggaactgagggagcaattgagttcagtatcttcatttgagagattcgaaatattccccaaagaaagctcatggcccaaccacaccgtaaccggagtatcagcatcatgctcccataatgggaaaagcagtttttacagaaatttgctatggctgacggggaagaatggtttgtacccaaacctgagcaagtcctatgcaaacaacaaagagaaagaagtccttgtactatggggtgttcatcacccgcctaacataggggaccaaagggccctctatcatacagaaaatgcttatgtctctgtagtgtcttcacattatagcagaagattcaccccagaaatagccaaaagacccaaagtaagagatcaggaaggaagaatcaactactactggactctgctggaacccggggatacaataatatttgaggcaaatggaaatctaatagcgccatggtatgctttcgcactgagtagaggctttggatcaggaatcatcacctcaaatgcaccaatgggtgaatgtgatgcgaagtgtcaaacacctcagggagctataaacagcagtcttcctttccagaatgtacacccagtcacaataggagagtgtccaaagtatgtcaggagtgcaaaattaaggatggttacaggactaaggaacatcccatccattcaatccagaggtttgtttggagccattgccggtttcattgaaggggggtggactggaatggtagatgggtggtatggttatcatcatcagaatgagcaaggatctggctatgctgcagatcaaaaaagcacacaaaatgccattaacgggattacaaacaaggtgaattctgtaattgagaaaatgaacactcaattcacagctgtgggcaaagaattcaacaaattggaaagaaggatggaaaacttaaataaaaaagttgatgatgggtttctagacatttggacatataatgcagaattgttggttctactggaaaatgaaaggactttggatttccatgactccaatgtgaagaatctgtatgagaaagtaaaaagccaattaaagaataatgccaaagaaataggaaacgggtgttttgaattctatcacaagtgtaacaatgaatgcatggagagtgtgaaaaatggaacttatgactatccaaaatattccgaagaatcaaagttaaacagggagaaaattgatggagtgaaattggaatcaatgggagtctatcagattctggcgatctactcaactgtcgccagttccctggttcttttggtctccctgggggcaatcagcttctggatgtgttccaatgggtctttgcagtgtagaatatgcatctga

SEQ ID NO: 32148 - RNA, 1701 nt, synthetic construct
  misc_feature 1..1701: note = hemagglutinin__InfluenzaA__ABP49316
  source 1..1701: mol_type = other RNA
atgaaagcaaaactactggtcctgttatgtgcactttcagctacagatgcagacacaatatgtataggctaccatgcgaacaactcaaccgacactgttgacacagtactcgaaaagaacgtgacagtgacacactctgtcaacctactcgaggacagccacaacgggaaactatgcagactaaaaggaatagccccactacaattggggaaatgcaacattgccggatggatcttaggaaacccagaatgcgaatcactgttttctaagaaatcatggtcctacattgcagaaacaccaaactctgagaatggaacatgttacccaggatatttcgccgactatgaggaactgagggagcaattgagctcagtatcatcattcgagagattcgaaatattccccaaggaaaggtcatggcccaaacacaacataaccagaggagtaacggcagcatgctcccataaggggaaaagcagtttttacagaaatttgctatggctgacggagaaaaatggctcgtacccaaatctgaaaaagtcctatgtgaacaataaagagaaagaagtccttgtactatggggtgttcatcacccgtctaacatagaggaccaaaagaccctctatcggaaagaaaatgcttatgtctctgtagtgtcttcaaattataacaagagattcaccccagaaatagcagaaagacccaaagtaagaggtcaagcagggagaattaactactactggactctgctggaacccggagacacaataatatttgaggcaaatggaaatctaatagcgccatggcatgctttcgcactgagtagaggctttgggtcaggaatcatcacctcaaacgcatcgatggatgaatgtgacacgaagtgtcaaacaccccagggagctataaacagtagtctccctttccagaatatacacccagtcacaataggagagtgcccaaaatacgtcaggagtacaaaattgaggatggttacaggactaaggaacatcccatccattcaatccagaggtctgtttggggccattgccggtttcattgaagggggatggactggaatgatagatggatggtatggttatcatcatcagaatgaacagggatctggctatgctgcggatcaaaaaagcacacaaaatgccattaacgggattacaaacaaggtgaactctgttatcgagaaaatgaacactcaattcacagctgtgggtaaagaattcaacaaattagaaaaaaggatggaaaacttaaataaaaaagttgatgatggatttctggacatttggacatataatgcagaattgttggttctactggaaaatgaaaggactttggattttcatgactcaaatgtgaagaatctgtatgagaaagtaaaaagccaattaaagaataatgccaaagaaataggaaacgggtgttttgaattctaccacaagtgtaacaatgaatgcatggaaagtgtaaaaaatggaacttatgattatccaaaatattcagaggaatcaaagttaaacagggaaaaaattgatggagtgaaattggaatcaatgggagtctatcagattctggcgatctactcaactgtcgccagttcactggtgcttctggtctccctgggggcaatcagcttctggatgtgttctaatgggtctttgcagtgcagaatatgcatctga

SEQ ID NO: 32149 - RNA, 1701 nt, synthetic construct
  misc_feature 1..1701: note = hemagglutinin__InfluenzaA__ABP49327
  source 1..1701: mol_type = other RNA
atgaaggcaagactactggtcctgttatgtgcacttgcagctacagatgcagacacaatatgtataggctaccatgcgaacaactcaaccgatactgttgacacagtactcgaaaagaatgtgacagtgacacactctgtcaacctactcgaagacagccacaacgggaaattatgtagattaaaaggaatagccccactacaattgaggaaatgtaacattgctggatggatcctgggaaacccagaatgcgaatcactgctttcagagagatcatggtcctacattgttgaaacaccaaactctgagaatggaacatgttacccaggagattttaccaactatgaggaactgagggagcaattgagctctgtatcatcattcgaaagattcgaaatattccccaaggaaagctcatggcccaaacacaacacaaccagaggagtaacggcagcatgctcccatgcgggaaaaagcagtttttacagaaatttgctatggctgacggagaaggatggctcatatccgaatctgaacaattcctatgtgaacaagaaagggaaagaagtccttgtactatggggtgttcatcacccgtccaacataaaggatcaacagaccctctatcagaaagaaaatgcttatgtctctgtagtgtcttcaaactataacaggagattcaccccggaaatagcagaaagacccaaagtaagaggtcaagcagggaggatgaactattactggaccttgctaaaacccggagacacaataatgtttgaggcaaatggaaatctaatagcgccatggtatgctttcgcactaagtagaggctttgggtcaggcatcatcacctcaaacgcatcgatgcatgagtgtgacacgaagtgtcaaacaccccagggagctataaacagcagtctccctttccagaatatccacccagtcacaataggagagtgcccaaaatacgtcaggagtaccaaattgaggatggttacaggactacggaacatcccatccattcaatccagaggtctatttggagccattgccggtttcattgaagggggatggactggaatgatagatggatggtatggttatcatcatcagaatgaacagggatcaggctatgctgcggatcaaaaaagcacacaaaatgccattaacgggattacaaacaaggtgaactctgttatcgagaagatgaacactcaattcactgctgtgggtaaagaattcaacaacttagaaaaaaggatggaaaacttaaacaaaaaagttgatgatggatttctggacatttggacatataatgcagaattgttgattctactggaaaatgaaaggactctggatttccatgactcaaatgtgaagaatctgtatgaaaaagttaaaagccaattaaggaataatgccaaagaaataggaaacgggtgttttgagttctaccacaagtgtaacaatgaatgcatggaaagtgtaaaaaatggaacttatgattatccaaaatattcagaagaatcaaagttgaacagggaaaaaatagatggagtgaaattggaatcaatgggggtctatcagattctggcgatctactcaactgtcgccagttcactggtgcttctagtctccctgggggcaatcagcttctggatgtgttctaatgggtctttgcagtgcagaatatgcatctga

SEQ ID NO: 32150 - RNA, 1701 nt, synthetic construct
  misc_feature 1..1701: note = hemagglutinin__InfluenzaA__ABP49338
  source 1..1701: mol_type = other RNA
atgaaagcaaaactactggtcctgttatgtgcactttcagctacagatgcagacacaatatgtataggctaccatgcgaacaactcaaccgacactgttgacacagtactcgaaaagaacgtgacagtgacacactctgtcaacctacttgaggacagtcacaacggaaaactatgcagactaaaaggaatagctccactacaattggggaaatgcagcattgccggatggatcttaggaaacccagaatgcgaatcactgttttctaagaaatcatggtcctacattgcagaaacaccaaactccgagaatggaacatgttacccaggatatttcgccgactatgaggaactgagggagcaattgagttcagtatcatcattcgagagattcgaaatattccccaaggaaagatcatggcccaaacacaacgtaaccagaggagtaacggcatcatgctcccataaggggaaaagcagtttttacagaaatttgctatggctgacggagaaaaatggctcgtacccaaatctgagcaagtcctatgtgaacaacaaagagaaagaagtccttgtactatggggtgttcatcacccgtctaacatagaggaccaaaagaccatctatcggaaagaaaatgcttatgtctctgtagtgtcttcaaattataacaggagattcaccccagaaatagcaaaaagacccaaagtaagaggtcaagaagggagaattaactactactggactctgctggaacccggggacacaataatatttgaggcaaatggaaatctaatagcgccatggtatgctttcgcactgagtagaggctttgggtcaggaatcatcacctcaaacgcatcgatggatgaatgtgacacgaagtgtcaaacaccccagggagctataaacagtagccttcctttccagaatgtacacccagtcacaataggagagtgcccaaaatacgtcaggagtacaaaattaaggatggttacaggactaagaaacatcccatccattcaatccagaggtctgtttggagccattgccggtttcattgaagggggatggactggaatgatagatggatggtatggttatcatcatcagaatgaacagggatctggctatgctgcggatcaaaaaagcacacaaaatgccattaacgggattacaaacaaggtgaactctgttatcgagaaaatgaacactcaattcacagctgtgggtaaagaattcaacaaattagaaaaaaggatggaaaacttaaataaaaaagttgatgatggatttctggacatttggacatataatgcagaattgttggttctactggaaaatgaaaggactttggattttcatgactcaaatgtgaagaatctgtatgagaaagtaaaaagccaattaaagaataatgccaaagaaataggaaacgggtgttttgaattctaccacaagtgtaacaatgaatgcatggaaagtgtaaaaaatggaacttatgactatccaaaatattcagaggaatcaaagttaaacagggaaaaaattgatggagtgaaattggaatcaatgggagtctatcagattctggcgatctactcaactgtcgccagttcactggtgcttttggtctccctgggggcaatcagcttctggatgtgttctaatgggtctttgcagtgcagaatatgcatctga

SEQ ID NO: 32151 - RNA, 1701 nt, synthetic construct
  misc_feature 1..1701: note = hemagglutinin__InfluenzaA__ABP49349
  source 1..1701: mol_type = other RNA
atgaaagcaaaactactggtcctgttatgtgcactttcagctacagatgcagacacaatatgtataggctaccatgcgaacaactcaaccgacactgttgacacagtactcgaaaagaacgtgacagtgacacactctgtcaacctacttgaggacaatcacaacgggaaactatgcaaactaaaaggaatagcgccactacaattggggaaatgcagcattgccggatggatcttaggaaacccagaatgtgaatcactgttttctaagaaatcatggtcctacattgcagaaacaccaaactccgagaatggaacatgttacccagggtatttcgccgactatgaagaactgagggaacaattgagttcagtatcatcattcgagagattcgaaatattccccaaggaaagttcatggcccaaccacaacgtaaccaaaggagtaacggcatcatgctcccataaggggaaaagcagcttttacagaaatttgctatggctgacggagaaaaatggctcgtacccaaatctgagcaaatcctatgtgaacaacaaagagaaagaagtccttgtactatggggtattcatcacccgtctaacatagaggaccaaaagaccatctatcgtaaagaaaatgcttatgtctctgtagtgtcttcacattataacaggagattcaccccagaaatagcaaaaagacccaaagtaagagatcaagaagggagaattaactactactggactctgctggaacccggggacacaataatatttgaggcaaatggaaatctaatagcgccatggtatgctttcgcactgagtaggggctttgggtcaggaatcatcacctcaaacgcatcgatggatgaatgtgacgcgaagtgtcaaacacccctgggagctataaacagtagtcttccttttcagaatgtacacccagtcacaataggagagtgcccaaagtacgtcaggagtacaaaattaaggatggttacaggactaaggaacatcccatccattcaatccagaggtttgtttggagctattgccggtttcattgaagggggatggactggaatgattgatggatggtatggttatcatcatcagaatgaacagggatctggctatgctgcggatcaaaaaagcacacaaagtgccattaacgggattacaaacaaggtgaactctataatcgagaaaatgaacactcaattcacagctgtgggtaaagaattcaacaaactagaaaaaaggatggaaaacttaaataaaaaagttgatgatggatttctggacatttggacatataatgcagaattgttggttctactggaaaatgaaaggactttggatttccatgactcaaatgtgaagaacctgtatgagaaagtaaaaagccaattaaagaataatgccaaagaaataggaaacgggtgttttgaattctaccacaagtgtaacaatgaatgcatggaaagtgtaaaaaatggaacttatgactatccaaaatattcagaggaatcaaaattaaacagggaaaaaattgatggagtgaaattggaatcaatgggagtctatcagattctggcgatctactcaactgtcgccagttcactggtgcttttggtctccctgggggcaatcagcttctggatgtgttctaatgggtctttgcagtgcagaatatgcatctga

SEQ ID NO: 32152 - RNA, 1701 nt, synthetic construct
  misc_feature 1..1701: note = hemagglutinin__InfluenzaA__ABP49360
  source 1..1701: mol_type = other RNA
atgaaagcaaaactactaatcctgttatgtgcatttacagctacagatgcagacacaatatgtataggctaccatgcgaacaactcaaccgacactgttgacacagtacttgaaaagaacgtgacagtgacacactctgtcaacctacttgaggacagtcacaacggaaaactatgtcgactaaaaggaatagccccactacaattgggtaattgcagcattgccggatggattttaggaaacccagaatgcgaatcactgttttctaagaaatcatggtcctacattgcagaaacaccaaactccgagaatggaacatgttacccagggtatttcgccgactatgaggaactgagggagcaattgagttcagtatcatcattcgagagattcgaaatattccccaaagaaagctcatggcccaaccacaccgtaaccaaaggagtaacggcatcatgctcccataatgggaaaagcagtttttacagaaatttgctatggctgacgaagaagaatggctcgtacccaaatctgagcaagtcctatgtgaacaacaaagagaaagaagtccttgtactatggggtgttcatcacccgtctaacataggggaccaaagggccatctatcatacagaaaatgcttatgtctctgtagtgtcttcacattataacaggagattcaccccagaaatagcaaaaagacccaaagtaagagatcaagaaggaagaattaactactactggactctgctggaacccggggacacaataatatttgaggcaaatggaaatctaatagcgccatggtatgctttcgcactgagtagaggctttgggtcaggaatcatcacctcaaacgcatcaatggatgaatgtgacgcgaagtgtcaaacaccccagggagctataaacagtagtcttcctttccagaatgtacacccagtcacaataggagagtgcccaaagtatgtcaggagtacaaaattaagaatggttacaggactaaggaacatcccatccattcaatccagaggtttgtttggagccattgccggtttcattgaaggggggtggactggaatgatagatggatggtatggttatcatcatcagaatgaacaaggatctggctatgctgcggatcaaaaaagcacacaaaatgccattaacgggattacaaacaaggtgaattctgtaatcgagaaaatgaacactcaattcacagctgtgggcaaagaattcaacaaattagaaagaaggatggaaaacttaaataaaaaagttgatgatggatttctggacatttggacatataatgcagaattgttggttctactggaaaatgaaaggactttggattttcatgactcaaatgtgaagaatctgtatgagaaagtaaaaagccaattaaagaacaatgccaaagaaataggaaacgggtgttttgaattctaccacaagtgtaacaatgaatgcatggaaagtgtgaaaaatggaacttatgactatccaaaatattccgaggaatcaaagttaaacagggaaaaaattgatggagtgaaattggaatcaatgggagtctatcagattctggcgatctactcaactgtcgccagttcactggtgcttttggtctccctgggggcaatcagcttctggatgtgttctaatgggtctttgcagtgtagaatatgcatctga

SEQ ID NO: 32153 - RNA, 1701 nt, synthetic construct
  misc_feature 1..1701: note = hemagglutinin__InfluenzaA__ABP49371
  source 1..1701: mol_type = other RNA
atgaagactatcattgctttgagctacattttatgtctggttttcgctcaaaaacttcccggaaatgacaacagcacggcaacgctgtgcctggggcaccatgcagtgccaaacggaacgctagtgaaaacaatcacgaatgaccaaattgaagtgactaatgctactgagctggttcagagttcctcaacaggtggaatatgcgacagtcctcaccaaatccttgatggagaaaactgcacactaatagatgctctattgggagaccctcattgtgatggcttccaaaataaggaatgggacctttttgttgaacgcagcaaagcctacagcaactgttacccttatgatgtgccggattatgcctcccttaggtcactagttgcctcatccggcacactggagtttaacaatgaaagcttcaattggactggagtcgctcagaatggaacaagctctgcttgcaaaaggagatctaataaaagtttctttagtagattgaattggttgcaccaattaaaatacaaatacccagcactgaacgtgactatgccaaacaatgaaaaatttgacaaattgtacatttggggggttcaccacccgagtacggacagtgaccaaatcagcctatatgctcaagcaccagggagagtcacagtctctaccaaaagaagccaacaaactgtaatcccgaatatcggatctagaccctgggtaaggggtgtctccagcagaataagcatctattggacaatagtaaaaccgggagacatacttttgattaactgcacagggaatctaattgctcctcggggttacttcaaaatacgaagtgggaaaagctcaataatgaggtcagatgcatccattggcaaatgcaattctgaatgcatcactccaaatggaagcattcccaatgacaaaccatttcaaaatgtaaacaggatcacatatggggcctgtcccagatatgttaagcaaaacactctgaaattggcaacagggatgcggaatgtaccagagaaacaaactagaggcatattcggcgcaatcgcgggtttcatagaaaatggttgggagggaatggtggacggttggtacggtttcaggcatcaaaattctgagggcacaggacaagcagcagatctcaaaagcactcaagcagcaatcaaccaaatcaacggaaaactgaataggttaatcgagaaaacgaacgagaaattccatcaaattgaaaaagaattctcagaagtggaagggagaattcaggacctcgagaaatatgttgaggacactaaaatagatctctggtcgtacaacgcggagcttcttgttgccctggagaaccagcatacaattgatctaactgactcagaaatgaacaaactgtttgaaagaacaaagaagcaactgagggaaaatgctgaggatatgggcaatggttgtttcaaaatataccacaaatgtgacaatgcctgcatagggtcaatcagaaatgggacttatgaccatgatgtatacagagacgaagcattaaacaaccggttccagatcaaaggtgttgagctgaagtcaggatacaaagattggatcctatggatttcctttgccatatcatgttttttgctttgtgttgtcttgctggggttcatcatgtgggcctgccaaaaaggcaacattaggtgcaacatttgcatttga

SEQ ID NO: 32154 - RNA, 1701 nt, synthetic construct; identical to SEQ ID NO: 31891
  misc_feature 1..1701: note = hemagglutinin__InfluenzaA__ABP49382
  source 1..1701: mol_type = other RNA

SEQ ID NO: 32155 - RNA, 1698 nt, synthetic construct
  misc_feature 1..1698: note = hemagglutinin__InfluenzaA__ABP49393
  source 1..1698: mol_type = other RNA
atgaaagtaaaactactggttctgttatgtacatttacagctacatatgcagacacaatatgtataggctaccatgccaacaactcgaccgacactgttgacacagtacttgagaagaatgtgacagtgacacactctgtcaacctacttgaggacagtcacaatggaaaactatgtctactaaaaggaatagccccactacaattgggtaattgcagcgttgccggatggatcttaggaaacccagaatgcgaattactgatttccaaggaatcatggtcctacattgtagaaacaccaaatcctgagaatggaacatgttacccagggtatttcgccgactatgaggagctgagggagcaattgagttcagtatcttcatttgagaggttcgaaatattccccaaagagagctcatggcccaaccacaccgtaaccggagtatcagcatcatgctcccataacgggaaaagcagtttttacagaaatttgctatggctgacggggaagaatggtttgtatccaaacctgagcaagtcctatgcaaacaacaaagagaaagaagtccttgtactgtggggtattcatcacccgcctaacataggggaccaaagggccctctatcatacagaaaatgcttatgtctctgtagtgtcttcacattacagcagaagattcaccccagaaatagccaaaagacccaaggtgagagatcaggaaggaagaatcaactactactggactctgctggaacccggggatacaataatatttgaggcaaatggaaatctaatagcgccaaggtttgctttcgcactgagtagaggctttggatcaggaatcatcacctcaaatgcaccaatggatgaatgtgatgcgaagtgtcaaacacctcagggagctataaacagcagtcttcctttccagaatgtacacccagtcacaataggagagtgtccaaagtatgtcaggagtgcaaaattaagaatggttacaggactaaggaacatcccatccattcaatccagaggtttgtttggagccattgccggtttcattgaaggggggtggactggaatggtagatggttggtatggttatcaccatcagaatgagcaaggatctgggtatgctgcagatcaaaaaagcacacaaaatgccattaacgggattacaaacaaggtgaattctgtaattgagaaaatgaacactcaattcacagctgtgggcaaagaattcaacaaattggaaagaaggatggaaaacttaaataaaaaagttgatgatgggtttctagacatttggacatataacgcagaattgttggttctactggaaaatgaaaggactttggacttccatgactccaacgtgaagaatctgtatgagaaagtaaaaagccaattaaagaataatgccaaagaaataggaaacgggtgttttgaattctatcacaagtgtaacgatgaatgcatggagagtgtgaaaaatggaacttatgactatccaaaatattccgaagaatcaaagttgaacagggagagaattgatggagtgaaattggaatcaatgggagtctatcagattctggcgatctactcaacagtcgccagttccctggttcttttggtctccctgggggcaatcagcttctggatgtgttccaatgggtctttgcagtgtagaatatgcatctaa

SEQ ID NO: 32156 - RNA, 1701 nt, synthetic construct
  misc_feature 1..1701: note = hemagglutinin__InfluenzaA__ABP49404
  source 1..1701: mol_type = other RNA
atgaagactatcattgctttgagctacactctatgtctggttttcgctcaaaaacttcccggaaatgacaacagcacggcaacgctgtgccttgggcaccatgcagtaccaaacggaacgatagtgaaaacaatcacgaatgaccaaattgaagttactaatgctactgagctggttcagagttcctcaacaggtggaatatgcgacagtcctcatcagatccttgatggagaaaactgcacactaataggtgctctattgggagaccctcagtgtgatggcttccaaaataagaaatgggacctttttgttgaacgcagcaaagcctacagcaattgttacccttatgatgtgccggattatgcctcccttaggtcactagttgcctcatccggcacactggagtttaacaatgaaagcttcaattggactggagtcactcaaaatggaacaagctctgcttgcaaaaggagatctaataacagtttctttagtagattgaattggttgacccatttaaaattcaaatacccagcattgaacgtgactatgccaaacaatgaaaaatttgacaaattgtacatttggggggttcaccacccgggtacgtacaatgaccaaatcagcctatatgctcaagcatcaggaagaatcacagtctctaccaaaagaagccaacaaactgtaatcccgaatatcggatctagacccagggtaagggatatccccagcagaataagcatctattggacaatagtaaaaccgggagacatacttttgattaacagcacagggaatctaattgctcctcggggttacttcaaaatacgaagtgggaaaagctcaataatgagatcagatgcacctattggcaaatgcaattctgaatgcatcactccaaatggaagcattcccaatgacaaaccatttcaaaatgtaaacaggatcacatatggggcctgtcccagatatgttaagcaaaacactctgaaattggcaacagggatgcgaaatgtaccagagaaacaaactagaggcatatttggcgcaatcgcgggtttcatagaaaatggttgggagggaatggtggatggttggtacggtttcaggcatcaaaattcggaaggaataggacaagcagcagatctcaaaagcactcaagcagcaatcaaccaaatcaatgggaagctgaataggttgatcgggaaaaccaacgagaaattccatcagattgaaaaagaattctcagaagtagaagggagaattcaggacctcgagaaatatgttgaggacactaaaatagatctctggtcatacaacgcggagcttcttgttgccctggagaaccaacatacaattgatctaactgactcagaaatgaacaaactgtttgaaagaacaaagaagcaactgagggaaaatgctgaggatatgggcaatggttgtttcaaaatataccacaaatgtgacaatgcctgcatagggtcaatcagaaatggaacttatgaccatgatgtatacagagatgaagcattaaacaaccggttccagatcaaaggtgttgagctgaagtcaggatacaaagattggatcctatggatttcctttgccatatcatgttttttgctttgtgttgctttgttggggttcatcatgtgggcctgccaaaaaggcaacattagatgcaacatttgcatttga

SEQ ID NO: 32157 - RNA, 1701 nt, synthetic construct; identical to SEQ ID NO: 31154
  misc_feature 1..1701: note = hemagglutinin__InfluenzaA__ABP49415
  source 1..1701: mol_type = other RNA

SEQ ID NO: 32158 - RNA, 1701 nt, synthetic construct
  misc_feature 1..1701: note = hemagglutinin__InfluenzaA__ABP49426
  source 1..1701: mol_type = other RNA
atgaagactatcattgctttgagctacattttatgtctggttttcgctcaaaaacttccaggaaatgacaacagcacggcaacgctgtgcctggggcaccatgcagtgccaaacggaacgctagtgaaaacaatcacgaatgaccaaattgaagtgactaatgctactgagctggttcagagttcctcaacaggtggaatatgcgacagtcctcaccaaatccttgatggagaaaactgcacactaatagatgctctattgggagaccctcattgtgatggcttccaaaataaggaatgggacctttttgttgaacgcagcaaagcctacagcaactgttacccttatgatgtgccggattatgcctcccttaggtcactagttgcctcatccggcacactggagtttaacaatgaaagcttcaattggactggagtcgctcagaatggaacaagctctgcttgcaaaaggagatctaataaaagtttctttagtagattgaattggttgcaccaattaaaatacaaatacccagcactgaacgtgactatgccaaacaatgaaaaatttgacaaattgtacatttggggggttcaccacccgagtacggacagtgaccaaatcagcctatatgctcaagcaccagggagagtcacagtctctaccaaaagaagccaacaaactgtaatcccgaatatcggatctagaccctgggtaaggggtgtctccagcagaataagcatctattggacaatagtaaaaccgggagacatacttttgattaactgcacagggaatctaattgctcctcggggttacttcaaaatacgaagtgggaaaagctcaataatgaggtcagatgcatccattggcaaatgcaattctgaatgcatcactccaaatggaagcattcccaatgacaaaccatttcaaaatgtaaacaggatcacatatggggcctgtcccagatatgttaagcaaaacactctgaaattggcaacagggatgcggaatgtaccagagaaacaaactagaggcatattcggcgcaatcgcgggtttcatagaaaatggttgggagggaatggtggacggttggtacggtttcaggcatcaaaattctgagggcacaggacaagcagcagatctcaaaagcactcaagcagcaatcaaccaaatcaacgggaaactgaataggttaatcgagaaaacgaacgagaaattccatcaaattgaaaaagaattctcagaagtggaagggagaattcaggacctcgagaaatatgttgaggacactaaaatagatctctggtcgtacaacgcggagcttcttgttgccctggagaaccagcatacaattgatctaactgactcagaaatgaacaaactgtttgaaagaacgaagaagcaactgagggaaaatgctgaggatatgggcaatggttgtttcaaaatataccacaaatgtgacaatgcctgcatagggtcaatcagaaatgggacttatgaccatgatgtatacagagacgaagcattaaacaaccggttccagatcaaaggtgttgagctgaagtcaggatacaaagattggatcctatggatttcctttgccatatcatgttttttgctttgtgttgtcttgctggggttcatcatgtgggcctgccaaaaaggcaacattaggtgcaacatttgcatttga

SEQ ID NO: 32159 - RNA, 1689 nt, synthetic construct
  misc_feature 1..1689: note = hemagglutinin__InfluenzaA__ABP49437
  source 1..1689: mol_type = other RNA
atggccatcatttatctcattctcctgttcacagcagtgagaggggaccagatatgcattggataccatgccaataattccacagagaaggtcgacacaattctagagcggaacgtcactgtaactcatgccaaggacattcttgagaagacccataacggaaagttatgcaaactaaacggaatccctccacttgaactaggggactgtagcattgccggatggctccttggaaatccagaatgtgataggcttctaagtgtgccagaatggtcctatataatggagaaagaaaacccgagagacggtttgtgttatccaggcagcttcaatgattatgaagaattgaaacatctcctcagcagcgtgaaacatttcgagaaagtaaagattctgcccaaagatagatggacacagcatacaacaactggaggttcacgggcctgcgcggtgtctggtaatccatcattcttcaggaacatggtctggctgacaaagaaaggatcaaattatccggttgccaaaggatcgtacaacaatacaagcggagaacaaatgctaataatttggggggtgcaccatcccaatgatgagacagaacaaagaacattgtaccagaatgtgggaacctatgtttccgtaggcacatcaacattgaacaaaaggtcaaccccagaaatagcaacaaggcctaaagtgaatggactaggaggtagaatggaattctcttggaccctcttggatatgtgggacaccataaattttgagagtactggtaatctaattgcaccagagtatggattcaaaatatcgaaaagaggtagttcagggatcatgaaaacagaaggaacacttgagaactgtgagaccaaatgccaaactcctttgggagcaataaatacaacattgccttttcacaatgtccacccactgacaataggtgagtgccccaaatatgtaaaatcggagaagttggtcttagcaacaggactaaggaatgttccccagattgaatcaagaggattgtttggggcaatagctggttttatagaaggaggatggcaaggaatggttgatggttggtatggataccatcacagcaatgaccagggatcagggtatgcagcagacaaagaatccactcaaaaggcatttgatggaatcaccaacaaggtaaattctgtgattgaaaagatgaacacccaatttgaagctgttgggaaagaattcagtaacttagagagaagactggagaacttgaacaaaaagatggaagacgggtttctagatgtgtggacatacaatgctgagcttctagttctgatggaaaatgagaggacacttgactttcatgattctaatgtcaagaatctgtatgataaagtcagaatgcagctgagagacaacgtcaaagaactaggaaatggatgttttgaattttatcacaaatgtgatgatgaatgcatgaatagtgtgaaaaacgggacgtatgattatcccaagtatgaagaagagtctaaactaaatagaaatgaaatcaaaggggtaaaattgagcagcatgggggtttatcaaatccttgccatttatgctacagtagcaggttctctgtcactggcaatcatgatggctgggatctctttctggatgtgctccaacgggtctctgcagtgcaggatctgcatatga

SEQ ID NO: 32160 - RNA, 1701 nt, synthetic construct
  misc_feature 1..1701: note = hemagglutinin__InfluenzaA__ABP49448
  source 1..1701: mol_type = other RNA
atgaaagcaaaactactggtcctgttatgtgcactttcagctacagatgcagacacaatatgtataggctaccatgcgaacaactcaaccgacactgttgacacagtactcgaaaagaacgtgacagtgacacactctgtcaacctacttgaggacagtcacaacggaaaactatgcagactaaaaggaatagccccactacaattggggaaatgcagcattgccggatggatcttaggaaacccagaatgcgaatcactgttttctaagaaatcatggtcctacattgcagaaacaccaaactccgagaatggaacatgttacccaggatatttcgccgactatgaggaactgagggagcaattgagttcagtatcatcattcgagagattcgaaatattccccaaggaaagatcatggcccaaacacaacgtaaccagaggagtaacggcatcatgctcccataaggggaaaagcagtttttacagaaatttgctatggctgacggagaaaaatggctcgtacccaaatctgagcaagtcctatgtgaacaacaaagagaaagaagtccttgtactatggggtgttcatcacccgtctaacatagaggaccaaaagaccatctatcggaaagaaaatgcttatgtctctgtagtgtcttcaaattataacaggagattcaccccagaaatatcagaaagacccaaagtaagaggtcaagaagggagaattaactactactggactctgctggaacccggggacacaataatatttgaggcaaatggaaatctaatagcgccatggtatgctttcgcactgagtagaggctttgggtcaggaatcatcacctcaaacgcatcgatggatgaatgtgacacgaagtgtcaaacaccccagggagctataaacagtagtcttcctttccagaatgtacacccagtcacaataggagagtgcccaaaatacgtcaggagtacaaaattaaggatggttacaggactaaggaacatcccatccattcaatccagaggtctgtttggagccattgccggtttcattgaagggggatggactggaatgatagatggatggtatggttatcatcatcagaatgaacagggatctggctatgctgcggatcaaaaaagcacacaaaatgccattaacgggattacaaacaaggtgaactctgttatcgagaaaatgaacactcaattcacagctgtgggtaaagaattcaacaaattagaaaaaaggatggaaaacttaaataaaaaagttgatgatggatttctggacatttggacatataatgcagaattgttggttctactggaaaatgaaaggactttggattttcatgactcaaatgtgaagaatctgtatgagaaagtaaaaagccaattaaagaataatgccaaagaaataggaaacgggtgttttgaattctaccacaagtgtaacaatgaatgcatggaaagtgtaaaaaatggaacttatgactatccaaaatattcagaggaatcaaagttaaacagggaaaaaattgatggagtgaaattggaatcaatgggagtctatcagattctggcgatctactcaactgtcgccagttcactggtgcttttggtctccctgggggcaatcagcttctggatgtgttctaatgggtctttgcagtgcagaatatgcatctga

SEQ ID NO: 32161 - RNA, 1689 nt, synthetic construct
  misc_feature 1..1689: note = hemagglutinin__InfluenzaA__ABP49459
  source 1..1689: mol_type = other RNA
atggccatcatttatctcattctcctgttcacagcagtgagaggggaccagatatgcattggataccatgccaataattccacagagaaggtcgacacaattctagagcggaacgtcactgtgactcatgccaaggacattcttgagaagacccataacggaaagttatgcaaactaaacggaatccctccacttgaactaggggactgtagcattgccggatggctccttggaaatccagaatgtgataggcttctaagtgtgccagaatggtcctatataatggagaaagaaaacccgagagacggtttgtgttatccaggcagcttcaatgattatgaagaattgaaacatctcctcagcagcgtgaaacatttcgagaaagtaaagattctgcccaaagatagatggacacagcatacaacaactggaggttcacgggcctgcgcggtgtctggtaatccatcattcttcaggaacatggtctggctgacaaagaaaggatcaaattatccggttgccaaaggatcgtacaacaatacaagcggagaacaaatgctaataatttggggggtgcaccatcccaatgatgagacagaacaaagaacattgtaccagaatgtgggaacctatgtttccgtaggcacaccaacattgaacaaaaggtcaaccccagacatagcaacaaggcctaaagtgaatggacaaggaggtagaatggaattctcttggaccctattggatatgtgggacaccataaattttgagagtactggtaatctaattgcaccagagtatggattcaaaatatcgaaaagaggtagttcagggatcatgaaaacagaaggaacacttgggaactgtgagaccaaatgccaaactcctttgggagcaataaatacaacattgccttttcacaatgtccacccactgacaataggtgagtgccccaaatatgtaaaatcggagaagttggtcttagcaacaggactaaggaatgttccccagattgaatcaagaggattgtttggggcaatagctggttttatagaaggaggatggcaaggaatggttgatggttggtatggataccatcacagcaatgaccagggatcagggtatgcagcagacaaagaatccactcaaaaggcatttgatggaatcaccaacaaggtaaattctgtgattgaaaagatgaatacccaatttgaagctgttgggaaagaattcagtaacttagagagaagactggagaacttgaacaaaaagatggaagacgggtttctagatgtgtggacatacaatgctgagcttctagttctgatggaaaatgagaggacacttgactttcatgattctaatgtcaagaatctgtatgataaagtcagaatgcagctgagagacaacgtcaaagaactaggaaatggatgttttgaattttatcacaaatgtgatgatgaatgcatgaatagtgtgaaaaacgggacgtatgattatcccaagtatgaagaagagtctaaactaaatagaaatgaaatcaaaggggtaaaattgagcagcatgggggtttatcaaatccttgccatttatgctacagtagcaggttctctgtcactggcaatcatgatggctgggatctctttctggatgtgctccaacgggtctctgcagtgcaggatctgcatatga

SEQ ID NO: 32162 - RNA, 1689 nt, synthetic construct
  misc_feature 1..1689: note = hemagglutinin__InfluenzaA__ABP49470
  source 1..1689: mol_type = other RNA
atggccatcatttatctcattctcctgttcacagcagtgagaggagaccagatatgcattggataccatgccaataattccacagagaaggtcgacacaattctagagcggaacgtcactgtgactcatgccaaggacattcttgagaagacccataacggaaagttatgcaaactaaacggaatccctccacttgaactaggggactgtagcattgccggatggctccttggaaatccagaatgtgataggcttctaagtgtgccagaatggtcctatataatggagaaagaaaacccgagagacggtttgtgttatccaggcagcttcaatgattatgaagaattgaaacatctcctcagcagcgtgaaacatttcgagaaagtaaagattctgcccaaagatagatggacacagcatacaacaactggaggttcacgggcctgcgcggtgtctggtaatccatcattcttcaggaacatggtctggctgacaaagaaaggatcaaattatccggttgccaaaggatcgtacaacaatacaagcggagaacaaatgctaataatttggggggtgcaccatcccaatgatgagacagaacaaagaacattgtaccagaatgtgggaacctatgtttccgtaagcacatcaacattgaacaaaaggtcaaccccagacatagcaacaaggcctaaagtgaatggactaggaggtagaatggaattctcttggaccctattggatatgtgggacaccataaattttgagagtactggtaatctaattgcaccagagtatggattcaaaatatcgaaaagaggtagttcagggatcatgaaaacagaaggaacacttgggaactgtgagaccaaatgccaaactcctttgggagcaataaatacaacattgccttttcacaatgtccacccactgacaataggtgagtgccccaaatatgtaaaatcggagaagttggtcttagcaacaggactaaggaatgttccccagattgaatcaagaggattgtttggggcaatagctggttttatagaaggaggatggcaaggaatggttgatggttggtatggataccatcacagcaatgaccagggatcagggtatgcagcagacaaagaatccactcaaaaggcatttgatggaatcaccaacaaggtaaattctgtgattgaaaagatgaacacccaatttgaagctgttgggaaagaattcagtaacttagagagaagactggagaacttgaacaaaaagatggaagacgggtttctagatgtgtggacatacaatgctgagcttctagttctgatggaaaatgagaggacacttgactttcatgattctaatgtcaagaatctgtatgataaagtcagaatgcagctgagagacaacgtcaaagaactaggaaatggatgttttgaattttatcacaaatgtgatgatgaatgcatgaatagtgtgaaaaacgggacgtatgattatcccaagtatgaagaagagtctaaactaaatagaaatgaaatcaaaggggtaaaattgagcagcatgggggtttatcaaatccttgccatttatgctacagtagcaggttctctgtcactggcaatcatgatggctgggatctctttctggatgtgctccaacgggtctctgcagtgcaggatctgcatatga

SEQ ID NO: 32163 - RNA, 1701 nt, synthetic construct
  misc_feature 1..1701: note = hemagglutinin__InfluenzaA__ABP49492
  source 1..1701: mol_type = other RNA
atgaagactatcattgctttgagctacattttctgtctggtttttgcccaaggccttccaggaaatgacaacagcacagcaactctgtgcctgggacatcatgcggtgccaaacggaacgctagtgaaaacaatcacgaatgatcagattgaagtgactaatgctactgaactggttcagagttcctcaacgggtaaaatatgcgacaatcctcatcgaatccttgatggaataaactgcacactgatagatgctctattgggggaccctcattgtgatggctttcaaaatgagaaatgggaccttttcgttgaacgcagcaaagctttcagcaactgttacccttatgatgtgccagattatgcctcccttaggtcactagttgcctcgtcaggcactctggagtttatcaatgaaggcttcaattggactggggtcactcagaatgggggaagcagttcttgcaaaaggggacctgataacggttttttcagtagactgaactggttgtacaaatcaggaagcacatatccagtgcagaacgtgaccatgccaaacaatgacaactctgacaaactatacatttggggggttcaccacccgagcacggacaaagaacaaaccgacctatatgttcaagcatcagggaaagtcacagtctccaccaagagaagccagcaaactgtaatcccgaatgtcgggtctagaccctgggtaaggggtctgtctagtagagtaagcatctattggacaatagttaaaccgggagacatactggtaattaatagtaatggaaacctaattgctcctcggggttacttcaaaatgcgcactgggaaaagctcaataatgaggtcagatgcacctattggcacctgcagctctgaatgcatcactccaaatggaagcattcccaatgacaagccctttcaaaacgtaaacaagatcacatatggggcatgtcccaagtatgttaagcaaaacactctgaagttggcaacagggatgcggaatgtaccagagaaacaaactagaggcatattcggcgcaatagcaggtttcatagaaaatggttgggagggaatgatagacggttggtacggtttcaggcatcaaaattctgagggcacaggacaagcagcagatcttaaaagcactcaagcagccatcgaccaaatcaatgggaaactgaatagggtaatcgagaagacgaacgagaaattccatcaaatcgaaaaggaattctcagaagtagaagggagaattcaggacctcgagaaatacgttgaagacactaaaatagatctctggtcttacaatgcggagcttcttgtcgctctggagaaccaacatacaattgatctgactgactcggaaatgaacaaactgtttgaaaaaacaaggaggcaactgagggaaaatgctgaggacatgggcaatggttgcttcaaaatataccacaaatgtgacaatgcttgcatagggtcaatcagaaatgggacttatgaccatgatgtatacagagacgaagcattaaacaaccggtttcagatcaaaggtgttgaactgaagtcaggatacaaagactggatcctgtggatttcctttgccatatcatgctttttgctttgtgttgttttgctggggttcatcatgtgggcctgccagaaaggcaacattaggtgcaacatttgcatttga

SEQ ID NO: 32164 - RNA, 1701 nt, synthetic construct
  misc_feature 1..1701: note = hemagglutinin__InfluenzaA__ABP49503
  source 1..1701: mol_type = other RNA
atgaagaccatcattgctttgagctacattttctgtctggctctcggccaagaccttccaggaaatgacaacagcacagcaacgctgtgcctgggacatcatgcggtgccaaacggaacactagtgaaaacaatcacagatgatcagattgaagtgactaatgctactgagctagttcagagctcctcaacggggaaaatatgcaacaatcctcatcgaatccttgatggaataaactgcacactgatagatgctctattgggggaccctcattgtgatgtttttcaagatgagacatgggaccttttcgttgaacgcagcaaagctttcagcaactgttacccttatgatgtgccagattatgcctcccttaggtcactagttgcctcgtcaggcactctggagtttatcactgagggtttcacttggactggggtcactcagaatgggggaagcaatgcttgcaaaaggggacctggtagcggttttttcagtagactgaactggttgaccaaatcaggaagcacatatccagtgctgaacgtgactatgccaaacaatgacaattttgacaaactatacatttggggggttcaccacccgagcacgaaccaagaacaaaccagcctgtatgttcaagcatcagggagagtcacagtctctaccaggagaagccagcaaactataatcccgaatatcgggtccagaccctgggtaaggggtctgtctagtagaataagcatctattggacaatagttaagccgggagacgtactggtaattaatagtaatggaaacctaatcgctcctcggggttatttcaaaatgcgcactgggaaaagctcaataatgaggtcagatgcacctattgatacctgtatttctgaatgcatcactccaaatggaagcattcccaatgacaagccctttcaaaacgtaaacaagatcacatatggagcatgccccaagtatgttaagcaaaacaccctgaagttggcaacagggatgcggaatgtaccagagaaacaaactagaggcctattcggcgcaatagcaggcttcatagaaaatggttgggagggaatgatagacggttggtacggtttcaggcatcaaaattctgagggcacaggacaagcagcagatcttaaaagcactcaagcagccatcgaccaaatcaatgggaaattgaacagggtaatcgagaagacgaacgagaaattccatcaaatcgaaaaggaattctcagaagtagaagggagaattcaggacctcgagaaatacgttgaagacactaaaatagatctctggtcttacaatgcggagcttcttgtcgctctggagaatcaacatacaattgacctgactgactcggaaatgaacaagctgtttgaaaaaacaaggaggcaactgagggaaaatgctgaagacatgggcaatggttgcttcaaaatataccacaaatgtgacaacgcttgcatagagtcaatcagaaatgggacttatgaccatgatgtatacagagacgaagcattaaacaaccggtttcagatcaaaggtgttgaactgaagtctggatacaaagactggatcctgtggatttcctttgccatatcatgctttttgctttgtgttgttttgctggggttcatcatgtgggcctgccagagaggcaacattaggtgcaacatttgcatttga

SEQ ID NO: 32165 - RNA, 1701 nt, synthetic construct
  misc_feature 1..1701: note = hemagglutinin__InfluenzaA__ABP49514
  source 1..1701: mol_type = other RNA
atgaagaccatcattgctttgagctacattttctatctggctctcggccaagaccttccaggaaatgacaacagcacagcaacgctgtgcctgggacatcatgcggtgccaaacggaacactagtgaaaacaatcacaaatgatcagattgaagtgactaatgctactgagctagttcagagctcctcaacggggaaaatatgcaacaatcctcatcgaatccttgatggaatagactgcacactgatagatgctctattgggggaccctcattgtgatgtttttcaaaatgagacatgggaccttttcgttgaacgcagcaaagctttcagcaactgttacccttatgatgtgccagattatgcctcccttaggtcactagttgcctcgtcaggcactctggagtttatcactgagggtttcacttggactggggtcactcagaatgggggaagcaatgcttgcaaaaggggacctggtagcggttttttcagtagactgaactggttgaccaaatcaggaagcacatatccagtgctgaacgtgactatgccaaacaatgacaattttgacaaactatacatttggggggttcaccacccgagcacgaaccaagaacaaaccagcctgtatgttcaagcatcagggagagtcacagtctctaccaggagaagccagcaaactataatcccgaatatcgggtccagaccctgggtaaggggtctgtctagtagaataagcatctattggacaatagttaagccgggagacgtactggtaattaatagtaatgggaacctaatcgctcctcggggttatttcaaaatgcgcactgggaaaagctcaataatgaggtcagatgcacctattgatacctgtatttctgaatgcatcactccaaatggaagcattcccaatgacaagccctttcaaaacgtaaacaagatcacatatggagcatgccccaagtatgttaagcaaaacaccctgaagttggcaacagggatgcggaatgtaccagagaaacaaactagaggcctattcggtgcaatagcaggtttcatagaaaatggttgggagggaatgatagacggttggtacggtttcaggcatcaaaattctgagggcacaggacaagcagcagatcttaaaagcactcaagcagccatcgaccaaatcaatgggaaattgaacagggtaatcgagaagacgaacgagaaattccatcaaatcgaaaaggaattctcagaagtagaagggagaattcaggacctcgagaaatacgttgaagacactaaaatagatctctggtcttacaatgcggagcttcttgtcgctctggagaatcaacatacaattgacctgactgactcggaaatgaacaagctgtttgaaaaaacaaggaggcaactgagggaaaatgctgaagacatgggcaatggttgcttcaaaatataccacaaatgtgacaacgcttgcatagagtcaatcagaaatgggacttatgaccatgatgtatacagagacgaagcattaaacaaccggtttcagatcaaaggtgttgaactgaagtctggatacaaagactggatcctgtggatttcctttgccatatcatgctttttgctttgtgttgttttgctgggattcatcatgtgggcctgccagagaggcaacattaggtgcaacatttgcatttga

SEQ ID NO: 32166 - RNA, 1701 nt, synthetic construct
  misc_feature 1..1701: note = hemagglutinin__InfluenzaA__ABQ01311
  source 1..1701: mol_type = other RNA
atgaaagcaagactactgatcctgttatgtgcactttcagctacagatgcagacacaatatgtataggctaccatgcgaacaattcaaccgacactgttgacacagtactcgaaaagaatgtgacagtgacacactctgtaaacctactcgaagacagccacaacgggaaattatgcagattaaaaggaatagccccactacaattggggaaatgtaacattgccggatggatcttgggaaacccagaatgcgaatcattgctctctaatagatcatggtcctacattgcagaaacaccaaactctgagaatggaacatgttacccaggagatttcgccgactatgaggaactgagggagcaattgagctcagtatcatcattcgagagattcgaaatattccccaaggaaagatcatggcccaaacacaacataaccagaggagtaacggcagcatgctcccacgcgaagaaaagcagtttttacaaaaatttgctctggctgacggaggcaaatggctcatacccaaatctgagcaagtcctatgtgaacaacaaagagaaagaagtccttgtgctatggggtgttcatcacccgtctaaaatagaggatcaaaggaccctctatcggaaagaaaatgcttatgtctctgtggtgtcttcaaattataacaggagattcaccccggaaatagcagaaagacccaaagtaagaggtcaagcagggagaatgaactattactggactttgctagaacccggagacaaaataatatttgaggcaaatggaaacctaatagcgccatggtatgctttcgcactgagtagaggccttggatcaggaatcatcacctcaaacgcatcaatggatgaatgtgacacgaagtgtcaaacaccccagggagctataaacagtagtctcccttttcagaacatacacccagtcacaataggagagtgcccaaaatatgtcaggagtaccaaattgaggatggttacaggactaaggaacatcccatccattcaatccagaggtctgtttggagccattgccggtttcattgaagggggatggactggaatggtagatggatggtatggttaccatcatcaaaatgaacagggatctggctatgctgcggatcaaaaaagcacacaaaatgccattaacgggattacaaataaggtgaactctgttatcgagaaaatgaacactcaattcacagctgtgggtaaagaattcaacaaattggaaaaaagaatggaaaacttaaataaaaaagttgatgatggatttctggacatttggacatataatgcagaattgttggttctactggaaaatgaaaggactttggatttccatgactcaaatgtgaagaatctgtatgagaaagtaaaaaaccaattgagaaataatgcaaaggaaataggaaacgggtgttttgagttctaccacaagtgtgacaatgaatgcatggaaagtgtaaaaaatggaacttatgattacccaaagtattcagaggaatcaaagttaaacagggaaaaaattgatggagtgaaattggaatcaatgggggtctatcagattctggcgatctactcaactgtcgccagttcactggtgcttctggtctccctgggggcaatcagcttctggatgtgttccaatgggtctttgcaatgcagaatatgcatctga

SEQ ID NO: 32167 - RNA, 1701 nt, synthetic construct
  misc_feature 1..1701: note = hemagglutinin__InfluenzaA__ABQ01322
  source 1..1701: mol_type = other RNA
atgaaagcaaaactactggtcctgttatgtgcactttcagctacagatgcagacacaatatgtataggctaccatgcgaacaactcaaccgacactgttgacacagtactcgaaaagaacgtgacagtgacacactctgtcaacctacttgaggacagtcacaacggaaaactatgcagactaaaaggaatagctccactacatttggggaaatgcagcattgccggatggatattaggaaacccagaatgcgaatcactgttttctaagaaatcatggtcctacattgcagaaacaccaaactccgagaatggaacatgttacccaggatatttcgccgactatgaggaactgagggagcaattgagttcagtatcatcattcgagagattcgaaatattccccaaggaaagatcatggcccaaacacaacgtaaccagaggagtaacggcagcatgctcccataaggggaaaagcagtttttacagaaatttgctatggctgacggagaaaaatggctcgtacccaaatctgagcaagtcctatgtgaacaacaaagagaaagaagtccttgtactatggggtgttcatcacccgtctaacatagaggaccaaaagaccatctatcggaaagaaaatgcttatgtctctgtagtgtcttcaaattataacaggagattcaccccagaaatagcaaaaagacccaaagtaagaggtcaagaagggagaattaactactactggactctgctggaacccggggacacaataatatttgaggcaaatggaaatctaatagcgccatggtatgctttcgcactgagtagaggctttgggtcaggaatcatcacctcaaacgcatcgatggatgaatgtgacgcgaagtgtcaaacaccccagggagctataaacagtagccttcctttccagaatgtacacccagtcacaataggagagtgcccaaaatacgtcaggagtacaaaattaaggatggttacaggactaagaaacatcccatccattcaatccagaggtctgtttggagccattgccggtttcattgaagggggatggactggaatgatagatggatggtatggttatcatcatcagaatgaacagggatctggctatgctgcggatcaaaaaagcacacaaaatgccattaacgggattacaaacaaggtgaactctgttatcgagaaaatgaacactcaattcacagctgtgggtaaagaattcaacaaattagaaaaaaggatggaaaacttaaataaaaaagttgatgatggatttctggacatttggacatataatgcagaattgttggttctactggaaaatgaaaggactttggattttcatgactcaaatgtgaagaatctgtatgagaaagtaaaaagccaattaaagaataatgccaaagaaataggaaacgggtgttttgaattctaccacaagtgtaacaatgaatgcatggaaagtgtaaaaaatggaacttatgactatccaaaatattcagaggaatcaaagttaaacagggaaaaaattgatggagtgaagttggaatcaatgggagtctatcagattctggcgatctactcaactgtcgccagttcactggtgcttttggtctccctgggggcaatcagcttctggatgtgttctaatgggtctttgcagtgcagaatatgcatctga

SEQ ID NO: 32168 - RNA, 1701 nt, synthetic construct
  misc_feature 1..1701: note = hemagglutinin__InfluenzaA__ABQ01333
  source 1..1701: mol_type = other RNA
atgaagactatcattgctttgagctacattttatgtctggttttcgctcaaaaacttcccggaaatgacaacagcacggcaacgctgtgcctggggcaccatgcagtgccaaacggaacgctagtgaaaacaatcacgaatgaccaaattgaagtgactaatgctactgagctggttcagagttcctcaacaggtggaatatgcgacagtcctcaccaaatccttgatggagaaaactgcacactaatagatgctctattgggagaccctcattgtgatggcttccaaaataaggaatgggacctttttgttgaacgcagcaaagcctacagcaactgttacccttatgatgtgccggattatgcctcccttaggtcactagttgcctcatccggcacactggagtttaacaatgaaagcttcaattggactggagtcgctcagaatggaacaagctctgcttgcaaaaggagatctaataaaagtttctttagtagattgaattggttgcaccaattaaaatacaaatacccagcactgaacgtgactatgccaaacaatgaaaaatttgacaaattgtacatttggggggttcaccacccgagtacggacagtgaccaaatcagcctatatgctcaagcaccagggagagtcacagtctctaccaaaagaagccaacaaactgtaatcccgaatatcggatctagaccctgggtaaggggtgtctccagcagaataagcatctattggacaatagtaaaaccgggagacatacttttgattaactgcacagggaatctaattgctcctcggggttacttcaaaatacgaagtgggaaaagctcaataatgaggtcagatgcatccattggcaaatgcaattctgaatgcatcactccaaatggaagcattcccaatgacaaaccatttcaaaatgtaaacaggatcacatatggggcctgtcccagatatgttaagcaaaacactctgaaattggcaacagggatgcggaatgtaccagagaaacaaactagaggcatattcggcgcaatcgcgggtttcatagaaaatggttgggagggaatggtggacggttggtacggtttcaggcatcaaaattccgagggcacaggacaagcagcagatctcaaaagcactcaagcagcaatcaaccaaatcaacgggaaactgaataggttaatcgagaaaacgaacgagaaattccatcaaattgaaaaagaattctcagaagtggaagggagaattcaggacctcgagaaatatgttgaggacactaaaatagatctctggtcgtacaacgcggagcttcttgttgccctggagaaccagcatacaattgatctaactgactcagaaatgaacaaactgtttgaaagaacaaagaagcaactgagggaaaatgctgaggatatgggcaatggttgtttcaaaatataccacaaatgtgacaatgcctgcatagggtcaatcagaaatgggacttatgaccatgatgtatacagagacgaagcattaaacaaccggttccagatcaaaggtgttgagctgaagtcaggatacaaagattggatcctatggatttcctttgccatatcatgttttttgctttgtgttgtcttgctggggttcatcatgtgggcctgccaaaaaggcaacattaggtgcaacatttgcatttga

SEQ ID NO: 32169 - RNA, 1701 nt, synthetic construct
  misc_feature 1..1701: note = hemagglutinin__InfluenzaA__ABQ01344
  source 1..1701: mol_type = other RNA
atgaagactatcattgctttgagctacattttatgtctggttttcgctcaaaaacttcccggaaatgacaacagcacggcaacgctgtgcctggggcaccatgcagtgccaaacggaacgctagtgaaaacaatcacaaatgaccaaattgaagtgactaatgctactgagctggttcagagttcctcaacaggtggaatatgcgacagtcctcaccaaatccttgatggagaaaactgcacactaatagatgctctattgggagaccctcattgtgatggcttccaaaataaggaatgggacctttttgttgaacgcagcaaagcctacagcaactgttacccttatgatgtgccggattatgcctcccttaggtcactagttgcctcatccggcacactggagtttaacaatgaaagcttcaattggactggagtcgctcagaatggaacaagctctgcttgcaaaaggagatctaataaaagtttctttagtagattgaattggttgcaccaattaaaatacaaatacccagcactgaacgtgactatgccaaacaatgaaaaatttgacaaattgtacatttggggggttcaccacccgagtacggacagtgaccaaatcagcctatatgctcaagcaccagggagagtcacagtctctaccaaaagaagccaacaaactgtaatcccgaatatcggatctagaccctgggtaaggggtgtctccagcagaataagcatctattggacaatagtaaaaccgggagacatacttttgattaactgcacagggaatctaattgctcctcggggttacttcaaaatacgaagtgggaaaagctcaataatgaggtcagatgcatccattggcaaatgcaattctgaatgcatcactccaaatggaagcattcccaatgacaaaccatttcaaaatgtaaacaggatcacatatggggcctgtcccagatatgttaagcaaaacactctgaaattggcaacagggatgcggaatgtaccagagaaacaaactagaggcatattcggcgcaatcgcgggtttcatagaaaatggttgggagggaatggtggacggttggtacggtttcaggcatcaaaattctgagggcacaggacaagcagcagatctcaaaagcactcaagcagcaatcaaccaaatcaacgggaaactgaataggttaatcgggaaaacgaacgagaaattccatcaaattgaaaaagaattctcagaagtggaagggagaattcaggacctcgagaaatatgttgaggacactaaaatagatctctggtcgtacaacgcggagcttcttgttgccctggagaaccagcatacaattgatctaactgactcagaaatgaacaaactgtttgaaagaacaaagaagcaactgagggaaaatgctgaggatatgggcaatggttgtttcaaaatataccacaaatgtgacaatgcctgcatagggtcaatcagaaatgggacttatgaccatgatgtatacagagacgaagcattaaacaaccggttccagatcaaaggtgttgagctgaagtcaggatacaaagattggatcctatggatttcctttgccatatcatgttttttgctttgtgttgtcttgctggggttcatcatgtgggcctgccaaaaaggcaacattaggtgcaacatttgcatttga

SEQ ID NO: 32170 - RNA, 1689 nt, synthetic construct
  misc_feature 1..1689: note = hemagglutinin__InfluenzaA__ABQ01355
  source 1..1689: mol_type = other RNA
atggccatcatttatctcattctcctgttcacagcagtgagaggggaccaaatatgcattggataccatgccaataattccacagagaaggtcgacacaattctagagcggaacgtcactgtgactcatgccaaggacattcttgagaagacccataacgggaagttatgcaaactaaacggaatccctccacttgaactaggggactgtagcattgccggatggctccttggaaatccagaatgtgataggcttctaagagtgccagaatggtcctatataatggagaaagaaaacccgagagacggtttgtgttatccaggcagtttcaatgattatgaagaattgaaacatctcctcagcagcgtgaaacatttcgagaaagtgaggattttgcccaaagatagatggacacagcatacaacaactggaggttcacgggcctgcgcggtgtctggtaatccatcattcttcaggaacatgatctggctgacaaagaaaggatcaaattatccggttgccaaaggatcgtacaacaacacaagcggagaacaaatgctaataatttggggggtgcaccatcccattgatgaaacagaacaaagaacattgtaccagaatgtggaaacctatgtttccgtagtcacatcaacattgaacaaaaggtcaaccccgaaaatagcaacaaggcctaaagtgaatggactaggaggtagaatggaattctcttggaccctattggatatgtgggacaccataaattttgagagtactggtaatctaattgctccagagtatggattcaaaatatcgaaaagaggcagttcagggatcatgaaaacagaaggaacacttgagaactgtgagaccaaatgccaaactcctttgggagcaataaatacaacattgccttttcacaatgtccacccactgacaataggtgagtgccccaaatatgtaaaatcggagaagttggtcttagcaacaggactaaggaatgttccccagattgaatcaagaggattgtttggggcaatagctggctttatagaaggaggatggcaaggaatggttgatggttggtatggataccatcacagcaatgaccagggatcagggtatgcagcagacaaagaatccactcaaagggcatttgatggaatcactaacaaggtaaattctgtgattgagaagatgaacacccaatttgaagctgttgggaaagaattcagtaacttagagagaagactggagaacttgaacaaaaagatggaagacgggtttctagatgtgtggacatacaatgctgagcttctagttctgatggaaaatgagaggacacttgactttcatgattctaatgtcaagaatctgtatgataaagtcagaatgcagctgagagacaacgtcaaagaactaggaaatggatgttttgaattttatcacaaatgtgatgatgagtgcatgaatagtgtgaaaaacgggacgtatgattatcccaagtatgaagaagagtctaaactaaatagaaatgaaatcaaaggggtaaaattgagcagcatgggggtttatcaaatccttgccatttatgctacagtagcaggttctctgtcactggcaatcatgatggctgggatctctttctggatgtgctccaacgggtccctgcagtgcaggatctgcatatga

SEQ ID NO: 32171 - RNA, 1701 nt, synthetic construct
  misc_feature 1..1701: note = hemagglutinin__InfluenzaA__ABQ01366
  source 1..1701: mol_type = other RNA
atgaagactatcattgctttgagctacattttctgtctggttttcgcccaagaccttccaggaaatgacaacagcacagcaacgctgtgcctgggacatcatgcggtgccaaacggaacgctagtgaaaacaatcacgaatgatcagattgaagtgactaatgctactgaactggttcagagttcctcaacgggtaaaatatgcgacaatcctcatcgaatccttgatggaataaactgcacactgatagatgctctattgggggaccctcattgtgatggctttcaaaatgagaaatgggaccttttcgttgaacgcagcaaagctttcagcaactgttacccttatgatgtgccagattatgcctcccttaggtcactagttgcctcgtcaggcactctggagtttatcaatgaaggcttcaattggactggggtcactcagaatgggggaagcagtgcttgcaaaaggggacctgataacggttttttcagtagactgaactggttgtacaaatcaggaagcacatatccagtgcagaacgtgaccatgacaaacaatgacaattctgacaaactatacatttggggggtccaccacccgagcacggacaaagaacaaaccgacctatatgttcaagcatcagggaaagtcacagtctccaccaagagaagccagcaaactataatcccgaatgtcgggtctagaccctgggtaaggggtctgtctagtagagtaagcatctattggacaatagttaaaccgggagacatactggtaattaatagtaatggaaacctaattgctcctcggggttacttcaaaatgcgcactgggaaaagctcaataatgaggtcagatgcacctattggcacctgcagctctgaatgcatcactccaaatggaagcattcccaatgacaagccctttcaaaacgtaaacaagatcacatatggggcatgtcccaagtatgttaagcaaaacactctgaagttggcaacagggatgcggaatgtaccagagaaacaaactagaggcatattcggcgcaatagcaggtttcatagaaaatggttgggagggaatgatagacggttggtacggtttcaggcatcaaaattctgagggcacaggacaagcagcagatcttaaaagcactcaagcagccatcgaccaaatcaatgggaaactgaatagggtaatcgagaagacgaacgagaaattccatcaaatcgaaaaggaattctcagaagtagaagggagaattcaggacctcgagaaatacgttgaagacactaaaatagatctctggtcttacaatgcggagcttcttgtcgctctggagaaccaacatacaattgatctgactgactcggaaatgaacaaactgtttgaaaaaacaaggaggcaactgagagaaaatgctgaggacatgggcaatggttgcttcaaaatataccacaaatgtgacaatgcttgcatagggtcaatcagaaatgggacttatgaccatgatgtatacagagacgaagcattaaacaaccggtttcagatcaaaggtgttgaactgaagtcaggatacaaagactggatcctgtggatttcctttgccatatcatgctttttgctttgtgttgttttgctggggttcataatgtgggcctgccagaaaggcaacattaggtgcaacatttgcatttga

SEQ ID NO: 32172 - RNA, 1701 nt, synthetic construct; identical to SEQ ID NO: 31937
  misc_feature 1..1701: note = hemagglutinin__InfluenzaA__ABQ44383
  source 1..1701: mol_type = other RNA

SEQ ID NO: 32173 - RNA, 1701 nt, synthetic construct; identical to SEQ ID NO: 31161
  misc_feature 1..1701: note = hemagglutinin__InfluenzaA__ABQ44405
  source 1..1701: mol_type = other RNA

SEQ ID NO: 32174 - RNA, 1701 nt, synthetic construct
  misc_feature 1..1701: note = hemagglutinin__InfluenzaA__ABQ44416
  source 1..1701: mol_type = other RNA
atgaaagcaaaactactagtcctgttatgtgcatttacagctacagatgcagacacaatatgtataggctaccatgcgaacaactcaaccgacactgttgacacagtacttgaaaagaacgtgacagtgacacactctgtcaacctacttgaggacagtcacaacggaaaactatgtcgactaaaaggaatagccccactacaattgggtaattgcagtattgccggatggattttaggaaacccagaatgcgaatcactgttttctaagaaatcatggtcctacattgcagaaacaccaaactccgagaatggaacatgttacccagggtatttcgctgactatgaggaactgagggagcaattgagttcagtatcatcattcgagagattcgaaatattccccaaagaaagctcatggcccaaccacaccgtaaccaaaggagtaacggcatcatgctcccataaggggaaaagcagtttttacagaaatttgctatggctgacggagaagaatggctcgtacccaaatctgagcaagtcctatgtgaacaacaaagagaaagaagtccttgtactatggggtgttcatcacccgtctaacataggggaccaaagggccatctatcatacagaaaatgcttatgtctctgtagtgtcttcacattataacaggagattcaccccagaaatagcaaaaagacccaaagtaagagatcaagaaggaagaattaactactactggactctgctggaacccgaggacacaataatatttgaggcaaatggaaatctaatagcgccatggtatgcttttgcactgagtagaggctttgggtcaggaatcatcacctcaaacgcatcaatggatgaatgtgacgcgaagtgtcaaacaccccagggagctataaacagtagtcttcctttccagaatgtacacccagtcacaataggagagtgcccaaagtatgtcaggagtacaaaattaagaatggttacaggactaaggaacatcccatccattcaatccagaggtttgtttggagccattgccggtttcattgaaggggggtggactggaatgatagatggatggtatggttatcatcatcagaatgaacaaggatctggctatgctgcggatcaaaaaagcacacaaaatgccattaacgggattacaaacaaggtgaattctgtaatcgagaaaatgaacactcaattcacagctgtgggcaaagaattcaacaaattagaaagaaggatggaaaacttaaataaaaaagttgatgatgggtttctggacatttggacatataatgcagaattgttggttctactggaaaatgaaaggactttggattttcatgactcaaatgtgaagaatctgtatgagaaagtaaaaagccaattaaagaacaatgccaaagaaataggaaacgggtgttttgaattctaccacaagtgtaacaatgaatgcatggaaagtgtgaaaaatggaacttatgactatccaaaatattccgaggaatcaaagttaaacagggaaaaaattgatggagtgaaattggaatcaatgggagtctatcagattctggcgatctactcaactgtcgccagttcactggtgcttttggtctccctgggggcaatcagcttctggatgtgttctaatgggtctttgcagtgtagaatatgcatctga

SEQ ID NO: 32175 - RNA, 1701 nt, synthetic construct; identical to SEQ ID NO: 30763
  misc_feature 1..1701: note = hemagglutinin__InfluenzaA__ABQ44427
  source 1..1701: mol_type = other RNA

SEQ ID NO: 32176 - RNA, 1689 nt, synthetic construct
  misc_feature 1..1689: note = hemagglutinin__InfluenzaA__ABQ44438
  source 1..1689: mol_type = other RNA
atggccatcatttatttcatactcctgttcacagcagtgaggggggaccagatatgcattggataccatgccaataattccacagaaaaggtcgacacaattctagagcggaatgtcactgtgactcatgccaaggacatccttgagaagacccataacggaaagctatgcaaactaaacggaatccctccacttgaactaggggattgtagcattaccggatggctccttggaaatccagaatgtgataggcttctaagggtgccagaatggtcctatataatggagaaagaaaacccgagatacagtttgtgttatccaggcagcttcaatgactatgaagaattgaaacatctcctcagcagcgtaaaacacttcgagaaagtaaggattctgcccaaagatggatggacacaacatacaacatctggaggttcaaaggcctgcgcagtgtcaggtaaatcatcattcttcaggaacatggtctggctgacaaagaaaggaccaaattatccggttgccaaaagatcgtacaacaatacgagcggagagcaaatgctaataatttggggagtgcaccatcctaatgatgaggcagaacaaagtgcattgtaccagaaagtgggaacctatgtttccgcaagcacatcaacattgaacaaaaggtcaaccccagaaatagcagcaaggcctgaagtgaatggactaggaagtagaatggaattctcttggaccctattggatgtgtgggacaccataaattttgagagcactggtaatctagttgcaccagagtatggattcaaaatatcgaaaagaggtagttcaggaatcatgaagacagaaggaacacttggaaactgtgagaccaaatgccaaactcctttgggagcaataaatacaacactaccttttcacaatgtccacccactgacaataggtgaatgccccaaatatgtaaaatcggagaaattggtcttagcaacaggactaaggaatgttcctcagattgaatcaagaggattgtttggggcaatagctggctttatagaaggaggatggcaaggaatggttgatggttggtatggataccatcacagcaatgaccagggatcagggtatgcagcagacaaagaatccactcaaaaggcatttgacagaatcaccaacaaggtaaattctgtgattgaaaagatgaacactcaatttgaagctgttgggaaagaattcagtaacttagagaaaagactggaaaacttgaacaaaaagatggaagacgggtttctagatgtgtggacatacaatgctgagcttctagttctgatggaaaatgagaggacacttgactttcatgattctaatgtcaagaacctgtataataaagtcagaatgcagctgagagacaacgtcaaagaactaggaaatggatgttttgaattttatcacaaatgtgacgatgaatgcatgagtagtgtgaaaaacgggacgtatgattatcccaagtatgaagaagaatctaaactaaagagaaatgaaatcaaaggggtaaaattgagcagcatgggggtttaccaaattcttgccatttatgctacagttgcaggttctctgtcactggcaatcatgatagctgggatctctttatggatgtgctccaacgggtctctgcagtgcagaatctgcatatga

SEQ ID NO: 32177 - RNA, 1689 nt, synthetic construct
  misc_feature 1..1689: note = hemagglutinin__InfluenzaA__ABQ44460
  source 1..1689: mol_type = other RNA
atggccatcatttatctcattctcctgttcacagcagtgagaggggaccagatatgcattggataccatgccaataattccacagagaaggtcgacacaattctagagcggaacgtcactgtgactcatgccaaggacattcttgagaagacccataacggaaagttatgcaaactaaacggaatccctccacttgaactaggggactgtagcattgccggatggctccttggaaatccagaatgtgataggcttctaagtgtgccagaatggtcctatataatggagaaagaaaacccgagagacggtttgtgttatccaggcagcttcaatgattatgaagaattgaaacatctcctcagcagcgtgaaacatttcgagaaagtaaagattctgcccaaagatagatggacacagcatacaacaactggaggttcacgggcctgcgcggtgtctggtaatccatcattcttcaggaacatgatctggctgacaaagaaaggatcaaattatccggttgccaaaggatcgtacaacaatacaagcggagaacaaatgctaataatttggggggtgcaccatcccaatgatgagacagaacaaagaacattgtaccagaatgtgggaacctatgtttccgtaggcacatcaacattgaacaaaaggtcaaccccagacatagcaacaaggcctaaagtgaatggactaggaagtagaatggaattctcttggaccctattggatatgtgggacaccataaattttgagagtactggtaatctaattgcaccagagtatggattcaaaatatcgaaaagaggtagttcagggatcatgaaaacagaaggaacacttgggaactgtgagaccaaatgccaaactcctttgggagcaataaatacaacattgccttttcacaatgtccacccactgacaataggtgagtgccccaaatatgtaaaatcggagaagttggtcttagcaacaggactaaggaatgttccccagattgaatcaagaggattgtttggggcaatagctggttttatagaaggaggatggcaaggaatggttgatggttggtatggataccatcacagcaatgaccagggatcagggtatgcagcggacaaagaatccactcaaaaggcatttgatggaatcaccaacaaggtaaattctgtgattgaaaagatgaacacccaatttgaagctgttgggaaagaattcagtaacttagagagaagactggagaacttgaacaaaaagatggaagacgggtttctagatgtgtggacatacaatgctgagcttctagttctgatggaaaatgagaggacacttgactttcatgattctaatgtcaagaatctgtatgataaagtcagaatgcagctgagagacaacgtcaaagaactaggaaatggatgttttgaattttatcacaaatgtgatgatgaatgcatgaatagtgtgaaaaacgggacgtatgattatcccaagtatgaagaagagtctaaactaaatagaaatgaaatcaaaggggtaaaattgagcagcatgggggtttatcaaatccttgccatttatgctacagtagcaggttctctgtcactggcaatcatgatggctgggatctctttctggatgtgctccaacgggtctctgcagtgcaggatctgcatatga

SEQ ID NO: 32178 - RNA, 1701 nt, synthetic construct
  misc_feature 1..1701: note = hemagglutinin__InfluenzaA__ABQ44471
  source 1..1701: mol_type = other RNA
atgaaagcaagactactgatcctgttatgtgcactttcagctacagatgcagacacaatatgtataggctaccatgcgaacaattcaaccgacactgttgacacagtactcgaaaagaatgtgacagtgacacactctgtaaacctactcgaagacagccacaacgggaaattatgcagattaaaaggaatagccccactacaattggggaaatgtaacattgccggatggatcttgggaaacccagaatgcgaatcattgctctctaatagatcatggtcctacattgcagaaacaccaaactctgagaatggaacatgttacccaggagatttcgccgactatgaggaactgagggagcaattgagctcagtatcatcattcgagagattcgaaatattccccaaggaaagatcatggcccaaacacaacataaccagaggagtaacggcagcatgctcccacgcgaagaaaagcagtttttacaaaaatttgctctggctgacggaggcaaatggctcatacccaaatctgagcaagtcctatgtgaacaacaaagagaaagaagtccttgtgctatggggtgttcatcacccgtctaacatagaggatcaaaggaccctctatcggaaagaaaatgcttatgtctctgtggtgtcttcaaattataacaggagattcaccccggaaatagcagaaagacccaaagtaagaggtcaagcagggagaatgaactattactggactctgctagaacccggagacaaaataatatttgaggcaaatggaaacctaatagcgccatggtatgctttcgcactgagtagaggccttggatcaggaatcatcacctcaaacgcatcaatggatgaatgtgacacgaagtgtcaaacaccccagggagctataaacaatagtctcccttttcagaacatacacccagtcacaataggagagtgcccaaaatatgtcaggagtaccaaattgaggatggttacaggactaaggaacatcccatccattcaatccagaggtctgtttggagccattgccggtttcattgaagggggatggactggaatggtagatggatggtatggttaccatcatcaaaatgaacagggatctggctatgctgcggatcaaaaaagcacacaaaatgccattaacgggattacaaataaggtgaactctgttatcgagaaaatgaacactcaattcacagctgtgggtaaagaattcaacaaattggaaaaaagaatggaaaacttaaataaaaaagttgatgatggatttctggacatttggacatataatgcagaattgttggttctactggaaaatgaaaggactttggatttccatgactcaaatgtgaagaatctgtatgagaaagtaaaaaaccaattgagaaataatgcaaaggaaataggaaacgggtgttttgagttctaccacaagtgtgacaatgaatgcatggaaagtgtaaaaaatggaacttatgattacccaaagtattcagaggaatcaaagttaaacagggaaaaaattgatggagtgaaattggaatcaatgggggtctatcagattctggcgatctactcaactgtcgccagttcactggtgcttctggtctccctgggggcaatcagcttctggatgtgttccaatgggtctttgcaatgcagaatatgcatctga

SEQ ID NO: 32179 - RNA, 1701 nt, synthetic construct
  misc_feature 1..1701: note = hemagglutinin__InfluenzaA__ABR15797
  source 1..1701: mol_type = other RNA
atgaagaccatcattgctttgagctacattttctgtctggctctcggccaagaccttccaggaaatgacaacagcacagcaacgctgtgcctgggacatcatgcggtgccaaacggaacactagtgaaaacaatcacaaatgatcagattgaagtgactaatgctactgagctagttcagagctcctcaacggggaaaatatgcaacaatcctcatcgaatccttgatggaatagactgcacactgatagatgctctattgggggaccctcattgtgatgtttttcaaaatgagacatgggaccttttcgttgaacgcagcaaagctttcagcaactgttacccttatgatgtgccagattatgcctcccttaggtcactagttgcctcgtcaggcactctggagtttatcactgagggtttcacttggactggagtcactcagaatgggggaagcaatgcttgcaaaaggggacctggtagcggttttttcagtagactgaactggttgaccaaatcaggaagcacatatccagtgctgaacgtgactatgccaaacaatgacaattttgacaaactatacatttggggggttcaccacccgagcacgaaccaagaacaaaccagcctgtatgttcaagcatcagggagagtcacagtctctaccaggagaagccagcaaactataatcccgaatatcgggtccagaccctgggtaaggggtctgtctagtagaataagcatctattggacaatagttaagccgggagacgtactggtaattaatagtaatgggaacctaatcgctcctcggggttatttcaaaatgcgcactgggaaaagctcaataatgaggtcagatgcacctattgatacctgtatttctgaatgcatcactccaaatggaagcattcccaatgacaagccctttcaaaacgtaaacaagatcacatatggagcatgccccaagtatgttaagcaaaacaccctgaagttggcaacagggatgcggaatgtaccagagaaacaaactagaggcctattcggtgcaatagcaggtttcatagaaaatggttgggagggaatgatagacggttggtacggtttcaggcatcaaaattctgagggcacaggacaagcagcagatcttaaaagcactcaagcagccatcgaccaaatcaatgggaaattgaacagggtaatcgagaagacgaacgagaaattccatcaaatcgaaaaggaattctcagaagtagaagggagaattcaggacctcgagaaatacgttgaagacactaaaatagatctctggtcttacaatgcggaacttcttgtcgctctggagaatcaacatacaattgacctgactgactcggaaatgaacaagctgtttgaaaaaacaaggagacaactgagggaaaatgctgaagacatgggcaatggttgcttcaaaatataccacaaatgtgacaacgcttgcatagagtcaatcagaaatgggacttatgaccatgatgtatacagagacgaagcattaaacaaccggtttcagatcaaaggtgttgaactgaagtctggatacaaagactggatcctgtggatttcctttgccatatcatgctttttgctttgtgttgttttgctggggttcatcatgtgggcctgccagagaggcaacattaggtgcaacatttgcatttga

SEQ ID NO: 32180 - RNA, 1701 nt, synthetic construct
  misc_feature 1..1701: note = hemagglutinin__InfluenzaA__ABR15808
  source 1..1701: mol_type = other RNA
atgaaagcaagactactgatcctgttatgtgcactttcagctacagatgcagacacaatatgtataggctaccatgcgaacaattcaaccgacactgttgacacagtactcgaaaagaatgtgacagtgacacactctgtaaacctactcgaagacagccacaacgggaaattatgcagattaaaaggaatagccccactacaattggggaaatgtaacattgccggatggatcttgggaaacccagaatgcgaatcattgctctctaatagatcatggtcctacattgcagaaacaccaaactctgagaatggaacatgttacccaggagatttcgccgactatgaggaactgagggagcaattgagctcagtatcatcattcgagagattcgaaatattccccaaggaaagatcatggcccaaacacaacataaccagaggagtaacggcagcatgctcccacgcgaagaaaagcagtttttacaaaaatttgctctggctgacggaggcaaatggctcatacccaaatctgagcaagtcctatgtgaacaacaaagagaaagaagtccttgtgctatggggtgttcatcacccgtctaacatagaggatcaaaggaccctctatcggaaagaaaatgcttatgtctctgtggtgtcttcaaattataacaggagattcaccccggaaatagcagaaagacccaaagtaagaggtcaagcagggagaatgaactattactggactttgctagaacccggagacaaaataatatttgaggcaaatggaaacctaatagcgccatggtatgctttcgcactgagtagaggccttggatcaggaatcatcacctcaaacgcatcaatggatgaatgtgacacgaagtgtcaaacaccccagggagctataaacagtagtctcccttttcagaacatacacccagtcacaataggagagtgcccaaaatatgtcaggagtaccaaattgaggatggttacaggactaaggaacatcccatccattcaatccagaggtctgtttggagccattgccggtttcattgaagggggatggactggaatggtagatggatggtatggttaccatcatcaaaatgaacagggatctggctatgctgcggatcaaaaaagcacacaaaatgccattaacgggattacaaataaggtgaactctgttatcgagaaaatgaacactcaattcacagctgtgggtaaagaattcaacaaattggaaaaaagaatggaaaacttaaataaaaaagttgatgatggatttttggacatttggacatataatgcagaattgttggttctactggaaaatgaaaggactttggatttccatgactcaaatgtgaagaatctgtatgagaaagtaaaaaaccaattgagaaataatgcaaaggaaataggaaacgggtgttttgagttctaccacaagtgtgacaatgaatgcatggaaagtgtaaaaaatggaacttatgattacccaaagtattcagaggaatcaaagttaaacagggaaaaaattgatggagtgaaattggaatcaatgggggtctatcagattctggcgatctactcaactgtcgccagttcactggtgcttctggtctccctgggggcaatcagcttctggatgtgttccaatgggtctttgcaatgcagaatatgcatctga

SEQ ID NO: 32181 - RNA, 1698 nt, synthetic construct; identical to SEQ ID NO: 31246
  misc_feature 1..1698: note = hemagglutinin__InfluenzaA__ABR15885
  source 1..1698: mol_type = other RNA

SEQ ID NO: 32182 - RNA, 1698 nt, synthetic construct
  misc_feature 1..1698: note = hemagglutinin__InfluenzaA__ABR15896
  source 1..1698: mol_type = other RNA
atgaaagcaaaactactggtcctgttatgtacatttacagctacatacgcagacacaatatgtataggctaccatgccaacaactcaaccgacactgttgacacagtacttgagaagaatgtgacagtgacacactctgtcaacctacttgaggacagtcacaatggaaaactatgtctactaaaaggaatagccccactacaattgggtaattgcagcgttgccggatggatcttaggaaacccagaatgcgaattactgatttccaaggaatcatggtcctacattgtagaagcaccaaatcctgagaatggaacatgttacccagggtatttcgccgactatgaggaactgagggagcaattgagttcagtatcttcatttgagagattcgaaatattccccaaagaaagctcatggcccaaccacaccgtaaccggagtatcagcatcatgctcccataatgggaaaagcagtttttacagaaatttgctatggctgacggggaagaatggtttgtacccaaacctgagcatgtcctatgtaaacaacaaagagaaagaagtccttgtgctatggggtgttcatcacccacctaacataggggaccaaagggccctctaccatacagaaaatgcttatgtctctgtagtgtcttcacattatagcagaagattcaccccagaaatagccaaaagacccaaagtaagagatcaggaaggaagaatcaactactactggactctgctggaacccggggacacaataatatttgaggcaaatggaaatctaatagcgccatggtatgctttcgcactgagtagaggctttggatcaggaatcatcacctcaaatgcaccaatggatgaatgtgatgcgaagtgtcaaacacctcagggagctataaacagtagtcttcctttccagaatgtacacccagttacaataggagagtgtccaaagtatgtcaggagtgcaaaattaaggatggttacaggactaaggaacatcccatccattcaatccagaggtttgtttggagccattgccggtttcattgaaggggggtggactggaatggtagatgggtggtatggttatcatcatcagaatgagcaaggatctggctatgctgcagatcaaaaaagcacacaaaatgccattaacgggattacaaacaaggtgaattctgtaattgagaaaatgaacactcaattcacagctgtgggcaaagaattcaacaaattagaaagaaggatggaaaacttaaataaaaaagttgatgatgggtttctagacatttggacatataatgcagaattgttggttctactggaaaatgaaaggactttggatttccatgactccaatgtgaagaatctgtatgagaaagtaaaaagccaattaaagaataatgccaaagaaataggaaacgggtgttttgaattctatcacaagtgcaacaatgaatgcatggaaagtgtgaaaaatggaacttatgactatccaaaatattccgaagaatcaaagttaaacagggagaaaattgatggagtaaaattggaatcaatgggagtctatcagattctggcgatctactcaactgtcgccagttccctggttcttttggtctccctgggggcaatcagcttctggatgtgttccaatgggtctttgcagtgtagaatatgcatctga

SEQ ID NO: 32183 - RNA, 1698 nt, synthetic construct; identical to SEQ ID NO: 31245
  misc_feature 1..1698: note = hemagglutinin__InfluenzaA__ABR15907
  source 1..1698: mol_type = other RNA

SEQ ID NO: 32184 - RNA, 1698 nt, synthetic construct
  misc_feature 1..1698: note = hemagglutinin__InfluenzaA__ABR15918
  source 1..1698: mol_type = other RNA
atgaaagtaaaactactggtcctgttatgtacatttacagctacatatgcagacacaatatgtatagggtaccatgccaacaactcaaccgacactgttgacacagtacttgagaagaatgtgacagtgacacactctgtcaacctacttgaggacagtcacaatggaaaactatgtctactaaaaggaatagccccattacaattgggtaattgcagcgttgccggatggatcttaggaaacccagaatgcgaattactgatttccaaggaatcatggtcctacattgtagaaacaccaaatcctgagaatggaacatgttacccagggtatttcgctgactatgaggaactgagggagcaattgagttcagtatcttcatttgagagattcgaaatattccccaaagaaagctcatggcccaaccacaccgtaaccggagtatcagcatcatgctcccataatgggaaaagcagtttttacagaaatttgctatggctgacggggaagaatggtttgtacccaaacctgagcaagtcctatgcaaacaacaaagagaaagaagtccttgtactatggggtgttcatcacccgcctaacataggggaccaaagggccctctatcatacagaaaatgcttatgtctctgtagtgtcttcacattatagcagaagattcaccccagaaatagccaaaagacccaaagtaagagatcaggaaggaagaatcaactactactggactctgctggaacccggggatacaataatatttgaggcaaatggaaatctaatagcgccacggtatgctttcgcactgagtagaggctttggatcaggaatcatcacctcaaatgcaccaatggatgaatgtgatgcgaagtgtcaaacacctcagggagctataaacagcagtcttcctttccagaacgtacacccagtcacaataggagagtgtccaaagtatgtcaggagtgcaaaattaaggatggttacaggactaaggaacatcccatccattcaatccagaggtttgtttggagccattgccggtttcattgaaggggggtggactggaatggtagatgggtggtatggttatcatcatcagaatgagcaaggatctggctatgccgcagatcaaaaaagcacacaaaatgccattaacgggattacaaacaaggtgaattctgtaattgagaaaatgaacactcaattcacagctgtgggcaaagaattcaacaaattggaaagaaggatggaaaacttaaataaaaaagttgatgatgggtttctagacatttggacatataatgcagaattgttggttctactggaaaatgaaaggactttggatttccatgactccaatgtgaagaatctgtatgagaaagtaaaaagccaattaaagaataatgccaaagaaataggaaacgggtgttttgaattctatcacaagtgtaacaatgaatgcatggagagtgtgaaaaatggaacttatgactatccaaaatattccgaagaatcaaagttaaacagggagaaaattgatggagtgaaattggaatcaatgggagtctatcagattctggcgatctactcaactgtcgccagttccctggttcttttggtctccctgggggcaatcagcttctggatgtgttccaatgggtctttgcagtgtagaatatgcatctga

SEQ ID NO: 32185 - RNA, 1701 nt, synthetic construct
  misc_feature 1..1701: note = hemagglutinin__InfluenzaA__ABR15929
  source 1..1701: mol_type = other RNA
atgaagactatcattgctttgagctacattttatgtctggttttcgctcaaaaacttcccggaaatgacaacagcacggcaacgctgtgcctggggcaccatgcagtgccaaacggaacgctagtgaaaacaatcacgaatgaccaaattgaagtgactaatgctactgagctggttcagagttcctcaacaggtagaatatgcgacagtcctcaccaaatccttgatggagaaaactgcacactaatagatgctctattgggagaccctcattgtgatggcttccaaaataaggaatgggacctttttgttgaacgcagcaaagcctacagcaactgttacccttatgatgtgccggattatgtctcccttaggtcactagttgcctcatcaggcacgctggagtttaacaatgaaagcttcaattggactggagtcgctcagaatggaacaagctctgcttgcaaaaggagatctgataaaagtttctttagtagattgaattggttgcaccaattaaaatacaaatatccagcactgaacgtgactatgccaaacaatgaaaaatttgacaaattgtacatttggggggttcaccacccgggtacagacagtgaccaaatcagcctatatgctcaagcatcagggagagtcacagtctctaccaaaagaagccaacaaactgtaatcccgaatatcggatctagaccctgggtaaggggtatctccagcagaataagcatctattggacaatagtaaaaccgggagacatacttttaattaacagcacagggaatctaattgctcctcggggttacttcaaaatacgaagtgggaaaagctcaataatgaggtcagatgcacccattggcaaatgcaattctgaatgcatcactccaaatggaagcattcccaatgacaaaccatttcaaaatgtaaacaggatcacatatgggccctgtcccagatatgttaagcaaaacactctgaaattggcaacagggatgcggaatgtgccagagaaacaaactagaggcatattcggtgcaatcgcgggcttcatagaaaatggttgggagggaatgatggacggttggtacggtttcaggcatcaaaattctgagggcacagggcaagcagcagatcttaaaagcactcaagcagcaatcaaccaaatcaacgggaaactgaataggttaatcgagaaaacgaacgagaaattccatcaaattgaaaaagaattctcagaagtagaagggagaattcaggacctcgagaaatatgttgaggacactaaaatagatctctggtcgtacaatgcggagcttcttgttgccctggagaaccaacatacaattgatctaactgactcagaaatgaacaaactgtttgaaagaacaaagaagcaactgagggaaaatgctgaggatatgggcaatggttgtttcaaaatataccacaaatgtaacaatgcctgcatagggtcaatcagaaatggaacttatgaccatgatgtatacagagacgaagcattgaacaaccggttccagatcaaaggtgttgagctgaagtcaggatacaaagattggatcctatggatttcctttgccatatcatgttttttgctttgtattgttttgctggggttcatcatgtgggcctgccaaaaaggcaacattaggtgcaacatttgcatttga

SEQ ID NO: 32186 - RNA, 1701 nt, synthetic construct
  misc_feature 1..1701: note = hemagglutinin__InfluenzaA__ABR15940
  source 1..1701: mol_type = other RNA
atgaagactatcattgctttgagctacattttatgcctggttttcgctcaaaaacttcccggaaatgacaacagcacggcaacgctgtgtctggggcatcatgcagtgccaaacggaacgctagtgaaaacaatcacgaatgaccaaattgaagtaactaatgctactgagctggttcagagttcctcaacaggtagaatatgcgacagtcctcaccaaatccttgatggagaaaactgcacactaatagatgctctattgggagaccctcattgtgatggcttccaaaataaggaatgggacctttttgttgaacgcagcaaagcctacagcaactgttacccttatgatgtgccggattatgtctcccttaggtcactagttgcctcatcaggcacgctggagtttaacaatgaaagcttcaattggactggagtcgctcagaatggaacaagctctgcttgcaaaaggagatctgataaaagtttctttagtagattgaattggttgcaccaattaaaatacaaatatccagcactgaacgtgactatgccaaacaatgaaaaatttgacaaattgtacatttggggggttcaccacccgggtacagacagtgaccaaatcagcctatatgctcaagcatcggggagagtcacagtctctaccaaaagaagccaacaaactgtaatcccgaatatcggatctagaccctgggtaaggggtgtctccagcagaataagcatctattggacaatagtaaaaccgggagacatacttttgattaacagcacagggaatctaattgctcctcggggttacttcaaaatacgaagtgggaaaagctcaataatgaggtcagatgcacccattggcaaatgcaattctgaatgcatcactccaaatggaagcatttccaatgacaaaccatttcaaaatgtaaacaggatcacatatggggcctgtcccagatatgttaagcaaaacactctgaaattggcaacagggatgcggaatgtgccagagaaacaaactagaggcatattcggtgcaatcgcgggcttcatagaaaatggttgggagggaatgatggacggttggtacggtttcaggcatcaaaattctgagggcacagggcaagcagcagatcttaaaagcactcaagcagcaatcaaccaaatcaacgggaaactgaataggttaatcgagaaaacgaacgagaaattccatcaaattgaaaaagaattctcagaagtagaagggagaattcaggacctcgagaaatatgttgaggacactaaaatagatctctggtcgtacaatgcggagcttcttgttgccctggagaaccaacatacaattgatctaactgactcagaaatgaacaaactgtttgaaagaacaaagaagcaactgagggaaaatgctgaggatatgggcaatggttgtttcaaaatataccacaaatgtgacaatgcctgcatagggtcaatcagaaatggaacttatgaccatgatgtatacagagacgaagcattgaacaaccggttccagatcaaaggtgttgagctgaagtcaggatacaaagattgggtcctatggatttcctttgccatatcatgttttttgctttgtattgttttgctggggttcatcatgtgggcctgccaaaaaggcaacattaggtgcaacatttgcatttga

SEQ ID NO: 32187 - RNA, 1701 nt, synthetic construct; identical to SEQ ID NO: 31066
  misc_feature 1..1701: note = hemagglutinin__InfluenzaA__ABR15951
  source 1..1701: mol_type = other RNA

SEQ ID NO: 32188 - RNA, 1701 nt, synthetic construct
  misc_feature 1..1701: note = hemagglutinin__InfluenzaA__ABR15962
  source 1..1701: mol_type = other RNA
atgaagactatcattgctttgagctacattttatgtctggttttcgctcaaaaacttcccggaaatgacaacagcacggcaacgctgtgcctggggcaccatgcagtgccaaacggaacgctagtgaaaacaatcacgaatgaccaaattgaagtgactaatgctactgagctggttcagagttcctcaacaggtagaatatgcgacagtcctcaccaaatccttgatggagaaaactgcacactaatagatgctctattgggagaccctcattgtgatggcttccaaaataaggaatgggacctttttgttgaacgcagcagagcctacagcaactgttacccttatgatgtgccggattatgtctcccttaggtcactagttgcctcatcaggcacgctggagtttaacaatgaaagcttcaattggactggagtcgctcagaatggaacaagctctgcttgcaaaaggagatctgataaaagtttctttagtagattgaattggttgcaccaattaaaatacaaatatccagcactgaacgtgactatgccaaacaatgaaaaatttgacaaattgtacatttggggggttcaccacccgggtacagacagtgaccaaatcagcctatatgctcaagcatcagggagagtcacagtctctaccaaaagaagccaacaaactgtaatcccgaatatcggatctagaccctgggtaaggggtgtctccagcataataagcatctattggacaatagtaaaaccgggagacatacttttgattaacagcacagggaatctaattgctcctcggggttacttcaaaatacgaagtgggaaaagctcaataatgaggtcagatgcacccattggcaaatgcaattctgaatgcatcactccaaatggaagcattcccaatgacaaaccatttcaaaatgtaaacaggatcacatatgggccctgtcccagatatgttaagcaaaacactctgaaattggcaacagggatgcggaatgtgccagagaaacaaactagaggcatattcggtgcaatcgcgggcttcatagaaaatggttgggagggaatgatggacggttggtacggtttcaggcatcaaaattctgagggcacagggcaagcagcagatcttaaaagcactcaagcagcaatcaaccaaatcaacgggaaactgaataggttaatcgagaaaacgaacgagaaattccatcaaattgaaaaagaattctcagaagtagaagggagaattcaggacctcgaaaaatatgttgaggacactaaaatagatctctggtcgtacaatgcggagcttcttgttgccctggagaaccaacatacaattgatctaactgactcagaaatgaacaaactgtttgaaagaacaaagaagcaactgagggaaaatgctgaggatatgggcaatggttgtttcaaaatataccacaaatgtgacaatgcctgcatagggtcaatcagaaatggaacttatgaccatgatgtatacagagacgaagcattgaacaaccggttccagatcaaaggtgttgagctgaagtcaggatacaaagattggatcctatggatttcctttgccatatcatgttttttgctttgtattgttttgctggggttcatcatgtgggcctgccaaaaaggcaacattaggtgcaacatttgcatttga

SEQ ID NO: 32189 - RNA, 1701 nt, synthetic construct
  misc_feature 1..1701: note = hemagglutinin__InfluenzaA__ABR22241
  source 1..1701: mol_type = other RNA
atgaagactatcattgctttgagctacattttatgtctggctttcgctcaaaaacttcccggaaatgacaacagcacggcaacgctgtgcctgggacaccatgcagtgccaaacggaacgctagtgaaaacaatcacgaatgaccaaattgaagtgactaatgctactgagctggttcagagttcctcaacaggtagaatatgcgacagtcctcaccaaatccttgatggagaaaactgcacactgatagatgctctattgggagacccacattgtgatggcttccaaaataaggaatgggacctttttgttgaacgcagcaaagcctacagcaactgttacccttatgatgtgccggattatgcctcccttaggtcactagttgcctcatccggcaccctggagtttaacaatgaaagcttcaattggactggagtcgctcagaatggaacaagctctgcttgcaaaaggagatctattaaaagtttctttagtagattgaattggttgcaccaattagaatacagatatccagcactgaacgtgactatgccaaacaatgacaaatttgacaaattgtacatttggggggttcaccacccgagtacggacagtgaccaaatcagcgtatatgcccaagcatcagggagagtcacagtctctaccaaaagaagccaacaaactgtaatcccgaatatcggatccagaccctgggtaaggggtatctccagcagaataagcatctattggacaatagtaaaaccgggagacatacttttgattaacagcacagggaatctaattgctcctcggggttacttcaaaatacgaagtgggaaaagctcaataatgaggtcagatgcacccattggcaaatgcaattctgaatgcatcactccaaatggaagcattcccaatgacaaaccatttcaaaatgtaaacaggatcacatatggggcctgtcccagatatgttaagcaaaacactctgaaattggcaacagggatgcggaatgtaccagagaaacaaactagaggcatattcggcgcaatcgcgggtttcatagaaaatggttgggagggaatgatggacggttggtacggtttcaggcatcaaaattctgagggcacaggacaagcagcagatcttaaaagcactcaagcagcaatcaaccaaatcaacgggaaactgaataagttaatcgagaaaacgaacgagaaattccatcaaattgaaaaagaattctcagaagtagaagggagaattcaggacctcgagaaatatgttgaggacactaaaatagatctctggtcgtacaacgcggagcttcttgttgccctggagaaccaaaatacaattgatctaactgactcagaaatgaacaaactgtttgaaagaacaaggaagcaactgagagaaaatgctgaggatatgggcaatggttgtttcaaaatataccacaaatgtgacaatgcctgcatagggtcaatcagaaatggaacttatgaccatgatgtatacagagacgaagcattaaacaaccggttccagatcaaaggtgttgagctgaagtcaggatacaaagattggatcctatggatttcctttgccatatcatgttttttgctttgtgttgttttgctggggttcattatgtgggcctgccaaaaaggcaacattaggtgcaacatttgcatttga

SEQ ID NO: 32190 - RNA, 1701 nt, synthetic construct; identical to SEQ ID NO: 31154
  misc_feature 1..1701: note = hemagglutinin__InfluenzaA__ABR28515
  source 1..1701: mol_type = other RNA

SEQ ID NO: 32191 - RNA, 1701 nt, synthetic construct
  misc_feature 1..1701: note = hemagglutinin__InfluenzaA__ABR28592
  source 1..1701: mol_type = other RNA
atgaagactatcattgctttgagctacgttttctgtctggttttcgcccaagaccttccaggaaatgacaacagcacagcaactctgtgcctgggacatcatgcggtgccaaacggaacgctagtgaaaacaatcacgaatgatcagattgaagtgactaatgctactgaactggttcagagttcctcaacgggtaaaatatgcgacaatcctcatcgaatccttgatggaataaactgcacactgatagatgctctattgggggaccctcattgtgatggctttcaaaatgagaaatgggaccttttcgttgaacgcagcaaagctttcagcaactgttacccttatgatgtgccagattatgcctcccttaggtcactagttgcctcgtcaggcactctggagtttatcaatgaaggcttcaattggactggggtcactcagaatgggggaagcagtgcttgcaaaaggggacctgataacggttttttcagtagactgaactggttgtacaaatcaggaagcacatatccagtgcagaacgtgaccatgccaaacaatgacaactctgacaaactatacatttggggggttcaccacccgagcacggacaaagaacaaaccgacctatatgttcaagcatcagggaaagtcacagtctccaccaagagaagccagcaaactgtaatcccgaatgtcgggtctagaccctgggtaaggggtctgtctagtagagtaagcatctattggacaatagttaaaccgggagacatactggtaattaatagtaatggaaacctaattgctcctcggggttacttcaaaatgcgcactgggaaaagctcaataatgaggtcagatgcacctattggcacctgcagctctgaatgcatcactccaaatggaagcattcccaatgacaagccctttcaaaacgtaaacaagatcacatatggggcatgtcccaagtatgttaagcaaaacactctgaagttggcaacagggatgcggaatgtaccagagaaacaaactagaggcatattcggcgcaatagcaggtttcatagaaaatggttgggagggaatgatagacggttggtacggtttcaggcatcaaaattctgagggcacaggacaagcagcagatcttaaaagcactcaagcagccatcgaccaaatcaatgggaaactgaatagggtaatcgagaagacgaacgagaaattccatcaaatcgaaaaggaattctcagaagtagaagggagaattcaggacctcgagaaatacgttgaagacactaaaatagatctctggtcttacaatgcggagcttcttgtcgctctggagaaccaacatacaattgatctgactgactcggaaatgaacaaactgtttgaaaaaacaaggaggcaactgagggaaaatgctgaggacatgggcaatggttgcttcaaaatataccacaaatgtgacaatgcttgcatagggtcaatcagaaatgggacttatgaccatgatgtatacagagacgaagcattaaacaaccggtttcagatcaaaggtgttgaactgaagtcaggatacaaagactggatcctgtggatttcctttgccatatcatgctttttgctttgtgttgttttgctggggttcatcatgtgggcctgccagaaaggcaacattaggtgcaacatttgcatttga

SEQ ID NO: 32192 - RNA, 1698 nt, synthetic construct; identical to SEQ ID NO: 31246
  misc_feature 1..1698: note = hemagglutinin__InfluenzaA__ABR28768
  source 1..1698: mol_type = other RNA

SEQ ID NO: 32193 - RNA, 1698 nt, synthetic construct
  misc_feature 1..1698: note = hemagglutinin__InfluenzaA__ABR28779
  source 1..1698: mol_type = other RNA
atgaaagtaaaactactggtcctgttatgtacatttacagctacatatgcagacacaatatgtatagggtaccatgccaacaactcaaccgacactgttgacacagtacttgagaagaatgtgacagtgacacactctgtcaacctacttgaggacagtcacaatggaaaactatgtctactaaaaggaatagccccactacaattgggtaattgcagcgttgccggatggatcttaggaaacccagaatgcgaattactgatttccaaggaatcatggtcctacattgtagaaacaccaaatcctgagaatggaacatgttacccagggtatttcgccgactatgaggaactgagggagcaattgagttcagtatcttcatttgagagattcgaaatattccccaaagaaagctcatggcccaaccacaccgtaaccggagtatcagcatcatgctcccataatgggaaaagcagtttttacagaaatttgctatggctgacggggaagaatggtttgtacccaaacctgagcaagtcctatgcaaacaacaaagagaaagaagtccttgtactatggggtgttcatcacccgcctaacataggggaccaaagggccctctatcatacagaaaatgcttatgtctctgtagtgtcttcacattatagcagaagattcaccccagaaatagccaaaagacccaaagtaagagatcaggaaggaagaatcaactactactggactctgctggaacccggggatacaataatatttgaggcaaatggaaatctaatagcgccacggtatgctttcgcactgagtagaggctttggatcaggaatcatcacctcaaatgcaccaatggatgaatgtgatgcgaagtgtcaaacacctcagggagctataaacagcagtcttcctttccagaacgtacacccagtcacaataggagagtgtccaaagtatgtcaggagtgcaaaattaaggatggttacaggactaaggaacatcccatccattcaatccagaggtttgtttggagccattgccggtttcattgaaggggggtggactggaatggtagatgggtggtatggttatcatcatcagaatgagcaaggatctggctatgccgcagatcaaaaaagcacacaaaatgccattaacgggattacaaacaaggtgaattctgtaattgagaaaatgaacactcaattcacagctgtgggcaaagaattcaacaaattggaaagaaggatggaaaacttaaataaaaaagttgatgatgggtttctagacatttggacatataatgcagaattgttggttctactggaaaatgaaaggactttggatttccatgactccaatgtgaagaatttgtatgagaaagtaaaaagccaattaaagaataatgccaaagaaataggaaacgggtgttttgaattctatcacaagtgtaacaatgaatgcatggagagtgtgaaaaatggaacttatgactatccaaaatattccgaagaatcaaagttaaacagggagaaaattgatggagtgaaattggaatcaatgggagtctatcagattctggcgatctactcaactgtcgccagttccctggttcttttggtctccctgggggcaatcagcttctggatgtgttccaatgggtctttgcagtgtagaatatgcatctga

SEQ ID NO: 32194 - RNA, 1701 nt, synthetic construct; identical to SEQ ID NO: 31937
  misc_feature 1..1701: note = hemagglutinin__InfluenzaA__ABR28790
  source 1..1701: mol_type = other RNA

SEQ ID NO: 32195 - RNA, 1698 nt, synthetic construct
  misc_feature 1..1698: note = hemagglutinin__InfluenzaA__ABR28801
  source 1..1698: mol_type = other RNA
atgaaagtaaaactactggtcctgttatgtacatttacagctacatatgcagacacaatatgtatagggtaccatgccaacaactcaaccgacactgttgacacagtacttgagaagaatgtgacagtgacacactctgtcaacctacttgaggacagtcacaatggaaaactatgtctactaaaaggaatagccccactacaattgggtaattgcagcgttgccggatggatcttaggaaacccagaatgcgaattactgatttccaaggaatcatggtcctacattgtagaaacaccaaatcctgagaatggaacatgttatccagggtatttcgccgactatgaggaactgagggagcaattgagttcagtatcttcatttgagagattcgaaatattccccaaagaaagctcatggcccaaccacaccgtaaccggagtatcagcatcatgctcccataatgggaaaagcagtttttacagaaatttgctatggctgacggggaagaatggtttgtacccaaacctgagcaagtcctatgcaaacaacaaagagaaagaagtccttgtactatggggtgttcatcacccgcctaacataggggaccaaagggccctctatcatacagaaaatgcttatgtctctgtagtgtcttcacattatagcagaagattcaccccagaaatagccaaaagacccaaagtaagagatcaggaaggaagaatcaactactactggactctgctggaacccggggatacaataatatttgaggcaaatggaaatctaatagcgccacggtatgctttcgcactgagtagaggctttggatcaggaatcatcacctcaaatgcaccaatggatgaatgtgatgcgaagtgtcaaacacctcagggagctataaacagcagtcttcctttccagaacgtacacccagtcacaataggagagtgtccaaagtatgtcaggagtgcaaaattaaggatggttacaggactaaggaacatcccatccattcaatccagaggtttgtttggagccattgccggtttcattgaaggggggtggactggaatggtagatgggtggtatggttatcatcatcagaatgagcaaggatctggctatgccgcagatcaaaaaagcacacaaaatgccattaacgggattacaaacaaggtgaattctgtaattgagaaaatgaacactcaattcacagctgtgggcaaagaattcaacaaattggaaagaaggatggaaaacttaaataaaaaagttgatgatgggtttctagacatttggacatataatgcagaattgttggttctactggaaaatgaaaggactttggatttccatgactccaatgtgaagaatctgtatgagaaagtaaaaagccaattaaagaataatgccaaagaaataggaaacgggtgttttgaattctatcacaagtgtaacaatgaatgcatggagagtgtgaaaaatggaacttatgactatccaaaatattccgaagaatcaaagttaaacagggagaaaattgatggagtgaaattggaatcaatgggagtctatcagattctggcgatctactcaactgtcgccagttccctggttcttttggtctccctgggggcaatcagcttctggatgtgttccaatgggtctttgcagtgtagaatatgcatctga

SEQ ID NO: 32196 - RNA, 1701 nt, synthetic construct
  misc_feature 1..1701: note = hemagglutinin__InfluenzaA__ABR28812
  source 1..1701: mol_type = other RNA
atgaagactatcattgctttgagctacattttatgtctggttttcgctcaaaaacttcccggaaatgacaacagcacggcaacgctgtgcctggggcaccatgcagtgccaaacggaacgctagtgaaaacaatcacgaatgaccaaattgaagtgactaatgctactgagctggttcagagttcctcaacaggtggaatatgcgacagtcctcaccaaatccttgatggagaaaactgcacactaatagatgctctattgggagaccctcattgtgatggcttccaaaataaggaatgggacctttttgttgaacgcagcaaagcctacagcaactgttacccttatgatgtgccggattatgcctcccttaggtcactagttgcctcatccggcacactggagtttaacaatgaaagcttcaattggacaggagtcgctcagaatggaacaagctctgcttgcaaaaggagatctaataaaagtttctttagtagattgaattggttgcaccaattaaaatacaaatacccagcactgaacgtgactatgccaaacaatgaaaaatttgacaaattgtacatttggggggttcaccacccgagtacggacagtgaccaaatcagcctatatgctcaagcaccagggagagtcacagtctctaccaaaagaagccaacaaactgtaatcccgaatatcggatctagaccctgggtaaggggtgtctccagcagaataagcatctattggacaatagtaaaaccgggagacatacttttgattaactgcacagggaatctaattgctcctcggggttacttcaaaatacgaagtgggaaaagctcaataatgaggtcagatgcatccattggcaaatgcaattctgaatgcatcactccaaatggaagcattcccaatgacaaaccatttcaaaatgtaaacaggatcacatatggggcctgtcccagatatgttaagcaaaacactctgaaattggcaacagggatgcggaatgtaccagagaaacaaactagaggcatattcggcgcaatcgcgggtttcatagaaaatggttgggagggaatggtggacggttggtacggtttcaggcatcaaaattctgagggcacaggacaagcagcagatctcaaaagcactcaagcagcaatcaaccaaatcaacgggaaactgaataggttaatcgagaaaacgaacgagaaattccatcaaattgaaaaagaattctcagaagtggaagggagaattcaggacctcgagaaatatgttgaggacactaaaatagatctctggtcgtacaacgcggagcttcttgttgccctggagaaccagcatacaattgatctaactgactcagaaatgaacaaactgtttgaaagaacaaagaagcaactgagggaaaatgctgaggatatgggcaatggttgtttcaaaatataccacaaatgtgacaatgcctgcatagggtcaatcagaaatgggacttatgaccatgatgtatacagagacgaagcattaaacaaccggttccagatcaaaggtgttgagctgaagtcaggatacaaagattggatcctatggatttcctttgccatatcatgttttttgctttgtgttgtcttgctgggattcatcatgtgggcctgccaaaaaggcaacattaggtgcaacatttgcatttga

SEQ ID NO: 32197 - RNA, 1701 nt, synthetic construct
  misc_feature 1..1701: note = hemagglutinin__InfluenzaA__ABR28823
  source 1..1701: mol_type = other RNA
atgaagactatcattgctttgagctacattttatgtctggttttcgctcaaaaactccccggaaatgacaacagcacggcaacgctgtgcctggggcaccatgcagtgccaaacggaacgctagtgaaaacaatcacgaatgaccaaattgaagtgactaatgctactgagctggttcagagttcctcaacaggtagaatatgcgacagtcctcaccaaatccttgatggagaaaactgcacactaatagatgctctattgggagaccctcattgtgatggcttccaaaataaggaatgggacctttttgttgaacgcagcaaagcctacagcaactgttacccttatgatgtgccggattatgtctcccttaggtcactagttgcctcatcaggcacgctggagtttaacaatgaaagcttcaattggactggagtcgctcagaatggaacaagctctgcttgcaaaaggagatctgataaaagtttctttagtagattgaattggttgcaccaattaaaatacaaatatccagcactgaacgtgactatgccaaacaatgaaaaatttgacaaattgtacatttggggggttcatcacccgggtacagacagtgaccaaatcagcctatatgctcaagcatcagggagagtcacagtctctaccaaaagaagccaacaaactgtaatcccgaatatcggatctagaccctgggtaaggggtatctccagcagaataagcatctattggacaatagtaaaaccgggagacatacttttgattaacagcacagggaatctaattgctcctcggggttacttcaaaatacgaagtgggaaaagctcaataatgaggtcagatgcacccattggcaaatgcaattctgaatgcatcactccaaatggaagcattcccaatgacaaaccatttcaaaatgtaaacaggatcacatatgggccctgtcccagatatgttaagcaaaacactctgaaattggcaacagggatgcggaatgtgccagagaaacaaactagaggcatattcggtgcaatcgcgggcttcatagaaaatggttgggagggaatgatggacggttggtacggtttcaggcatcaaaattctgagggcacagggcaagcagcagatcttaaaagcactcaagcagcaatcaaccaaatcaacgggaaactgaataggttaatcgagaaaacgaacgagaaattccatcaaattgaaaaagaattctcagaagtagaagggagaattcaggacctcgagaaatatgttgaggacactaaaatagatctctggtcgtacaatgcggagcttcttgttgccctggagaaccaacatacaattgatctaactgactcagaaatgaacaaactgtttgaaagaacaaagaagcaactgagggaaaatgctgaggatatgggcaatggttgtttcaaaatataccacaaatgtgacaatgcctgcatagggtcaatcagaaatggaacttatgaccatgatgtatacagagacgaagcattgaacaaccggttccagatcaaaggtgttgagctgaagtcaggatacaaagattggatcctatggatttcctttgccatatcatgttttttgctttgtattgttttgctggggttcatcatgtgggcctgccaaaaaggcaacattaggtgcaacatttgcatttga

SEQ ID NO: 32198 - RNA, 1698 nt, synthetic construct; identical to SEQ ID NO: 31374
  misc_feature 1..1698: note = hemagglutinin__InfluenzaA__ABR28834
  source 1..1698: mol_type = other RNA

SEQ ID NO: 32199 - RNA, 1698 nt, synthetic construct; identical to SEQ ID NO: 31346
  misc_feature 1..1698: note = hemagglutinin__InfluenzaA__ABR28845
  source 1..1698: mol_type = other RNA

SEQ ID NO: 32200 - RNA, 1701 nt, synthetic construct
  misc_feature 1..1701: note = hemagglutinin__InfluenzaA__ABR28856
  source 1..1701: mol_type = other RNA
atgaagactatcattgctttgagctacattttatgcctggttttcgctcaaaaacttcccggaaatgacaacagcacggcaacgctgtgcctggggcaccatgcagtgccaaacggaacgctagtgaaaacaatcacgaatgaccaaattgaagtaactaatgctactgagctggttcagagttcctcaacaggtagaatatgcgacagtcctcaccaaatccttgatggagaaaactgcacactaatagatgctctattgggagaccctcattgtgatggcttccaaaataaggaatgggacctttttgttgaacgcagcaaagcctacagcaactgttacccttatgatgtgccggattatgtctcccttaggtcactagttgcctcatcaggcacgctggagtttaacaatgaaagcttcaattggactggagtcgctcagaatggaacaagctctgcttgcaaaaggagatctgataaaagtttctttagtagattgaattggttgcaccaattaaaatacaaatatccagcactgaacgtgattatgccaaacaatgaaaaatttgacaaattgtacatttggggggtccaccacccgggtacagacagtgaccaaatcagcctatatgctcaagcatcagggagagtcacagtctctaccaaaagaagccaacaaactgtaatcccgaatatcggatctagaccctgggtaaggggtgtctccagcagaataagcatctattggacaatagtaaaaccgggagacatacttttgattaacagcacagggaatctaattgctcctcggggttacttcaaaatacgaagtgggaaaagctcaataatgaggtcagatgcacccattggcaaatgcaattctgaatgcatcactccaaatggaagcattcccaatgacaaaccatttcaaaatgtaaacaggatcacatatggggcctgtcccagatatgttaagcaaaaaactctgaaattggcaacagggatgcggaatgtgccagagaaacaaactagaggcatattcggtgcaatcgcgggcttcatagaaaatggttgggagggaatgatggacggttggtacggtttcaggcatcaaaattctgagggcacagggcaagcagcagatcttaaaagcactcaagcagcaatcaaccaaatcaacgggaaactgaataggttgattgagaaaacgaacgagaaattccatcaaattgaaaaagaattctcagaagtagaagggagaattcaggacctcgagaaatatgtcgaggacactaaaatagatctctggtcgtacaatgcggagcttcttgttgccctggagaaccaacatacaattgatctaactgactcagaaatgaacaaactgtttgaaagaacaaagaagcaactgagggaaaatgctgaggatatgggcaatggttgtttcaaaatataccacaaatgtgacaatgcctgcatagggtcaatcagaaatggaacttatgaccatgatgtatacagagacgaagcattgaacaaccggttccagatcaaaggtgttgagctgaagtcaggatacaaagattggatcctatggatttcctttgccatatcatgttttttgctttgtattgttttactggggttcatcatgtgggcctgccaaaaaggcaacattaggtgcaacatttgcatttga

SEQ ID NO: 32201 - RNA, 1701 nt, synthetic construct
  misc_feature 1..1701: note = hemagglutinin__InfluenzaA__ABR28867
  source 1..1701: mol_type = other RNA
atgaagactatcattgctttgagctacattttatgcctggttttcgctcaaaaacttcccggaaatgacaacagcacggcaacgctgtgcctggggcaccatgcagtgccaaacggaacgctagtgaaaacaatcacgaatgaccaaattgaagtgactaatgctactgagctggttcagagttcctcaacaggtagaatatgcgacagtcctcaccaaatccttgatggagaaaactgcacactaatagatgctctattgggagaccctcattgtgatggcttccaaaataaggaatgggacctttttgttgaacgcagcaaagcctacagcaactgttacccttatgatgtgccggattatgtctcccttaggtcactagttgcctcatcaggcacgctggagtttaacaatgaaagcttcaattggactggagtcgctcagaatggaacaagctctgcttgcaaaaggagatctgataaaagtttctttagtagattgaattggttgcaccaattaaaatacaaatatccagcactgaacgtgactatgccaaacaatgaaaaatttgacaaattgtacatttggggggttcaccacccgggtacagatagtgaccaaatcagcctatatgctcaagcatcagggagagtcacagtctctaccaaaagaagccaacaaactgtaatcccgaatatcggatctagaccctgggtaaggggtgtctccagcagaataagcatctattggacaatagtaaaaccgggagacatacttttgattaacagcacagggaatctaattgctcctcggggttacttcaaaatacgaagtgggaaaagctcaataatgaggtcagatgcacccattggcaaatgcaattctgaatgcatcactccaaatggaagcattcccaatggcaaaccatttcaaaatgtaaacaggatcacatatggggcatgtcccagatatgttaagcaaaacactctgaaattggcaacagggatgcggaatgtgccagagaaacaaactagaggcatattcggtgcaatcgcgggcttcatagaaaatggttgggagggaatgatggacggttggtacggtttcaggcatcagaattctgagggcacagggcaagcagcagatcttaaaagcactcaagcagcaatcaaccaaatcaacgggaaactgaataggttaatcgagaaaacgaacgagaaattccatcaaattgaaaaagaattctcagaagtagaagggagaattcaggacctcgagaaatatgtcgaggacactaaaatagatctctggtcgtacaatgcggagcttcttgttgccctggagaaccaacatacaattgatctaactgactcagaaatgaacaaactgtttgaaagaacaaagaagcaactgagggaaaatgctgaggatatgggcaatggttgtttcaaaatataccacaaatgtgacaatgcctgcatagggtcaatcagaaatggaacttatgaccatgatgtatacagagacgaagcattgaacaaccggttccagatcaaaggtgttgagctgaagtcaggatacaaagattggatcctatggatttcctttgccatatcatgttttttgctttgtattgttttactggggttcatcatgtgggcctgccaaaaaggcaacattaggtgcaacatttgcatttga

SEQ ID NO: 32202 - RNA, 1701 nt, synthetic construct; identical to SEQ ID NO: 31066
  misc_feature 1..1701: note = hemagglutinin__InfluenzaA__ABR28878
  source 1..1701: mol_type = other RNA

SEQ ID NO: 32203 - RNA, 1698 nt, synthetic construct
  misc_feature 1..1698: note = hemagglutinin__InfluenzaA__ABR28900
  source 1..1698: mol_type = other RNA
atgaaagtaaaactactggttctgttatgtacatttacagctacatatgcagacacaatatgtataggctaccatgccaacaactcgaccgacactgttgacacagtacttgagaagaatgtgacagtgacacactctgtcaacctacttgaggacagtcacaatggaaaactatgtctactaaaaggaatagccccactacaattgggtaattgcagcgttgccggatggatcttaggaaacccagaatgcgaattactgatttccaaggaatcatggtcctacattgtagaaacaccaaatcctgagaatggaacatgttacccagggtatttcgccgactatgaggagctgagggagcaattgagttcagtatcttcatttgagaggttcgaaatattccccaaagagagctcatggcccaaccacaccgtaaccggagtatcagcatcatgctcccataacgggaaaagcagtttttacagaaatttgctatggctgacggggaagaatggtttgtatccaaacctgagcaagtcctatgcaaacaacaaagagaaagaagtccttgtactgtggggtgttcatcacccgcctaacataggggaccaaagggccctctatcatacagaaaatgcttatgtctctgtagtgtcttcacattatagcagaagattcactccagaaatagccaaaagacccaaggtgagagatcaggaaggaagaatcaactactactggactctgctggaacccggggatactataatatttgaggcaaatggaaatctaatagcgccaaggtttgctttcgcactgagtagaggctttggatcaggaatcatcacctcaaatgcaccaatggatgaatgtgatgcgaagtgtcaaacacctcagggagctataaacagcagtcttcctttccagaatgtacacccagtcacaataggagagtgtccaaagtatgtcaggagtgcaaaattaagaatggttacaggactaaggaacatcccatccattcaatccagaggtttgtttggagccattgccggtttcattgaaggggggtggactggaatggtagatggttggtatggttatcaccatcagaatgagcaaggatctgggtatgctgcagatcaaaaaagcacacaaaatgccattaacgggattacaaacaaggtgaattctgtaattgagaaaatgaacactcaattcacagctgtgggcaaagaattcaacaaattggaaagaaggatggaaaacttaaataaaaaagttgatgatgggtttctagacatttggacatataacgcagaattgttggttctactggaaaatgaaaggactttggacttccatgactccaacgtgaagaatctgtatgagaaagtaaaaagccaattaaagaataatgccaaagaaataggaaacgggtgttttgaattctatcacaagtgtaacgatgaatgcatggagagtgtgaaaaatggaacttatgactatccaaaatattccgaagaatcaaagttgaacagggagagaattgatggagtgaaattggaatcaatgggagtctatcagattctggcgatctactcaacagtcgccagttccctggttcttttggtctccctgggggcaatcagcttctggatgtgttccaatgggtctttgcagtgtagaatatgcatctaa

SEQ ID NO: 32204 - RNA, 1701 nt, synthetic construct
  misc_feature 1..1701: note = hemagglutinin__InfluenzaA__ABR28922
  source 1..1701: mol_type = other RNA
atgaagactatcattgctttgagctacattctatgtctggttttcgctcaaaaacttcccggaaatgacaacagcacggcaacgctgtgccttgggcaccatgcagtaccaaacggaacgatagtgaaaacaatcacgaatgaccaaattgaagttactaatgctactgagctggttcagagttcctcaacaggtggaatatgcgacagtcctcatcagatccttgatggagaaaactgcacactaatagatgctctattgggagaccctcagtgtgatggcttccaaaataagaaatgggacctttttgttgaacgcagcaaagcctacagcaactgttacccttatgatgtgccggattatgcctcccttaggtcactagttgcctcatccggcacactggagtttaacaatgaaagcttcaattggactggagtcactcaaaatggaacaagctctgcttgcaaaaggagatctaataacagtttctttagtagattgaattggttgacccatttaaaattcaaatacccagcattgaacgtgactatgccaaacaatgaaaaatttgacaaattgtacatttggggggttcaccacccgggtacagacaatgaccaaatcagcctatatgctcaagcatcaggaagaatcacagtctctaccaaaagaagccaacaaactgtaatcccgaatatcggatctagacccagggtaagggatatccccagcagagtaagcatctattggacaatagtaaaaccgggagacatacttttgattaacagcacagggaatctaattgctcctcggggttacttcaaaatacgaagtgggaaaagctcaataatgagatcagatgcacccattggcaaatgcaattctgaatgcatcactccaaatggaagcattcccaatgacaaaccatttcaaaatgtaaacaggatcacatatggggcctgtcccagatatgttaagcaaaacactctgaaattggcaacagggatgcgaaatgtaccagagaaacaaactagaggcatatttggcgcaatcgcgggtttcatagaaaatggttgggagggaatggtggatggttggtacggtttcaggcatcaaaattctgagggaataggacaagcagcagatctcaaaagcactcaagcagcaatcaaccaaatcaatgggaagctgaataggttgatcgggaaaaccaacgagaaattccatcagattgaaaaagaattctcagaagtagaagggagaattcaggacctcgagaaatatgttgaggacactaaaatagatctctggtcatacaacgcggagcttcttgttgccctggagaaccaacatacaattgatctaactgactcagaaatgaacaaactgtttgaaagaacaaagaagcaactgagggaaaatgctgaggatatgggcaatggttgtttcaaaatataccacaaatgtgacaatgcctgcatagggtcaatcagaaatggaacttatgaccatgatgtatacagagatgaagcattaaacaaccggttccagatcaaaggtgttgagctgaagtcaggatacaaagattggatcctatggatttcctttgccatatcatgttttttgctttgtgttgctttgttggggttcatcatgtgggcctgccaaaaaggcaacattaggtgcaacatttgcatttga

SEQ ID NO: 32205 - RNA, 1701 nt, synthetic construct
  misc_feature 1..1701: note = hemagglutinin__InfluenzaA__ABR88080
  source 1..1701: mol_type = other RNA
atgaagactatcattgctttgagctacattctatgtctggttttcgctcaaaaacttcccggaaatgacaacagcacggcaacgctgtgccttgggcaccatgcagtaccaaacggaacgatagtgaaaacaatcacgaatgaccaaattgaagttactaatgctactgagctggttcagagttcctcaacaggtgaaatatgcgacagtcctcatcagatccttgatggagaaaactgcacactaatagatgctctattgggagaccctcagtgtgatggcttccaaaataagaaatgggacctttttgttgaacgcagcaaagcctacagcaactgttacccttatgatgtgccggattatgcctcccttaggtcactagttgcctcatccggcacactggagtttaacaatgaaagcttcaattggactggagtcactcaaaatggaacaagctctgcttgcaaaaggagatctaataacagtttctttagtagactgaattggttgacccacttaaaattcaaatacccagcattgaacgtgactatgccaaacaatgaaaaatttgacaaattgtacatttggggggttcaccacccgggtacggacaatgaccaaatcttcctgtatgctcaagcatcaggaagaatcacagtctctaccaaaagaagccaacaaactgtaatcccgaatatcggatctagacctagagtaaggaatatccccagcagaataagcatctattggacaatagtaaaaccgggagacatacttttgattaacagcacagggaatctaattgctcctaggggttacttcaaaatacgaagtgggaaaagctcaataatgagatcagatgcacccattggcaaatgcaattctgaatgcatcactccaaatggaagcattcccaatgacaaaccatttcaaaatgtaaacagaatcacatatggggcctgtcccagatatgttaagcaaaacactctgaaattggcaacagggatgagaaatgtaccagagaaacaaactagaggcatatttggcgcaatcgcgggtttcatagaaaatggttgggagggaatggtggatggttggtacggtttcaggcatcaaaattctgagggaataggacaagcagcagatctcaaaagcactcaagcagcaatcaatcaaatcaatgggaagctgaataggttgatcgggaaaaccaacgagaaattccatcagattgaaaaagaattctcagaagtagaagggagaattcaggacctcgagaaatatgttgaggacactaaaatagatctctggtcatacaacgcggagcttcttgttgccctggagaaccaacatacaattgatctaactgactcagaaatgaacaaactgtttgaaagaacaaagaagcaactgagggaaaatgctgaggatatgggcaatggttgtttcaaaatataccacaaatgtgacaatgcctgcataggatcaatcagaaatggaacttatgaccatgatgtatacagagatgaagcattaaacaaccggttccagatcaaaggcgttgagctgaagtcaggatacaaagattggatcctatggatttcctttgccatatcatgttttttgctttgtgttgttttgttggggttcatcatgtgggcctgccaaaaaggcaacattaggtgcaacatttgcatttga

SEQ ID NO: 32206 - RNA, 1701 nt, synthetic construct
  misc_feature 1..1701: note = hemagglutinin__InfluenzaA__ABS00315
  source 1..1701: mol_type = other RNA
atgaaagcaaaactactagtcctgttatgtgcatttacagctacagatgcagacacaatatgtataggctaccatgcgaacaactcaaccgacactgttgacacagtacttgaaaagaacgtgacagtgacacactctgtcaacctacttgaggacagtcacaacggaaaactatgtcgactaaaaggaatagccccactacaattgggtaattgcagcgttgccggatggatcttaggaaacccagaatgcgaatcactgttttctaagaaatcatggtcctacattgcagaaacaccaaactccgagaatggaacatgttacccagggtatttcgccgactatgaggaactgagggagcaattgagttcagtatcatcattcgagagattcgaaatattccccaaagaaagctcatggcccaaccacaccgtaaccaaaggagtatcggcatcatgctcccataaggggagaagcagtttttacagaaatttgctatggctgacggagaagaatggctcgtacccaaatctgagcaagtcctatgtgaacaacaaagagagagaagtccttgtactatggggtgttcatcacccgtctaacataggggagcaaagggccatctatcatacagaaaatgcttatgtctccgtagtgtcttcacattataacaggagattcaccccagaaatagcaaaaagacccaaagtaagaggtcaagaaggaagaattaactactactggactctgctggaacccggggacacaataatatttgaggcaaatggaaatctaatagcgccatggtatgctttcgcactgagtagaggctttgggtcaggaatcatcacctcaaacgcatcaatggatgaatgtgacgcgaagtgtcaaacaccccagggagctataaacagtagtcttcctttccagaatgtacacccagtcacaataggagagtgcccaaagtatgtcaggagtacaaaattaaggatggttacaggactaaggaacatcccatccattcaatccagaggtttgtttggagccattgccggtttcattgaaggggggtggactggaatgatagatggatggtatggttatcatcatcagaatgaacaaggatctggctatgctgcggatcaaaaaagcacacaaaatgccattaacgggattacaaacaaggtgaattctgtaatcgagaaaatgaacactcaattcacagctgtgggcaaagaattcaacaaattagaaagaaggatggaaaacttaaataaaaaagttgatgatggatttctggacatttggacatataatgcagaattgttggttctactggaaaatgaaaggactttggattttcatgactcaaatgtgaagaatctgtatgagaaagtaaaaagccaattaaagaataatgccaaagaaataggaaacgggtgttttgaattctaccacaagtgtaacaatgaatgcatggaaagtgtgaaaaatggaacttatgactacccaaaatattccgaggaatcaaagttaaacagggaaaaaattgatggagtgaaattggaatcaatgggagtctatcagattctggcgatctactcaactgtcgccagttcactggtgcttttggtctccctgggggcaatcagtttctggatgtgttctaatgggtctttgcagtgtagaatatgcatctga

SEQ ID NO: 32207 - RNA, 1701 nt, synthetic construct
  misc_feature 1..1701: note = hemagglutinin__InfluenzaA__ABS00326
  source 1..1701: mol_type = other RNA
atgaaagcaaaactactagtcctgttatgtgcatttacagctacagatgcagacacaatatgtataggctaccatgcgaacaactcaaccgacactgttgacacagtacttgaaaagaacgtgacagtgacacactctgtcaacctacttgaggacagtcacaacggaaaactatgtcgactaaaaggaatagccccactacaattgggtaattgcagcgttgccggatggatcttaggaaacccagaatgcgaatcactgttttctaagaaatcatggtcctacattgcagaaacaccaaactccgagaatggaacatgttacccagggtatttcgccgactatgaggaactgagggagcaattgagttcagtatcatcattcgagagattcgaaatattccccaaagaaagctcatggcccaaccacaccgtaaccaaaggagtatcggcatcatgctcccataaggggagaagcagtttttacagaaatttgctatggctgacggagaagaatggctcgtacccaaatctgagcaagtcctatgtgaacaacaaagagaaagaagtccttgtactatggggtgttcatcacccgtctaacataggggagcaaagggccatctatcatacagaaaatgcttatgtctcagtagtgtcttcacattataacaggagattcaccccagaaatagcaaaaagacccaaagtaagaggtcaagaaggaagaattaactactactggactctgctggaacccggggacacaataatatttgaggcaaatggaaatctaatagcgccatggtatgctttcgcactgagtagaggctttgggtcaggaatcatcacctcaaacgcatcaatggatgaatgtgacgcgaagtgtcaaacaccccagggagctataaacagtagtcttcctttccagaatgtacacccagtcacaataggagagtgcccaaagtatgtcaggagtacaaaattaaggatggttacaggactaaggaacatcccatccattcaatccagaggtttgtttggagccattgccggtttcattgaaggggggtggactggaatgatagatggatggtatggttatcatcatcagaatgaacaaggatctggctatgctgcggatcaaaaaagcacacaaaatgccattaacgggattacaaacaaggtgaattctgtaatcgagaaaatgaacactcaattcacagctgtgggcaaagaattcaacaaattagaaagaaggatggaaaacttaaataaaaaagttgatgatggatttctggacatttggacatataatgcagaattgttggttctactggaaaatgaaaggactttggattttcatgactcaaatgtgaagaatctgtatgagaaagtaaaaagccaattaaagaataatgccaaagaaataggaaacgggtgttttgaattctaccacaagtgtaacaatgaatgcatggaaagtgtgaaaaatggaacttatgactatccaaaatattccgaggaatcaaagttaaacagggaaaaaattgatggagtgaaattggaatcaatgggagtctatcagattctggcgatctactcaactgtcgccagttcactggtgcttttggtctccctgggggcaatcagtttctggatgtgttctaatgggtctttgcagtgtagaatatgcatctga

SEQ ID NO: 32208 - RNA, 1701 nt, synthetic construct
  misc_feature 1..1701: note = hemagglutinin__InfluenzaA__ABS49899
  source 1..1701: mol_type = other RNA
atgaagaccatcattgctttgagctacattttctgtctggctctcggccaagaccttccaggaaatgacaacagtacagcaacgctgtgcctgggacatcatgcggtgccaaacggaacactagtgaaaacaatcacaaatgatcagattgaagtgactaatgctactgagctagttcagagttcctcaacggggaaaatatgcaacaatcctcatcgaatccttgatggaataaactgcacactgatagacgctctattgggggaccctcattgtgatgttttccaagatgagacatgggaccttttcgttgaacgcagcaaagctttcagcaactgttacccttatgatgtgccagattatgcctcccttaggtcactagttgcctcgtcaggcactctggagtttatcactgagggtttcacttggactggggtcactcagaatgggggaagcaatgcttgcaaaaggggacctggtagcggttttttcagtagactgaactggttgaccaaatcaggaagcacatatccagtgctgaacgtgactatgccaaacaatgacaattttgacaaactatacatttggggggttcaccacccgagcacgaaccaagaacaaaccagcctgtatgttcaagcgtcagggagagtcacagtctctaccaggagaagccagcaaactataatcccgaatatcgggtccagaccctgggtaaggggtctgtctagtagaataagcatctattggacaatagttaaaccgggagacgtactggtaattaatagtaatgggaacctaatcgctcctcggggttatttcaaaatgcgcactgggaaaagctcaataatgaggtcagatgcacctattgatacctgtatttctgaatgcatcactccaaatggaagcattcccaatgacaagccctttcaaaacgtaaacaagatcacatatggagcatgccccaagtatgttaagcaaaacaccctgaaattggcaacagggatgcggaatgtaccagagaaacaaactagaggcctattcggagcaatagcaggcttcatagaaaatggttgggagggaatgatagacggttggtacggtttcaggcatcaaaattctgagggcacaggacaagcagcagatcttaaaagcactcaagcagccatcgaccaaatcaatgggaaattgaacagggtaatcgagaagacgaacgagaaattccatcaaatcgaaaaggaattctctgaagtagaagggagaattcaggacctcgagaaatacgttgaagacactaaaatagatctctggtcttacaatgcggagcttcttgtcgctctggagaatcaacatacaattgacctgactgactcggaaatgaacaagctgtttgaaaaaacaaggaggcaactgagggaaaatgctgaagacatgggcaatggttgcttcaaaatataccacaaatgtgacaacgcttgcatagagtcaatcagaaatgggacttatgaccatgatgtatacagagacgaagcattaaacaaccggtttcagatcaaaggtgttgaactgaagtctggatacaaagactggatcctgtggatttcctttgccatatcatgctttttgctttgtgttgttttgctggggttcatcatgtgggcctgccagagaggcaacattaggtgcaacatttgcatttga

SEQ ID NO: 32209 - RNA, 1701 nt, synthetic construct
  misc_feature 1..1701: note = hemagglutinin__InfluenzaA__ABS49910
  source 1..1701: mol_type = other RNA
atgaagaccatcattgctttgagctacattttctgtctggctctcggccaagaccttccaggaaatgacaacagtacagcaacgctgtgcctgggacatcatgcggtgccaaacggaacactagtgaaaacaatcacaaatgatcagattgaagtgactaatgctactgagctagttcagagctcctcaacggggaaaatatgcaacaatcctcatcgaatccttgatggaataaactgcacactgatagacgctctattgggggaccctcattgtgatgttttccaagatgagacatgggaccttttcgttgaacgcagcaaagctttcagcaactgttacccttatgatgtgccagattatgcctcccttaggtcactagttgcctcgtcaggcactctggagtttatcactgagggtttcacttggactggggtcactcagaatgggggaagcaatgcttgcaaaaggggacctggtagcggttttttcagtagactgaactggttgaccaaatcaggaagcacatatccagtgctgaacgtgactatgccaaacaatgacaattttgacaaactatacatttggggggttcaccacccgagcacgaaccaagaacaaaccagcctgtatgttcaagcatcagggagagtcacagtctctaccaggagaagccagcaaactataatcccgaatatcgggtccagaccctgggtaaggggtctgtctagtagaataagcatctattggacaatagttaaaccgggagacgtactggtaattaatagtaatgggaacctaatcgctcctcggggttatttcaaaatgcgcactgggaaaagctcaataatgaggtcagatgcacctattgatacctgtatttctgaatgcatcactccaaatggaagcattcccaatgacaagccctttcaaaacgtaaacaagatcacatatggagcatgccccaagtatgttaagcaaaacaccctgaaattggcaacagggatgcggaatgtaccagagaaacaaactagaggcctattcggcgcaatagcaggcttcatagaaaatggttgggagggaatgatagacggttggtacggtttcaggcatcaaaattctgagggcacaggacaagcagcagatcttaaaagcactcaagcagccatcgaccaaatcaatgggaaattgaacagggtaatcgagaagacgaacgaaaaattccatcaaatcgaaaaggaattctctgaagtagaagggagaattcaggacctcgagaaatacgttgaagacactaaaatagatctctggtcttacaatgcggagcttcttgtcgctctggagaatcaacatacaattgacctgactgactcggaaatgaacaagctgtttgaaaaaacaaggaggcaaatgagggaaaatgctgaagacatgggcaatggttgcttcaaaatataccacaaatgtgacaacgcttgcatagagtcaatcagaaatgggacttatgaccatgatgtatacagagacgaagcattaaacaaccggtttcagatcaaaggtgttgaactgaagtctggatacaaagactggatcctgtggatttcctttgccatatcatgctttttgctttgtgttgttttgctggggttcatcatgtgggcctgccagagaggcaacattaggtgcaacatttgcatttga

SEQ ID NO: 32210 - RNA, 1701 nt, synthetic construct; identical to SEQ ID NO: 31154
  misc_feature 1..1701: note = hemagglutinin__InfluenzaA__ABS49965
  source 1..1701: mol_type = other RNA

SEQ ID NO: 32211 - RNA, 1698 nt, synthetic construct
  misc_feature 1..1698: note = hemagglutinin__InfluenzaA__ABS49976
  source 1..1698: mol_type = other RNA
atgaaagtaaaactactggtcctgttatgtacatttacagctacatatgcagacacaatatgtatagggtaccatgccaacaactcaaccgacactgttgacacagtacttgagaagaatgtgacagtgacacactctgtcaacctacttgaggacagtcacaatggaaaactatgtctactaaaaggaatagccccactacaattgggtaattgcagcgttgccggatggatcttaggaaacccagaatgcgaattactgatttccaaggaatcatggtcctacattgtagaaacaccaaatcctgagaatggaacatgttacccagggtatttcgccgactatgaggaactgagggagcaattgagttcagtatcttcatttgagagattcgaaatattccccaaagaaagctcatggcccaaccacaccgtaaccggagtatcagcatcatgctcccataatgggaaaagcagtttttacagaaatttgctatggctgacggggaagaatggtttgtacccaaacctgagcaagtcctatgcaaacaacaaagagaaagaagtccttgtactatggggtgttcatcacccgcctaacatagggaaccaaagggccctctatcatacagaaaatgcttatgtctctgtagtgtcttcacattatagcagaagattcaccccagaaatagccaaaagacccaaagtaagagatcaggaaggaagaatcaactactactggactctgctggaacccggggatacaataatatttgaggcaaatggaaatctaatagcgccacggtatgcgttcgcactgagtagaggctttggatcaggaatcatcacctcaaatgcaccaatggatgaatgtgatgcgaagtgtcaaacacctcagggagctataaacagcagtcttcctttccagaacgtacacccagtcacaataggagagtgtccaaagtatgtcaggagtgcaaaattaaggatggttacaggactaaggaacatcccatccattcaatccagaggtttgtttggagccattgccggtttcattgaaggggggtggactggaatggtagatgggtggtatggttatcatcatcagaatgagcaaggatctggctatgccgcagatcaaaaaagcacacaaaatgccattaacgggattacaaacaaggtgaattctgtaattgagaaaatgaacactcaattcacagctgtgggcaaagaattcaacaaattggaaagaaggatggaaaacttaaataaaaaagttgatgatgggtttctagacatttggacatataatgcagaattgttggttctactggaaaatgaaaggactttggatttccataactccaatgtgaagaatctgtatgagaaagtaaaaagccaattaaagaataatgccaaagaaataggaaacgggtgttttgaattctaccacaagtgtaacaatgaatgcatggagagtgtgaaaaatggaacttatgactatccaaaatattccgaagaatcaaagttaaacagggagaaaattgatggagtgaaattggaatcaatgggagtctatcagattctggcgatctactcaactgtcgccagttccctggttcttttggtctccctgggggcaatcagcttctggatgtgttccaatgggtctttgcagtgtagaatatgcatctga

SEQ ID NO: 32212 - RNA, 1698 nt, synthetic construct
  misc_feature 1..1698: note = hemagglutinin__InfluenzaA__ABS49987
  source 1..1698: mol_type = other RNA
atgaaagtaaaactactggtcctgttatgtacatttacagctacatatgcagacacaatatgtatagggtaccatgccaacaactcaaccgacactgttgacacagtacttgagaagaatgtgacagtgacacactctgtcaacctacttgaggacagtcacaatggaaaactatgtctactaaaaggaatagccccattacaattgggtaattgcagcgttgccggatggatcttaggaaacccagaatgcgaattactgatttccaaggaatcatggtcctacattgtagaaacaccaaatcctgagaatggaacatgttacccagggtatttcgctgactatgaggaactgagggagcaattgagttcagtatcttcatttgagagattcgaaatattccccaaagaaagctcatggcccaaccacaccgtaaccggagtatcagcatcatgctcccataatgggaaaagcagtttttacagaaatttgctatggctgacggggaagaatggtttgtacccaaacctgagcaagtcctatgcaaacaacaaagagaaagaagtccttgtactatggggtgttcatcacccgcctaacataggggaccaaagggccctctatcatacagaaaatgcttatgtctctgtagtgtcttcacattatagcagaagattcaccccagaaatagccaaaagacccaaagtaagagatcaggaaggaagaatcaactactactggactctgctggaacccggggatacaataatatttgaggcaaatggaaatctaatagcgccacggtatgctttcgcactgagtagaggctttggatcaggaatcatcacctcaaatgcaccaatggatgaatgtgatgcgaagtgtcaaacacctcagggagctataaacagcagtcttcctttccagaacgtacacccagtcacaataggagagtgtccaaagtatgtcaggagtgcaaaattaaggatggttacaggactaaggaacatcccatccattcaatccagaggtttgtttggagccattgccggtttcattgaaggggggtggactggaatggtagatgggtggtatggttatcatcatcagaatgagcaaggatctggctatgccgcagatcaaaaaagcacacaaaatgccattaacgggattacaaacaaggtgaattctgtaattgagaaaatgaacactcaattcacagctgtgggcaaagaattcaacaaattggaaagaaggatggaaaacttaaataaaaaagttgatgatgggtttctagacatttggacatataatgcagaattgttggttctactggaaaatgaaaggactttggatttccatgactccaatatgaagaatctgtatgagaaagtaaaaagccaattaaagaataatgccaaagaaataggaaacgggtgttttgaattctatcacaagtgtaacaatgaatgcatggagagtgtgaaaaatggaacttatgactatccaaaatattccgaagaatcaaagttaaacagggagaaaattgatggagtgaaattggaatcaatgggagtctatcagattctggcgatctactcaactgtcgccagttccctggttcttttggtctccctgggggcaatcagcttctggatgtgttccaatgggtctttgcagtgtagaatatgcatctga

SEQ ID NO: 32213 - RNA, 1701 nt, synthetic construct
  misc_feature 1..1701: note = hemagglutinin__InfluenzaA__ABS49998
  source 1..1701: mol_type = other RNA
atgaagactatcattgctttgagctacattttatgtctggttttcgctcaaaaacttcccggaaatgacaacagcacggcaacgctgtgcctggggcaccatgcagtgccaaacggaacgctagtgaaaacaatcacgaatgaccaaattgaagtgactaatgctactgagctggttcagagttcctcaacaggtggaatatgcgacagtcctcaccaaatccttgatggagaaaactgcacactaatagatgctctattgggagaccctcattgtgatggcttccaaaataaggaatgggacctttttgttgaacgcagcaaagcctacagcaactgttacccttatgatgtgccggattatgcctcccttaggtcactagttgcctcatccggcacactggagtttaacaatgaaagcttcaattggacaggagtcgctcagaatggaacaagctctgcttgcaaaaggagatctaataaaagtttctttagtagattgaattggttgcaccaattaaaatacaaatacccagcactgaacgtgattatgccaaacaatgaaaaatttgacaaattgtacatttggggggttcaccacccgagtacggacagtgaccaaatcagcctatatgctcaagcaccagggagagtcacagtctctaccaaaagaagccaacaaactgtaatcccgaatatcggatctagaccctgggtaaggggtgtctccagcagaataagcatctattggacaatagtaaaaccgggagacatacttttgattaactgcacagggaatctaattgctcctcggggttacttcaaaatacgaagtgggaaaagctcaataatgaggtcagatgcatccattggcaaatgcaattctgaatgcatcactccaaatggaagcattcccaatgacaaaccatttcaaaatgtaaacaggatcacatatggggcctgtcccagatatgttaagcaaaacactctgaaattggcaacagggatgcggaatgtaccagagaaacaaactagaggcatattcggcgcaatcgcgggtttcatagaaaatggttgggagggaatggtggacggttggtacggtttcaggcatcaaaattctgagggcacaggacaagcagcagatctcaaaagcactcaagcagcaatcaaccaaatcaacgggaaactgaataggttaatcgagaaaacgaacgagaaattccatcaaattgaaaaagaattctcagaagtggaagggagaattcaggacctcgagaaatatgttgaggacactaaaatagatctctggtcgtacaacgcggagcttcttgttgccctggagaaccagcatacaattgatctaactgactcagaaatgaacaaactgtttgaaagaacaaagaagcaactgagggaaaatgctgaggatatgggcaatggttgtttcaaaatataccacaaatgtgacaatgcctgcatagggtcaatcagaaatgggacttatgaccatgatgtatacagagacgaagcattaaacaaccggttccagatcaaaggtgttgagctgaagtcaggatacaaagattggatcctatggatttcctttgccatatcatgttttttgctttgtgttgtcttgctgggattcatcatgtgggcctgccaaaaaggcaacattaggtgcaacatttgcatttga

SEQ ID NO: 32214 - RNA, 1701 nt, synthetic construct
  misc_feature 1..1701: note = hemagglutinin__InfluenzaA__ABS50009
  source 1..1701: mol_type = other RNA
atgaagactatcattgctttgagctacattttatgtctggttttcgctcaaaaacttcccggaaatgacaacagcacggcaacgctgtgcctggggcaccatgcagtgccaaacggaacgctagtgaaaacaatcacgaatgaccaaattgaagtgactaatgctactgagctggttcagagttcctcaacaggtggaatatgcgacagtcctcaccaaatccttgatggagaaaactgcacactaatagatgctctattgggagaccctcattgtgatggcttccaaaataaggaatgggacctttttgttgaacgcagcaaagcctacagcaactgttacccttatgatgtgccggattatgcctcccttaggtcactagttgcctcatccggcacactggagtttaacaatgaaagcttcaattggactggagtcgctcagaatggaacaagctctgcttgcaaaaggagatctaataaaagtttctttagtagattgaattggttgcaccaattaaaatacaaatacccagcactgaacgtgactatgccaaacaatgaaaaatttgacaaattgtacatttggggggttcaccacccgagtacggacagtgaccaaatcagcctatatgctcaagcaccagggagagtcacagtctctaccaaaagaagccaacaaactgtaatcccgaatatcggatctagaccctgggtaaggggtgtctccagcaaaataagcatctattggacaatagtaaaaccgggagacatacttttgattaactgcacagggaatctaattgctcctcggggttacttcaaaatacgaagtgggaaaagctcaataatgaggtcagatgcatccattggcaaatgcaattctgaatgcatcactccaaatggaagcattcccaatgacaaaccatttcaaaatgtaaacaggatcacatatggggcctgtcccagatatgttaagcaaaacactctgaaattggcaacagggatgcggaatgtaccagagaaacaaactagaggcatattcggcgcaatcgcgggtttcatagaaaatggttgggagggaatggtggacggttggtacggtttcaggcatcaaaattctgagggcacaggacaagcagcagatctcaaaagcactcaagcagcaatcaaccaaatcaacgggaaactgaataggttaatcgagaaaacgaacgagaaattccatcaaattgaaaaagaattctcagaagtggaagggagaattcaggacctcgagaaatatgttgaggacactaaaatagatctctggtcgtacaacgcggagcttcttgttgccctggagaaccagcatacaattgatctaactgactcagaaatgaacaaactgtttgaaagaacaaagaagcaactgagggaaaatgctgaggatatgggcaatggttgtttcaaaatataccacaaatgtgacaatgcctgcatagggtcaatcagaaatgggacttatgaccatgatgtatacagagacgaagcattaaacaaccggttccagatcaaaggtgttgagctgaagtcaggatacaaagattggatcctatggatttcctttgccatatcatgttttttgctttgtgttgtcttgctgggattcatcatgtgggcctgccaaaaaggcaacattaggtgcaacatttgcatttga

SEQ ID NO: 32215 - RNA, 1701 nt, synthetic construct
  misc_feature 1..1701: note = hemagglutinin__InfluenzaA__ABS50020
  source 1..1701: mol_type = other RNA
atgaagactatcattgctttgagctacattttatgtctggttttcgctcaaaaacttcccgtaaatgacaacagcacggcaacgctgtgcctgggacaccatgcagtgccaaacggaacgctagtgaaaacaatcacgaatgaccacattgaagtgactaatgctactgagttggttcagagttcctcaacaggtagaatatgcgacagtcctcaccaaatccttgatggagaaaactgcacactaatagatgctctattgggagacccgcattgtgatggcttccaaaataaggaatgggacctttttgttgaacgcagcacagcctacagcaactgttacccttatgatgtgccggattatgcctcccttaggtcactagttgcctcatccggcacactggagtttaacaatgaaagcttcaattggactggagtcgctcagaatggaacaagctctgcttgcaaaaggagatctattaaaagtttctttagtagattgaattggttgcaccaattaaaatacaaatatccagcactgaacgtgactatgccaaacaatgaaaaatttgacaaattgtacatttggggggttcaccacccgagtacggacagtgaccaaatcagcctatatgctcaagcatcagggagagtcacagtctctaccaaaagaagccaacaaactgtaatcccgaatatcgggtctagaccctgggtaaggggtgtctccagcagaataagcatctattggacaatagtaaaaccgggagacatacttttgattaacagcacagggaatctaattgctcctcggggttactttaaaatacgaagtgggaaaagctcaataatgaggtcaaatgcacccattggcaaatgcaattctgaatgcatcactccaaatggaagcattcccaatgacaaaccatttcaaaatgtaaacaggatcacatatggggcctgtcccagatatgttaagcaaaacactctgaaattggcaacaggaatgcggaatgtaccagagaaacaaactagaggcatattcggcgcaatcgcgggtttcatagaaaatggttgggagggaatggtagacggttggtacggtttcaggcatcaaaattctgagggcacaggacaagcagcagatcttaaaagcactcaagcagcaatcaaccaaatcaacgggaaactgaataggttaatcgagaaaacaaacgagaaattccatcaaattgaaaaagaattctcagaagtagaagggagaattcaggacctcgagaaatatgttgaggacactaaaatagatctctggtcgtacaacgcggagcttcttgttgccctggagaaccaacatacaattgatctaactgactcagaaatgaacaaactgtttgaaagaacaaggaagcaactgagggaaaatgctgaggagatgggcaatggttgtttcaaaatataccacaaatgtgacaatgcctgcatagggtcaatcagaaatggaacttatgaccatgatgtatacagagacgaagcattaaacaaccggttccagatcaaaggtgttgagctgaagtcaggatacaaagattggatcctatggatttcctttgccatatcatgttttttgctttgtgttgttttgctggggttcatcatgtgggcctgccaaaaaggcaacattaggtgcaacatttgcatttga

SEQ ID NO: 32216 - RNA, 1701 nt, synthetic construct
  misc_feature 1..1701: note = hemagglutinin__InfluenzaA__ABS50031
  source 1..1701: mol_type = other RNA
atgaagactatcattgctttgagctacatgttatgtctggttttcgctcaaaaacttcccggaaatgacaacagcacggcaatgctgtgcctggggcaccatgcagtgccaaacggaacgctagtgaaaacaatcacgaatgaccaaattgaagtgactaatgctactgagctggttcagagttcctcaacaggtggaatatgcgacagtcctcaccaaatccttgatggagaaaactgcacactaatagatgctctattgggagaccctcattgtgatggcttccaaaataaggaatgggacctttttgttgaacgcagcaaagcctacagcaactgttacccttatgatgtgccggattatgcctcccttaggtcactagttgcctcatccggcacactggagtttaacaatgaaagcttcaattggactggagtcgctcagaatggaacaagctctgcttgcaaaaggagatctaataaaagtttctttagtagattgaattggttgcaccaattaaaatacaaatacccagcactgaacgtgactatgccaaacaatgaaaaatttgacaaattgtacatttggggggttcaccacccgagtacggacagtgaccaaatcagcctatatgctcaagcaccagggagagtcacagtctctaccaaaagaagccaacaaactgtaatcccgaatatcggatctggaccctgggtaaggggtgtctccagcagaataagcatctattggacaatagtaaaaccgggagacatacttttgattaactgcacagggaatctaattgctcctcggggttacttcaaaatacgaagtgggaaaagctcaataatgaggtcagatgcatccattggcaaatgcaattctgaatgcatcactccaaatggaagcattcccaatgacaaaccatttcaaaatgtaaacaggatcacatatggagcctgtcccagatatgttaagcaaaacactctgaaattggcaacagggatgcggaatgtaccagagaaacaaactagaggcatattcggcgcaatcgcgggtttcatagaaaatggttgggagggaatggtggacggttggtacggtttcaggcatcaaaattctgagggcacaggacaagcagcagatctcaaaagcactcaagcagcaatcaaccaaatcaacgggaaactgaataggttaatcgagaaaacgaacgagaaattccatcaaattgaaaaagaattctcagaagtggaagggagaattcaggacctcgagaaatatgttgaggacactaaaatagatctctggtcgtacaacgcggagcttcttgttgccctggagaaccagcatacaattgatctaactgactcagaaatgaacaaactgtttgagagaacaaagaagcaactgagggaaaatgctgaggatatgggcaatggttgtttcaaaatataccacaaatgtgacaatgcctgcatagggtcaatcagaaatgggacttatgaccatgatgtatacagagacgaagcattaaacaaccggttccagatcaaaggtgttgagctgaagtcaggatacaaagattggatcctatggatttcctttgccatatcatgttttttgctttgtgttgtcttgctggggttcatcatgtgggcctgccaaaaaggcaacattaggtgcaacatttgcatttga

SEQ ID NO: 32217 - RNA, 1701 nt, synthetic construct; identical to SEQ ID NO: 31947
  misc_feature 1..1701: note = hemagglutinin__InfluenzaA__ABS50042
  source 1..1701: mol_type = other RNA

SEQ ID NO: 32218 - RNA, 1701 nt, synthetic construct
  misc_feature 1..1701: note = hemagglutinin__InfluenzaA__ABS50053
  source 1..1701: mol_type = other RNA
atgaagactatcattgctttgagctacattttatgtctggttttcgctcaaaaacttcccggaaatgacaacagcacggcaacgctgtgcctggggcaccatgcagtgccaaacggaacgctagtgaaaacaatcacgaatgaccaaattgaagtgactaatgctactgagctggttcagagttcctcaacaggtagaatatgcgacagtcctcaccaaatccttgatggagaaaactgcacactaatagatgctctattgggagaccctcattgtgatggcttccaaaataaggaatgggacctttttgttgaacgcagcaaagcctacagcaactgttacccttatgatgtgccggattatgtctcccttaggtcactagttgcctcatcaggcacgctggagtttaacaatgaaagcttcaattggactggagtcgctcagaatggaacaagctctgcttgcaaaaggagatctgataaaagtttctttagtagattgaattggttgcaccaattaaaatacaaatatccagcactgaacgtgactatgccaaacaatgaaaaatttgacaaattgtacatttggggggttcaccacccgggtacagacagtgaccaaatcagcctatatgctcaagcatcagggagagtcacagtctctaccaaaagaagccaacaaactgtaatcccgaatatcggatctagaccctgggtaaggggtatctccagcagaataagcatctattggacaatagtaaaaccgggagacatacttttgattaacagcacagggaatctaattgctcctcggggttacttcaaaatacgaagtgggaaaagctcaataatgaggtcagatgcacccattggcaaatgcaattctgaatgcatcactccaaatggaagcattcccaatgacaaaccatttcaaaatgtaaacaggatcacatatgggccctgtcccagatatgttaagcaaaacactctgaaattggcaacagggatgcggaatgtgccagagaaacaaactagaggcatattcggtgcaatcgcgggcttcatagaaaatggttgggagggaatgatggacggttggtacggtttcaggcatcaaaattctgagggcacagggcaagcagcagatcttaaaagcactcaagcagcaatcaaccaaatcaacgggaaactgaataggttaatcgagaaaacgaacgagaaattccatcaaattgaaaaagaattctcagaagtagaagggagaattcaggacctcgagaaatatgttgaggacactaaaatagatctctggtcgtacaatgcggagcttcttgttgccctggagaaccaacatacaattgatctaactgactcagaaatgaacaaactgtttgaaagaacaaagaagcaactgagggaaaatgctgaggatatgggcaatggttgtttcaaaatataccacaaatgtgacaatgcctgcatagggtcaatcagaaatggaacttatgaccatgatgtatacagagacgaagcattgaacaaccggttccagatcaaaggtgttgagctgaagtcaggatacaaagattggatcctatggatttcctttgccatatcatgttttttgctttgtattgttttgctggggttcatcatgtgggcctgccaaaaaggcaacattaggtgcaacatttgcatttga

SEQ ID NO: 32219 - RNA, 1701 nt, synthetic construct
  misc_feature 1..1701: note = hemagglutinin__InfluenzaA__ABS50064
  source 1..1701: mol_type = other RNA
atgaagactatcattgctttgagctacattttatgtctggttttcgctcaaaaacttcccggaaatgacaacagcacggcaacgctgtgcctggggcaccatgcagtgccaaacggaacgctagtgaaaacaatcacgaatgaccaaattgaagtgactaatgctactgagctggttcagagttcctcaacaggtagaatatgcgacagtcctcaccaaatccttgatggagaaaactgcacactaatagatgctctattgggagaccctcattgtgatggcttccaaaataaggaatgggacctttttgttgaacgcagcaaagcctacagcaactgttacccttatgatgtgccggattatgtctcccttaggtcactagttgcctcatcaggcacgctggagtttaacaatgaaagcttcaattggactggagtcgctcagaatggaacaagctctgcttgcaaaaggagatctgataaaagtttctttagtagattgaattggttgcaccaattaaaatacaaatatccagcactgaacgtgactatgccaaacaatgaaaaatttgacaaattgtacatttggggggttcaccacccgggtacagacagtgaccaaatcagcctatatgctcaagcatcagggagagtcacagtctctaccaaaagaagccaacaaactgtaatcccgaatatcggatctagaccctgggtaaggggtgtctccagcagaataagcatctattggacaatagtaaaaccgggagacatacttttgattaacagcacagggaatctaattgctcctcggggttacttcaaaatacgaagtgggaaaagctcaataatgaggtcagatgcacccattggcaaatgcaattctgaatgcatcactccaaatggaagcattcccaatgacaaaccatttcaaaatgtaaacaggatcacatatgggccctgtcccagatatgttaagcaaaccactctgaaattggcaacagggatgcggaatgtgccagagaaacaaactagaggcatattcggtgcaatcgcgggcttcatagaaaatggttgggagggaatgatggacggttggtacggtttcaggcatcaaaattctgagggcacagggcaagcagcagatcttaaaagcactcaagcagcaatcaaccaaatcaacgggaaactgaataggttaatcgaaaaaacgaacgagaaattccatcaaattgaaaaagaattctcagaagtagaagggagaattcaggacctcgagaaatatgttgaggacactaaaatagatctctggtcgtacaatgcggagcttcttgtttccctggagaaccaacatacaattgatctaactgactcagaaatgaacaaactgtttgaaagaacaaagaagcaactgagggaaaatgctgaggatatgggcaatggttgtttcaaaatataccacaaatgtgacaatgcctgcatagggtcaatcagaaatggaacttatgaccatgatgtatacagagacgaagcattgaacaaccggttccagatcaaaggtgttgagctgaagtcaggatacaaagattggatcctatggatttcctttgccatatcatgttttttgctttgtattgttttgctggggttcatcatgtgggcctgccaaaaaggcaacattaggtgcaacatttgcatttga

SEQ ID NO: 32220 - RNA, 1701 nt, synthetic construct
  misc_feature 1..1701: note = hemagglutinin__InfluenzaA__ABS50075
  source 1..1701: mol_type = other RNA
atgaagactatcattgctttgagctacattctatgtctggttttcgctcaaaaacttcccggaaatgacaacagcacggcaacgctgtgccttgggcaccatgcagtaccaaacggaacgatagtgaaaacaatcacgaatgaccaaattgaagttactaatgctactgagctggttcagagttcctcaacaggtggaatatgcgacagtcctcataagatccttgatggagaaaactgcacactaatagatgctctattgggagaccctcagtgtgatggcttccaaaataagaaatgggacctttttgttgaacgcagcaaagcctacagcaactgttacccttatgatgtgccggattatgcctcccttaggtcactaattgcctcatccggcacactggagtttaacaatgaaagcttcaattggactggagtcactcaaaatggaacaagctctgcttgcaaaaggagatctaatagcagtttctttagtagattgaattggttgacccacttaaaattcaaatacccagcattgaacgtgactatgccaaacaatgaagaatttgacaaattgtacatttggggggttcaccacccgggtacatacaatgaccaaatcagcctatatgctcaagcatcaggaagaatcacagtctctaccaaaagaagccaacaaactgtaatcccgaatatcgggtctagacccagggtaagggatatccccagcagaataagcatctattggacaatagtaaaaccgggagacatacttttgattaacagcacagggaatctaattgctcctcggggttacttcaaaatacgaagtgggaaaagctcaataatgagatcagatgcacccattggcaaatgcaattctgaatgcatcactccaaatggaagcattcccaatgacaaaccatttcaaaatgtaaacaggatcacatatggggcctgtcccagatatgttaagcaaaacactctgaaattggcaacagggatgcgaaatgtaccagagaaacaaactagaggcatatttggcgcaatcgcgggtttcatagaaaatggttgggagggaatggtggatggttggtacggtttcaggcatcaaaattctgagggaataggacaagcagcagatctcaaaagcactcaagcagcaatcgaccaaatcaatgggaagctgaataggttgatcgggaaaaccaacgagaaattccatcagattgaaaaagaattctcagaagtagaagggagaattcaggacctcgagaaatatgttgaggacactaaaatagatctctggtcatacaacgcggagcttcttgttgccctggagaaccaacatacaattgatctaactgactcagaaatgaacaaactgtttgaaagaacaaagaagcaactgagggaaaatgctgaggatatgggcaatggttgtttcaaaatataccacaaatgtgacaatgcatgcatagggtcaatcagaaatggaacttatgaccatgatgtatacagagatgaagcattaaacaaccggttccagatcaaaggtgttgagctgaagtcaggatacaaagattggatcctatggatttcctttgccatatcatgttttttgctttgtgttgctttgttggggttcatcatgtgggcctgccaaaaaggcaacattaggtgcaacatttgcatttga

SEQ ID NO: 32221 - RNA, 1698 nt, synthetic construct
  misc_feature 1..1698: note = hemagglutinin__InfluenzaA__ABS71665
  source 1..1698: mol_type = other RNA
atgaaagtaaaactactggtcctgttatgcacatttacagctacatatgcagacacaatatgtataggctaccatgccaacaactcaaccgacactgttgacacagtacttgagaagaatgtgacagtgacacactctgtcaacctgcttgaggacagtcacaatggaaaattatgtctattaaaaggaatagccccactacaattgggtaattgcagcgttgccggatggatcttaggaaatccagaatgcgaatcactgatttccagggaatcatggtcctacattgtagaaaaaccaagtcctgagaatgggacatgttacccagggcatttcgccgactatgaggaactaagggagcaattgagttcagtatcttcatttgagagattcgaaatattccccaaagaaagctcatggcccaaccacaccgcaaccggagtatcagcatcatgctcccataatggggaaagcagtttttacaaaaatttgctatggctgacggggaagaatggtttgtacccaaacctgagcaagtcctatgcaaacaacaaagagaaagaagtccttgtactatggggtgttcatcacccgcccaacataggtgaccaaagggccctctatcatacagaaaatgcttatgtctctgtagtgtcttcacattatagcagaaaattcaccccagaaatagccaaaagacccaaagtaagagatcaagaaggaagaatcagctactactggactctacttgaacccggggatacaataatatttgaggcaaatggaaatctaatagcgccaagatatgctttcgcactgagtagaggctttggatcaggaatcatcaactcaaatgcaccaatggatgaatgtgatgcgaagtgccaaacacctcagggagctataaacagcagtcttcctttccagaatgtacacccagtcacaataggagagtgtccaaagtatgtcaggagtgcaaaattaaggatggttacaggactaaggaacatcccatccattcaatccagaggtttgtttggagccattgccggtttcattgaaggggggtggactggaatggtagatggttggtatggttatcatcatcagaatgagcaaggatctggctatgctgcagatcaaaaaagcacacaaaatgccattaatgggattacaaacaaggtgaattctgtaattgagaaaatgaacactcaattcacagctgtgggcaaagaattcaacaaattggaaagaaggatggaaaacttaaataaaaaagttgatgatgggtttatagacatttggacatataatgcagaattgttggttctactggaaaatgaaaggactttggatttccatgactccaatgtgaagaatctgtatgagaaagtaaaaagccaattaaagaataatgccaaagaaataggaaatgggtgttttgaattctatcacaagtgtaacgatgaatgcatggagagtgtaaaaaatggaacttatgactatccaaaatattccgaagagtcaaagttaaacagggagaaaattgatggagtgaaattggaatcaatgggagtctatcagattctggcgatctactcaacagtcgccagttctctggttcttttggtctccctgggggcaatcagcttctggatgtgttccaatgggtctttgcagtgtagaatatgcatctaa

SEQ ID NO: 32222 - RNA, 1698 nt, synthetic construct
  misc_feature 1..1698: note = hemagglutinin__InfluenzaA__ABS71666
  source 1..1698: mol_type = other RNA
atgaaagtaaaactactggtcctgttatgcacatttacagctacatatgcagacacaatatgtataggctaccatgccaacaactcaaccgacactgttgacacagtacttgagaagaatgtgacagtgacacactctgtcaacctgcttgaggacagtcacaatggaaaattatgtctattaaaaggaatagccccactacaattgggtaattgcagcgttgccggatggatcttaggaaatccagaatgcgaatcactgatttccagggaatcatggtcctacattgtagaaaaaccaagtcctgagaatgggacatgttacccagggcatttcgccgactatgaggaactaagggagcaattgagttcagtatcttcatttgagagattcgaaatattccccaaagaaagctcatggcccaaccacaccgcaaccggagtatcagcatcatgctcccataatgggaaaagcagtttttacaaaaatttgctatggctgacggggaagaatggtttgtacccaaacctgagcaagtcctatgcaaacaacaaagagaaagaagtccttgtactatggggtgttcatcacccgcccaacataggtgaccaaagggccctctatcatacagaaaatgcttatgtctctgtagtgtcttcacattatagcagaaaattcaccccagaaatagccaaaagacccaaagtaagagatcaagaaggaagaatcagctactactggactctacttgaacccggggatacaataatatttgaggcaaatggaaatctaatagcgccaagatatgctttcgcactgagtagaggctttggatcaggaatcatcaactcaaatgcaccaatggatgaatgtgatgcgaagtgccaaacacctcagggagctataaacagcagtcttcctttccagaatgtacacccagtcacaataggagagtgtccaaagtatgtcaggagtgcaaaattaaggatggttacaggactaaggaacatcccatccattcaatccagaggtttgtttggagccattgccggtttcattgaaggggggtggactggaatggtagatggttggtatggttatcatcatcagaatgagcaaggatctggctatgctgcagatcaaaaaagcacacaaaatgccattaatgggattacaaacaaggtgaattctgtaattgagaaaatgaacactcaattcacagctgtgggcaaagaattcaacaaattggaaagaaggatggaaaacttaaataaaaaagttgatgatgggtttatagacatttggacatataatgcagaattgttggttctactggaaaatgaaaggactttggatttccatgactccaatgtgaagaatctgtatgagaaagtaaaaagccaattaaagaataatgccaaagaaataggaaatgggtgttttgaattctatcacaagtgtaacgatgaatgcatggagagtgtaaaaaatggaacttatgactatccaaaatattccgaagagtcaaagttaaacagggagaaaattgatggagtgaaattggaatcaatgggagtctatcagattctggcgatctactcaacagtcgccagttctctggttcttttggtctccctgggggcaatcagcttctggatgtgttccaatgggtctttgcagtgtagaatatgcatctaa

SEQ ID NO: 32223 - RNA, 1698 nt, synthetic construct
  misc_feature 1..1698: note = hemagglutinin__InfluenzaA__ABS71667
  source 1..1698: mol_type = other RNA
atgaaagtaaaactactggtcctgttatgcacatttacagctacatatgcagacacaatatgtataggctaccatgccaacaactcaaccgacactgttgacacagtacttgagaagaatgtgacagtgacacactctgtcaacctgcttgaggacagtcacaatggaaaattatgtctattaaaaggaatagccccactacaattgggtaattgcagcgttgccggatggatcttaggaaacccagaatgcgaatcactgatttccagggaatcatggtcctacattgtagaaaaaccaagtcctgagaatgggacatgttacccagggcatttcgccgactatgaggaactaagggagcaattgagttcagtatcttcatttgagagattcgaaatattccccaaagaaagctcatggcccaaccacaccgcaaccggagtatcagcatcatgctcccataatgggaaaagcagtttttacaaaaatttgctatggctgacggggaagaatggtttgtacccaaacctgagcaagtcctatgcaaacaacaaagagaaagaagttcttgtactatggggtgttcatcacccgcccaacataggtgaccaaagggccctctatcatacagaaaatgcttatatctctgtagtgtcttcacattatagcagaaaattcaccccagaaatagccaaaagacccaaagtaagagatcaagaaggaagaatcagctactactggactctacttgaacccggggatacaataatatttgaggcaaatggaaatctaatagcgccaagatatgctttcgcactgagtagaggctttggatcaggaatcatcaactcaaatgcaccaatggatgaatgtgatgcgaagtgccaaacacctcagggagctataaacagcagtcttcctttccagaatgtacacccagtcacaataggagagtgtccaaagtatgtcaggagtgcaaaattaaggatggttacaggactaaggaacatcccatccattcaatccagaggtttgtttggagccattgccggtttcattgaaggggggtggactggaatggtagatggttggtatggttatcatcatcagaatgagcaagggtctggctatgctgcagatcaaaaaagcacacaaaatgccattaatgggattacaaacaaggtgaattctgtaattgagaaaatgaacactcaattcacagctgtgggcaaagaattcaacaaattggaaagaaggatggaaaacttaaataaaaaagttgatgatgggtttatagacatttggacatataatgcagaattgttggttctactggaaaatgaaaggactttggatttccatgactccaatgtgaagaatctgtatgagaaagtaaaaagccaattaaagaataatgccaaagaaataggaaatgggtgttttgaattctatcacaagtgtaacgatgaatgcatggagagtgtaaaaaatggaacttatgactatccaaaatattccgaagagtcaaagttaaacagggagaaaattgatggagtgaaattggaatcaatgggagtctatcagattctggcgatctactcaacagtcgccagttctctggttcttttggtctccctgggggcaatcagcttctggatgtgttccaatgggtctttgcagtgtagaatatgcatctaa

SEQ ID NO: 32224 - RNA, 1698 nt, synthetic construct
  misc_feature 1..1698: note = hemagglutinin__InfluenzaA__ABS71668
  source 1..1698: mol_type = other RNA
atgaaagtaaaactactggtcctgttatgcacatttacagctacatatgcagacacaatatgtataggctaccatgccaacaactcaaccgacactgttgacacagtacttgagaagaatgtgacagtgacacactctgtcaacctgcttgaggacagtcacaatggaaaattatgtctattaaaaggaatagccccactacaattgggtaattgcagcgttgccggatggatcttaggaaacccagaatgcgaatcactgatttccagggaatcatggtcctacattgtagaaaaaccaagtcctgagaatggaacatgttacccagggcatttcgccgactatgaggaactgagggagcaattgagttcagtatcttcatttgagagattcgaaatattccccaaagaaagctcatggcccaaccacaccgcatccggagtatcagcatcatgctcccataatgggaaaagcagtttttacaaaaatttgctatggctgacggggaagaatggtttgtacccaaacctgagcaagtcctatgcaaacaacaaagagaaagaagtccttgtactatggggtgttcatcacccgcctaacataggtgaccaaagggccctctatcatacagaaaatgcttatgtctctgtagtgtcttcacattatagcagaaaattcaccccagaaatagccaaaagacccaaagtaagagatcaagaaggaagaatcaactactactggactctacttgaacccggggatacaataatatttgaggcaaatggaaatctaatagcgccaagatatgctttcgcactgagtagaggctttggatcaggaatcatcaactcaaatgcaccaatggatgaatgtgatgcgaagtgccaaacacctcagggagctataaacagcagtcttcctttccagaatgtacacccagtcacaataggagagtgtccaaagtatgtcaggagtgcaaaattaaggatggttacaggactaaggaacatcccatccattcaatccagaggtttgtttggagccattgccggtttcattgaaggggggtggactggaatggtagatggttggtatggttatcatcatcagaatgagcaaggatctggctatgctgcagatcaaaaaagcacacaaaatgccattaatgggattacaaacaaggtgaattctgtaattgagaaaatgaacactcaattcacagctgtgggcaaagaattcaacaaattggaaagaaggatggaaaacttaaataaaaaagttgatgatgggtttatagacatttggacatataatgcagaattgttggttctactggaaaatgaaaggactttggatttccatgactccaatgtgaagaatctgtatgagaaagtaaaaagccaattaaagaataatgccaaagaaataggaaatgggtgttttgaattctatcacaagtgtaacgatgaatgcatggagagtgtaaaaaatggaacttatgactatccaaaatattccgaagaatcaaagttaaacagggagaaaattgatggagtgaaattggaatcaatgggagtctatcagattctggcgatctactcaacagtcgccagttctctggttcttttggtctccctgggggcaatcagtttctggatgtgttccaatgggtctttgcagtgtagaatatgcatctaa

SEQ ID NO: 32225 - RNA, 1698 nt, synthetic construct
  misc_feature 1..1698: note = hemagglutinin__InfluenzaA__ABS71669
  source 1..1698: mol_type = other RNA
atgaaagtaaaactactggtcctgttatgcacatttacagctacatatgcagacacaatatgtataggctaccatgctaacaactcgaccgacactgttgacacagtacttgaaaagaatgtgacagtgacacactctgtcaacctgcttgaggacagtcacaatggaaaactatgtctattaaaaggaatagccccactacaattgggtaattgcagcgttgccgggtggatcttaggaaacccagaatgcgaattactgatttccaaggagtcatggtcctacattgtagaaaaaccaaatcctgagaatggaacatgttacccagggcatttcgctgactatgaggaactgagggagcaattgagttcagtatcttcatttgagaggttcgaaatattccccaaagaaagctcatggcccaaccacaccgtaaccggagtatcagcatcatgctcccataatggggaaagcagtttttacaaaaatttgctatggctgacggggaagaatggtttgtacccaaacctgagcaagtcctatgcaaacaacaaagaaaaagaagtccttgtactatggggtgttcatcacccgccaaacataggtgaccaaaaggccctctatcatacagaaaatgcttatgtctctgtagtgtcttcacattatagcagaaaattcaccccagaaatagccaaaagacccaaagtaagagatcaagaaggaagaatcaactactactggactctgcttgaacccggggatacaataatatttgaggcaaatggaaatctaatagcgccaagatatgctttcgcactgagtagaggctttggatcaggaatcatcaactcaaatgcaccaatggataaatgtgatgcgaagtgccaaacacctcagggagctataaacagcagtcttcctttccagaatgtacacccagtcacaataggagagtgtccaaagtatgtcaggagtgcaaaattaaggatggttacaggactaaggaacatcccatccattcaatccagaggtttgtttggagccattgccggtttcattgaaggggggtggactggaatggtagatggttggtatggttatcatcatcagaatgagcaaggatctggctatgctgcagatcaaaaaagcacacaaaatgccattaatgggattacaaacaaggtgaattctgtaattgagaaaatgaacactcaattcacagctgtgggcaaagaattcaacaaattggaaagaaggatggaaaacttaaataaaaaagttgatgatgggtttatagacatttggacatataatgcagaattgttagttctactggaaaatgaaaggactttggatttccatgactccaatgtgaagaatctgtatgagaaagtaaaaagccaattaaagaataatgccaaagaaataggaaatgggtgttttgaattctatcacaagtgtaacgatgaatgcatggagagtgtaaaaaatggaacttatgactatccaaaatattccgaagaatcaaaattaaacagggagaaaattgatggagtgaaattggaatcaatgggagtctatcagattctggcgatctactcaacagtcgccagttctctggttcttttggtctccctgggggcaatcagcttctggatgtgttccaatgggtctttgcagtgtagaatatgcatctaa

SEQ ID NO: 32226 - RNA, 1698 nt, synthetic construct
  misc_feature 1..1698: note = hemagglutinin__InfluenzaA__ABS71671
  source 1..1698: mol_type = other RNA
atgaaagtaaaactactggtcctgttatgcacatttacagctacatatgcagacacaatatgtataggctaccatgccaacaactcaaccgacactgttgacacagtacttgagaagaatgtgacagtgacacactctgtcaacctgcttgaggacagtcacaatggaaaactatgtctattaaaaggaatagccccactacaattgggtaattgcagcgttgccgggtggatcttaggaaacccagaatgcgaattactgatttccaaggaatcatggtcctacattgtagaaaaaccaaatcctgagaatggaacatgttacccagggcatttcgctgactatgaggaactgagggagcaattgagttcagtatcttcatttgagaggttcgaaatgttccccaaagaaagctcatggcccaaccacaccgtaaccggagtatcagcatcatgctcccataatgggaaaagcagtttttacaaaaatttgctatggctgacggggaagaatggtttgtacccaaacctgagcaagtcctatgcaaacaacaaagagaaagaagtccttgtactatggggtgttcatcacccgcctaacataggtgaccaaagggccctctatcatacagaaaatgcttatgtctctgtagtgtcttcacattatagcaggaaattcaccccagaaatagccaaaagacccaaagtaagagatcaagaaggaagaatcaactactactggactctgcttgaacccggggatacaataatatttgaggcaaatggaaatctaatagcaccaagatatgctttcgcactgagtagaggctttggatcaggaatcatcaactcaaatgcaccaatggatgaatgtgatgcgaagtgccaaacacctcagggagctataaacagcagtcttcctttccagaatgtacacccagtcacaataggagaatgtccaaagtatgtcaggagtgcaaaattaaggatggttacaggactaaggaacatcccatccattcaatccagaggtttgtttggagccattgccggtttcattgaaggggggtggactggaatggtagatggttggtatggttatcatcatcagaatgagcaaggatctggctatgctgcagatcaaaaaagcacacaaaatgccattaatgggattacaaacaaggtgaattctgtaattgagaaaatgaacactcaattcacagctgtgggcaaagaattcaacaaattggaaagaaggatggaaaacttaaataaaaaagttgatgatgggtttatagacatttggacatataatgcagaactgttggttctactggaaaatgaaaggactttggatttccatgactccaatgtgaagaatctgtatgagaaagtaaaaagccaattaaagaataatgccaaagaaataggaaatgggtgttttgaattctatcacaagtgtaacgatgaatgcatggagagtgtaaaaaatggaacttatgactatccaaaatattccgaagaatcaaaattaaacagggagaaaattgatggagtgaaattggaatcaatgggagtctatcagattctggcgatctactcaacagtcgccagttctctggttcttttggtctccctgggggcaatcagcttctggatgtgttccaatgggtctttgcagtgtagaatatgcatctaa

SEQ ID NO: 32227 - RNA, 1698 nt, synthetic construct
  misc_feature 1..1698: note = hemagglutinin__InfluenzaA__ABS71672
  source 1..1698: mol_type = other RNA
atgaaagtaaaactactggtcctgttatgcacatttacagctacatatgcagacacaatatgtataggctaccatgccaacaactcaaccgacactgttgacacagtacttgagaagaatgtgacagtgacacactctgtcaacctgcttgaggacagtcacaatggaaaactatgtctattaaaaggaatagccccactacaattgggtaattgcagcgttgccgggtggatcttaggaaacccagaatgcgaattactgatttccaaggaatcatggtcctacattgtagaaaaaccaaatcctgagaatggaacatgttacccagggcatttcgctgactatgaggaactgagggagcgattgagttcagtatcttcatttgagaggttcgaaatgttccccaaagaaagctcatggcccaaccacaccgtaaccggagtatcagcatcatgctcccataatgggaaaagcagtttttacaaaaatttgctatggctgacggggaagaatggtttgtacccaaacctgagcaagtcctatgcaaacaacaaagagaaagaagtccttgtactatggggtgttcatcacccgcctaacataggtgcccaaagggccctctatcatacagaaaatgcttatgtctctgtagtgtcttcacattatagcaggaaattcaccccagaaatagccaaaagacccaaagtaagagatcaagaaggaagaatcaactactactggactctgcttgaacccggggatacaataatatttgaggcaaatggaaatctaatagcaccaagatatgctttcgcactgagtagaggctttggatcaggaatcatcaactcaaatgcaccaatggatgaatgtgatgcgaagtgccaaacacctcagggagctataaacagcagtcttcctttccagaatgtacacccagtcacaataggagaatgtccaaagtatgtcaggagtgcaaaattaaggatggttacaggactaaggaacatcccatccattcaatccagaggtttgtttggagccattgccggtttcattgaaggagggtggactggaatggtagatggttggtatggttatcatcatcagaatgagcaaggatctggctatgctgcagatcaaaaaagcacacaaaatgccattaatgggattacaaacaaggtgaattctgtaattgagaaaatgaacactcaattcacagcagtgggcaaagaattcaacaaattggaaagaaggatggaaaacttaaataaaaaagttgatgatgggtttatagacatttggacatataatgcagaactgttggtcctactggaaaatgaaaggactttggatttccatgactccaatgtgaagaatctgtatgagaaagtaaaaagccagttaaagaataatgccaaagaaataggaaatggatgttttgaattctatcacaagtgtaacgatgaatgcatggagagtgtaaagaatggaacttatgactatccaaaatattccgaagaatcaaagttaagcagggagaaaattgatggagtgaaattggaatcaatgggagtctatcagattctggcgatctactcaacagtcgccagttctctggttcttttggtctccctgggggcaatcagcttctggatgtgttccaatgggtctttgcagtgtagaatatgcatctaa

SEQ ID NO: 32228 - RNA, 1698 nt, synthetic construct
  misc_feature 1..1698: note = hemagglutinin__InfluenzaA__ABS71673
  source 1..1698: mol_type = other RNA
atgaaagtaaaactactggttctgttatgtacatttacagctacatatgcagacacaatatgtataggctaccatgccaacaactcaaccgacactgttgacacagtacttgagaagaatgtgacagtgacacactctgtcaacctacttgaggacagtcacaatggaaaactatgtctactaaaaggaatagccccactacaattgggtaattgcagcgttgccggatggatcttaggaaacccagaatgcgaattactgatttccaaggaatcatggtcctacattgtagaaacaccaaatcctgagaatggaacatgttacccagggtatttcgccgactatgaggaactgagggagcaattgagttcagtatcttcatttgagaggttcgaaatattccccaaagagagctcatggcccaaccacaccgtaaccggagtatcagcatcatgctcccataacgggagaagcagtttttacagaaatttgttatggctgacggggaagaatggtttgtacccaaacctgagcaagtcctatgcaaacaacaaagagaaagaagtccttgtactatggggtgttcatcacccgcctaacataggggaccaaagggccctctatcatacagaaaatacttatgtctctgtagtgtcttcacattatagcagaagattcaccccagaaatagccaaaagacccaaggtgagagatcaggaaggaagaatcaactactactggactctgctggaacccggggatacaataatattcgaggcaaatggaaatctaatagcaccaaggtttgctttcgcactgagtagaggctttggatcaggaatcatcacctctaatgcaccaatggatgaatgtgatgcgaagtgtcaaacacctcaaggagctataaacagcagccttcctttccagaatgtacacccagtcacaataggagagtgtccaaagtatgtcaggagtgcaaaattaaggatggctacaggactaaggaacatcccatccattcaatccagaggtttgtttggagccattgccggtttcattgaaggggggtggactggaatggtagatggttggtatggttatcatcatcagaatgagcaaggatctgggtatgctgcagatcaaaaaagcacacaaaatgccattaacgggattacaaacaaggtgaattctgtaattgagaaaatgaacactcaattcacagctgtgggcaaagaattcagcaaattggagagaaggatggaaaacttaaataagaaagttgatgatgggtttctagacatttggacatataatgcagaattgttggttctactggaaaatgaaaggactttggatttccatgactccaacgtgaagaacctgtatgagaaagtgaaaagccaattaaagaataatgccaaagaaataggaaacgggtgctttgaattctatcacaagtgtaacgatgaatgcatggagagtgtgaaaaatggaacttatgactatccaaaatattccgaagaatcaaagttaaacagggagaaaattgatggtgtgaaattggaatcaatgggagtctatcagattctggcgatctactcaacagtcgccagttccctggttcttttggtctccctgggggcaatcagcttctggatgtgttccaatgggtctttgcagtgtagaatatgcatctaa

SEQ ID NO: 32229 - RNA, 1701 nt, synthetic construct
  misc_feature 1..1701: note = hemagglutinin__InfluenzaA__ABS71674
  source 1..1701: mol_type = other RNA
atgaagactatcattgctttgagctacattctatgtctggttttcgctcaaaaacttcccggaaatgacaacagcacggcaacgctgtgccttgggcaccatgcagtaccaaacggaacgatagtgaaaacaatcacgaatgaccaaattgaagttactaatgctactgagctggttcagagttcctcaacaggtggaatatgcgacagtcctcatcagatccttgatggagaaaactgcacactaatagatgctctattgggagaccctcagtgtgatggcttccaaaataagaaatgggacctttttgttgaacgcagcaaagcctacagcaactgttacccttatgatgtgccggattatgcctcccttaggtcactagttgcctcatccggcacactggagtttaacaatgaaagcttcaattggactggagtcactcaaaatgggacaagctctgcttgcaaaaggagatctaataacagtttctttagtagattgaattggttgacccacttaaaattcaaatacccagcattgaacgtgactatgccaaacaatgaaaaatttgacaaattgtacatttggggggttcaccacccgggtacggacaatgaccaaatcttcctgtatgctcaagcatcaggaagaatcacagtctctaccaaaagaagccaacaaactgtaatcccgaatatcggatctagacccagagtaaggaatatccccagcagaataagcatctattggacaatagtaaaaccgggagacatacttttgattaacagcacagggaatctaattgctcctaggggttacttcaaaatacgaagtgggaaaagctcaataatgagatcagatgcacccattggcaaatgcaattctgaatgcatcactccaaatggaagcattcccaatgacaaaccatttcaaaatgtaaacaggatcacatatggggcctgtcccagatatgttaagcaaaacactctgaaattggcaacagggatgcgaaatgtaccagagaaacaaactagaggcatatttggcgcaatcgcggggttcatagaaaatggttgggagggaatggtggatggttggtacggtttcaggcatcaaaattctgagggaataggacaagcagcagatctcaaaagcactcaagcagcaatcaatcaaatcaatgggaagctgaataggttgatcgggaaaaccaacgagaaattccatcaaattgaaaaagaattctcagaagtagaagggagaattcaggacctcgagaaatatgttgaggacactaaaatagatctctggtcatacaacgcggagcttcttgttgccctggagaaccaacatacaattgatctaactgactcagaaatgaacaaactgtttgaaagaacaaagaagcaactgagggaaaatgctgaggatatgggcaatggttgtttcaaaatataccacaaatgtgataatgcctgcataggatcaatcagaaatggaacttatgaccatgatgtatacagagatgaagcattaaacaaccggttccagatcaaaggcgttgagctgaagtcaggatacaaagattggatcctatggatttcctttgccatatcatgttttttgctttgtgttgctttgttggggttcatcatgtgggcctgccaaaaaggcaacattaggtgcaacatttgcatttga

SEQ ID NO: 32230 - RNA, 1701 nt, synthetic construct
  misc_feature 1..1701: note = hemagglutinin__InfluenzaA__ABS71675
  source 1..1701: mol_type = other RNA
atgaagactatcattgctttgagctacattctatgtctggttttcgctcaaaaacttcccggaaatgacaacagcacggcaacgctgtgccttgggcaccatgcagtaccaaacggaacgatagtgaaaacaatcacgaatgaccaaattgaagttactaatgctactgagctggttcagagttcctcaacaggtggaatatgcgacagtcctcatcagatccttgatggagaaaactgcacactaatagatgctctattgggagaccctcagtgtgatggcttccaaaataagaaatgggacctttttgttgaacgcagcaaagcccacagcaactgttacccttatgatgtgccggattatgcctcccttaggtcactagttgcctcatccggcacactggagtttaacaatgaaagcttcaattggactggagtcactcaaaatggaacaagctctgcttgcaaaaggagatctaataacagtttctttagtagattgaattggttgacccacttaaaattcaaatacccagcattgaacgtgactatgccaaacaatgaaaaatttgacaaattgtacatttggggggttcaccacccgggtacggacaatgaccaaatcttcctgtatgctcaagcatcaggaagaatcacagtctctaccaaaagaagccaacaaactgtaatcccgaatatcggatctagacccagagtaagaaatatccccagcagaataagcatctattggacaatagtaaaaccgggagacatacttttgattaacagcacagggaatctaattgctcctaggggttacttcaaaatacgaagtgggaaaagctcaataatgagatcagatgcacccattggcaaatgcaattctgaatgcatcactccaaatggaagcattcccaatgacaaaccatttcaaaatgtaaacaggatcacatatggggcctgtcccagatatgttaagcaaaacactctgaaattggcaacagggatgcgaaatgtaccagagaaacaaactagaggcatatttggcgcaatcgcgggtttcatagaaaatggttgggagggaatggtggatggttggtacggtttcaggcatcaaaattctgagggaataggacaagcagcagatctcaaaagcactcaagcagcaatcaatcaaatcaatgggaagctgaataggttgatcgggaaaaccaacgagaaattccatcagattgaaaaagaattctcagaagtagaagggagaattcaggacctcgagaaatatgttgaggacactaaaatagatctctggtcatacaacgcggagcttcttgttgccctggagaaccaacatacaattgatctaactgactcagaaatgaacaaactgtttgaaagaacaaagaagcaactgagggaaaatgctgaggatatgggcaatggttgtttcaaaatataccacaaatgtgacaatgcctgtataggatcaatcagaaatggaacttatgaccatgatgtatacagagatgaagcattaaacaaccggttccagatcaaaggcgttgagctgaagtcaggatacaaagattggatcctatggatttcctttgccatatcatgttttttgctttgtgttgctttgttggggttcatcatgtgggcctgccaaaaaggcaacattaggtgcaacatttgcatttga

SEQ ID NO: 32231 - RNA, 1701 nt, synthetic construct
  misc_feature 1..1701: note = hemagglutinin__InfluenzaA__ABS71676
  source 1..1701: mol_type = other RNA
atgaagactatcattgctttgagctacattctatgtctggttttcgctcaaaaacttcccggaattgacaacagcacggcaacgctgtgccttgggcaccatgcagtaccaaacggaacgatagtgaaaacaatcacgaatgaccaaattgaagttactaatgctactgagctggttcagaattcctcaacaggtggaatatgcgacagtcctcatcagatccttgatggagaaaactgcacactaatagatgctctattgggagaccctcagtgtgatggcttccaaaataagaaatgggacctttttgttgaacgcagcaaagcctacagcaactgttacccttatgatgtgccggattatgcctcccttaggtcactagttgcctcatccggcacactggagtttaacaatgaaagcttcaattggactggagtcactcaaaatggaacaagctctgcttgcaaaaggggatctaataacagtttctttagtagattgaattggttgacccactcaaaattcaaatacccagcattgaacgtgactatgccaaacaatgaagaatttgacaaattgtacatttggggggttcaccacccgggtacggacaatgaccaaatcttcctgtatgctcaagcatcaggaagaatcacagtctctaccaaaagaagccaacaaactgtaatcccgaatatcggatctagacccagagtaaggaatatccccagcagaataagcatctattggacaatagtaaaaccgggagacatacttttgattaacagcacagggaatctaattgctcctaggggttacttcataatacgaagtgggaaaagctcaataatgagatcagatgcacccattggcaaatgcaattctgaatgcatcactccaaatggaagcattcccaatgacaaaccatttcaaaatgtaaacaggatcacatacggggcctgtcccagatatgttaagcaaaacactctgaaattggcaacagggatgcgaaatgtaccagagaaacaaactagaggcatatttggcgcaatcgcgggtttcatagaaaatggttgggagggaatggtggatggttggtacggtttcaggcatcaaaattctgagggaataggacaagcagcagatctcaaaagcactcaagcagcaatcgatcaaatcaatgggaagctgaataggttgatcgggaaaaccaacgagaaattccaccagattgaaaaagaattctcagaagtagaagggagaattcaggacctcgagaaatatgttgaggacactaaaatagatctctggtcatacaacgcggagcttcttgttgccctggagaaccaacatacaattgatctaactgactcagaaatgaacaaactgtttgaaaagacaaagaagcaactgagggaaaatgctgaggatatgggcaatggttgtttcaaaatataccacaaatgtgacaatgcctgcataggatcaatcagaaatggaacttatgaccatgatgtatacagagatgaagcattaaacaaccggtttcagatcaagggcgttgagctgaagtcaggatacaaagattggatcctatggatttcctttgccatatcatgttttttgctttgtgttgctttgttggggttcatcatgtgggcctgccaaaaaggcaacattaggtgcaacatttgcatttga

SEQ ID NO: 32232 - RNA, 1701 nt, synthetic construct
  misc_feature 1..1701: note = hemagglutinin__InfluenzaA__ABS71677
  source 1..1701: mol_type = other RNA
atgaagactatcattgctttgagctacattctatgtctggttttcgctcaaaaacttcccggaattgacaacagcacggcaacgctgtgccttgggcaccatgcagtaccaaacggaacgatagtgaaaacaatcacggatgaccaaattgaagttactaatgctactgagctggttcagaattcctcaacaggtggaatatgcgacagtcctcatcagatccttgatggagaaaactgcacactaatagatgctctattgggagaccctcagtgtgatggcttccaaaataagaaatgggacctttttgttgaacgcagcaaagcctacagcaactgttacccttatgatgtgccggattatgcctcccttaggtcactagttgcctcatccggcacactggagtttaacaatgaaagcttcaattggactggagtcactcaaaatggaacaagctctgcttgcaaaaggggatctaataacagtttctttagtagattgaattggttgacccactcaaaattcaaatacccagcattgaacgtgactatgccaaacaatgaagaatttgacaaattgtacatttggggggttcaccacccgggtacggacaatgaccaaatcttcctgtatgctcaagcatcaggaagaatcacagtctctaccaaaagaagccaacaaactgtaatcccgaatatcggatctagacccagagtaaggaatatccccagcagaataagcatctattggacaatagtaaaaccgggagacatacttttgattaacagcacagggaatctaattgctcctaggggttacttcaaaatacgaagtgggaaaagctcaataatgagatcagatgcacccattgacaaatgcaattctgaatgcatcactccaaatggaagcattcccaatgacaaaccatttcaaaatgtgaacagaatcacatacggggcctgtcccagatatgttaagcaaaacactctgaaattggcaacagggatgcgaaatgtaccagagaaacaaactagaggcatatttggcgcaatcgcgggtttcatagaaaatggttgggagggaatggtggatggttggtacggtttcaggcatcaaaattctgagggaataggacaagcagcagatctcaagagcactcaagcagcaatcgatcaaatcaatgggaagctgaataggttgatcgggaaaaccaacgagaaattccaccagattgaaaaagaattctcagaagtagaagggagaattcaggacctcgagaaatatgttgaggacactaaaatagatctctggtcatacaacgcggagcttcttgttgccctggagaaccaacatacaattgatctaactgactcagaaatgaacaaactgtttgaaaagacaaagaagcaactgagggaaaatgctgaggatatgggcaatggttgtttcaaaatataccacaaatgtgacaatgcctgcataggatcaatcagaaatggaacttatgaccatgatgtatacagagatgaagcattaaacaaccggtttcagatcaagggcgttgagctgaagtcaggatacaaagattggatcctatggatttcctttgccatatcatgttttttgctttgtgttgctttgttggggttcatcatgtgggcctgccaaaaaggcaacattaggtgcaacatttgcatttga

SEQ ID NO: 32233 - RNA, 1701 nt, synthetic construct
  misc_feature 1..1701: note = hemagglutinin__InfluenzaA__ABS71679
  source 1..1701: mol_type = other RNA
atgaagactatcattgctttgagctacattctatgtctggttttcgctcaaaaacttcccggaattgacaacagcacggcaacgctgtgccttgggcaccatgcagtaccaaacggaacgatagtgaaaacaatcacgaatgaccaaattgaagttactaatgctactgagctggttcagagttcctcaacaggtggaatatgcgacagtcctcatcagatccttgatggagaaaactgcacactaatagatgctctattgggagaccctcagtgtgatggcttccaaaataagaaatgggacctttttgttgaacgcagcaaagcctacagcaactgttacccttatgatgtgccggattatgcctcccttaggtcactagttgcctcatccggcacactggagtttaacaatgaaagcttcaattggactggagtcactcaaaatggaacaagctctgcttgcaaaaggggatctaataacagtttctttagtagattgaattggttgacccactcaaaattcaaatacccagcattgaacgtgactatgccaaacaatgaagaatttgacaaattgtacatttggggggttcaccacccgggtacggacaatgaccaaatcttcctgtatgctcaagcatcaggaagaatcacagtctctaccaaaagaagccaacaaactgtaatcccgaatatcggatctagacccagagtaaggaatatccccagcagaataagcatctattggacaatagtaaaaccgggagacatacttttgattaacagcacagggaatctaattgctcctaggggttacttcaaaatacgaagtgggaaaagctcaataatgagatcagatgcacccattggcaaatgcaattctgaatgcatcactccaaatggaagcattcccaatgacaaaccatttcaaaatgtaaacaggatcacatacggggcctgtcccagatatgttaagcaaaacactctgaaattggcaacagggatgcgaaatgtaccagagaaacaaactagaggcatatttggcgcaatcgcgggtttcatagaaaatggttgggagggaatggtggatggttggtacggtttcaggcatcaaaattctgagggaataggacaagcagcagatctcaaaagcactcaagcagcaatcgatcaaatcaatgggaagctgaataggttgatcgggaaaaccaacgagaaattccaccagattgaaaaagaattctcagaagtagaagggagaattcaggacctcgagaaatatgttgaggacactaaaatagatctctggtcatacaacgcggagcttcttgttgccctggagaaccaacatacaattgatctaactgactcagaaatgaacaaactgtttgaaaagacaaagaagcaactgagggaaaatgctgaggatatgggcaatggttgtttcaaaatataccacaaatgtgacaatgcctgcataggatcaatcagaaatggaacttatgaccatgatgtatacagagatgaagcattaaacaaccggtttcagatcaagggcgttgagctgaagtcaggatacaaagattggatcctatggatttcctttgccatatcatgttttttgctttgtgttgctttgttggggttcatcatgtgggcctgccaaaaaggcaacattaggtgcaacatttgcatttga

SEQ ID NO: 32234 - RNA, 1701 nt, synthetic construct
  misc_feature 1..1701: note = hemagglutinin__InfluenzaA__ABS71680
  source 1..1701: mol_type = other RNA
atgaagactatcattgctctgagctacatcctatgtctggttttcgctcaaaaacttcccggaattgacaacagcacggcaacgctgtgccttgggcaccatgcagtaccaaacggaacgatagtgaaaacaatcacgaatgaccaaattgaagttactaatgctactgagctggttcagagttcctcaacaggtggaatatgcgacagtcctcatcagatccttgatggagaaaactgcacactaatagatgctctattgggagaccctcagtgtgatggcttccaaaataagaaatgggacctttttgttgaacgcagcaaagcctacagcaactgttacccttatgatgtgccggattatgcctcccttaggtcactagttgcctcatccggcacactggagtttaacaatgaaagcttcaattggactggagtcactcaaaatggaacaagctctgcttgcaaaaggggatctaataacagtttctttagtagattgaattggttgacccactcaaaattcaaatacccagcattgaacgtgactatgccaaacaatgaagaatttgacaaattgtacatttggggggttcaccacccgggtacggacaatgaccaaatcttcctgtatgctcaagcatcaggaagaatcacagtctctaccaaaagaagccaacaaactgtaatcccgaatatcggatctagacccagagtaaggaatatccccagcagaataagcatctattggacaatagtaaaaccgggagacatacttttgattaacagcacagggaatctaattgctcctaggggttacttcaaaatacgaagtgggaaaagctcaataatgagatcagatgcacccattggcaaatgcaattctgaatgcatcactccaaatggaagcattcccaatgacaaaccatttcaaaatgtaaacaggatcacatacggggcctgtcccagatatgttaagcaaaacactctgaaattggcaacagggatgcgaaatgtaccagagaaacaaactagaggcatatttggcgcaatcgcgggtttcatagaaaatggttgggagggaatggtggatggttggtacggtttcaggcatcaaaattctgagggaataggacaagcagcagatctcaaaagcactcaagcagcaatcgatcaaatcaatgggaaactgaataggttgatcgggaaaaccaacgagaaattccaccagattgaaaaagaattctcagaagtagaagggagaattcaggacctcgagaaatatgttgaggacactaaaatagatctctggtcatacaacgcggagcttcttgttgccctggagaaccaacatacaattgatctaactgactcagaaatgaacaaactgtttgaaaagacaaagaagcaactgagggaaaatgctgaggatatgggcaatggttgtttcaaaatataccacaaatgtgacaatgcctgcataggatcaatcagaaatggaacttatgaccatgatgtatacagagatgaagcattaaacaaccggtttcagatcaagggcgttgagctgaagtcaggatacaaagattggatcctatggatttcctttgccatatcatgttttttgctttgtgttgctttgttggggttcatcatgtgggcctgccaaaaaggcaacattaggtgcaacatttgcatttga

SEQ ID NO: 32235 - RNA, 1701 nt, synthetic construct
  misc_feature 1..1701: note = hemagglutinin__InfluenzaA__ABS71682
  source 1..1701: mol_type = other RNA
atgaagactatcattgctttgagctacattctatgtctggttttcgctcaaaaacttcccggaaatgacaacagcacggcaacgctgtgccttgggcaccatgcagtaccaaacggaacgatagtgaaaacaatcacgaatgaccaaattgaagttactaatgctactgagctggttcagagttcctcaacaggtggaatatgcgacagtcctcatcagatccttgatggagaaaactgcacactaatagatgctctattgggagaccctcagtgtgatggcttccaaaataagaaatgggacctttttgttgaacgcagcaaagcctacagcaactgttacccttatgatgtgccggattatgcctcccttaggtcactaattgcctcatccggcacactggagtttaacaatgaaagcttcaattggactggagtcactcaaaacggaacaagctctgcttgcaaaaggagatctaataacagtttctttagtagattgaattggttgacccacttaaaattcaaatacccagcattgaacgtgactatgccaaacaatgaaaaatttgacaaattgtacatttggggggttcaccacccgggtacggacaatgaccaaatcttcctgtatgctcaagcatcaggaagaatcacagtctctaccaaaagaagtcaacaaactgtaatcccgaatatcggatctagacccagagtaaggaatatccccagcagaataagcatctattggacaatagtaaaaccgggagacatacttttgattaacagcacagggaatctaattgctcctaggggttacttcaaaatacgaagtgggaaaagctcaataatgagatcagatgcacccattggcaaatgcaattctgaatgcatcactccaaatggaagcattcccaatgacaaaccatttcaaaatgtaaacaggataacatacggggcctgtcccagatatgttaagcaaaacactctgaaattggcaacagggatgcgaaacgtaccagagaaacaaactagaggcatatttggtgcaatcgcgggtttcatagaaaatggttgggagggaatggtggatggttggtacggtttcaggcatcaaaattctgagggaataggacaagcagcagatctcaaaagcactcaagcagcaatcgatcaaatcaatgggaagctgaataggttgatcgggaaaaccaacgagaaattccatcagattgaaaaagaattctcagaagtagaagggagaattcaggacctcgagaaatatgttgaggacactaaaatagatctctggtcatacaatgcggagcttcttgttgccctggagaaccaacatacaattgatttaactgactcagaaatgaacaaactgtttgaaaaaacaaagaagcaactgagggaaaatgctgaggatatgggcaatggttgtttcaaaatataccacaaatgtgacaatgcctgcataggatcaatcagaaatggaacttatgaccatgatgtatacagagatgaagcattaaacaaccggttccagatcaagggcgttgagctgaagtcaggatacaaagattggatcctatggatttcctttgccatatcatgttttttgctttgtgttgttttgttggggttcatcatgtgggcctgccaaaaaggcaacattaggtgcaacatttgcatttga

SEQ ID NO: 32236 - RNA, 1701 nt, synthetic construct
  misc_feature 1..1701: note = hemagglutinin__InfluenzaA__ABU80177
  source 1..1701: mol_type = other RNA
atgaagactatcattgctttgagctacattttatgtctggttttcgctcaaaaacttcccgtaaatgacaacagcacggcaacgctgtgcctggggcaccatgcagtgccaaacggaacgctagtgaaaacaatcacgaatgaccacattgaagtgactaatgctactgagctggttcagagttcctcaacaggtagaatatgcgacagtcctcaccaaatccttgatggagaaaactgcacactaatagatgctctattgggagaccctcattgtgatggcttccaaaataaggaatgggacctttttgttgaacgcagcacagcctacagcaactgttacccttatgatgtgccggattatgcctcccttaggtcactagttgcttcatccggcacactggagtttaacaatgaaagcttcaattggactggagtcgctcagaatggaacaagctcttcttgcaaaaggagatctattaaaagtttctttagtagattgaattggttgcaccaattaaaatacaaatatccagcactgaacgtgactatgccaaacaatgaaaaatttgacaaattgtacatttggggggttcaccacccgagtacggacagtgaccaaatcagcctatatgctcaagcatcagggagagtcacagtctctaccaaaagaagccaacaaactgtaatcccgaatatcggatctagaccctgggtaaggggtgtctccagcagaataagcatctattggacaatagtaaaaccgggagacatacttttgattaacagcacagggaatctaattgctcctcggggttacttcaaaatacgaagtgggaaaagctcaataatgaggtcaaatgcacccattggcaaatgcaattctgaatgcatcactccaaatggaagcattcccaatgacaaaccatttcaaaatgtaaacaggatcacatatggggcctgtcccagatatgttaagcaaaacactctgaaattggcaacagggatgcggaatgtaccagagaaacaaactagaggcatattcggtgcaatcgcgggtttcatagaaaatggttgggaaggaatggtggacggttggtacggtttcaggcatcaaaattctgagggcacaggacaagcagcagatcttaaaagcactcaagcagcaatcaaccaaatcaacgggaaactgaataggttaatcgagaaaacaaacgagaaattccatcaaattgaaaaagaattctcagaagtagaagggagaattcaggacctcgagaaatatgttgaggacactaaaatagatctctggtcgtacaacgcggagcttcttgttgccctggagaaccaacatacaattgatctaactgactcagaaatgaacaaactgtttgaaagaacaaggaagcaactgagggaaaatgctgaggatatgggcaatggttgtttcaaaatataccacaaatgtgacaatgcctgcatagggtcaatcagaaatggaacttatgaccatgatgtatacagagacgaagcattaaacaaccggtttcagatcaaaggtgttgagctgaagtcaggatacaaagattggatcctatggatttcctttgccatatcatgttttttgctttgtgttgttttgctggggttcatcatgtgggcctgccaaaaaggcaacattaggtgcaacatttgcatttga

SEQ ID NO: 32237 - RNA, 1698 nt, synthetic construct
  misc_feature 1..1698: note = hemagglutinin__InfluenzaA__ABU80298
  source 1..1698: mol_type = other RNA
atgaaagtaaaactactggtcctgttatgtacatttacagctacatatgcagacacaatatgtatagggtaccatgccaacaactcaaccgacactgttgacacagtacttgagaagaatgtgacagtgacacactctgtcaacctacttgaggacagtcacaatggaaaactatgtctactaaaaggaatagccccactacaattgggtaattgcagcgttgccggatggatcttaggaaacccagaatgcgaattactgatttccaaggaatcatggtcctacattgtagaaacaccaaatcctgagaatggaacatgttacccagggtatttcgccgactatgaggaactgagggagcaattgagttcagtatcttcatttgagagattcgaaatattccccaaagaaagctcatggcccaaccacaccgtaaccggagtatcagcatcatgctcccataatgggaaaagcagtttttacagaaatttgctatggctgacggggaagaatggtttgtacccaaacctgagcaagtcctatgcaaacaacaaagagaaagaagtccttgtactatggggtgttcatcacccgcctaacataggggaccaaagggccctctatcatacagaaaatgcttatgtctctgtagtgtcttcacattatagcagaagattcaccccagaaatagccaaaagacccaaagtaagagatcaggaaggaagaatcaactactactggactctgctggaacccggggatacaataatatttgaggcaaatggaaatctaatagcgccacggtatgctttcgcactgagtagaggctttggatcaggaatcatcacctcaaatgcaccaatggatgaatgtgatgcgaagtgtcaaacacctcagggagctataaacagcagtcttcctttccagaacgtacacccagtcacaataggagagtgtccaaagtatgtcaggagtgcaaaattaaggatggctacaggactaaggaacatcccatccattcaatccagaggtttgtttggagccattgccggtttcattgaaggggggtggactggaatggtagatgggtggtatggttatcatcatcagaatgagcaaggatctggctatgccgcagatcaaaaaagcacacaaaatgccattaacgggattacaaacaaggtgaattctgtaattgagaaaatgaacactcaattcacagctgtgggcaaagaattcaacaaattggaaagaaggatggaaaacttaaataaaaaagttgatgatgggtttctagacatttggacatataatgcagaattgttggttctactggaaaatgaaaggactttggatttccatgactccaatgtgaagaatctgtataagaaagtaaaaagccaattaaagaataatgccaaagaaataggaaacgggtgttttgaattctatcacaagtgtaacaatgaatgcatggagagtgtgaaaaatggaacttatgactatccaaaatattccgaagaatcaaagttaaacagggagaaaattgatggagtgaaattggaatcaatgggagtctatcagattctggcgatctactcaactgtcgccagttccctggttcttttggtctccctgggggcaatcagcttctggatgtgttccaatgggtctttgcagtgtagaatatgcatctga

SEQ ID NO: 32238 - RNA, 1701 nt, synthetic construct
  misc_feature 1..1701: note = hemagglutinin__InfluenzaA__ABU80320
  source 1..1701: mol_type = other RNA
atgaagactatcattgctttgagctacattttatgtctggttttcgctcaaaaacttcccggaaatgacaacagcacggcaacgctgtgcctggggcaccatgcagtgccaaacggaacgctagtgaaaacaatcacgaatgaccaaattgaagtgactaatgctactgagctggttcagagttcctcaacaggtggaatatgcgacagtcctcaccaaatccttgatggagaaaactgcacactaatagatgctctattgggagaccctcattgtgatagcttccaaaataaggaatgggacctttttgttgaacgcagcaaagcctacagcaactgttacccttatgatgtgccggattatgcctcccttaggtcactagttgcctcatccggcacactggagtttaacaatgaaagcttcaattggactggagtcgctcagaatggaacaagctctgcttgcaaaaggagatctaataaaagtttctttagtagattgaattggttgcaccaattaaaatacaaatacccagcactgaacgtgactatgccaaacaatgaaaaatttgacaaattgtacatttggggggttcaccacccgagtacggacagtgaccaaatcagcctatatgctcaagcaccagggagagtcacagtctctaccaaaagaagccaacaaactgtaatcccgaatatcggatctagaccctgggtaaggggtgtctccagcataataagcatctattggacaatagtaaaaccgggagacatacttttgattaactgcacagggaatctaattgctcctcggggttacttcaaaatacgaagtgggaaaagctcaataatgaggtcagatgcatccattggcaaatgcaattctgaatgcatcactccaaatggaagcattcccaatgacaaaccatttcaaaatgtaaacaggatcacatatggggcctgtcccagatatgttaagcaaaacactctgaaattggcaacagggatgcggaatgtaccagagaaacaaactagaggcatattcggcgcaatcgcgggtttcatagaaaatggttgggagggaatggtggacggttggtacggtttcaggcatcaaaattctgagggcacaggacaagcagcagatctcaaaagcactcaagcagcaatcaaccaaatcaacgggaaactgaataggttaatcgagaaaacgaacgagaaattccatcaaattgaaaaagaattctcagaagtggaagggagaattcaggacctcgagaaatatgttgaggacactaaaatagatctctggtcgtacaacgcggagcttcttgttgccctggagaaccagcatacaattgatctaactgactcagaaatgaacaaactgtttgaaagaacaaagaagcaactgagggaaaatgctgaggatatgggcaatggttgtttcaaaatataccacaaatgtgacaatgcctgcatagggtcaatcagaaatgggacttatgaccatgatgtatacagagacgaagcattaaacaaccggttccagatcaaaggtgttgagctgaagtcaggatacaaagattggatcctatggatttcctttgccatatcatgttttttgctttgtgttgtcttgctggggttcatcatgtgggcctgccaaaaaggcaacattaggtgcaacatttgcatttga

SEQ ID NO: 32239 - RNA, 1701 nt, synthetic construct
  misc_feature 1..1701: note = hemagglutinin__InfluenzaA__ABU80331
  source 1..1701: mol_type = other RNA
atgaagactatcattgctttgagctacattttatgtctggttttcgctcaaaaacttcccggaaatgacaacagcacggcaacgctgtgcctggggcaccatgcagtgccaaacggaacgctagtgaaaacaatcacgaatgaccaaattgaagtgactaatgctactgagctggttcagagttcctcaacaggtagaatatgcgacagtcctcaccaaatccttgatggagaaaactgcacactaatagatgctctattgggagaccctcattgtgatggcttccaaaataaggaatgggacctttttgttgaacgcagcagagcctacagcaactgttacccttatgatgtgccggattatgtctcccttaggtcactagttgcctcatcaggcacgctggagtttaacaatgaaagcttcaattggactggagtcgctcagaatggaacaagctctgcttgcaaaaggagatctgataaaagtttctttagtagattgaattggttgcaccaattaaaatacaaatatccagcactgaacgtgactatgccaaacaatgaaaaatttgacaaattgtacatttggggggttcaccacccgggtacagacagtgaccaaatcagcctatatgctcaagcatcagggagagtcacagtctctaccaaaagaagccaacaaactgtaattccgaatatcggatctagaccctgggtaaggggtgtctccagcagaataagcatctattggacaatagtaaaaccgggagacatacttttgattaacagcacagggaatctaattgctcctaggggttacttcaaaatacgaagtgggaaaagctcaataatgaggtcagatgcacccattggcaagtgcaattctgaatgcatcactccaaatggaagcattcccaatgacaaaccatttcaaaatgtaaacaggatcacatatgggccctgtcccagatatgttaagcaaaacactctgaaattggcaacagggatgcggaatgtgccagagaaacaaactagaggcatattcggtgcaatcgcgggcttcatagaaaatggttgggagggaatgatggacggttggtacggtttcaggcatcaaaattctgagggcacagggcaagcagcagatcttaaaagcactcaagcagcaatcaaccaaatcaacgggaaactgaataggttaatcgagaaaacgaacgagaaattccatcaaattgaaaaagaattctcagaagtagaagggagaattcaggacctcgagaaatatgttgaggacactaaaatagatctctggtcgtacaatgcggagcttcttgttgccctggagaaccaacatacaattgatctaactgactcagaaatgaacaaactgtttgaaagaacaaagaagcaactgagggaaaatgctgaggatatgggcaatggttgtttcaaaatataccacaaatgtgacaatgcctgcatagggtcaattagaaatggaacttatgaccatgatgtatacagagacgaagcattaaacaaccggttccagatcaaaggtgttgagctgaagtcaggatacaaagattggatcctatggatttcctttgccatatcatgttttttgctttgtattgttttgctggggttcatcatgtgggcctgccaaaaaggcaacattaggtgcaacatttgcatttga

SEQ ID NO: 32240 - RNA, 1701 nt, synthetic construct
  misc_feature 1..1701: note = hemagglutinin__InfluenzaA__ABU80400
  source 1..1701: mol_type = other RNA
atgaaggcaatactattagtcttgctatatacatttacagccgcaaatgcagacacattatgtataggttaccatgcaaataattcaactgacactgttgatacagtactagaaaagaatgtaacagtaacacactctgttaaccttctagaagacagacataacggaaaactatgtaaactaaggggggtagccccattgcatttgggtaaatgtaacattgctggatggctcctgggaaacccagaatgtgaattactattcacagcaagctcatggtcttacattgtggaaacatctaactcagacaatgggacatgttacccaggagatttcatcaattacgaagagctaagagagcaattgagctcagtgtcatcatttgaaagatttgagatattccccaaggcaagttcatggcccaatcatgaaacgaacagaggtgtgacggcagcatgcccttatgctggagcaaacagcttctacagaaatttaatatggctggtaaaaaaaggaaattcatacccaaagctcagcaaatcctatgttaacaataaggagaaggaagtcctcgtgctatggggcattcaccatccacctaccagtactgaccaacaaagtctctaccagaatgcagatgcttatgtttttgtggggtcatcaaagtacaacaagaaattcaagccagaaatagcaacaagacccaaggtgagaggtcaagcagggagaatgaactattactggacactagtagagcctggagacacaataacattcgaagcaactggaaatctagtggtaccaagatatgccttcgcaatgaaaagaggttctggatctggtattatcatttcagatacaccagtccacgattgtaatacgacttgtcaaacacccaaaggtgctataaacaccagcctcccatttcagaatatacatccagtcacaattggagaatgtccaaagtatgtcaaaagcacaaaattgagaatggctacaggactaaggaatatcccgtctattcaatctagaggtctgtttggagccattgctggctttattgaggggggatggacaggaatgatagatggatggtacggttatcaccatcaaaatgagcagggatcaggatatgcagctgaccgaaagagcacacagaatgccattgacgggatcactaacaaagtaaactctgttattgaaaagatgaacacacaattcacagcagtgggtaaagaattcaaccacctggaaaaaagaatagagaatttaaacagaaaggttgatgatggttttctggatatttggacttacaatgccgaactgttggttctattggaaaatgaaagaactttagattaccatgactcaaatgtgaagaacctatatgagaaagtgagaagccagctaaaaaacaatgccaaggaaattggaaatggctgctttgaattttaccacaaatgtgatgacacgtgcatggagagcgtcaaaaatgggacttatgattacccaaaatactcagaagaatcaaaactaaacagagaggaaatagatggggtaaagctggaatcaacaaggatttaccagatcttggcgatctattcaactgtcgccagttcattggtactgttagtctccctgggggcaatcagtttctggatgtgctccaatgggtctttacagtgcagaatatgtatttaa

SEQ ID NO: 32241 - RNA, 1701 nt, synthetic construct
  misc_feature 1..1701: note = hemagglutinin__InfluenzaA__ABU92572
  source 1..1701: mol_type = other RNA
atgaagactatcattgctttgagctacattttatgtctggttttcactcaaaaacttcccggaaatgacaacagcacggcaacgctgtgcctggggcaccatgcagtgccaaacggaacgctagtgaaaacaatcacgaatgaccaaattgaagtgactaatgctactgagctggttcagagttcctcaacaggtagaatatgcgacagtcctcaccaaatccttgatggagaaaactgcacactaatagatgctctattgggagaccctcattgtgatggcttccaaaataaggaatgggacctttttgttgaacgcagcaaagcctacagcaactgttacccttatgatgtgccggattatgtctcccttaggtcactagttgcctcatcaggcacgctggagtttaacaatgaaagcttcaattggactggagtcgctcagaatggaacaagctctgcttgcaaaaggagatctgataaaagtttctttagtagattgaattggttgcaccaattaaaatacaaatatccagcactgaacgtgactatgccaaacaatgaaaaatttgacaaattgtacatttggggggttcaccacccgggtacagacagtgaccaaatcagcctatatgctcaagcatcagggagagtcacagtctctaccaaaagaagccaacaaactgtaatcccgaatatcggatctagaccctgggtaaggggtgtctccagcagaataagcatctattggacaatagtaaaaccgggagacatacttttgattaacagcacagggaatctaattgctcctcggggttatttcaaaatacgaagtgggaaaagctcaataatgaggtcagatgcacccattggcaaatgcaattctgaatgcatcactccaaatggaagcattcccaatgacaaaccatttcaaaatgtaaacaggatcacatatgggccctgtcccagatatgttaagcaaaacactctgaaattggcaacagggatgcggaatgtgccagagaaacaaactagaggcatattcggtgcaatcgcgggcttcatagaaaatggttgggagggaatgatggacggttggtacggtttcaggcatcaaaattctgagggcacagggcaagcagcagatcttaaaagcactcaagcagcaatcaaccaaatcaacgggaaactgaataggttaatcgagaaaacgaacgagaaattccatcaaattgaaaaagaattctcagaagtagaagggagaattcaggacctcgagaaatatgttgaggacactaaaatagatctctggtcgtacaatgcggagcttcttgttgccctggagaaccaacatacaattgatctaactgactcagaaatgaacaaactgtttgaaagaacaaagaagcaactgagggaaaatgctgaggatatgggcaatggttgtttcaaaatataccacaaatgtgacaatgcctgcatagggtcaatcagaaatggaacttatgaccatgatgtatacagagacgaagcattgaacaaccggttccagatcaaaggtgttgagctgaagtcaggatacaaagattggatcctatggatttcctttgccatatcatgttttttgctttgtattgttttgctggggttcatcatgtgggcctgccaaaaaggcaacattaggtgcaacatttgcatttga

SEQ ID NO: 32242 - RNA, 1701 nt, synthetic construct
  misc_feature 1..1701: note = hemagglutinin__InfluenzaA__ABU92573
  source 1..1701: mol_type = other RNA
atgaagactatcattgctttgagctacattttatgcctggttttcgctcaaaaacttcccggaaatgacaacagcacggcaacgctgtgcctggggcaccatgcagtgccaaacggaacgctagtgaaaacaatcacgaatgaccaaattgaagtaactaatgctactgagctggttcagagttcctcaacaggtagaatatgcgacagtcctcaccaaatccttgatggagaaaactgcacactaatagatgctctattgggagaccctcattgtgatggcttccaaaataaggaatgggacctttttgttgaacgcagcaaagcctacagcaactgttacccttatgatgtgccggattatgtctcccttaggtcactagttgcctcatcaggcacgctggagtttaacaatgaaagcttcaattggactggagtcgctcagaatggaacaagctctgcttgcaaaaggagatctgataaaagtttctttagtagattgaattggttgcaccaattaaaatacaaatatccagcactgaacgtgactatgccaaacaatgaaaaatttgacaaattgtacatttggggggttcaccacccgggtacagacagtgaccaaatcagcctatatgctcaagcatcagggagagtcacagtctctaccaaaagaagccaacaaactgtaatcccgaatatcggatctagaccctgggtaaggggtgtctccagcagaataagcatctattggacaatagtaaaaccgggagacatacttttgattaacagcacagggaatctaattgctcctcggggttacttcaaaatacgaagtgggaaaagctcaataatgaggtcagatgcacccattggcaaatgcaattctgaatgcatcactccaaatggaagcattcccaatggcaaaccatttcaaaatgtaaacaggatcacatatggggcctgtcccagatatgttaagcaaaacactctgaaattggcaacagggatgcggaatgtgccagagaaacaaactagaggcatattcggtgcaatcgcgggcttcatagaaaatggttgggagggaatgatggacggttggtacggtttcaggcatcagaattctgagggcacagggcaagcagcagatcttaaaagcactcaagcagcaatcaaccaaatcaacgggaaactgaataggttaatcaagaaaacgaacgagaaattccatcaaattgaaaaagaattctcagaagtagaagggagaattcaggacctcgagaaatatgtcgaggacactaaaatagatctctggtcgtacaatgcggagcttcttgttgccctggagaaccaacatacaattgatctaactgactcagaaatgaacaaactgtttgaaagaacaaagaagcaactgagggaaaatgctgaggatatgggcaatggttgtttcaaaatataccacaaatgtgacaatgcctgcatagggtcaatcagaaatggaacttatgaccatgatgtatacagagacgaagcattgaacaaccggttccagatcaaaggtgttgagctgaagtcaggatacaaagattggatcctatggatttcctttgccatatcatgttttttgctttgtattgttttactggggttcatcatgtgggcctgccaaaaaggcaacattaggtgcaacatttgcatttga

SEQ ID NO: 32243 - RNA, 1701 nt, synthetic construct
  misc_feature 1..1701: note = hemagglutinin__InfluenzaA__ABU92575
  source 1..1701: mol_type = other RNA
atgaagactatcattgctttgagctacattttatgtctggttttcgctcaaaaacttcccggaaatgacaacagcacggcaacgctgtgcctggggcaccatgcagtgccaaacggaacgctagtgaaaacaatcacgaatgaccaaattgaagtgactaatgctactgagctggttcagagttcctcaacaggtagaatatgcgacagtcctcaccaaatccttgatggagaaaactgcacactaatagatgctctattgggagaccctcattgtgatggcttccaaaataaggaatgggacctttttgttgaacgcagcaaagcctacagcaactgttacccttatgatgtgccggattatgtctcccttaggtcactagttgcctcatcaggcacgctggagtttaacaatgaaagcttcaattggactggagtcgctcagaatggaacaagctctgcttgcaaaaggagatctgataaaagtttctttagtagattgaattggttgcaccaattaaaatacaaatatccagcactgaacgtgactatgccaaacaatgaaaaatttgacaaattgtacatttggggggttcaccacccgggtacagacagtgaccaaatcagcctatatgctcaagcatcagggagagtcacagtctctaccaaaagaagccaacaaactgtaatcccgaatatcggatctaaaccctgggtaaggggtgtctccagcagaataagcatctattggacaatagtaaaaccgggagacatacttttgattaacagcacagggaatctaattgctcctcggggttacttcaaaatacgaagtgggaaaagctcaataatgaggtcagatgcacccattggcaaatgcaattctgaatgcatcactccaaatggaagcattcccaatgacaaaccatttcaaaatgtaaacaggatcacatatgggccctgtcccagatatgttaagcaaaacactctgaaattggcaacagggatgcggaatgtgccagagaaacaaactagaggcatattcggtgcaatcgcgggcttcatagaaaatggttgggagggaatgatggacggttggtacggtttcaggcatcaaaattctgagggcacagggcaagcagcagatcttaaaagcactcaagcagcaatcaaccaaatcaacgggaaactgaataggttaatcgagaaaacgaacgagaaattccatcaaattgaaaaagaattctcagaagtagaagggagaattcaggacctcgagaaatatgttgaggacactaaaatagatctctggtcgtacaatgcggagcttcttgttgccctggagaaccaacatacaattgatctaactgactcagaaatgaacaaactgtttgaaagaacaaagaagcaactgagggaaaatgctgaggatatgggcaatggttgtttcaaaatataccacaaatgtgacaatgcctgcatagggtcaatcagaaatggaacttatgaccatgatgtatacagagacgaagcattgaacaaccggttccagatcaaaggtgttgagctgaagtcaggatacaaagattggatcctatggatttcctttgccatatcatgttttttgctttgtattgttttgctggggttcatcatgtgggcctgccaaaaaggcaacattaggtgcaacatttgcatttga

SEQ ID NO: 32244 - RNA, 1701 nt, synthetic construct
  misc_feature 1..1701: note = hemagglutinin__InfluenzaA__ABU92576
  source 1..1701: mol_type = other RNA
atgaagactatcattgctttgagctacattttatgtctggttttcgctcaaaaacttcccggaaatgacaacagcacggcaacgctgtgcctggggcaccatgcagtgccaaacggaacgctagtgaaaacaatcacgaatgaccaaattgaagtgactaatgctactgagctggttcagagttcctcaacaggtagaatatgcgacagtcctcaccaaatccttgatggagaaaactgcacactaatagatgctctattgggagaccctcattgtgatggcttccaaaataaggaatgggacctttttgttgaacgcagcaaagcctacagcaactgttacccttatgatgtgccggattatgtctcccttaggtcactagttgcctcatcaggcacgctggagtttaacaatgaaagcttcaattggactggagtcgctcagaatggaacaagctctgcttgcaaaaggagatctgataaaagtttctttagtaggttgaattggttgcaccaattaaaatacaaatatccagcactgaacgtgactatgccgaacaatgaaaaatttgacaaattgtacatttggggggttcaccacccgggtacagacagtgaccaaatcagcctatatgctcaagcatcagggagagtcacagtctctaccaaaagaagccaacaaactgtaatcccgaatatcggatctagaccctgggtaaggggtgtctccagcagaataagcatctattggacaatagtaaaaccgggagacatacttttgattaacagcacagggaatctaattgctcctcggggttacttcaaaatacgaagtgggaaaagctcaataatgaggtcagatgcacccattggcaaatgcaattctgaatgcatcactccaaatggaagcattcccaatgacaaaccatttcaaaatgtaaacaggatcacatatgggccctgtcctagatatgttaagcaaaacactctgaaattggcaacagggatgcggaatgtgccagagaaacaaactagaggcatattcggtgcaatcgcgggcttcatagaaaatggttgggagggaatgatggacggttggtacggtttcaggcatcaaaattctgagggcacagggcaagcagcagatcttaaaagcactcaagcagcaatcaaccaaatcaacgggaaactgaataggttaatcgagaaaacgaacgagaaattccatcaaattgaaaaagaattctcagaagtagaagggagaattcaggacctcgagaaatatgttgaggacactaaaatagatctctggtcgtacaatgcggagcttcttgttgccctggagaaccaacatacaattgatctaactgactcagaaatgaacaaactgtttgaaagaacaaagaagcaactgagggaaaatgctgaggatatgggcaatggttgtttcaaaatataccacaaatgtgacaatgcctgcatagggtcaatcagaaatggaacttatgaccatgatgtatacagagacgaagcattgaacaaccggttccagatcaaaggtgttgagctgaagtcaggatacaaagattggatcctatggatttcctttgccatatcatgttttttgctttgtattgttttgctggggttcatcatgtgggcctgccaaaaaggcaacattaggtgcaacatttgcatttga

SEQ ID NO: 32245 - RNA, 1701 nt, synthetic construct
  misc_feature 1..1701: note = hemagglutinin__InfluenzaA__ABU92577
  source 1..1701: mol_type = other RNA
atgaagactatcattgctttgagctacattttatgtctggttttcgctcaaaaacttcccggaaatgacaacagcacggcaacgctgtgcctggggcaccatgcagtgccaaacggaacgctagtgaaaacaatcacgaatgaccaaattgaagtgactaatgctactgagctggttcagagttcctcaacaggtagaatatgcgacagtcctcaccaaatccttgatggagaaaactgcacactaatagatgctctattgggagaccctcattgtgatggcttccaaaataaggaatgggacctttttgttgaacgcagcaaagcctacagcaactgttacccttatgatgtgccggattatgtctcccttaggtcactagttgcctcatcaggcacgctggagtttaacaatgaaagcttcaattggactggagtcgctcagaatggaacaagctctgcttgcaaaaggagatctgataaaagtttctttagtagattgaattggttgcaccaattaaaatacaaatatccagcactgaacgtgactatgccaaacaatgaaaaatttgacaaattgtacatttggggggttcaccacccgggtacagacagtgaccaaatcagcctatatgctcaagcatcagggagagtcacagtctctaccaaaagaagccaacaaactgtaatcccgaatatcggatctagaccctgggtaaggggtgtctccagcagaataagcatctattggacaatagtaaaaccgggagacatacttttgattaacagcacagggaatctaattgctcctcggggttacttcaaaatacgaagtgggaaaagctcaataatgaggtcagatgcacccattggcaaatgcaattctgaatgcatcactccaaatggaagcattcccaatgacaaaccatttcaaaatgtaaacaggatcacatatgggccctgtcccagatatgttaagcaaaacactctgaaattggcaacagggatgcggaatgtgccagagaaacaaactagaggcatattcggtgcaatcgcgggcttcatagaaaatggttgggagggaatgatggacggttggtacggtttcaggcatcaaaattctgagggcacagggcaagcagcagatcttaaaagcactcaagcagcaatcaaccaaatcaacgggaaactgaataggttaatcgagaaaacgaacgagaaattccatcaaattgaaaaagaattctcagaagtagaagggagaattcaggacctcgagaaatatgttgaggatactaaaatagatctctggtcgtacaatgcggagcttcttgttgccctggagaaccaacatacaattgatctaactgactcagaaatgaacaaactgtttgaaagaacaaagaagcaactgagggaaaatgctgaggatatgggcaatggttgtttcaaaatataccacaaatgtgacaatgcctgcatagggtcaatcagaaatggaacttatgaccatgatgtatacagagacgaagcattgaacaaccggttccagatcaaaggtgttgagctgaagtcaggatacaaagattggatcctatggatttcctttgccatatcatgttttttgctttgtattgttttgctggggttcatcatgtgggcctgccaaaaaggcaacattaggtgcaacatttgcatttga

SEQ ID NO: 32246 - RNA, 1701 nt, synthetic construct; identical to SEQ ID NO: 30576
  misc_feature 1..1701: note = hemagglutinin__InfluenzaA__ABU92578
  source 1..1701: mol_type = other RNA

SEQ ID NO: 32247 - RNA, 1701 nt, synthetic construct
  misc_feature 1..1701: note = hemagglutinin__InfluenzaA__ABU92579
  source 1..1701: mol_type = other RNA
atgaagactatcattgctttgagctacattttatgtctggttttcgctcaaaaacttcccgtaaatgacaacagcacggcaacgctgtgcctgggacaccatgcagtgccaaacggaacgctagtgaaaacaatcacgaatgaccacattgaagtgactaatgctactgagctggttcagagttcctcaacaggtagaatatgcgacagtcctcaccaaatccttgatggagaaaactgcacactaatagatgctctattgggagaccctcattgtgatggcttccaaaataaggaatgggacctttttgttgaacgcagcacagcctacagcaactgttacccttatgatgtgccggattatgcctcccttaggtcactagttgcctcatccggcacactggagtttaacaatgaaagcttcaattggactggagtcgctcagaatggaacaagctctgcttgcaaaaggagatctattaaaagtttctttagtagattgaattggttgcaccaattaaaatacaaatatccagcactgaacgtgactatgccaaacaatgaaaaatttgacaaattgtacatttggggggttcaccacccgagtacggacagtgaccaaatcagcctatatgctcaagcatcagggagagtcacagtctctaccaaaagaagccaacaaactgtaatcccgaatatcggatctagaccctgggtaaggggtgtctccagcagaataagcatctattggacaatagtaaaaccgggagacatacttttgattaacagcacagggaatctaattgctcctcggggttacttcaaaatacgaagtgggaaaagctcaataatgaggtcaaatgcacccattggcaaatgcaattctgaatgcatcactccaaatggaagcattcccaatgacaaaccatttcaaaatgtaaacaggatcacatatggggcctgtcccagatatgttaagcaaaacactctgaaattggcaacagggatgcggaatgtaccagagaaacaaactagaggcatattcggcgcaatcgcgggtttcatagaaaatggttgggaaggaatggtggacggttggtacggtttcaggcatcaaaattctgagggcacaggacaagcagcagatcttaaaagcactcaagcagcaatcaaccaaatcaacgggaaactgaataggttaatcgagaaaacaaacgagaaattccatcaaattgaaaaagaattctcagaagtagaagggagaattcaggacctcgagaaatatgttgaggacactaaaatagatctctggtcgtacaacgcggagcttcttgttgccctggagaaccaacatacaattgatctaactgactcagaaatgaacaaactgtttgaaagaacaaggaagcaactgagggaaaatgctgaggatatgggcaatggttgtttcaaaatataccacaaatgtgacaatgcctgcatagggtcaatcagaaatggaacttatgaccatgatgtatacagagacgaagcattaaacaaccggtttcagatcaaaggtgttgagctgaagtcaggatacaaagattggatcctgtggatttcctttgccatatcatgttttttgctttgtgttgttttgctggggttcatcatgtgggcctgccagaaaggcaacattaggtgcaacatttgcatttga

SEQ ID NO: 32248 - RNA, 1701 nt, synthetic construct; identical to SEQ ID NO: 30576
  misc_feature 1..1701: note = hemagglutinin__InfluenzaA__ABU92580
  source 1..1701: mol_type = other RNA

SEQ ID NO: 32249 - RNA, 1701 nt, synthetic construct; identical to SEQ ID NO: 32241
  misc_feature 1..1701: note = hemagglutinin__InfluenzaA__ABU92581
  source 1..1701: mol_type = other RNA

SEQ ID NO: 32250 - RNA, 1701 nt, synthetic construct
  misc_feature 1..1701: note = hemagglutinin__InfluenzaA__ABU92582
  source 1..1701: mol_type = other RNA
atgaagactatcattgctttgagctacattttatgcctggttttcgctcaaaaacttcccggaaatgacaacagcacggcaacgctgtgcctggggcatcatgcagtgccaaacggaacgctagtgaaaacaatcacgaatgaccaaattgaagtaactaatgctactgagctggttcagagttcctcaacaggtagaatatgcgacagtcctcaccaaatccttgatggagaaaactgcacactaatagatgctctattgggagaccctcattgtgatggcttccaaaataaggaatgggacctttttgttgaacgcagcaaagcctacagcaactgttacccttatgatgtgccggattatgtctcccttaggtcactagttgcctcatcaggcacgctggagtttaacaatgaaagcttcaattggactggagtcgctcagaatggaacaagctctgcttgcaaaaggagatctgataaaagtttctttagtagattgaattggttgcaccaattaaaatacaaatatccagcacagaacgtgactatgccaaacaatgaaaaatttgacaaattgtacatttggggggttcaccacccgggtacagacagtgaccaaatcagcctatatgctcaagcatcagggagagtcacagtctctaccaaaagaagccaacaaactgtaatcccgaatatcggatctagaccctgggtaaggggtgtctccagcagaataagcatctattggacaatagtaaaaccgggagacatacttttgattaacagcacagggaatctaattgctcctcggggttacttcaaaatacgaagtgggaaaagctcaataatgaggtcagatgcacccattggcaaatgcaattctgaatgcatcactccaaatggaagcattcccaatgacaaaccatttcaaaatgtaaacaggatcacatatggggcctgtcccagatatgttaagcaaaacactctgaaattggcaacagggatgcggaatgtgccagagaaacaaactagaggcatattcggtgcaatcgcaggcttcatagaaaatggttgggagggaatgatggacggttggtacggtttcaggcatcaaaattctgagggcacagggcaagcagcagatcttaaaagcactcaagcagcaatcaaccaaatcaacgggaaactgaataggttaatcgagaaaacgaacgagaaattccatcaaattgaaaaagaattctcagaagtagaagggagaattcaggacctcgagaaatatgttgaggacactaaaatagatctctggtcgtacaatgcggagcttcttgttgccctggagaaccaacatacaattgatctaactgactcagaaatgaacaaactgtttgaaagaacaaagaagcaactgagggaaaatgctgaggatatgggcaatggttgtttcaaaatataccacaaatgtgacaatgcctgcatagggtcaatcagaaatggaacttatgaccatgatgtatacagagacgaagcattgaacaaccggttccagatcaaaggtgttgagctgaagtcaggatataaagattggatcctatggatttcctttgccatatcatgttttttgctttgtattgttttgctggggttcatcatgtgggcctgccaaaaaggcaacattaggtgcaacatttgcatttga

SEQ ID NO: 32251 - RNA, 1701 nt, synthetic construct; identical to SEQ ID NO: 32250
  misc_feature 1..1701: note = hemagglutinin__InfluenzaA__ABU92583
  source 1..1701: mol_type = other RNA

SEQ ID NO: 32252 - RNA, 1701 nt, synthetic construct
  misc_feature 1..1701: note = hemagglutinin__InfluenzaA__ABU92584
  source 1..1701: mol_type = other RNA
atgaagactatcattgctttgagctacattttatgcctggttttcgctcaaaaacttcccggaaatgacaacagcacggcaacgctgtgcctggggcaccatgcagtgccaaacggaacgctagtgaaaacaatcacgaatgaccaaattgaagtaactaatgctactgagctggttcagagttcctcaacaggtagaatatgcgacagtcctcaccaaatccttgatggagaaaactgcacactaatagatgctctattgggagaccctcattgtgatggcttccaaaataaggaatgggacctttttgttgaacgcagcaaagcctacagcaactgttacccttatgatgtgccggattatgtctcccttaggtcactagttgcctcatcaggcacgctggagtttaacaatgaaagcttcaattggactggagtcgctcagaatggaacaagctctgcttgcaaaaggagatctgataaaagtttctttagtagattgaattggttgcaccaattaagatacaaatatccagcactgaacgtgactatgccaaacaatgaaaaatttgacaaattgtacatttggggggtccaccacccgggtacagacagtgaccaaatcagcctatatgctcaagcatcagggagagtcacagtctctaccaaaagaagccaacaaactgtaatcccgaatatcggatctagaccctgggtaaggggtgtctccagcagaataagcatctattggacaatagtaaaaccgggagacatacttttgattaacagcacagggaatctaattgctcctcggggttacttcaaaatacgaagtgggaaaagctcaataatgaggtcagatgcacccattggcaaatgcaattctgaatgcatcactccaaatggaagcattcccaatgacaaaccatttcaaaatgtaaacaggatcacatatggggcctgtcccagatatgttaagcaaaaaactctgaaattggcaacagggatgcggaatgtgccagagaaacaaactagaggcatattcggtgcaatcgcgggcttcatagaaaatggttgggagggaatgatggacggttggtacggtttcaggcatcaaaattctgagggcacagggcaagcagcagatcttaaaagcactcaagcagcaatcaaccaaatcaacgggaaactgaataggttgattgagaaaacgaacgagaaattccatcaaattgaaaaagaattctcagaagtagaagggagaattcaggacctcgagaaatatgtcgaggacactaaaatagatctctggtcgtacaatgcggagcttcttgttgccctggagaaccaacatacaattgatctaactgactcagaaatgaacaaactgtttgaaagaacaaagaagcaactgagggaaaatgctgaggatatgggcaatggttgtttcaaaatataccacaaatgtgacaatgcctgcatagggtcaatcagaaatggaacttatgaccatgatgtatacagagacgaggcattgaacaaccggttccagatcaaaggtgttgagctgaagtcaggatacaaagattggatcctatggatttcctttgccatatcatgttttttgctttgtattgttttactggggttcatcatgtgggcctgccaaaaaggcaacattaggtgcaacatttgcatttga

SEQ ID NO: 32253 - RNA, 1701 nt, synthetic construct
  misc_feature 1..1701: note = hemagglutinin__InfluenzaA__ABU92586
  source 1..1701: mol_type = other RNA
atgaagactatcattgctttgagctacattctatgtctggttttcgctcaaaaacttcccggaaatgacaacagcacggcaacgctgtgccttgggcaccatgcagtaccaaacggaacgatagtgaaaacaatcacaaatgaccaaattgaagttactaatgctactgagctggttcagagttcctcaacaggtggaatatgcgacagtcctcatcaaatccttgatggagaaaactgcacactaatagatgctctattgggagaccctcagtgtgatggcttccaaaataagaaatgggacctttttgttgaacgcagcaaagcctacagcaactgttacccttatgatgtgccggattatgcctcccttaggtcactaattgcctcatccggcacactggagtttaacaatgaaagcttcaattggactggagtcactcaaaatggaacaagctctgcttgcaaaaggagatctaatagcagtttctttagtagattgaattggttgacccacttaaaattcaaatacccagcattgaacgtgactatgccaaacaatgaagaatttgacaaattgtacatttggggggttcaccacccgggtacagacaatgaccaaatcagcctatatgctcaagcatcaggaagaatcacagtctctaccaaaagaagccaacaaactgtaatcccgaatatcggatctagacccagggtaagggatatccccagcagaataagcatctattggacaatagtaaaaccgggagacatacttttgattaacagcacagggaatctaattgctcctcggggttacttcaaaatacgaagtgggaaaagctcaataatgagatcagatgcacccattggcaaatgcaattctgaatgcatcactccaaatggaagcattcccaatgacaaaccatttcaaaatgtaaacaggatcacatatggggcctgtcccagatatgttaagcaaaacactctgaaattggcaacagggatgcgaaatgtaccagagaaacaaactagaggcatatttggcgcaatcgcgggtttcatagaaaatggttgggagggaatggtggatggttggtacggtttcaggcatcaaaattctgagggaataggacaagcagcagatctcaaaagcactcaagcagcaatcgaccaaatcaatgggaagctgaataggttgatcgggaaaaccaacgagaaattccatcagattgaaaaagaattctcagaagtagaagggagaattcaggacctcgagaaatatgttgaggacactaaaatagatctctggtcatacaacgcggagcttcttgttgccttggagaaccaacatacaattgatctaactgactcagaaatgaacaaactgtttgaaagaacaaagaagcaactgagggaaaatgctgaggatatgggcaatggttgtttcaaaatataccacaaatgtgacaatgcctgcatagggtcaatcagaaatggaacttatgaccatgatgtatacagagatgaagcattaaacaaccggttccagatcaaaggtgttgagctgaagtcaggatacaagaattggatcctatggatttcctttgccatatcatgttttttgctttgtgttgctttgttggggttcatcatgtgggcctgccaaaaaggcaacattaggtgcaacatttgcatttga

SEQ ID NO: 32254 - RNA, 1701 nt, synthetic construct
  misc_feature 1..1701: note = hemagglutinin__InfluenzaA__ABU92587
  source 1..1701: mol_type = other RNA
atgaagactatcattgctttgagctacattctatgtctggttttcgctcaaaaacttcccggaaatgacaacagcacggcaacgctgtgccttgggcaccatgcagtaccaaacggaacgatagtgaaaacaatcacgaatgaccaaattgaagttactaatgctactgagctggttcagagttcctcaacaggtggaatatgcgacagtcctcatcagatccttgatggagaaaactgcacactaatagatgctctattgggagaccctcagtgtgatggcttccaaaataagaaatgggacctttttgttgaacgcagcaaagcctacagcaactgttacccttatgatgtgccggattatgcctcccttaggtcactaattgcctcatccggcacactggagtttaacaatgaaagcttcaattggactggagtcactcaaaatggaacaagctctgcttgcaaaaggagatctaatagcagtttctttagtagattgaattggttgacccacttaaaattcaaatacccagcattgaacgtgactatgccaaacaatgaagaatttgacaaattgtacatttggggggttcaccacccgggtacatacaatgaccaaatcagcctatatgctcaagcatcaggaagaatcacagtctctaccaaaagaagccaacaaactgcaatcccgaatatcgggtccagacccagggtaagggatatccccagcagaataagcatctattggacaatagtaaaaccgggagacatacttttgattaacagcacagggaatctaattgctcctcggggttacttcaaaatacgaagtgggaaaagctcaataatgagatcagatgcacccattggcaaatgcaattctgaatgcatcactccaaatggaagcattcccaatgacaaaccatttcaaaatgtaaacaggatcacatatggggcctgtcccagatatgttaagcaaaacactctgaaattggcaacagggatgcgaaatgtaccagagaaacaaactagaggcatatttggcgcaatcgcgggtttcatagaaaatggttgggagggaatggtggatggttggtacggtttcaggcatcaaaattctgagggaataggacaagcagcagatctcaaaagcactcaagcagcaatcgaccaaatcaatgggaagctgaataggttgatcgggaaaaccaacgagaaattccatcagattgaaaaagaattctcagaagtagaagggagaattcaggacctcgagaaatatgttgaggacactaaaatagatctctggtcatacaacgcggagcttcttgttgccctggagaaccaacatacaattgatctaactgactcagaaatgaacaaactgtttgaaagaacaaagaagcaactgagggaaaatgctgaggatatgggcaatggttgtttcaaaatataccacaaatgtgacaatgcctgcatagggtcaatcagaaatggaacttatgaccatgatgtatacagagatgaagcattaaacaaccggttccagatcaaaggtgttgagctgaagtcaggatacaaagattggatcctatggatttcctttgccatatcatgttttttgctttgtgttgctttgttggggttcatcatgtgggcctgccaaaaaggcaacattaggtgcaacatttgcatttga

SEQ ID NO: 32255 - RNA, 1701 nt, synthetic construct
  misc_feature 1..1701: note = hemagglutinin__InfluenzaA__ABU92588
  source 1..1701: mol_type = other RNA
atgaagactatcattgctttgagctacattctatgtctggttttcgctcaaaaacttcccggaaatgacaacagcacggcaacgctgtgccttgggcaccatgcagtaccaaacggaacgatagtgaaaacaatcacgaatgaccaaattgaagttactaatgctactgagctggttcagagttcctcaacaggtggaatatgcgacagtcctcatcagatccttgatggagaaaactgcacactaatagatgctctattgggagaccctcagtgtgatggcttccaaaataagaaatgggacctttttgttgaacgcagcaaagcctacagcaactgttacccttatgatgtgccggattatgcctcccttaggtcactagttgcctcatccggcacactggagtttaacaatgaaagcttcaattggactggagtcactcaaaatggaacaagctctgcttgcaaaaggaaatctaataacagtttctttagtagattgaattggttgacccacttaaaattcaaatacccagcattgaatgtgaccatgccaaacaatgaaaaatttgacaaattgtacatttggggggttcaccacccgggtacggacaatgaccaaatcagcctatatgctcaagcttcaggaagaatcacagtctctaccaaaagaagccaacaaactgtaattccgaatatcggatctagacccagggtaagggatatccccagcagaataagcatctattggacaatagtaaaaccgggagacatacttttgattaacagcacagggaatctaattgctcctcggggttacttcaaaatacgaagtgggaaaagctcaataatgagatcagatgcacccattggcaaatgcaattctgaatgcatcactccaaatggaagcattcccaatgacaaaccatttcaaaatgtaaacaggatcacatatggggcctgtcccagatatgttaagcaaaacactctgaaattggcaacagggatgcgaaatgtaccagagaaacaaactagaggcatatttggcgcaatcgcgggtttcatagaaaatggttgggagggaatggtggatggttggtacggtttcaggcatcaaaattctgagggaataggacaagcagcagatctcaaaagcactcaagcagcaatcaaccaaatcaatgggaagctgaataggttgatcgggaaaaccaacgagaaattccatcagattgaaaaagaattctcagaagtagaagggagaattcaggacctcgagaaatatgttgaggacactaaaatagatctctggtcatacaacgcggagtttcttgttgccctggagaaccaacatacaattgatctaaccgactcagaaatgaacaaactgtttgaaagaacaaagaagcaactgagggaaaatgctgaggatatgggcaatggttgtttcaaaatataccacaaatgtgacaatgcctgcatagggtcaatcagaaatggaacttatgaccatgatgtatacagagatgaagcattaaacaaccggttccagatcaaaggtgttgagctgaagtcaggatacaaagattggatcctatggatttcctttgccatatcatgttttttgctttgtgttgctttgttggggttcatcatgtgggcctgccaaaaaggcaacattaggtgcaacatttgcatttga

SEQ ID NO: 32256 - RNA, 1701 nt, synthetic construct
  misc_feature 1..1701: note = hemagglutinin__InfluenzaA__ABU92590
  source 1..1701: mol_type = other RNA
atgaagactatcattgctttgagctacattctatgtctggttttcgctcaaaaacttcccggaaatgacaacagcacggcaacgctgtgccttgggcaccatgcagtaccaaacggaacgatagtgaaaacaatcacgaatgaccaaattgaagttactaatgctactgagctggttcagagttcctcaacaggtggaatatgcgacagtcctcatcagatccttgatggagaaaactgcacactaatagatgctctattgggagaccctcagtgtgatggcttccaaaataagaaatgggacctttttgttgaacgcagcaaagcctacagcaactgttacccttatgatgtgccggattatgcctcccttaggtcactaattgcctcatccggcacactggagtttaacaatgaaagcttcaattggactggagtcactcaaaatggaacaagctctgcttgcaaaaggagatctaatagcagtttctttagtagattgaattggttgacccacttaaaattcaaatacccagcattgaacgtgactatgccaaacaatgaagaatttgacaaattgtacatttggggggttcaccacccgggtacatacaatgaccaaatcagcctatatgctcaagcatcaggaagaatcacagtctctaccaaaagaagccaacaaactgtaatcccgaatatcgggtctagacccagggtaagggatatccccagcagaataagcatctattggacaatagtaaaaccgggagacatacttttgattaacagcacagggaatctaattgctcctcggggttacttcaaaatacgaagtgggaaaagctcaataatgagatcagatgcacccattggcaaatgcaattctgaatgcatcactccaaatggaagcattcccaatgacaaaccatttcaaaatgtaaacaggatcacatatggggcctgtcccagatatgttaagcaaaacactctgaaattggcaacagggatgcgaaatgtaccagagaaacaaactagaggcatatttggcgcaatcgcgggtttcatagaaaatggttgggagggaatggtggatggttggtacggtttcaggcatcaaaattctgagggaataggacaagcagcagatctcaaaagcactcaagcagcaatcgaccaaatcaatgggaagctgaataggttgatcgggaaaaccaacgagaaattccatcagattgaaaaagaattctcagaagtagaagggagaattcaggacctcgagaaatatgttgaggacactaaaatagatctctggtcatacaacgcggagcttcttgttgccctggagaaccaacatacaattgatctaactgactcagaaatgaacaaactgtttgaaagaacaaagaagcaactgagggaaaatgctgaggatatgggcaatggttgtttcaagatataccacaaatgtgacaatgcctgcatagggtcaatcagaaatggaacttatgaccatgatgtatacagagatgaagcactaaacaaccggttccagatcaaaggtgttgagctgaagtcaggatacaaagattggatcctatggatttcctttgccatatcatgttttttgctttgtgttgctttgttggggttcatcatgtgggcctgccaaaaaggcaacattaggtgcaacatttgcatttga

SEQ ID NO: 32257 - RNA, 1701 nt, synthetic construct
  misc_feature 1..1701: note = hemagglutinin__InfluenzaA__ABU92591
  source 1..1701: mol_type = other RNA
atgaagactatcattgctttgagctacattctatgtctggttttcgctcaaaaacttcccggaaatgacaacagcacggcaacgctgtgccttgggcaccatgcagtaccaaacggaacgatagtgaaaacaatcacgaatgaccaaattgaagttactaatgctactgagctggttcagagttcctcaacaggtggaatatgcgacagtcctcatcagatccttgatggagaaaactgcacactaatagatgctctattgggagaccctcagtgtgatggcttccaaaataagaaatgggacctttttgttgaacgcagcaaagcctacagcaactgttacccttatgatgtgccggattatgcctcccttaggtcactaattgcctcatccggcacactggagtttaacaatgaaagcttcaattggactggagtcactcaaaatggaacaagctctgcttgcaaaaggagatctaatagcagtttctttagtagattgaattggttgacccacttaaaattcaaatacccagcattgaacgtgactatgccaaacaatgaagaatttgacaaattgtacatttggggggttcaccacccgggtacagacaatgaccaaatcagcctatatgctcaagcatcaggaagaatcacagtctctaccaaaagaagccaacaaactgtaatcccgaatatcggatctagacccagggtaagggatatccccagcagaataagcatctattggacaatagtaaaaccgggagacatacttttgattaacagcacagggaatctaattgctcctcggggttacttcaaaatacgaagtgggaaaagctcaataatgagatcagatgcacccattggcaaatgcaattctgaatgcatcactccaaatggaagcattcccaatgacaaaccatttcaaaatgtaaacaggatcacatatggggcctgtcccagatatgttaagcaaaacactctgaaattggcaacagggatgcgaaatgtaccagagaaacaaactagaggcatatttggcgcaatcgcgggtttcatagaaaatggttgggagggaatggtggatggttggtacggtttcaggcatcaaaattctgagggaataggacaagcagcagatctcaaaagcactcaagcagcaatcgaccaaatcaatgggaagctgaataggttgatcgggaaaaccaacgagaaattccatcagattgaaaaagaattctcagaagtggaagggagaattcaggacctcgagaaatatgttgaggacactaaaatagatctctggtcatacaacgcggagcttcttgttgccctggagaaccaacatacaattgatctaactgactcagaaatgaacaaactgtttgaaagaacaaagaagcaactgagggaaaatgctgaggatatgggcaatggttgtttcaaaatataccacaaatgtgacaatgcctgcatagggtcaatcagaaatggaacttatgaccatgatgtatacagagatgaagcattaaacaaccggttccagatcaaaggtgttgagctgaagtcaggatacaaagattggatcctatggatttcctttgccatatcatgttttttgctttgtgttgctttgttggggttcatcatgtgggcctgccaaaaaggcaacattaggtgcaacatttgcatttga

SEQ ID NO: 32258 - RNA, 1701 nt, synthetic construct
  misc_feature 1..1701: note = hemagglutinin__InfluenzaA__ABU92592
  source 1..1701: mol_type = other RNA
atgaagactatcattgctttgagctacattctatgtctggttttcgctcaaaaacttcccggaaatgacaacagcacggcaacgctgtgccttgggcaccatgcagtaccaaacggaacgatagtgaaaacaatcacgaatgaccaaattgaagttactaatgctactgagctggttcagagttcctcaacaggtggaatatgcgacagtcctcatcagatccttgatggagaaaactgcacactaatagatgctctattgggagaccctcagtgtgatggcttccaaaataagaaatgggacctttttgttgaacgcagcaaagcctacagcaactgttacccttatgatgtgccggattatgcctcccttaggtcactaattgcctcatccggcacactggagtttaacaatgaaagcttcaattggactggagtcactcaaaatggaacaagctctgcttgcaaaaggagatctaatagcagtttctttagtagattgaattggttgacccacttaaaattcaaatacccagcattgaacgtgactatgccaaacaatgaagaatttgacaaattgtacatttggggggttcaccacccgggtacagacaatgaccaaatcagcctatatgctcaagcatcaggaagaatcacagtctctaccaaaagaagccaacaaactgtaatcccgaatatcggatctagacccagggtaagggatatccccagcagaataagcatctattggacaatagtaaaaccgggagacatacttttgattaacagcacagggaatctaattgctcctcggggttacttcaaaatacgaagtgggaaaagctcaataatgagatcagatgcacccattggcaaatgcaattctgaatgcatcactccaaatggaagcattcccaatgacaaaccatttcaaaatgtaaacaggatcacatatggggcctgtcccagatatgttaagcaaaacactctgaaattggcaacagggatgcgaaatgtaccagagaaacaaactagaggcatatttggcgcaatcgcgggtttcatagaaaatggttgggagggaatggtggatggttggtacggtttcaggcatcaaaattctgagggaataggacaagcagcagatctcaaaagcactcaagcagcaatcgaccaaatcaatgggaagctgaataggttgatcgggaaaaccaacgagaaattccatcagattgaaaaagaattctcagaagtagaagggagaattcaggacctcgagaaatatgttgaggacactaaaatagatctctggtcatacaacgcggagcttcttgttgccctggagaaccaacatacaattgatctaactgactcagaaatgaacaaactgtttgaaagaacaaagaagcaactgagggaaaatgctgaggatatgggcaatggttgtttcaaaatataccacaaatgtgacaatgcctgcatagggtcaatcagaaatggaacttatgaccatgatgtatacagagatgaagcattaaacaaccggttccagatcaaaggtgttgagctgaagtcaggatacaaagattggatcctatggatttcctttgccatatcatgttttttgctttgtgttgctttgttggggttcatcatgtgggcctgccaaaaaggcaacattaggtgcaacatttgcatttga

SEQ ID NO: 32259 - RNA, 1701 nt, synthetic construct
  misc_feature 1..1701: note = hemagglutinin__InfluenzaA__ABU92593
  source 1..1701: mol_type = other RNA
atgaagactatcattgctttgagctacattctatgtctggttttcgctcaaaaacttcccggaaatgacaacagcacggcaacgctgtgccttgggcaccatgcagtaccaaacggaacgatagtgaaaacaatcacgaatgaccaaattgaagttactaatgctactgagctggttcagagttcctcaacaggtggaatatgcgacagtcctcatcagatccttgatggagaaaactgcacactaatagatgctctattgggagaccctcagtgtgatggcttccaaaataagaaatgggacctttttgttgaacgcagcaaagcctacagcaactgttacccttatgatgtgccggattatgcctcccttaggtcactagttgcctcatccggcacactggagtttaacaatgaaagcttcaattggactggagtcactcaaaatggaacaagctctgcttgcaaaaggagatctaataacagtttctttagtagattgaattggttgacccacttaaaattcaaatacccagcattgaacgtgactatgccaaacaatgaaaaatttgacaaattgtacatttggggggttcaccacccgggtacggacaatgaccaaatcttcctgtatgctcaagcatcaggaagaatcacagtctctaccaaaagaagccaacaaactgtaatcccgaatatcggatctagacccagagtaaggaatatccccagcagaataagcatctattggacaatagtaaaaccgggagacatacttttgattaacagcacagggaatctaattgctcctaggggttacttcaaaatacgaagtgggaaaagctcaataatgagatcagatgcacccattggcaaatgcaattctgaatgcatcactccaaatggaagcattcccaatgacaaaccatttcaaaatgtaaacaggatcacatacggggcctgtcccagatatgttaagcaaaacactctgaaattggcaacagggatgcgaaatgtaccagagaaacaaactagaggcatatttggcgcaatcgcgggtttcatagaaaatggttgggagggaatggtggatggttggtacggtttcaggcatcaaaattctgagggaataggacaagcagcagatctcaaaagcactcaagcagcaatcgatcaaatcaatgggaagctgaataggttgatcgggaaaaccaacgagaaattccatcagattgaaaaagaattctcagaagtagaagggagaattcaggacctcgagaaatatgttgaggacactaaaatagatctctggtcatacaacgcggagcttcttgttgccctggagaaccaacatacaattgatctaactgactcagaaatgaacaaactgtttgaaaaaacaaagaagcaactgagggaaaatgctgaggatatgggcaatggttgtttcaaaatataccacaaatgtgacaatgcctgcataggatcaatcagaaatggaacttatgaccatgatgtatacagagatgaagcattaaacaaccggttccagatcaagggcgttgagctgaagtcaggatacaaagattggatcctatggatttcctttgccatatcatgttttttgctttgtgttgctttgttggggttcatcatgtgggccggccaaaaaggcaacaaaaggtgcaacatttgcatttga

SEQ ID NO: 32260 - RNA, 1701 nt, synthetic construct
  misc_feature 1..1701: note = hemagglutinin__InfluenzaA__ABU92594
  source 1..1701: mol_type = other RNA
atgaagactatcattgctttgagctacattctatgtctggttttcgctcaaaaacttcccggaaatgacaacagcacggcaacgctgtgccttgggcaccatgcagtaccaaacggaacaatagtgaaaacaatcacgaatgaccaaattgaagttactaatgctactgagctggttcagagttcctcaacaggtgaaatatgcaacagtcctcatcagatccttgatggagaaagctgcacactaatagatgctctattgggagaccctcagtgtgatggcttccaaaataagaaatgggacctttttgttgaacgcagcaaagcctacagcaactgttacccttatgatgtgccggattatgcctcccttaggtcactagttgcctcatccggcacactggagtttaacaatgaaagcttcaattggactggagtcactcaaaatggaacaagctctgcttgcaaaaggagatctaataacagtttctttagtagattgaattggttgacccacttaaaattcaaatacccagcattgaacgtgactatgccaaacaatgaaaaatttgacaaattgtacatttggggggttcaccacccgggtacggacaatgaccaaatcttcctgtatgctcaagcatcaggaagaatcacagtctctaccaaaagaagccaacaaactgtaatcccgaatatcggatctagacccagagtaaggaatatccccagcagaataagcatctattggacaatagtaaaaccgggagacatacttttgattaacagcacagggaatctaattgctcctaggggttacttcaaaatacgaagtgggaaaagctcaataatgagatcagatgcacccattggcaaatgcaattctgaatgcatcactccaaatggaagcattcccaatgacaaaccatttcaaaatgtaaacaggatcacatatggggcctgtcccagatatgttaagcaaaacactctgaaattggcaacagggatgcgaaatgtaccagagaaacaaactagaggcatatttggcgcaatcgcgggtttcatagaaaatggttgggagggaatggtggatggttggtacggtttcaggcatcaaaattctgagggaataggacaagcagcagatctcaaaagcactcaagcagcaatcaatcaaatcaatgggaagctgaataggttgatcgggaaaaccaacgagaaattccatcagattgaaaaagaattctcagaagtagaagggagaattcaggacctcgagaaatatgttgaggacactaaaatagatctctggtcatacaacgcagagcttcttgttgccctggagaaccaacatacaattgatctaactgactcagaaatgaacaaactgtttgaaagaacaaagaagcaactgagggaaaatgctgaggatatgggcaatggttgtttcaaaatataccacaaatgtgacaatgcctgtataggatcaatcagaaatggaacttatgatcatgatgtatacagagatgaagcattaaacaaccggttccagatcaaaggcgttgagctgaagtcaggatacaaagattggatcctatggatttcctttgccatatcatgttttttgctttgtgttgctttgtcggggttcatcatgtgggcctgccaaaaaggcaacattaggtgcaacatttgcatttga

SEQ ID NO: 32261 - RNA, 1701 nt, synthetic construct
  misc_feature 1..1701: note = hemagglutinin__InfluenzaA__ABU92595
  source 1..1701: mol_type = other RNA
atgaagactatcattgctttgagctacattctatgtctggttttcgctcaaaaacttcccgaaaatgacaacagcacggcaacgctgtgccttgggcaccatgcagtaccaaacggaacgatagtgaaaacaatcacgaatgaccaaattgaagttactaatgctactgagctggttcagagttcctcaacaggtggaatatgcgacagtcctcatcagatccttgatggagaaaactgcacactaatagatgctctattgggagaccctcagtgtgatggcttccaaaataagaaatgggacctttttgttgaacgcagcaaagcctacagcaactgttacccttatgatgtgccggattatgcctcccttaggtcactagttgcctcatccggcacactggagtttaacaatgaaagcttcaattggactggagtcactcaaaacggaacaagctctgcttgcaaaaggagatctaataacagtttctttagtagattgaattggttgacccacttaaaattcaaatacccagcattgaacgtgactatgccaaacaatgaaaaatttgacaaattgtacatttggggggttcaccacccgggtacggacaatgaccaaatcttcctgtatgctcaagcatcaggaagaatcacagtctctaccaaaagaagccaacaaactgtaatcccgaatatcggatctagacccagagtaaggaatatccccagcagaataagcatctattggacaatagtaaaaccgggagacatacttttgattaacagcacagggaatctaattgctcctaggggttacttcaaaatacgaagtgggaaaagctcaataatgagatcagatgcacccattggcaaatgcaattctgaatgcatcactccaaatggaagcattcccaatgacaaaccatttcaaaatgtaaacaggatcacatatggggcctgtcccagatatgttaagcaaaacactctgaaattggcaacagggatgcgaaatgtaccagagaaacaaactagaggcatatttggcgcaatcgcgggtttcatagaaaatggttgggagggaatggtggatggttggtacggtttcaggcatcaaaattctgagggaataggacaagcagcagatctcaaaagcactcaagcagcaatcgatcaaatcaatgggaagctgaataggttgatcgggaaaaccaacgagaaattccatcagattgaaaaagaattctcagaagtagaagggagaattcaggacctcgagaaatatgttgaggacactaaaatagatctctggtcatacaacgcggagcttcttgttgccctggagaaccaacatacaattgatctaactgactcagaaatgaacaaactgtttgaaaaaacaaagaagcaactgagggaaaatgctgaggatatgggcaatggttgtttcaaaatataccacaaatgtgacaatgcctgcataggatcaatcagaaatggaacttatgaccatgatgtatacagagatgaagcattaaacaaccggttccagatcaagggcgttgagctgaagtcaggatacaaagattggatcctatggatttcctttgccatatcatgttttttgctttgtgttgctttgttggggttcatcatgtgggcctgccaaaaaggcaacattaggtgcaacatttgcatttga

SEQ ID NO: 32262 - RNA, 1701 nt, synthetic construct
  misc_feature 1..1701: note = hemagglutinin__InfluenzaA__ABU92596
  source 1..1701: mol_type = other RNA
atgaagactatcattgctttgagctacattctatgtctggtttttgctcaaaaacttcccggaaatgacaacagcacggcaacgctgtgccttgggcaccatgcagtaccaaacggaacgatggtgaaaacaatcacgaatgaccaaattgaagttactaatgctactgagctggttcagagttcctcaacaggtgaaatatgcgacagtcctcatcagatccttgatggagaaaactgcacactaatagatgctctattgggagaccctcagtgtgatggcttccaaaataagaaatgggacctttttgttgaacgaagcaaagcccacagcaactgttacccttatgatgtgccggattatgcctcccttaggtcactaattgcctcatccggcaccctggagtttaacaatgaaagcttcaattggactggagtcactcaaaatgggacaagctctgcttgcaaaaggagatctgataacagtttctttagtagattgaattggttgacccacttaaaattcaaatacccagcattgaacgtgactatgccaaacaatgaagaatttgacaaattgtacatttggggggttcaccacccgggtacggacaatgaccaaatcagcctatatgctcaagcatcaggaagaatcacagtctctaccaaaagaagccaacaaactgtaatcccgaatatcggatctagacccagggtaagggatatccccagcagaataagcatctattggacaatagtaaaaccgggagacatacttttgattaacagcacagggaatctaattgctcctcggggttacttcaaaatacgaagtgggaaaagctcaataatgagatcagatgcacccattggcaaatgtaattctggatgcatcactccaaatggaagcattcccaatgacaaaccatttcaaaatgtaaacaggatcacatatggggcctgccccagatatgttaagcaaaacactctaaaattggcaacagggatgcgaaatgtaccagagaaacaaactagaggcatatttggcgcaatcgcgggtttcatagaaaatggttgggagggaatggtggatggttggtacggtttcaggcatcaaaattctgagggaataggacaagcagcagatctcaaaagcactcaagcagcaatcgaccaaatcaatgggaagctgaataggttgatcgggaaaaccaacgagaaattccatcagattgaaaaagaattctcagaagtagaagggagaattcaggacctcgagaaatatgttgaggacactaaaatagatctctggtcatacaacgcggagcttcttgttgccctggagaaccaacatacaattgatctaactgactcagaaatgaacaaactgtttgaaagaacaaagaagcaactgagggaaaatgctgaggatatgggcaatggttgtttcaaaatataccacaaatgtgacaatgcctgcatagggtcaatcagaaatggaacttatgaccatgatgtatacagagatgaagcattaaacaaccggttccagatcaaaggtgttgagctgaagtcaggatacaaagattggatcctatggatttcctttgccatatcatgttttttgctttgtgttgctttgttggggttcatcatgtgggcctgccaaaaaggcaacattaggtgcaacatttgcatttga

SEQ ID NO: 32263 - RNA, 1701 nt, synthetic construct
  misc_feature 1..1701: note = hemagglutinin__InfluenzaA__ABU92597
  source 1..1701: mol_type = other RNA
atgaagactatcattgctttgagctacattctatgtctggttttcgctcaaaaacttcccggaaatgacaacagcacggcaacgctgtgccttgggcaccatgcagtaccaaacggaacgatagtgaaaacaatcacgaatgaccaaattgaagttactaatgctactgagctggttcagagttcctcaacaggtggaatatgcgacagtcctcatcagatccttgatggagaaaactgcacactaatagatgctctattgggagaccctcagtgtgatggcttccaaaataagaaatgggacctttttgttgaacgcagcaaagcctacagcaactgttacccttatgatgtgccggattatgcctcccttaggtcactagttgcctcatccggcacactggagtttaacaatgaaagcttcaattggactggagtcactcaaaatggaacaagctctgcttgcaaaaggagatctaataacagtttctttagtagattgaattggttgacccacttaaaattcaaatacccagcattgaacgtgactatgccaaacaatgaaaaatttgacaaattgtacatttggggggttcaccacccgggtacggacaatgaccaaatcttcctgtatgctcaagcatcaggaagaatcacagtctctaccaaaagaagccaacaaactgtaatcccgaatatcggatctagacccagagtaaggaatatccccagcagaataagcatctattggacaatagtaaaaccgggagacatacttttgattaacagcacagggaatctaattgctcctaggggttacttcaaaatacgaagtgggaaaagctcaataatgagatcagatgcacccattggcaaatgcaattctgaatgcatcactccaaatggaagcattcccaatgacaaaccatttcaaaatgtaaacaggatcacatatggggcctgtcccagatatgttaagcaaaacactctgaaattggcaacagggatgcgaaatgtaccagagaaacaaactagaggcatatttggcgcaatcgcgggtttcatagaaaatggttgggagggaatggtggatggttggtacggtttcaggcatcaaaattctgagggaataggacaagcagcagatctcaaaagcactcaagcagcaatcaatcaaatcaatgggaagctgaataggttgatcgggaaaaccaacgagaaattccatcagattgaaaaagaattctcagaagtagaagggagaattcaggacctcgagaaatatgttgaggacactaaaatagatctctggtcatacaacgcggagcttcttgttgccctggagaaccaacatacaattgatctaactgactcagaaatgaacaaactgtttgaaagaacaaagaagcaactgagggaaaatgctgaggatatgggaaatggttgtttcaaaatataccacaaatgtgacaatgcctgcataggatcaatcagaaatggaacttatgaccatgatgtatacagagatgaagcattaaacaaccggttccagatcaaaggcgttgagctgaagtcaggatacaaagattggatcttatggatttcctttgccatatcatgttttttgctttgtgttgctttgttggggttcatcatgtgggcctgccaaaaaggcaacattaggtgcaacatttgcatttga

SEQ ID NO: 32264 - RNA, 1701 nt, synthetic construct
  misc_feature 1..1701: note = hemagglutinin__InfluenzaA__ABU92601
  source 1..1701: mol_type = other RNA
atgaagactatcattgctttgagctacattctatgtctggttttcgctcaaaaacttcccggaaatgacaacagcacggcaacgctgtgccttgggcaccatgcagtaccaaacggaacgatagtgaaaacaatcacgaatgaccaaattgaagttactaatgctactgagctggttcagatttcctcaacaggtggaatatgcgacagtcctcatcagatccttgatggagaaaactgcacactaatagatgctctattgggagaccctcagtgtgatggcttccaaaataagaaatgggacctttttgttgaacgcagcaaagcctacagcaactgttacccttatgatgtgccggattatgcctcccttaggtcactagttgcctcatccggcacactggagtttaacaatgaaagcttcgattggactggagtcactcagaatggaacaagctctgcttgcaaaaggagatctaataaaagtttctttagtagattgaattggttgacccacttaaaatacaaatacccagcattgaacgtgactatgccaaacaatgaaaaatttgacaaattgtacatctggggggttcaccacccgggtacggacagtgaccaaatcagcctatatgctcaagcatcaggaagaatcacagtctctaccaaaagaagccaacaaactgtaatcccgaatatcggatctagacccagggtaagggatgtctccagccgaataagcatctattggacaatagtaaaaccgggagacatacttttgattaacagcacagggaatctaattgctcctcggggctacttcaaaatacgaagtgggaaaagctcaataatgagatcagatgcacccattggcaaatgcaattctgaatgcatcactccaaatggaagcattcccaatgacaaaccatttcaaaatgtaaacaggatcacatatggggcctgtcccagatatgttaagcaaaacactctgaaattggcaacagggatgcgaaatgtaccagagaaacaaactagaggcatatttggcgcaatcgcgggtttcatagaaaatggttgggagggaatggtggacggttggtacggtttcaggcatcaaaattctgagggcacaggacaagcagcagatctcaaaagcactcaagcagcaatcaaccaaatcaatgggaaactgaataggttaatcgggaaaacaaacgagaaattccatcagattgaaaaagaattctcggaagtagaaggaagaattcaggacctcgagaaatatgttgaggacactaaaatagatctctggtcatacaacgcggagcttcttgttgccctggagaaccaacatacaattgatctaactgactcagaaatgaacaaactgtttgaaagaacaaagaagcaactgagggaaaatgctgaggatatgggcaatggttgtttcaaaatataccacaaatgtgacaatgcctgcatagggtcaatcagaaatggaacttatgaccatgatgtgtacagagatgaagcattaaacaaccggttccagatcaaaggtgttgagctgaagtcaggatacaaagattggatcctatggatttcctttgccatatcatgttttttgctttgtgttgctttgttggggttcatcatgtgggcctgccagaaaggcaacattaggtgcaacatttgcatttga

SEQ ID NO: 32265 - RNA, 1701 nt, synthetic construct
  misc_feature 1..1701: note = hemagglutinin__InfluenzaA__ABU92602
  source 1..1701: mol_type = other RNA
atgaagactatcattgctttgagctacattctatgtctggttttcgctcaaaaacttcccggaaatgacaacagcacggcaacgctgtgccttgggcaccatgcagtaccaaacggaacgatagtgaaaacaatcacgaatgaccaaattgaagttactaatgctactgagctggttcagatttcctcaacaggtggaatatgcgacagtcctcatcagatccttgatggagaaaactgcacactaatagatgctctattgggagaccctcagtgtgatggcttccaaaataagaaatgggacctttttgttgaacgcagcaaagcctacagcaactgttacccttatgatgtgccggattatgcctcccttaggtcactagttgcctcatccggcacactggagtttaacaatgaaagcttcgattggactggagtcactcagaatggaacaagctctgcttgcaaaaggagatctaataaaagtttctttagtagattgaattggttgacccacttaaaatacaaatacccagcattgaacgtgactatgccaaacaatgaaaaatttgacaaattgtacatttggggggttcaccacccgggtacggacagtgaccaaatcagcctatatgctcaagcatcaggaagaatcacagtctctaccaaaagaagccaacaaactgtaatcccgaatatcggatctagacccagggtaagggatgtctccagccgaataagcatctattggacaatagtaaaaccgggagacatacttttgattaacagcacagggaatctaattgctcctcggggctacttcaaaatacgaagtgggaaaagctcaataatgagatcagatgcacccattggcaaatgcaattctgaatgcatcactccaaatggaagcattcccaatgacaaaccatttcaaaatgtaaacaggatcacatatggggcctgtcccagatatgttaagcaaaacactctgaaattggcaacagggatgcgaaatgtaccagagaaacaaactagaggcatatttggcgcaatcgcgggtttcatagaaaatggttgggagggaatggtggacggttggtacggtttcaggcatcaaaattctgagggcacaggacaagcagcagatctcaaaagcactcaagcagcaatcaaccaaatcaatgggaaactgaataggttaatcgggaaaacaaacgagaaattccatcagattgaaaaagaattctcggaagtagaaggaagaattcaggacctcgagaaatatgttgaggacactaaaatagatctctggtcatacaacgcggagcttcttgttgccctggagaaccaacatacaattgatctaactgactcagaaatgaacaaactgtttgaaagaacaaagaagcaactgagggaaaatgctgaggatatgggcaatggttgtttcaaaatataccacaaatgtgacaatgcctgcatagggtcaatcagaaatggaacttatgaccatgatgtgtacagagatgaagcattaaacaaccggttccagatcaaaggtgttgagctgaagtcaggatacaaagattggatcctatggatttcctttgccatatcatgttttttgctttgtgttgctttgttggggttcatcatgtgggcctgccagaaaggcaacattaggtgcaacatttgcatttga

SEQ ID NO: 32266 - RNA, 1701 nt, synthetic construct
  misc_feature 1..1701: note = hemagglutinin__InfluenzaA__ABU92603
  source 1..1701: mol_type = other RNA
atgaagactatcattgctttgagctacattctatgtctggttttcgctcaaaaacttcccggaaatgacaacagcacggcaacgctgtgccttgggcaccatgcagtaccaaacggaacgatagtgaaaacaatcacgaatgaccaaattgaagttactaatgctactgagctggttcagatttcctcaacaggtgaaatatgcgacagtccccatcagatccttgatggagaaaactgcacactaatagatgctctattgggagaccctcagtgtgatggcttccaaaataagaaatgggacctttttgttgaacgcagcaaagcctacagcaactgttacccttatgatgtgccggattatgcctcccttaggtcactagttgcctcatccggcacactggagtttaacaatgaaagcttcgattggactggagtcactcagaatggaacaagctctgcttgcaaaaggagatctgataaaagtttctttagtagattgaattggttgacccacttaaaatacaaatacccagcattgaacgtaactatgccaaacaatgaaaaatttgacaaattgtacatttggggggttcaccacccgggtacggacagtgaccaaatcagcctatatgctcaagcatcaggaagaatcacagtctctaccaaaagaagccaacaaactgtaatcccgaatatcggatctagacccagggtaagggatgtctccagccgaataagcatctattggacaatagtaaaaccgggagacatacttttgattaacagcacagggaatctaattgctcctcggggttacttcaaaatacgaagtgggaaaagctcaataatgagatcagatgcacccattggcaaatgcaattctgaatgcatcactccaaatggaagcattcccaatgacaaaccatttcaaaatgtaaacaggatcacatatggggcctgtcccagatatgttaagcaaaacactctgaaattggcaacagggatgcgaaatgtaccagagaaacaaactagaggcatatttggcgcaatcgcgggtttcatagaaaatggttgggagggaatggtggacggttggtacggtttcaggcatcaaaattctgagggcacaggacaagcagcagatctcaaaagcactcaagcagcaatcaaccaaatcaatgggaaactgaataggttaatcgggaaaacaaacgagaaattccatcagattgaaaaagaattctcggaagtagaaggaagaattcaggacctcgagaaatatgttgaggacactaaaatagatctctggtcatacaacgcggagcttcttgttgccctggagaaccaacatacaattgatctaactgactcagaaatgaacaaactgtttgaaagaacaaagaagcaactgagggaaaatgctgaggatatgggcaatggttgtttcaaaatataccacaaatgtgacaatgcctgcatagggtcaatcagaaatggaacttatgaccatgatgtgtacagagatgaagcattaaacaaccggttccagatcaaaggtgttgagctgaagtcaggatacaaagattggatcctatggatttcctttgccatatcatgttttttgctttgtgttgctttgttggggttcatcatgtgggcctgccaaaaaggcaacattaggtgcaacatttgcatttga

SEQ ID NO: 32267 - RNA, 1701 nt, synthetic construct
  misc_feature 1..1701: note = hemagglutinin__InfluenzaA__ABU92604
  source 1..1701: mol_type = other RNA
atgaagactatcattgctttgagctacattctatgtctggttttcgctcagaaacttcccggaaatgacaacagcacggcaacgctgtgccttgggcaccatgcagtaccaaacggaacgatagtgaaaacaatcacgaatgaccaaattgaagttactaatgctactgagctggttcagatttcctcaacaggtggaatatgcgacagtcctcatcagatccttgatggagaaaactgcacactaatagatgctctattgggagaccctcagtgtgatggcttccaaaataagaaatgggacctttttgttgaacgcagcaaagcctacagcaactgttacccttatgatgtgccggattatgcctcccttaggtcactagttgcctcatccggcacactggagtttaacaatgaaagcttcgattggactggagtcactcagaatggaacaagctctgcttgcaaaaggagatctaataaaagtttctttagtagattgaattggttgacccacttaaaatacaaatacccagcattgaacgtgactatgccaaacaatgaaaaatttgacaaattgtacatttggggggttcaccacccgggtacggacagtgaccagatcagcctatatgctcaagcatcaggaagaatcacagtctctaccaaaagaagccaacaaactgtaatcccgaatatcggatctagacccagggtaagggatgtctccagccgaataagcatctattggacaatagtaaaaccgggagacatacttttgattaacagcacagggaatctaattgctcctcggggttacttcaaaatacgaagtgggaaaagctcaataatgagatcagatgcacccattggcaaatgcaattctgaatgcatcactccaaatggaagcattcccaatgacaaaccatttcaaaatgtaaacaggatcacatatggggcctgtcccagatatgttaagcaaaacactctgaaattggcaacagggatgcgaaatgtaccagagaaacaaactagaggcatatttggcgcaatcgcgggtttcatagaaaatggttgggagggaatggtggacggttggtacggtttcaggcatcaaaattctgagggcacaggacaagcagcagatctcaaaagcactcaagcagcaatcaaccaaatcaatgggaaactgaataggttaatcgggaaaacaaacgagaaattccatcagattgaaaaagaattctcggaagtagaaggaagaattcaggacctcgagaaatatgttgaggacactaaaatagatctctggtcatacaacgcggagcttcttgttgccctggagaaccaacatacaattgatctaactgactcagaaatgaacaaactgtttgaaagaacaaagaagcaactgagggaaaatgctgaggatatgggcaatggttgtttcaaaatataccacaaatgtgacaatgcctgcatagggtcaatcagaaatggaacttatgaccatgatgtgtacagagatgaagcattaaacaaccggttccagatcaaaggtgttgagctgaagtcaggatacaaagattggatcctatggatttcctttgccatatcatgttttttgctttgtgttgctttgttggggttcatcatgtgggcctgccaaaaaggcaacattaggtgcaacatttgcatttga

SEQ ID NO: 32268 - RNA, 1701 nt, synthetic construct; identical to SEQ ID NO: 32266
  misc_feature 1..1701: note = hemagglutinin__InfluenzaA__ABU92605
  source 1..1701: mol_type = other RNA

SEQ ID NO: 32269 - RNA, 1701 nt, synthetic construct
  misc_feature 1..1701: note = hemagglutinin__InfluenzaA__ABU92606
  source 1..1701: mol_type = other RNA
atgaagactatcattgctttgagctacattctatgtctggttttcgctcaaaaacttcccggaaatgacaacagcacggcaacgctgtgccttgggcaccatgcagtaccaaacggaacgatagtgaaaacaatcacaaatgaccaaattgaagttactaatgctactgagctggttcagatttcctcaacaggtgaaatatgcgacagtccccatcagatccttgatggagaaaactgcacactaatagatgctctattgggagaccctcagtgtgatggcttccaaaataagaaatgggacctttttgttgaacgcagcaaagcctacagcaactgttacccttatgatgtgccggattatgcctcccttaggtcactagttgcctcatccggcacactggagtttaacaatgaaagcttcgattggactggagtcactcagaatggaacaagctctgcttgcaaaaggagatctgataaaagtttctttagtagattgaattggttgacccacttaaaatacaaatacccagcattgaacgtaactatgccaaacaatgaaaaatttgacaaattgtacatttggggggttcaccacccgggtacggacagtgaccaaatcagcctatatgctcaagcatcaggaagaatcacagtctctaccaaaagaagccaacaaactgtaatcccgaatatcggatctagacccagggtaagggatgtctccagccgaataagcatctattggacaatagtaaaaccgggagacatacttttgattaacagcacagggaatctaattgctcctcggggttacttcaaaatacgaagtgggaaaagctcaataatgagatcagatgcacccattggcaaatgcaattctgaatgcatcactccaaatggaagcattcccaatgacaaaccatttcaaaatgtaaacaggatcacatatggggcctgtcccagatatgttaagcaaaacactctgaaattggcaacagggatgcgaaatgtaccagagaaacaaactagaggcatatttggcgcaatcgcgggtttcatagaaaatggttgggagggaatggtggacggttggtacggtttcaggcatcaaaattctgagggcacaggacaagcagcagatctcaaaagcactcaagcagcaatcaaccaaatcaatgggaaactgaataggttaattgggaaaacaaacgagaaattccatcagattgaaaaagaattctcggaagtagaaggaagaattcaggacctcgagaaatatgttgaggacactaaaatagatctctggtcatacaacgcggagcttcttgttgccctggagaaccaacatacaattgatctaactgactcagaaatgaacaaactgtttgaaagaacaaagaagcaactgagggaaaatgctgaggatatgggcaatggttgtttcaaaatataccacaaatgtgacaatgcctgcatagggtcaatcagaaatggaacttatgaccatgatgtgtacagagatgaagcattaaacaaccggttccagatcaaaggtgttgagttgaagtcaggatacaaagattggatcctatggatttcctttgccatatcatgttttttgctttgtgttgctttgttggggttcatcatgtgggcctgccaaaaaggcaacattaggtgcaacatttgcatttga

SEQ ID NO: 32270 - RNA, 1701 nt, synthetic construct
  misc_feature 1..1701: note = hemagglutinin__InfluenzaA__ABU92608
  source 1..1701: mol_type = other RNA
atgaagactatcattgctttgagctacattctatgtctggttttcgctcaaaaacttcccggaaatgacaacagcacggcaacgctgtgccttgggcaccatgcagtaccaaacggaacgatagtgaaaacaatcacgaatgaccaaattgaagttactaatgctactgagctggttcagagttcctcaacaggtggaatatgcgacagtcctcatcagatccttgatggagaaaactgcacactaatagatgctctattgggagaccctcagtgtgatggcttccaaaataagaaatgggacctttttgttgaacgcagcaaagcctacagcaactgttacccttatgatgtgccggattatgtctcccttaggtcactagttgcctcatccggcacactggagtttaacaatgaaagcttcaattggactggagtcactcaaaatggaacaagctctgcttgcaaaaggagatctaataacagtttctttagtaggttgaattggttgacccatttaaaattcaaatacccagcattgaacgtgactatgccaaacaatgaaaaatttgacaaattgtacatttggggggttcaccacccgggtacggacaatgaccaaatcagcctatatgctcaagcatcaggaagaatcacagtctctaccaaaagaagccaacaaactgtaatcccgaatatcggatctagacccagggtaagggatatccccagcagaataagcatctattggacaatagtaaaaccgggagacatacttttgattaacagcacagggaatctaattgctcctcggggttacttcaaaatacgaagtgggaaaagctcaataatgagatcagatgcacccattggcaaatgcaattctgaatgcatcactccaaatggaagcattcccaatgacaaaccatttcaaaatgtaaacaggatcacatatggggcctgtcccagatatgttaagcaaaacactctgaaattggcaacagggatgcgaaatgtaccagagaaacaaactagaggcatatttggcgcaatcgcgggtttcatagaaaatggttgggagggaatggtggatggttggtacggtttcaggcatcaaaattctgagggaataggacaagcagcagatctcaaaagcactcaagcagcaatcaaccaaatcaatgggaagctgaataggttgatcgggaaaaccaacgagaaattccatcagattgaaaaagaattctcagaagtagaagggagaattcaggacctcgagaaatatgttgaggacactaaaatagatctctggtcatacaacgcggagcttcttgttgccctggagaaccaacatacaattgatctaactgactcagaaatgaacaaactgtttgaaagaacaaagaagcaactgagggaaaatgctgaggatatgggcaatggttgtttcaaaatataccacaaatgtgacaatgcctgcatagggtcaatcagaaatggaacttatgatcatgatgtatacagagatgaagcattaaacaaccggttccagatcaaaggtgttgagctgaagtcaggatacaaagattggatcctatggatttcctttgccatatcatgttttttgctttgtgttgctttgttggggttcatcatgtgggcctgccaaaaaggcaacattaggtgcaacatttgcatttga

SEQ ID NO: 32271 - RNA, 1701 nt, synthetic construct; identical to SEQ ID NO: 32270
  misc_feature 1..1701: note = hemagglutinin__InfluenzaA__ABU92609
  source 1..1701: mol_type = other RNA

SEQ ID NO: 32272 - RNA, 1701 nt, synthetic construct
  misc_feature 1..1701: note = hemagglutinin__InfluenzaA__ABU92610
  source 1..1701: mol_type = other RNA
atgaagactatcattgctttgagctacattctatgtctggttttcgctcaaaaacttcccggaaatgacaacagcacggcaacgctgtgccttgggcaccatgcagtaccaaacggaacgatagtgaaaacaatcacgaatgaccaaattgaggttactaatgctactgagctggttcagagttcctcaacaggtgaaatatgcgacagtcctcatcagatccttgatggagaaaactgcacactaatagatgctctattgggagaccctcagtgtgatggcttccaaaataagaaatgggacctttttgttgaacgcagcaaagcctacagcaactgttacccttatgatgtgccggattatgcctcccttaggtcactagttgcctcatccggcacactggagtttaacaatgaaagcttcaattggactggagtcactcaaaatggaacaagctctgcttgcaaaaggagatctaataacagtttctttagtagactgaattggttgacccactcaaaattcaaatacccagcattgaacgtgactatgccaaacaatgaaaaatttgacaaattgtacatttggggggttcaccacccgggtacggacaatgaccaaatcttcctgtatgctcaagcatcaggaagaatcacagtctctaccaaaagaagccaacaaactgtaatcccgaatatcggatctagacctagagtaaggaatatccccagcagaataagcatctattggacaatagtaaaaccgggagacatacttttgattaacagcacagggaatctaattgctcctaggggttacttcaaaatacgaagtgggaaaagctcaataatgagatcagatgcacccattggcaaatgcaattctgaatgcatcactccaaatggaagcattcccaatgacaaaccatttcaaaatgtaaacagaatcgcatatggggcctgtcccagatatgttaagcaaaacactctgaaattggcaacagggatgagaaatgtaccagagaaacaaactagaggcatatttggcgcaatcgcaggtttcatagaaaatggttgggagggaatggtggatggttggtacggtttcaggcatcaaaattctgagggaataggacaagcagcagatctcaaaagcactcaagcagcaatcaatcaaatcaatgggaagctgaataggttgatcgggaaaaccaacgagaaattccatcagattgaaaaagaattctcagaagtagaagggagaattcaggacctcgagaaatatgttgaggacactaaaatagatctctggtcatacaacgcggagcttcttgttgccctggagaaccaacatacaattgatctaactgactcagaaatgaacaaactgtttgaaagaacaaagaagcaactgagggaaaatgctgaggatatgagcaatggttgtttcaaaatataccacaaatgtgacaatgcctgcataggatcaatcagaaatggaacttatgaccatgatgtatacagagatgaagcattaaacaaccggttccagatcaaaggcgttgagctgaagtcaggatacaaagattggatcctatggatttcctttgccatatcatgttttttgctttgtgttgttttgttggggttcatcatgtgggcctgccaaaaaggcaacattaggtgcaacatttgcatatga

SEQ ID NO: 32273 - RNA, 1701 nt, synthetic construct
  misc_feature 1..1701: note = hemagglutinin__InfluenzaA__ABU92611
  source 1..1701: mol_type = other RNA
atgaagactatcattgctttgagctacattctatgtctggttttcgctcaaaaacttcccggaaatgacaacagcacggcaacgctgtgccttgggcaccatgcagtaccaaacggaacgatagtgaaaacaatcacgaatgaccaaattgaagttactaatgctactgagctggttcagagttcctcaacaggtggaatatgcgacagtcctcatcagatccttgatggagaaaactgcacactaatagatgctctattgggagaccctcagtgtgatggcttccaaaataagaaatgggacctttttgttgaacgcagcaaagcctacagcaactgttacccttatgatgtgccggattatgcctcccttaggtcactaattgcctcatccggcacactggagtttaacaatgaaagcttcaattggactggagtcactcaaaatggaacaagctctgcttgcaaaaggagatctaataacagtttctttagtagattgaattggttgacccacttaaaattcaaatacccagcattgaacgtgactatgccaaacaatgaagaatttgacaaattgtacatttggggggttcaccacccgggtacggacaatgaccaaatcagcctatatgctcaagcatcaggaaaaatcacagtctctaccaaaagaagccaacaaactgtaatcccgaatatcggatctagacccagggtaagggatatccccagcagaataagcatctattggacaatagtaaaaccgggagacatacttttgattaacagcacagggaatctaattgctcctcggggttacttcaaaatacgaagtgggaaaagctcaataatgagatcagatgcacccattggcaaatgcaattctgaatgcatcactccaaatggaagcattcccaatgacaaaccatttcaaaatgtaaacaggatcacatatggggcctgtcccagatatgttaagcaaaacactctgaaattggcaacagggatgcgaaatgtaccagagaaacaaactagaggcatatttggcgcaatcgcgggtttcatagaaaatggttgggagggaatggtggatggttggtacggtttcaggcatcaaaattctgagggaataggacaagcagcagatctcaaaagcactcaagcagcaatcgaccaaatcaatgggaagctgaataggttgatcgggaaaaccaacgagaaattccatcagattgaaaaagaattctcagaagtagaagggagaatccaggacctcgagaaatatgttgaggacactaaaatagatctctggtcatacaacgcggagcttcttgttgccctggagaaccaacatacaattgatctaactgactcagaaatgaacaaactgtttgaaagaacaaagaagcaactgagggaaaatgctgaggatatgggcaatggttgtttcaaaatataccacaaatgtgacaatgcctgcatagggtcaatcagaaatggaacttatgaccatgatgtatacagagatgaagcattaaacaaccggttccagatcaaaggtgttgagctgaagtcaggatacaaagattggatcctatggatttcctttgccatatcatgttttttgctttgtgttgctttgttggggttcatcatatgggcctgcctaaaaggcaacattaggtgcaacatttgcatttga

SEQ ID NO: 32274 - RNA, 1701 nt, synthetic construct
  misc_feature 1..1701: note = hemagglutinin__InfluenzaA__ABU92612
  source 1..1701: mol_type = other RNA
atgaagactatcattgctttgagctacattctatgtctggttttcgctcaaaaacttcccggaaatgacaacagcacggcaacgctgtgccttgggcaccatgcagtaccaaacggaacgatggtgaaaacaatcacgaatgaccaaattgaagttactaatgctactgagctggttcagagttcctcaacaggtggaatatgcgacagtcctcatcagatccttgatggagaaaactgcacactaatagatgctctattgggagaccctcagtgtgatggcttccaaaataagaaatgggacctttttgttgaacgcagcaaagcccacagcaactgttacccttatgatgtgccggattatgcctcccttaggtcactagttgcctcatccggcacactggagtttaacaatgaaagcttcaattggactggagtcactcaaaatggaacaagctctgcttgcaaaaggagatctaataacagtttctttagtagattgaattggttgacccacttaaaattcaaatacccagcattgaacgtgactatgccaaacaatgaaaaatttgacaaattgtacatttggggggttcaccacccgggtacggacaatgaccaaatcagcctatatgctcaagcttcaggaagaatcacagtctctaccaaaagaagccaacaaactgtaatcccgaatatcggatctagacccagggtaagggatatccccagcagaataagcatctattggacaatagtaaaaccgggagacatacttttgattaacagcacagggaatctaattgctcctcggggttacttcaaaatacgaagtgggaaaagctcaataatgagatcagatgcacccattggcaaatgcaattctgaatgcatcactccaaatggaagcattcccaataacaaaccatttcaaaatgtaaacaggatcacatatggggcctgtcccagatatgttaagcaaaacactctgaaattggcaacagggatgcgaaatgtaccagagaaacaaactagaggcatatttggcgcaatcgcgggtttcatagaaaatggttgggagggaatggtggatggttggtacggtttcaggcatcaaaattctgagggaataggacaagcagcagatctcaaaagcactcaagcagcaatcaaccaaatcaatgggaagctgaataggttgatcgggaaaaccaacgagaaattccatcagattgaaaaagaattctcagaagtagaagggagaattcaggacctcgagaaatatgttgaggacactaaaatagatctctggtcatacaacgcggagcttcttgttgccctggagaaccaacatacaattgatctaactgactcagaaatgaacaaactgtttgaaagaacaaagaagcagctgagggaaaatgctgaggatatgggcaatggttgtttcaaaatataccacaaatgtgacaatgcctgcatagggtcaatcagaaatggaacttatgaccatgatgtatacagagatgaagcattaaacaaccggttccagatcaaaggtgttgagctgaagtcaggatacaaagattggatcctatggatttcctttgccatatcatgttttttgctttgtgttgctttgttggggttcatcatgtgggcctgccaaaaaggcaacattaggtgcaacatttgcatttga

SEQ ID NO: 32275 - RNA, 1701 nt, synthetic construct
  misc_feature 1..1701: note = hemagglutinin__InfluenzaA__ABU92613
  source 1..1701: mol_type = other RNA
atgaagactatcattgctttgagctacattctatgtctggttttcgctcaaaaacttcccggaaatgacaacagcacggcaacgctgtgccttgggcaccatgcagtaccaaacggaacgatagtgaaaacaatcacgaatgaccaaattgaagttactaatgctactgagctggttcagagttcctcaacaggtggaatatgcgacagtcctcatcagatccttgatggagaaaactgcacactaatagatgctctattgggagaccctcagtgtgatggcttccaaaataagaaatgggacctttttattgaacgcagcaaagcctacagcaactgttacccttatgatgtgccggattatgcctcccttaggtcactagttgcctcatccggcacactggaatttaacaatgaaagcttcaattggactggagtcactcaaaatggaacaagctctgcttgcaaaaggagatctaataacagtttctttagtagattgaattggttgacccacttaaaattcaaatacccagcattgaacgtgactatgccaaacaatgaaaaatttgacaaattgtacatttggggggttcaccacccgggtacggacaatgaccaaatcagcctatatgctcaagcttcaggaagaatcacagtctctaccaaaagaagccaacaaactgtaatcccgaatatcggatctagacccagggtaagggatatccccagcagaataagcatctattggacaatagtaaaaccgggagacatacttttgattaacagcacagggaatctaattgctcctcggggttacttcaaaatacgaagtgggaaaagctcaataatgagatcagatgcacccattggcaaatgcaattctgaatgcatcactccaaatggaagcattcccaatgacaaaccatttcaaaatgtaaacaggatcacatatggggcctgtcccagatatgttaagcaaaacactctgaaattggcaacagggatgcgaaatgtaccagagaaacaaactagaggcatatttggcgcaatcgcgggtttcatagaaaatggttgggagggaatggtggatggttggtacggtttcaggcatcaaaattctgagggaataggacaagcagcagatctcaaaagcactcaagcagcaatcaaccaaatcaatgggaagctgaataggttgatcgggaaaaccaacgagaaattccatcagattgaaaaagaattctcagaagtagaagggagaattcaggacctcgagaaatatgttgaggacactaaagtagatctctggtcatacaacgcggagcttcttgttgccctggagaaccaacatacaattgatctaactgactcagaaatgaacaaactgtttgaaagaacaaagaagcaactgagggaaaatgctgaggatatgggcaatggttgtttcaaaatataccacaaatgtgacaatgcctgcatagggtcaatcagaaatggaacttatgaccatgatgtatacagagatgaagcattgaacaaccggttccagatcaaaggtgttgagctgaagtcaggatacaaagattggatcctatggatttcctttgccatatcatgttttttgctttgtgttgctttgttggggttcatcatgtgggcctgccaaaaaggcaacattaggtgcaacatttgcatttga

SEQ ID NO: 32276 - RNA, 1701 nt, synthetic construct; identical to SEQ ID NO: 32261
  misc_feature 1..1701: note = hemagglutinin__InfluenzaA__ABU92614
  source 1..1701: mol_type = other RNA

SEQ ID NO: 32277 - RNA, 1701 nt, synthetic construct
  misc_feature 1..1701: note = hemagglutinin__InfluenzaA__ABU92615
  source 1..1701: mol_type = other RNA
atgaagactatcattgctttgagctacattctatgtctggttttcgcccaaaaacttcccggaaatgacaacagcacggcaacgctgtgccttgggcaccatgcagtaccaaacggaacgatagtgagaacaatcacgaatgaccaaattgaagttactaatgctactgagctggttcagagttcctcaacaggtggcatatgcgacagtcctcatcagatccttgatggagaaaactgcacactaatagatgctctattgggagaccctcagtgtgatggcttccaaaataagaaatgggacctttttgttgaacgcagcaaagcctacagcaactgttacccttatgatgtgccggattatgcctcccttaggtcactggttgcctcatccggcacactggagtttaacaatgaaagcttcaattggactggagtcactcaaaatggaacaagctctgcttgcaaaaggagatctaataacagtttctttagtagattgaattggttgacccacttaaaattcaaatacccagcattgaacgtgactatgccaaacaatgaaaaatttgacaaattgtacatttggggggttcaccacccgggtacggacaatgaccaaatcagcctatatgctcaagcttcaggaagaatcacagtctctaccaaaagaagccaacaaactgtaatcccgaatgtcggatctagacccagggtaagggatatccccagcagaataagcatctattggacaatagtaaaaccgggagacatacttttgattaacagcacagggaatctaattgctcctcggggttacttcaaaatacgaagtgggaaaagctcaataatgagatcagatgcacccattggcaaatgcaattctgaatgtatcactccaaatggaagcattcccaatgacaaaccatttcaaaatgtaaacaggatcacatatggggcctgtcccagatatgttaagcaaaacactctgaaattggcaacagggatgcgaaatgtaccagagaaacaaactagaggcatatttggcgcaatcgcgggtttcatagaaaatggttgggagggaatggtggatggttggtacggtttcaggcatcaaaattctgagggaataggacaagcagcagatctcaaaagcactcaagcagcaatcaaccaaatcaatgggaagctgaatagattgatcgggaaaaccaacgagaaattccatcagattgaaaaagaattctcagaagtagaagggagaattcaggacctcgagaaatatgttgaggacactaaaatagatctctggtcatacaacgcggagcttcttgttgccctggagaaccaacatacaattgatctaactgactcagaaatgaacaaactgtttgaaagaacaaagaagcaactgagggaaaatgctgaggatatgggcaatggttgtttcaaaatataccataaatgtgacaatgcctgcatagggtcaatcagaaatggaacttatgaccatgatgtatacagagatgaagcattaaacaaccggttccagatcaaaggtgttgagctgaagtcaggatacaaagattggatcctatggatttcctttgccatatcatgttttttgctttgtgttgctttgttggggttcatcatgtgggcctgccaaaaaggcaacattaggtgcaacatttgcatttga

SEQ ID NO: 32278 - RNA, 1701 nt, synthetic construct
  misc_feature 1..1701: note = hemagglutinin__InfluenzaA__ABU92617
  source 1..1701: mol_type = other RNA
atgaagactatcattgctttgagctacattctatgtctggttttcgctcaaaaacttcccggaaatgacaacagcacggcaacgctgtgccttgggcaccattcagtaccaaacggaacgatagtgaaaacaatcacgaatgatcaaattgaagttactaatgctactgagctggttcagagttcctcaacaggtggaatatgcgacagtcctcatcagatccttgatggagaaaactgcacactaatagatgctctattgggagaccctcagtgtgatggcttccaaaataagaaatgggacctttttgttgaacgcagcaaagcctacagcaactgttacccttatgatgtgccggattatgcctcccttaggtcactaattgcctcatccggcacactggagtttaacaatgaaagcttcaattggactggagtcactcaaaatggaacaagctctgcttgcaaaaggagatctaatagcagtttctttagtagattgaattggttgacccacttaaaattcaaatacccagcattgaacgtgactatgccaaacaatgaagaatttgacaaattgtacatttggggggttcaccacccgggtacagacaatgaccaaatcagcctatatgctcaagcatcaggaagaatcacagtctctaccaaaagaagccaacaaactgtaatcccgaatatcgggtctagacccagggtaagggatatccccagcagaataagcatctattggacaatagtaaaaccgggagacatacttttgattaacagcacagggaatctaattgctcctcggggttacttcaaaatacgaagtgggaaaagctcaataatgagatcagatgcacccattggcaaatgcaattctgaatgcatcactccaaatggaagcattcccaatgacaaaccatttcaaaatgtaaacaggatcacatatggggcctgtcccagatatgttaagcaaaacactctgaaattggcaacagggatgcgaaatgtaccagagaaacaaactagaggcatatttggcgcaatcgcgggtttcatagaaaatggttgggagggaatggtggatggttggtacggtttcaggcatcaaaattctgagggaataggacaagcagcagatctcaaaagcactcaagcagcaatcgaccaaatcaatgggaagctgaataggttgatcgggaaaaccaacgagaaattccatcagattgaaaaagaattctcagaagtagaagggagaattcaggacctcgagaaatatgttgaggacactaaaatagatctctggtcatacaacgcggagcttcttgttgccctggagaaccaacatacaattgatctaactgactcagaaatgaacaaactgtttgaaagaacaaagaagcaactgagggaaaatgctgaggatatgggcaatggttgcttcaaaatataccacaaatgtgacaatgcctgcatagggtcaatcagaaatggaacttatgaccatgatgtatacagagatgaagcattaaacaaccggttccagatcaaaggtgttgagctgaagtcaggatacaaagattggatcctatggatttcctttgccatatcatgttttttgctttgtgttgctttgttggggttcatcatgtgggcctgccaaaaaggcaacattaggtgcaacatttgcatttga

SEQ ID NO: 32279 - RNA, 1701 nt, synthetic construct; identical to SEQ ID NO: 32275
  misc_feature 1..1701: note = hemagglutinin__InfluenzaA__ABU92619
  source 1..1701: mol_type = other RNA

SEQ ID NO: 32280 - RNA, 1701 nt, synthetic construct; identical to SEQ ID NO: 32261
  misc_feature 1..1701: note = hemagglutinin__InfluenzaA__ABU92620
  source 1..1701: mol_type = other RNA

SEQ ID NO: 32281 - RNA, 1701 nt, synthetic construct
  misc_feature 1..1701: note = hemagglutinin__InfluenzaA__ABU92622
  source 1..1701: mol_type = other RNA
atgaagactatcattgctttgagctacattctatgtctggttttcgctcaaaaacttcccggaaatgacaacagcacggcaacgctgtgccttgggcaccatgcagtaccaaacggaacgatagtgaaaacaatcacaaatgaccaaattgaagttactaatgctactgagctggttcagagttcctcaacaggtggaatatgcgacagtcctcatcaaatccttgatggagaaaactgcacactaatagatgctctattgggagaccctcagtgtgatggcttccaaaataagaaatgggacctttttgttgaacgcagcaaagcctacagcaactgttacccttatgatgtgccggattatgcctcccttaggtcactaattgcctcatccggcacactggagtttaacaatgaaagcttcaattggactggagtcactcaaaatggaacaagctctgcttgcaaaaggagatctaatagcagtttctttagtagattgaattggttgacccacttaaaattcaaatacccagcattgaacgtgactatgccaaacaatgaagaatttgacaaattgtacatttggggggttcaccacccgggtacagacaatgaccaaatcagcctatatgctcaagcatcaggaagaatcacagtctctaccaaaagaagccaacaaactgtaatcccgaatatcggatctagacccagggtaagggatatccccagcagaataagcatctattggacaatagtaaaaccgggagacatacttttgattaacagcacagggaatctaattgctcctcggggttacttcaaaatacgaagtgggaaaagctcaataatgagatcagatgcacccattggcaaatgcaattctgaatgcatcactccaaatggaagcattcccaatgacaaaccatttcaaaatgtaaacaggatcacatatggggcctgtcccagatctgttaagcaaaacactctgaaattggcaacagggatgcgaaatgtaccagagaaacaaactagaggcatatttggcgcaatcgcgggtttcatagaaaatggttgggagggaatggtggatggttggtacggtttcaggcatcaaaattctgagggaataggacaagcagcagatctcaaaagcactcaagcagcaatcgaccaaatcaatgggaagctgaataggttgatcgggaaaaccaacgagaaattccatcagattgaaaaagaattctcagaagtagaagggagaattcaggacctcgagaaatatgttgaggacactaaaatagatctctggtcatacaacgcggagcttcttgttgccctggagaaccaacatacaattgatctaactgactcagaaatgaacaaactgtttgaaagaacaaagaagcaactgagggaaaatgctgaggatatgggcaatggttgtttcaaaatataccacaaatgtgacaatgcctgcatagggtcaatcagaaatggaacttatgaccatgatgtatacagagatgaagcattaaacaaccggttccagatcaaaggtgttgagctgaagtcaggatacaaggattggatcctatggatttcctttgccatatcatgttttttgctttgtgttgctttgttggggttcatcatgtgggcctgccaaaaaggcaacattaggtgcaacatttgcatttga

SEQ ID NO: 32282 - RNA, 1701 nt, synthetic construct
  misc_feature 1..1701: note = hemagglutinin__InfluenzaA__ABU92623
  source 1..1701: mol_type = other RNA
atgaagactatcattgctttgagctacattctatgtctggttttcgctcaaaaacttcccggaaatgacaacagcacggcaacgctgtgccttgggcaccatgcagtaccaaacggaacgatagtgaaaacaatcacgaatgaccaaattgaagttactaatgctactgagctggttcagatttcctcaacaggtggaatatgcgacagtcctcatcagatccttgatggagaaaactgcacactaatagatgctctattgggagaccctcagtgtgatggcttccaaaataagaaatgggacctttttgttgaacgcagcaaagcctacagcaactgttacccttatgatgtgccggattatgcctcccttaggtcactagttgcctcatccggcacactggagtttaacaatgaaagcttcgattggactggagtcactcagaatggaacaagctctgcttgcaaaaggagatctaataaaagtttctttagtagattgaattggttgacccacttaaaatacaaatacccagcattgaacgtgactatgccaaacaatgaaaaatttgacaaattgtacatttggggggttcaccacccgggtacggacagtgaccaaatcagcctatatgctcaagcatcaggaagaatcacagtctctaccaaaagaagccaacaaactgtaatcccgaatatcggatctagacccagggtaagggatgtctccagccgaataagcatctattggacaatagtaaaaccgggagacatacttttgattaacagcacagggaatctaattgctcctcggggctacttcaaaatacgaagtgggaaaagctcaataatgagatcagatgcacccattggcaaatgcaattctgaatgcatcactccaaatggaagcattcccaatgacaaaccatttcaaaatgtaaacaggatcacatatggggcctgtcccagatatgttaagcaaaacactctgaaattggcaacagggatgcgaaatgtaccagagaaacaaactagaggcatatttggcgcaatcgcgggtttcatagaaaatggttgggagggaatggtggacggttggtacggtttcaggcatcaaaattctgagggcacaggacaagcagcagatctcaaaagcactcaagcagcaatcaaccaaatcaatgggaaactgaataggttaatcgggaaaacaaacgagaaattccatcagattgaaaaagaattctcggaagtagaaggaagaattcaggacctcgagaaatatgttgaggacactaaaatagatctctggtcatacaacgcggagcttcttgttgccctggagaaccaacatacaattgatctaactgactcagaaatgaacaaactgtttgaaagaacaaagaagcaactgagggaaaatgctgaggatatgggcaatggttgtttcaaaatataccacaaatgtgacaatgcctgcatagggtcaatcagaaatggaacttatgaccatgatgtgtacagagatgaagcattaaacaaccggttccagatcaaaggtgttgagctgaagtcaggatacaaagattggatcctatggatttcctttgccatatcatgttttttactttgtgttgctttgttggggttcatcatgtgggcctgccagaaaggcaacattaggtgcaacatttgcatttga

SEQ ID NO: 32283 - RNA, 1701 nt, synthetic construct
  misc_feature 1..1701: note = hemagglutinin__InfluenzaA__ABU92624
  source 1..1701: mol_type = other RNA
atgaagactatcattgctttgagctacattctatgtctggttttcgctcaaaaacttcccggaaatgacaacagcacggcaacgctgtgccttgggcaccatgcagtaccaaacggaacgatagtgaaaacaatcacgaatgaccaaattgaagttactaatgctactgagctggttcagatttcctcaacaggtgaaatatgcgacagtccccatcagatccttgatggagaaaactgcacactaatagatgctctattgggagaccctcagtgtgatggcttccaaaataagaaatgggacctttttgttgaacgcagcaaagcctacagcaactgttacccttatgatgtgccggattatgcctcccttaggtcactagttgcctcatccggcacactggagtttaacaatgaaagcttcgattggactggagtcactcagaatggaacaagctctgcttgcaaaaggagatctgataaaagtttctttagtagattgaattggttgacccacttaaaatacaaatacccagcattgaacgtaactatgccaaacaatgaaaaatttgacaaattgtacatttggggggttcaccacccgggtacggacagtgaccaaatcagcctatatgctcaagcattaggaagaatcacagtctctaccaaaagaagccaacaaactgtaatcccgaatatcggatctagacccagggtaagggatgtctccagccgaataagcatctattggacaatagtaaaaccgggagacatacttttgattaacagcacagggaatctaattgctcctcggggttacttcaaaatacgaagtgggaaaagctcaataatgagatcagatgcacccattggcaaatgcaattctgaatgcatcactccaaatggaagcattcccaatgacaaaccatttcaaaatgtaaacaggatcacatatggggcctgtcccagatatgttaagcaaaacactctgaaattggcaacagggatgcgaaatgtaccagagaaacaaactagaggcatatttggcgcaatcgcgggtttcatagaaaatggttgggagggaatggtggacggttggtacggtttcaggcatcaaaattctgagggcacaggacaagcagcagatctcaaaagcactcaagcagcaatcaaccaaatcaatgggaaactgaataggttaatcgggaaaacaaacgagaaattccatcagattgaaaaagaattctcggaagtagaaggaagaattcaggacctcgagaaatatgttgaggacactaaaatagatctctggtcatacaacgcggagcttcttgttgccctggagaaccaacatacaattgatctaactgactcagaaatgaacaaactgtttgaaagaacaaagaagcaactgagggaaaatgctgaggatatgggcaatggttgtttcaaaatataccacaaatgtgacaatgcctgcatagggtcaatcagaaatggaacttatgaccatgatgtgtacagagatgaagcattaaacaaccggttccagatcaaaggtgttgagctgaagtcaggatacaaagattggatcctatggatttcctttgccatatcatgttttttgctttgtgttgctttgttggggttcatcatgtgggcctgccaaaaaggcaacattaggtgcaacatttgcatttga

SEQ ID NO: 32284 - RNA, 1701 nt, synthetic construct
  misc_feature 1..1701: note = hemagglutinin__InfluenzaA__ABU92625
  source 1..1701: mol_type = other RNA
atgaagactatcattgctttgagctacattctatgtctggttttcgctcaaaaacttcccggaaatgacaacagcacggcaacgctgtgccttgggcaccatgcagtaccaaacggaacgatagtgaaaacaatcacgaatgaccaaattgaagttactaatgctactgagctggttcagatttcctcaacaggtgaaatatgcgacagtccccatcagatccttgatggagaaaactgcacactaatagatgctctattgggagaccctcagtgtgatggcttccaaaataagaaatgggacctttttgttgaacgcagcaaagcctacagcaactgttacccttatgatgtgccggattatgcctcccttaggtcactagttgcctcatccggcacactggagtttaacaatgaaagcttcgattggactggagtcactcagaatggaacaagctctgcttgcaaaaggagatctgataaaagtttctttagtagattgaattggttgacccacttaaaatacaaatacccagcattgaacgtaactatgccaaacaatgaaaaatttgacaaattgtacatttggggggttcaccacccgggtacggacagtgaccaaatcagcctatatgctcaagcatcaggaagaatcacagtctctaccaaaagaagccaacaaactgtaatcccgaatatcggatctagacccagggtaagggatgtctccagccgaataagcatctattggacaatagtaaaaccgggagacatacttttgattaacagcacagggaatctaattgctcctcggggttacttcaaaatacgaagtgggaaaagctcaataatgagatcagatgcacccattggcaaatgcaattctgaatgcatcactccaaatggaagcattcccaatgacaaaccatttcaaaatgtaaacaggatcacatatggggcctgtcccagatatgttaagcaaaacactctgaaattggcaacagggatgcgaaatgtaccagagaaacaaactagaggcatatttggcgcaatcgcgggtttcatagaaaatggttgggagggaatggtggacggttggtacggtttcaggcatcaaaattctgagggcacaggacaagcagcagatctcaaaagcactcaagcagcaatcaaccaaatcaatgggaaactgaataggttaatcgggaaaacaaacgagaaattccatcagattgaaaaagaattctcggaagtagaaggaagaattcaggacctcgagaaatatgttgaggacactaaaatagatctctggtcatacaacgcggagcttcttgttgccctggagaaccaacatacaattgatctaactgactcagaaatgaacaaactgtttgaaagaacaaagaagcaactgagggaaaatgctgaggatatgggcaatggttgtttcaaaatataccacaaatgtgacaatgcctgcatagggtcaatcagaaatggaacttatgaccatgatgtgtacagagatgaagcattaaacaaccggttccagatcaaaggtgttgagttgaagtcaggatacaaagattggatcctatggatttcctttgccatatcatgttttttgctttgtgttgctttgttggggttcatcatgtgggcctgccaaaaaggcaacattaggtgcaacatttgcatttga

SEQ ID NO: 32285 - RNA, 1701 nt, synthetic construct
  misc_feature 1..1701: note = hemagglutinin__InfluenzaA__ABU92626
  source 1..1701: mol_type = other RNA
atgaagactatcattgctttgagctacattctatgtctggttttcgctcaaaaacttcccggaaatgacaacagcacggcaacgctgtgccttgggcaccatgcagtaccaaacggaacgatagtgaaaacaatcacgaatgaccaaattgaagttactaatgctactgagctggttcagatttcctcaacaggtggaatatgcgacagtcctcatcagatccttgatggagaaaactgcacactaatagatgctctattgggagaccctcagtgtgatggcttccaaaataagaaatgggacctttttgttgaacgcagcaaagcctacagcaactgttacccttatgatgtgccggattatgcctcccttaggtcactagttgcctcatccggcacactggagtttaacaatgaaagcttcgattggactggagtcactcagaatggaacaagctctgcttgcaaaaggagatctaataaaagtttctttagtagattgaattggttgacccacttaaaatacaaatacccagcattgaacgtgactatgccaaacaatgaaaaatttgacaaattgtacatttggggggttcaccacccgggtacggacagtgaccaaatcagcctatatgctcaagcatcaggaagaatcacagtctctaccaaaagaagccaacaaactgtaatcccgaatatcggatctagacccagggtaagggatgtctccagccgaataagcatctattggacaatagtaaaaccgggagacatacttttgattaacagcacagggaatctaattgctcctcggggctacttcaaaatacgaagtgggaaaagctcaataatgagatcagatgcacccattggcaaatgcaattctgaatgcatcactccaaatggaagcattcccaatgacaaaccatttcaaaatgtaaacaggatcacatatggggcctgtcccagatatgttaagcaaaacactctgaaattggcaacagggatgcgaaatgtaccagagaaacaaactagaggcatatttggcgcaatcgcgggtttcatagaaaatggttgggagggaatggtggatggttggtacggtttcaggcatcaaaattctgagggcacaggacaagcagcagatctcaaaagcactcaagcagcaatcaaccaaatcaatgggaaactgaataggttaatcgggaaaacaaacgagaaattccatcagattgaaaaagaattctcggaagtagaaggaagaattcaggacctcgagaaatatgttgaggacactaaaatagatctctggtcatacaacgcggagcttcttgttgccctggagaaccaacatacaattgatctaactgactcagaaatgaacaaactgtttgaaagaacaaagaagcaactgagggaaaatgctgaggatatgggcaatggttgtttcaaaatataccacaaatgtgacaatgcctgcatagggtcaatcagaaatggaacttatgaccatgatgtgtacagagatgaagcattaaacaaccggttccagatcaaaggtgttgagctgaagtcaggatacaaagattggatcctatggatttcctttgccatatcatgttttttgctttgtgttgctttgttggggttcatcatgtgggcctgccagaaaggcaacattaggtgcaacatttgcatttga

SEQ ID NO: 32286 - RNA, 1701 nt, synthetic construct
  misc_feature 1..1701: note = hemagglutinin__InfluenzaA__ABU92627
  source 1..1701: mol_type = other RNA
atgaagactatcattgctttgagctacattctatgtatggttttcgctcaaaaacttcccggaaatgacaacagcacggcaacgctgtgccttgggcaccatgcagtaccaaacggaacgatagtgaaaacaatcacgaatgaccaaattgaagttactaatgctactgagctggttcagatttcctcaacaggtgaaatatgcgacagtccccatcagatccttgatggagaaaactgcacactaatagatgctctattgggagaccctcagtgtgatggcttccaaaataagaaatgggacctttttgttgaacgcagcaaagcctacagcaactgttacccttatgatgtgccggattatgcctcccttaggtcactagttgcctcatccggcacactggagtttaacaatgaaagcttcgattggactggagtcactcagaatggaacaagctctgcttgcaaaaggagatctgataaaagtttctttagtagattgaattggttgacccacttaaaatacaaatacccagcattgaacgtaactatgccaaacaatgaaaaatttgacaaattgtacatttggggggttcaccacccgggtacggacagtgaccaaatcagcctatatgctcaagcatcaggaagaatcacagtctctaccaaaagaagccaacaaactgtaatcccgaatatcggatctagacccagggtaagggatgtctccagccgaataagcatctattggacaatagtaaaaccgggagacatacttttgattaaccgcccagggaatctaattgctcctcggggttacttcaaaatacgaagtgggaaaagctcaataatgagatcagatgcacccattggcaaatgcaattctgaatgcatcactccaaatggaagcattcccaatgacaaaccatttcaaaatgtaaacaggatcacatatggggcctgtcccagatatgttaagcaaaacactctgaaattggcaacagggatgcgaaatgtaccagagaaacaaactagaggcatatttggcgcaatcgcgggtttcatagaaaatggttgggagggaatggtggacggttggtacggtttcaggcatcaaaattctgagggcacaggacaagcagcagatctcaaaagcactcaagcagcaatcaaccaaatcaatgggaaactgaataggttaatcgggaaaacaaacgagaaattccatcagattgaaaaagaattctcggaagtagaaggaagaattcaggacctcgagaaatatgttgaggacactaaaatagatctctggtcatacaacgcggagcttcttgttgccctggagaaccaacatacaattgatctaactgactcagaaatgaacaaactgtttgaaagaacaaagaagcaactgagggaaaatgctgaggatatgggcaatggttgtttcaaaatataccacaaatgtgacaatgcctgcatagggtcaatcagaaatggaacttatgaccatgatgtgtacagagatgaagcattaaacaaccggttccagatcaaaggtgttgagctgaagtcaggatacaaagattggatcctatggatttcctttgccatatcatgttttttgctttgtgttgctttgttggggttcatcatgtgggcctgccaaaaaggcaacattaggtgcaacatttgcatttga

SEQ ID NO: 32287 - RNA, 1701 nt, synthetic construct; identical to SEQ ID NO: 32266
  misc_feature 1..1701: note = hemagglutinin__InfluenzaA__ABU92628
  source 1..1701: mol_type = other RNA

SEQ ID NO: 32288 - RNA, 1701 nt, synthetic construct; identical to SEQ ID NO: 32284
  misc_feature 1..1701: note = hemagglutinin__InfluenzaA__ABU92631
  source 1..1701: mol_type = other RNA

SEQ ID NO: 32289 - RNA, 1701 nt, synthetic construct
  misc_feature 1..1701: note = hemagglutinin__InfluenzaA__ABU92632
  source 1..1701: mol_type = other RNA
atgaagactatcatcgctttgagctacattctatgtctggttttcgctcaaaaacttcccggaaatgacaacagcacggcaacgctgtgccttgggcaccatgcagtaccaaacggaacgatagtgaaaacaatcacgaatgaccaaattgaagttactaatgctactgagctggttcagagttcctcaacaggtggaatatgcgacagtcctcatcagatccttgatggagaaaactgcacactaatagatgctctattgggagaccctcagtgtgatggcttccaaaataagaaatgggacctttttgttgaacgcagcaaagcctacagcaactgttacccttatgatgtgccggattatgcctcccttaggtcactaattgcctcatctggcacactggagtttaacaatgaaagcttcaattggactggagtaactcagaatggaacaagctctgcttgcaaaaggagatctaataaaagtttctttagtagattgaattggttgacccacttaaaatacaaatacccagcattgaacgtgactatgccaaacaatgaaaaatttgacaaattgtacatttggggggttcaccacccgggtacggacagtgaccaaatcagcctatatgctcaagcatcaggaagaatcacagtctctaccaaaagaagccaacaaactgtaatcccgaatatcggatccagacccagggtaagggatgtctccagcagaataagcatctattggacaatagtaaaaccgggagacatacttttgattaacagcacagggaatctaattgctcctcggggttacttcaaaatacgaagtgggaaaagctcaataatgagatcagatgcacccattggcaaatgcaattctgaatgcatcactccaaatggaagcattcccaatgacaaaccatttcaaaatgtaaacaggatcacatatggggcctgtcccagatatgttaagcaaaacactctgaaattggcaacagggatgcgaaatgtaccagagaaacaaactagaggcatatttggcgcaatcgcgggtttcatagaaaatggttgggagggaatggtggacggttggtacggtttcaggcatctaaattctgagggcacaggacaagcagcagatctcaaaagcactcaagcagcaatcaaccaaatcaatgggaaactgaataggttaatcgggaaaacaaacgagaaattccatcagattgaaaaagaattctcagaagtagaagggagaattcaggacctagagaaatatgttgaggacactaaaatagatctctggtcatacaacgcggagcttcttgttgccctggagaaccaacatacaattgatctaactgactcagaaatgaacaaactgtttgaaagaacaaagaagcaactgagagaaaatgctgaggatatgggcaatggttgtttcaaaatataccacaaatgtgacaatgcctgcatagggtcaatcagaaatggaacttatgaccatgatgtatacagagatgaagcattaaataaccggttccagatcaaaggtgttgagctgaagtcaggatacaaagattggatcctatggatttcctttgccatatcatgttttttgctttgtgttgctttgttggggttcatcatgtgggcctgccaaaaaggcaacattaggtgcaacatttgcatttga

SEQ ID NO: 32290 - RNA, 1701 nt, synthetic construct
  misc_feature 1..1701: note = hemagglutinin__InfluenzaA__ABU92635
  source 1..1701: mol_type = other RNA
atgaagactatcattgctttgagctacattctatgtctggttttcgctcaaaaacttcccggaaatgacaacagcacggcaacgctgtgccttgggcaccatgcagtaccaaacggaacgatagtgaaaacaatcacgaatgaccaaattgaagttactaatgctactgagctggttcagagttcctcaacaggtggaatatgcgacagtcctcatcagatccttgatggagaaaactgcacactaatagatgctctattgggagaccctcagtgtgatggcttccaaaataagaaatgggacctttttgttgaacgcagcaaagcctacagcaactgttacccttatgatgtgccggattatgcctcccttaggtcaatagttgcctcatccggcacactggagtttaacaatgaaagcttcaactggactggagtcactcagaatggaacaagctctgcttgcaaaaggaaatctaataaaagtttctttagtagattgaattggttgacccacttaaaatacaaatacccagcattgaacgtgactatgccaaacaatgaaaaatttgacaaattgtacatttggggggttcaccacccgggtacggacaatgaccaaatcagcctgtatgctcaagcatcaggaagaatcacagtctctaccaaaagaagccaacaaactgtaatcccgaatatcggatctagacccagggtaagggacgtctccagcagaataagcatctattggacaatagtaaaaccgggagacatacttttgattaacagcacaggtaatctaattgctcctcggggttacttcaaaatacgaagtgggaaaagctcaataatgagatcagatgcacccattggcaaatgcaattctgaatgcatcactccaaatggaagcattcccaatgacaaaccatttcaaaatgtaaacaggatcacatatggggcctgtcccagatatgttaagcaaaacactctgaaattggcaacagggatgcgaaatgtaccagagaaacaaactagaggcatatttggcgcaatcgcgggtttcatagaaaatggttgggagggaatggtggacggttggtacggtttcagacatcaaaattctgagggcacaggacaagcagcagatctcaaaagcactcaagcagcaatcaaccaaatcaatgggaaactgaataggttaatcgggaaaacaaacgagaaattccatcagattgaaaaagaattctcagaagtagaggggagaattcaggacctcgagaaatatgttgaggacactaaaatagatctctggtcatacaacgcggagcttcttgttgccctggagaaccaacatacaattgatctaactgactcagaaatgaacaaactgtttgaaagaacaaagaagcaactgagggaaaatgctgaggatatgggcaatggttgtttcaaaatataccacaaatgtgacaatgcctgcatagggtcaatcagaaatggaacttatgaccatgatgtatacagagatgaagcattaaacaaccggttccagatcaaaggtgttgagctgaagtcaggatacaaagattggatcctatggatttcctttgccatatcatgttttttgctttgtgttgctttgttggggttcatcatgtgggcctgccaaaaaggcaacattaggtgcaacatttgcatttga

SEQ ID NO: 32291 - RNA, 1701 nt, synthetic construct
  misc_feature 1..1701: note = hemagglutinin__InfluenzaA__ABU92636
  source 1..1701: mol_type = other RNA
atgaagactatcattgctttgagctacattctatgtctggttttcgctcaaaaacttcccggaaatgacaacagcacggcaacgctgtgccttgggcatcatgcagtaccaaacggaacgatagtgaaaacaatcacgaatgaccaaattgaagttactaatgctactgagctggttcagagttcctcaacaggtggaatatgcgacagtcctcatcagatccttgatggagaaaactgcacactaatagatgctctattgggagaccctcagtgtgatggcttccaaaataagaaatgggacctttttgttgaacgcagcaaagcctacagcaactgttacccttatgatgtgccggattatgcctcccttaggtcactagttgcctcatccggcacactggagtttaacaatgaaagcttcaattggactggagtcactcaaaatggaacaagctctgcttgcaaaaggagatctaataacagtttctttagtagactgaattggttgacccacttaaaattcaaatacccagcattgaacgtgactatgccaaacaatgaaaaatttgacaaattgtacatttggggggttcaccacccgggtacggacaatgaccaaatcttcctgtatgctcaagcatcaggaagaatcacagtctctaccaaaagaagccaacaaactgtaatcccgaatatcggatctagacccagagtaaggaatatccccagcagaataagcatctattggacaatagtaaaaccgggagacatacttttgattaacagcacagggaatctaattgctcctaggggttacttcaaaatacgaagtgggaaaagctcaataatgagatcagatgcacccattggcaaatgcaattctgaatgcatcactccaaatggaagcattcccaatgacaaaccatttcaaaatgtaaacaggatcacatatggggcctgtcccagatatgttaagcaaaacactctgaaattggcaacagggatgcgaaatgtaccagagaaacaaactagaggcatatttggcgcaatcgcgggtttcatagaaaatggttgggagggaatggtggatggttggtacggtttcaggcatcaaaattctgagggaataggacaagcagcagatctcaaaagcactcaagcagcaatcaatcaaatcaatgggaagctgaataggttgatcgggaaaaccaacgagaaattccatcagattgaaaaagaattctcagaagtagaagggagaattcaggacctcgagaaatatgttgaggacactaaaatagatctctggtcatacaacgcggagcttcttgttgccctggagaaccaacatacaattgatctaactgactcagaaatgaacaaactgtttgaaagaacaaagaagcaactgagggaaaatgctgaggatatgggcaatggttgtttcaaaatataccacaaatgtgacaatgcctgcataggatcaatcagaaatggaacttatgaccatgatgtatacagagatgaagcattaaacaaccggttccagatcaaaggcgttgagctgaagtcaggatacaaagattggatcctatggatttcctttgccatatcatgttttttgctttgtgttgctttgttggggttcatcatgtgggcctgccaaaaaggcaacattaggtgcaacatttgcatttga

SEQ ID NO: 32292 - RNA, 1701 nt, synthetic construct
  misc_feature 1..1701: note = hemagglutinin__InfluenzaA__ABU92637
  source 1..1701: mol_type = other RNA
atgaagactatcattgctttgagctacattctatgtctggttttcgctcaaaaacttcccggaaatgacaacagcacggcaacgctgtgccttgggcaccatgcagtaccaaacggaacgacagtgaaaacaatcacgaatgaccaaattgaagttactaatgctactgagctggttcagagttcctcaacaggtggaatatgcgacagtcctcatcagatccttgatggagaaaactgcacactaatagatgctctattgggagaccctcagtgtgatggcttccaaaataagaaatgggacctttttgttgaacgcagcaaagcctacagcaactgttacccttatgatgtgccggattatgtctcccttaggtcactagttgcctcatccggcacactggagtttaacaatgaaagcttcaattggactggagtcactcaaaatggaacaagctctgcttgcaaaaggagatctaataacagtttctttagtagattgaattggttgacccatttaaaattcaaatacccagcattgaacgtgactatgccaaacaatgaaaaatttgacaaattgtacatttggggggttcaccacccgggtacggacaatgaccaaatcagcctatatgctcaagcatcaggaagaatcacagtctctaccaaaagaagccaacaaactgtaatcccgaatatcggatctagacccagggtaagggatatccccagcagaataagcatctattggacaatagtaaaaccgggagacatacttttgattaacagcacagggaatctaattgctcctcggggttacttcaaaatacgaagtgggaaaagctcaataatgagatcagatgcacccattggcaaatgcaattctgaatgcatcactccaaatggaagcattcccaatgacaaaccatttcaaaatgtaaacaggatcacatatggggcctgtcccagatatgttaagcaaaacactctgaaattggcaacagggatgcgaaatgtaccagagaaacaaactagaggcatatttggcgcaatcgcgggtttcatagaaaatggttgggagggaatggtggatggttggtacggtttcaggcatcaaaattctgagggaataggacaagcagcagatctcaaaagcactcaagcagcaatcaaccaaatcaatgggaagctgaataggttgatcgggaaaaccaacgagaaattccatcagattgaaaaagaattctcagaagtagaagggagaattcaggacctcgagaaatatgttgaggacactaaaatagatctctggtcatacaacgcggagcttcttgttgccctggagaaccaacatacaattgatctaactgactcagaaatgaacaaactgtttgaaagaacaaagaagcaactgagggaaaatgctgaggatatgggcaatggttgtttcaaaatataccacaaatgtgacaatgcctgcatagggtcaatcagaaatggaacttatgatcatgatgtatacagagatgaagcattaaacaaccggttccagatcaaaggtgttgagctgaagtcaggatacaaagattggatcctatggatttcctttgccatatcatgttttttgctttgtgttgctttgttggggttcatcatgtgggcctgccaaaaaggcaacattaggtgcaacatttgcatttga

SEQ ID NO: 32293 - RNA, 1701 nt, synthetic construct
  misc_feature 1..1701: note = hemagglutinin__InfluenzaA__ABU92639
  source 1..1701: mol_type = other RNA
atgaagactatcattgctttgagctacattctatgtctggttttcgctcaaaaacttcccggaaatgacaacagcacggcaacgctgtgccttgggcaccatgcagtaccaaacggaacgatagtgaaaacaatcacgaatgaccaaattgaagttactaatgctactgagctggttcagatttcctcaacaggtgaaatatgcgacagtccccatcagatccttgatggagaaaactgcacactaatagatgctctattgggagaccctcagtgtgatggcttccaaaatacgaaatgggacctttttgttgaacgcagcaaagcctacagcaactgttacccttatgatgtgccggattatgcctcccttaggtcactagttgcctcatccggcacactggagtttaacaatgaaagcttcgattggactggagtcactcagaatggaacaagctctgcttgcaaaaggagatctgataaaagtttctttagtagattgaattggttgacccacttaaaatacaaatacccagcattgaacgtaactatgccaaacaatgaaaaatttgacaaattgtacatttggggggttcaccacccggggacggacagtgaccaaatcagcctatatgctcaagcatcaggaagaatcacagtctctaccaaaagaagccaacaaactgtaatcccgaatatcggatctagacccagggtaagggatgtctccagccgaataagcatctattggacaatagtaaaaccgggagacatacttttgattaacagcacagggaatctaattgctcctcggggttacttcaaaatacgaagtgggaaaagctcaataatgagatcagatgcacccattggcaaatgcaattctgaatgcatcactccaaatggaagcattcccaatgacaaaccatttcaaaatgtaaacaggatcacatatggggcctgtcccagatatgttaagcaaaacactctgaaattggcaacagggatgcgaaatgtaccagagaaacaaactagaggcatatttggcgcaatcgcgggtttcatagaaaatggttgggagggaatggtggacggttggtacggtttcagacatcaaaattctgagggcacaggacaagcagcagatctcaaaagcactcaagcagcaatcaaccaaatcaatgggaaactgaataggttaatcgggaaaacaaacgagaaattccatcagattgaaaaagaattctcggaagtagaaggaagaattcaggacctcgagaaatatattgaggacactaaaatagatctctggtcatacaacgcggagcttcttgttgccctggagaaccaacatacaattgatctaactgactcagaaatgaacaaactgtttgaaagaacaaagaagcaactgagggaaaatgctgaggatatgggcaatggttgtttcaaaatataccacaaatgtgacaatgcctgcatagggtcaatcagaaatggaacttatgaccatgatgtgtacagagatgaagcattaaacaaccggttccagatcaaaggtgttgagctgaagtcaggatacaaagattggatcctatggatttcctttgccatatcatgttttttgctttgtgttgctttgttggggttcatcatgtgggcctgccaaaaaggcaacattaggtgcaacatttgcatttga

SEQ ID NO: 32294 - RNA, 1701 nt, synthetic construct
  misc_feature 1..1701: note = hemagglutinin__InfluenzaA__ABU92640
  source 1..1701: mol_type = other RNA
atgaagactatcattgctttgagctacattctatgtctggttttcgctcaaaaacttcccggaaatgacaacagcacggcaacgctgtgccttgggcaccatgcagtaccaaacggaacgatagtgaaaacaatcacgaatgaccaaattgaagttactaatgctactgagctggttcagagttcctcaacaggtgaaatatgcgacagtcctcatcagatccttgatggagaaaactgcacactaatagatgctctattgggagaccctcagtgtgatggcttccaaaataagaaatgggacctttttgttgaacgcagcaaagcctacagcaactgttacccttatgatgtgccggattatgcctcccttaggtcactagttgcctcatccggcacactggagtttaacaatgaaagcttcaattggactggagtcactcaaaatggaacaagctctgcttgcaaaaggagatctaataacagtttctttagtagattgaattggttgacccacttaaaattcaaatacccagcattgaacgtgactatgccaaacaatgaaaaatttgacaaattgtacatttggggggttcaccacccgggtacggacaatgaccaaatcttcctgtatgctcaagcatcaggaagaatcacagtctctaccaaaagaagccaacaaactgtaatcccgaatatcggatctagacccagagtaaggaatatccccagcagaataagcatctattggacaatagtaaaaccgggagacatacttttgattaacagcacagggaatctaattgctcctaggggttacttcaaaatacgaagtgggaaaagctcaataatgagatcagatgcacccattggcaaatgcaattctgaatgcatcactccaaatggaagcattcccaatgacaaaccatttcaaaatgtaaacaggatcacatatggggcctgtcccagatatgtcaagcaaaacactctgaaattggcaacagggatgcgaaatgtaccagagaaacaaactagaggcatatttggcgcaatcgcgggtttcatagaaaatggttgggagggaatggtggatggttggtacggtttcaggcatcaaaattctgagggaataggacaagcagcagatctcaaaagcactcaagcagcaatcaatcaaatcaatgggaagctgaataggttgatcgggaaaaccaacgagaaattccatcagattgaaaaagaattctcagaagtagaagggagaattcaggacctcgagaaatatgttgaggacactaaaatagatctctggtcatacaacgcggagcttcttgttgccctggagaaccaacatacaattgatctaactgattcagaaatgaacaaactgtttgaaagaacaaagaagcaactgagggaaaatgctgaggatatgggcaatggttgtttcaaaatataccacaaatgtgacaatgcctgcataggatcaatcagaaatggaacttatgaccatgatgtatacagagatgaagcattaaacaaccggttccagatcaaaggcgttgagctgaagtcaggatacaaagattggatcctatggatttcctttgccatatcatgttttttgctttgtgctgctttgttggggttcatcatgtgggcctgccaaaaaggcaacattaggtgcaacatttgcatttga

SEQ ID NO: 32295 - RNA, 1701 nt, synthetic construct
  misc_feature 1..1701: note = hemagglutinin__InfluenzaA__ABU92641
  source 1..1701: mol_type = other RNA
atgaagactatcattgctttgagctacattctatgtctggttttcgctcaaaaacttcccggaaatgacaacagcacggcaacgctgtgccttgggcaccatgcagtaccaaacggaacgatagtgaaaacaatcacgaatgaccaaattgaagttactaatgctactgagctggttcagagttcctcaacaggtggaatatgcgacagtcctcatcagatccttgatggagaaaactgcacactaatagatgctctattgggagaccctcagtgtgatggcttccaaaataagaaatgggacctttttgttgaacgcagcaaagcctacagcaactgttacccttatgatgtgccggattatgcctcccttaggtcactagttgcctcatccggcacactggagtttaacaatgaaagcttcaattggactggagtcactcaaaatggaacaagctctgcttgcaaaaggaaatctaataacagtttctttagtagattgaattggttgacccacttaaaattcaaatacccagcattgaacgtgaccatgccaaacaatgaaaaatttgacaaattgtacatttggggggttcaccacccgggtacggacaatgaccaaatcagcctatatgctcaagcttcaggaagaatcacagtctctaccaaaagaagccaacaaactgtaattccgaatatcggatctagacccagggtaagggatatccccagcagaataagcatctattggacaatagtaaaaccgggagacatacttttgattaacagcacagggaatctaattgctcctcggggttacttcaaaatacgaagtgggaaaagctcaataatgagatcagatgcacccattggcaaatgcaattctgaatgcatcactccaaatggaagcattcccaatgacaaaccatttcaaaatgtaaacaggatcacatatggggcctgtcccagatatgttaagcaaaacactctgaaattggcaacagggatgcgaaatgtaccagagaaacaaactagaggcatatttggcgcaatcgcgggtttcatagaaaatggttgggagggaatggtggatggttggtacggtttcaggcatcaaaattctgagggaataggacaagcagcagatctcaaaagcactcaagcagcaatcaaccaaatcaatgggaagctgaataggttgatcgggaaaaccaacgagaaattccatcagattgaaaaagaattctcagaagtagaagggagaattcaggacctcgagaaatatgttgaggacactaaaatagatctctggtcatacaacgcagagcttcttgttgccctggagaaccaacatacaattgatctaaccgactcagaaatgaacaaactgtttgaaagaacaaagaagcaactgagggaaaatgctgaggatatgggcaatggttgtttcaaaatataccacaaatgtgacaatgcctgcatagggtcaatcagaaatggaacttatgaccatgatgtatacagagatgaagcattaaacaaccggttccagatcaaaggtgttgagctgaagtcaggatacaaagattggatcctatggatttcctttgccatatcatgttttttgctttgtgttgctttgttggggttcatcatgtgggcctgccaaaaaggcaacattaggtgcaacatttgcatttga

SEQ ID NO: 32296 - RNA, 1701 nt, synthetic construct
  misc_feature 1..1701: note = hemagglutinin__InfluenzaA__ABU92642
  source 1..1701: mol_type = other RNA
atgaagactatcattgctttgagctacattctatgtctggttttcgctcaaaaacttcccggaaatgacaacagcacggcaacgctgtgccttgggcaccatgcagtaccaaacggaacgatagtgaaaacaatcacgaatgaccaaattgaagttactaatgctactgagctggttcagagttcctcaacaggtggaatatgcgacagtcctcatcagatccttgatggagaaaactgcacactaatagatgctctattgggagaccctcagtgtgatggcttccaaaataagaaatgggacctttttgttgaacgcagcaaagcctacagcaactgttacccttatgatgtgccggattatgcctcccttaggtcactagttgcctcatccggcacactggagtttaacaatgaaagcttcaattggactggagtcactcaaaacggaacaagctctgcttgcaaaaggagatctaataacagtttctttagtagattgaattggttgacccacttaaaattcaaatacccagcattgaacgtgactatgccaaacaatgaaaaatttgacaaattgtacatttggggggttcaccacccgggtacggacaatgaccaaatcttcctgtatgctcaagcatcaggaagaatcatagtctctaccaaaagaagccaacaaactgtaatcccgaatatcggatctagacccagagtaaggaatatccccagcagaataagcatctattggacaatagtaaaaccgggagacatacttttgattaacagcacagggaatctaattgctcctaggggttacttcaaaatacgaagtgggaaaagctcaataatgagatcagatgcacccattggcaaatgcaattctgaatgcatcactccaaatggaagcattcccaatgacaaaccatttcaaaatgtaaacaggatcacatacggggcctgtcccagatatgttaagcaaaacactctgaaattggcaacagggatgcgaaatgtaccagagaagcaaactagaggcatatttggcgcaatcgcgggtttcatagaaaatggttgggagggaatggtggatggttggtacggtttcaggcatcaaaattctgagggaataggacaagcagcagatctcaaaagcactcaagcagcaatcgatcaaatcaatgggaagctgaataggttgatcgggaaaaccaacgagaaattccatcagattgaaaaagaattctcagaagtagaagggagaattcaggacctcgagaaatatgttgaggacactaaaatagatctctggtcatacaacgcggagcttcttgttgccctggagaaccaacatacaattgatctaactgactcagaaatgaacaaactgtttgaaaaaacaaagaagcaactgagggaaaatgctgaggatatgggcaatggttgtttcaaaatataccacaaatgtgacaatgcctgcataggatcaatcagaaatggaacttatgaccatgatgtatacagagatgaagcattaaacaaccggttccagatcaagggcgttgagctgaagtcaggatacaaagattggatcctatggatttcctttgccatatcatgttttttgctttgtgttgctttgttggggttcatcatgtgggcctgccaaaaaggcaacattaggtgcaacatttgcatttga

SEQ ID NO: 32297 - RNA, 1701 nt, synthetic construct
  misc_feature 1..1701: note = hemagglutinin__InfluenzaA__ABU92643
  source 1..1701: mol_type = other RNA
atgaagactatcattgctttgagctacattctatgtctggttttcgctcaaaaacttcccggaaatgacaacagcacggcaacgctgtgccttgggcaccatgcagtaccaaacggaacgatagtgaaaacaatcacgaatgaccaaattgaagttactaatgctactgagctggttcagatttcctcaacaggtgaaatatgcgacagtccccatcagatccttgatggagaaaactgcacactaatagatgctctattgggagaccctcagtgtgatggcttccaaaataagaaatgggacctttttgttgaacgcagcaaagcctacagcaactgttacccttatgatgtgccggattatgcctcccttaggtcactagttgcctcatccggcacactggagtttaacaatgaaagcttcgattggactggagtcactcagaatggaacaagctctgcttgcaaaagaagatctgataaaagtttctttagtagattgaattggttgacccacttaaaatacaaatacccagcattgaacgtaactatgccaaacaatgaaaaatttgacaaattgtacatttggggggttcaccacccgggtacggacagtgaccaaatcagcctatatgctcaagcatcaggaagaatcacagtctctaccaaaagaagccaacaaactgtaatcccgaatatcggatctagacccagggtaagggatgtctccagccgaataagcatctattggacaatagtaaaaccgggagacatacttttgattaacagcacagggaatctaattgctcctcggggttacttcaaaatacgaagtgggaaaagctcaataatgagatcagatgcacccattggcaaatgcaattctgaatgcatcactccaaatggaagcattcccaatgacaaaccatttcaaaatgtaaacaggatcacatatggggcctgtcccagatatgttaagcaaaacactctgaaattggcaacagggatgcgaaatgtaccagagaaacaaactagaggcatatttggcgcaatcgcgggtttcatagaaaatggttgggagggaatggtggacggttggtacggtttcaggcatcaaaattctgagggcacaggacaagcagcagatctcaaaagcactcaagcagcaatcaaccaaatcaatgggaaactgaataggttaatcgggaaaacaaacgagaaattccatcagattgaaaaagaattctcggaagtagaaggaagaattcaggacctcgagaaatatgttgaggacactaaaatagatctctggtcatacaacgcggagcttcttgttgccctggagaaccaacatacaattgatctaactgactcagaaatgaacaaactgtttgaaagaacaaagaagcaactgagggaaaatgctgaggatatgggcaatggttgtttcaaaatataccacaaatgtgacaatgcctgcatagggtcaatcagaaatggaacttatgaccataatgtgtacagagatgaagcattaaacaaccggttccagatcaaaggtgttgagttgaagtcaggatacaaagattggatcctatggatttcctttgccatatcatgttttttgctttgtgttgctttgttggggttcatcatgtgggcctgccaaaaaggcaacattaggtgcaacatttgcatttga

SEQ ID NO: 32298 - RNA, 1701 nt, synthetic construct
  misc_feature 1..1701: note = hemagglutinin__InfluenzaA__ABU92645
  source 1..1701: mol_type = other RNA
atgaagactatcattgctttgagctacattctatgtctggttttcgctcaaaaacttcccggaaatgacaacagcacggcaacgctgtgccttgggcaccatgcagtaccaaacggaacgatagtgaaaacaatcacgaatgaccaaattgaggttactaatgctactgagctggttcagagttcctcaacaggtgaaatatgcgacagtcctcatcagatccttgatggagaaaactgcacactaatagatgctctattgggagaccctcagtgtgatggcttccaaaataagaaatgggacctttttgttgaacgcagcaaagcctacagcaactgttacccttatgatgtgccggattatgcctcccttaggtcactagttgcctcatccggcacactggagtttaacaatgaaagcttcaattggactggagtcactcaaaatggaacaagctctgcttgcaaaaggagatctaataacagtttctttagtagactgaattggttgacccacttaaaattcaaatacccagcattgaacgtgactatgccaaacaatgaaaaatttgacaaattgtacatttggggggttcaccacccgggtacggacaatgaccaaatcttcctgtatgctcaagcatcaggaagaatcacagtctctaccaaaagaagccaacaaactgtaatcccgaatatcggatctagacctagagtaaggaatatccccagcagaataagcatctattggacaatagtaaaaccgggagacatacttttgattaacagcacagggaatctaattgctcctaggggttacttcaaaatacgaagtgggaaaagctcaataatgagatcagatgcacccattggcaaatgcaattctgaatgcatcactccaaatggaagcattcccaatgacaaaccatttcaaaatgtaaacagaatcgcatatggggcctgtcccagatatgttaagcaaaacactctgaaattggcaacagggatgagaaatgtaccagagaaacaaactagaggcatatttggcgcaatcgcaggtttcatagaaaatggttgggagggaatggtggatggttggtacggtttcaggcatcaaaattctgagggaataggacaagcagcagatctcaaaagcactcaagcagcaatcaatcaaatcaatgggaagctgaataggttgatcgggaaaaccaacgagaaattccatcagattgaaaaagaattctcagaagtagaagggagaattcaggacctcgagaaatatgttgaggacactaaaatagatctctggtcatacaacgcggagcttcttgttgccctggagaaccaacatacaattgatctaactgactcagaaatgaacaaactgtttgaaagaacaaagaagcaactgagggaaaatgctgaggatatgggcaatggttgtttcaaaatataccacaaatgtgacaatgcctgcataggatcaatcagaaatggaacttatgaccatgatgtatacagagatgaagcattaaacaaccggttccagatcaaaggcattgagctgaagtcaggatacaaagattggatcctatggatttcctttgccatatcatgttttttgctttgtgttgttttgttggggttcatcatgtgggcctgccaaaaaggcaacattaggtgcaacatttgcatatga

SEQ ID NO: 32299 - RNA, 1701 nt, synthetic construct
  misc_feature 1..1701: note = hemagglutinin__InfluenzaA__ABU92646
  source 1..1701: mol_type = other RNA
atgaagactatcattgctttgagctacattctatgtctggttttcgctcaaaaacttcccggaaatgacaacagcacggcaacgctgtgccttgggcaccatgcagtaccaaacggaacgatagtgaaaacaatcacgaatgaccaaattgaagttactaatgctactgagctggttcagagttcctcaacaggtggaatatgcgacagtcctcatcagatccttgatggagaaaactgcacactaatagatgctctattgggagaccctcagtgtgatggcttccaaaataagaaatgggacctttttgttgaacgcagcaaagcctacagcaactgttacccttatgatgtgccggattatgcctcccttaggtcactagttgcctcatccggcacactggagtttaacaatgaaagcttcaattggactggagtcactcaaaatggaacaagctctgcttgcaaaaggagatctaataaaagtttctttagtagattgaattggttgacccacttaaaattcaaatacccagcattgaacgtgactatgccaaacaatgaaaaatttgacaaattgtacatttggggggttcaccacccgggtacggacaatgaccaaatcagcctatatgctcaagcatcaggaagaatcacagtctctaccaaaagaagccaacaaactgtaatcccgaatatcggatctagacccagggtaagggatgtccccagcagaataagcatctattggacaatagtaaaaccgggagacatacttttgattaacagcacagggaatctaattgctcctcggggttacttcaaaatacgaagtgggaaaagctcaataatgagatcagatgcacccattggcaaatgcaattctgaatgcatcactccaaatggaagcattcccaatgacaaaccatttcaaaatgtaaacaggatcacatatggggcctgtcccagatatgttaagcaaaacactctgaaattggcaacagggatgcgaaatgtaccagagaaacaaactagaggcatatttggcgcaatcgcgggtttcatagaaaatggttgggagggaatggtggacggttggtacggtttcaggcatcaaaattctgagggaacaggacaagcagcagatctcaaaagcactcaagcagcaatcaaccaaatcaatgggaagctgaataggttgatcgggaaaacaaacgagaaattccatcagattgaaaaagaattctcagaagtagaagggagaattcaggacctcgagaaatatgttgaggacactaaaatagatctctggtcatacaacgcggagcttcttgttgccctggagaaccaacatacaattgatctaactgactcagaaatgaacaaactgtttgaaagaacaaagaagcaactgagggaaaatgctgaggatatgggcaatggttgtttcaaaatataccacaaatgtgacaatgcctgcatagggtcaatcagaaatggaacttatgaccatgatgtatacagagatgaagcattaaacaaccggttccagatcaaaggtgttgagctgaagtcaggatacaaagattggatcctatggatttcctttgccatatcatgttttttgctttgtgttgctttgttggggttcatcatgtgggcctgccaaaaaggcaacattaggtgcaacatttgcatttga

SEQ ID NO: 32300 - RNA, 1701 nt, synthetic construct; identical to SEQ ID NO: 32265
  misc_feature 1..1701: note = hemagglutinin__InfluenzaA__ABU92647
  source 1..1701: mol_type = other RNA

SEQ ID NO: 32301 - RNA, 1701 nt, synthetic construct
  misc_feature 1..1701: note = hemagglutinin__InfluenzaA__ABU92648
  source 1..1701: mol_type = other RNA
atgaagactatcattgctttgagctacattctatgtctggttttcgctcaaaaacttcccggaaatgacaacagcacggcaacgctgtgccttgggcaccatgcagtaccaaacggaacgatagtgaaaacaatcacgaatgaccaaattgaagttactaatgctactgagctggttcagatttcctcaacaggtgaaatatgcgacagtccccatcagatccttgatggagaaaactgcacactaatagatgctctattgggagaccctcagtgtgatggcttccaaaataagaaatgggacctttttgttgaacgcagcaaagcctacagcaactgttacccttatgatgtgccggattatgcctcccttaggtcactagttgcctcatccggcacactggagtttaacaatgaaagcttcaattggactggagtcactcagaatggaacaagctctgcttgcaaaaggagatctgataaaagtttctttagtagattgaattggttgacccacttaaaatacaaatacccagcattgaacgtaactatgccaaacaatgaaaaatttgacaaattgtacatttggggggttcaccacccgggtacggacagtgaccaaatcagcctatatgctcaagcatcaggaagaatcacagtctctaccaaaagaagccaacaaactgtaatcccgaatatcggatctagacccagggtaagggatgtctccagccgaataagcatctattggacaatagtaaaaccgggagacatacttttgattaacagcacagggaatctaattgctcctcggggttacttcaaaatacgaagtgggaaaagctcaataatgagatcagatgcacccattggcaaatgcaattctgaatgcatcactccaaatggaagcattcccaatgacaaaccatttcaaaatgtaaacaggatcacatatggggcctgtcccagatatgttaagcaaaacactctgaaattggcaacagggatgcgaaatgtaccagagaaacaaactagaggcatatttggcgcaatcgcgggtttcatagaaaatggttgggagggaatggtggacggttggtacggtttcaggcatcaaaattctgagggcacaggacaagcagcagatctcaaaagcactcaagcagcaatcaaccaaatcaatgggaaactgaataggttaatcgggaaaacaaacgagaaattccatcagattgaaaaagaattctcggaagtagaaggaagaattcaggacctcgagaaatatgttgaggacactaaaatagatctctggtcatacaacgcggagcttcttgttgccctggagaaccaacatacaattgatctaactgactcagaaatgaacaaactgtttgaaagaacaaagaagcaactgagggaaaatgctgaggatatgggcaatggttgtttcaaaatataccacaaatgtgacaatgcctgcatagggtcaatcagaaatggaacttatgaccatgatgtgtacagagatgaagcattaaacaaccggttccagatcaaaggtgttgagctgaagtcaggatacaaagattggatcctatggatttcctttgccatatcatgttttttgctttgtgttgctttgttggggttcatcatgtgggcctgccaaaaaggcaacattaggtgcaacatttgcatttga

SEQ ID NO: 32302 - RNA, 1701 nt, synthetic construct
  misc_feature 1..1701: note = hemagglutinin__InfluenzaA__ABU92649
  source 1..1701: mol_type = other RNA
atgaagactatcattgctttgagctacattctatgtctggttttcgctcaaaaacttcccggaaatgacaacagcacggcaacgctgtgccttgggcaccatgcagtaccaaacggaacgatagtgaaaacaatcacgaatgaccaaattgaagttactaatgctactgagctggttcagatttcctcaacaggtggaatatgcgacagtcctcatcagatccttgatggagaaaactgcacactaatagatgctctattgggagaccctcagtgtgatggcttccaaaataagaaatgggacctttttgttgaacgcagcaaagcctacagcaactgttacccttatgatgtgccggattatgcctcccttaggtcactagttgcctcatccggcacactggagtttaacaatgaaagcttcgattggactggagtcactcagaatggaacaagctctgcttgcaaaaggagatctaataaaagtttctttagtagattgaattggttgacccacttaaaatacaaatacccagcattgaacgtgactatgccaaacaatgaaaaatttgacaaattgtacatttggggggttcaccacccgggtacggacagtgaccaaatcagcctatatgctcaagcatcaggaagaatcacagtctctaccaaaagaagccaacaaactgtaatcccgaatatcggatctagacccagggtaagggatgtctccagccgaataagcatctattggacaatagtaaaaccgggagacatacttttgattaacagcacagggaatctaattgctcctcggggttacttcaaaatacgaagtgggaaaagctcaataatgagatcagatgcacccattggcaaatgcaattctgaatgcatcactccaaatggaagcattcccaatgacaagccatttcaaaacgtaaacaggatcacatatggggcctgtcccagatatgttaagcaaaacactctgaaattggcaacagggatgcgaaatgtaccagagaaacaaactagaggcatatttggcgcaatcgcgggtttcatagaaaatggttgggagggaatggtggacggttggtacggtttcaggcatcaaaattctgagggcacaggacaagcagcagatctcaaaagcactcaagcagcaatcaaccaaatcaatgggaaactgaataggttaatcgggaaaacaaatgagaaattccatcagattgaaaaagaattctcggaagtagaaggaagaattcaggacctcgagaaatatgttgaggacactaaaatagatctctggtcatacaacgcggagcttcttgttgccctggagaaccaacatacaattgatctaactgactcagaaatgaacaaactgtttgaaagaacaaagaagcaactgagggaaaatgctgaggatatgggcaatggttgtttcaaaatataccacaaatgtgacaatgcctgcatagggtcaatcagaaatggaacttatgaccatgatgtgtacagagatgaagcattaaacaaccggttccagatcaaaggtgttgagctgaagtcaggatacaaagattggatcctatggatttcctttgccatatcatgttttttgctttgtgttgctttgttggggttcatcatgtgggcctgtcagaaaggcaacattaggtgcaacatttgcatttga

SEQ ID NO: 32303 - RNA, 1701 nt, synthetic construct
  misc_feature 1..1701: note = hemagglutinin__InfluenzaA__ABU92650
  source 1..1701: mol_type = other RNA
atgaagactatcattgctttgagctacattctatgtctggttttcgctcaaaaacttcccggaaatgacaacagcacggcaacgctgtgccttgggcaccatgcagtaccaaacggaacgatagtgaaaacaatcacgaatgaccaaattgaagttactaatgctactgagctggttcagatttcctcaacaggtgaaatatgcgacagtccccatcagatccttgatggagaaaactgcacactaatagatgctctattgggagaccctcagtgtgatggcttccaaaataagaaatgggacctttttgttgaacgcagcaaagcctacagcaactgttacccttatgatgtgccggattatgcctcccttaggtcactagttgcctcatccggcacactggagtttaacaatgaaagcttcgattggactggagtcactcagaatggaacaagctctgcttgcaaaaggagatctgataaaagtttctttagtagattgaattggttgacccacttaaaatacaaatacccagcattgaacgtaactatgccaaacaatgaaaaatttgacaaattgtacatttggggggttcaccacccgggtacggacagtgaccaaatcagcctatatgctcaagcatcaggaagaatcacagtctctaccaaaagaagccaacaaactgtaatcccgaatatcggatctagacccagggtaagggatgtctccagccgaataagcatctattggacaatagtaaaaccgggagacatacttttgattaacagcacagggaatctaattgctcctcggggttacttcaaaatacgaagtgggaaaagctcaataatgagatcagatgcacccattggcaaatgcaattctgaatgcatcactccaaatggaagcattcccaatgacaaaccatttcaaaatgtaaacaggatcacatatggggcctgtcccagatatgttaagcaaaacactctgaaattggcaacagggatgcgaaatgtaccagagaaacaaactagaggcatatttggcgcaatcgcgggtttcatagaaaatggttgggagggaatggtggacggttggtacggtttcaggcaccaaaattctgagggcacaggacaagcagcagatctcaaaagcactcaagcagcaatcaaccaaatcaatgggaaactgaataggttaatcgggaaaacaaacgagaaattccatcagattgaaaaagaattctcggaagtagaaggaagaattcaggacctcgagaaatatgttgaggacactaaaatagatctctggtcatacaacgcggagcttcttgttgccctggagaaccaacatacaattgatctaactgactcagaaatgaacaaactgtttgaaagaacaaagaagcaactgagggaaaatgctgaggatatgggcaatggttgtttcaaaatataccacaaatgtgacaatgcctgcatagggtcaatcagaaatggaacttatgaccatgatgtgtacagagatgaagcattaaacaaccggttccagatcaaaggtgttgagctgaagtcaggatacaaagattggatcctatggatttcctttgccatatcatgttttttgctttgtgttgctttgttggggttcatcatgtgggcctgccaaaaaggcaacattaggtgcaacatttgcatttga

SEQ ID NO: 32304 - RNA, 1701 nt, synthetic construct
  misc_feature 1..1701: note = hemagglutinin__InfluenzaA__ABU92651
  source 1..1701: mol_type = other RNA
atgaagactatcattgctttgagctacattctatgtctggttttcgctcaaaaacttcccggaaatgacaacagcacggcaacgctgtgccttgggcaccatgcagtaccaaacggaacgatagtgaaaaccatcacgaatgaccaaattgaagttactaatgctactgagctggttcagatttcctcaacaggtgaaatatgcgacagtccccatcagatccttgatggagaaaactgcacactaatagatgctctattgggagaccctcagtgtgatggcttccaaaataagaaatgggacctttttgttgaacgcagcaaagcctacagcaactgttacccttatgatgtgccggattatgcctcccttaggtcactagttgcctcatccggcacactggagttttacaatgaaagcttcgattggactggagtcactcagaatggaacaagctctgcttgcaaaaggagatctgataaaagtttctttagtagattgaattggttgacccacttaaaatacaaatacccagcattaaacgtaactatgccaaacaatgaaaaatttgacaaattgtacatttggggggttcaccacccgggtacggacagtgaccaaatcagcctatatgctcaagcatcaggaagaatcacagtctctaccaaaagaagccaacaaactgtaatcccgaatatcggatctagacccagggtaagggatgtctccagccgaataagcatctattggacaatagtaaaaccgggagacatacttttgattaacagcacagggaatctaattgctcctcggggttacttcaaaatacgaagtgggaaaagctcaataatgagatcagatgcacccattggcaaatgcaattctgaatgcatcactccaaatggaagcattcccaatgacaaaccatttcaaaatgtaaacaggatcacatatggggcctgtcccagatatgttaagcaaaacactctgaaattggcaacagggatgcgaaatgtaccagagaaacaaactagaggcatatttggcgcaatcgcgggtttcatagaaaatggttgggagggaatggtggacggttggtacggtttcaggcatcaaaattctgagggcacaggacaagcagcagatctcaaaagcactcaagcagcaatcaaccaaatcaatgggaaactgaataggttaatcgggaaaacaaacgagaaattccatcagattgaaaaagaattctcggaagtagaaggaagaattcaggacctcgagaaatatgttgaggacactaaaatagatctctggtcatacaacgcggagcttcttgttgccctggagaaccaacatacaattgatctaactgactcagaaatgaacaaactgtttgaaagaacaaagaagcaactgagggaaaatgctgaggatatgggcaatggttgtttcaaaatataccacaaatgtgacaatgcctgcatagggtcaatcagaaatggaacttatgaccatgatgtgtacagagatgaagcattaaacaaccggttccagatcaaaggtgttgagctcaagtcaggatacaaagattggatcctatggatttcctttgccatatcatgttttttgctttgtgttgctttgctggggttcatcatgtgggcctgccaaaaaggcaacattaggtgcaacatttgcatttga

SEQ ID NO: 32305 - RNA, 1701 nt, synthetic construct
  misc_feature 1..1701: note = hemagglutinin__InfluenzaA__ABU92652
  source 1..1701: mol_type = other RNA
atgaagactatcattgctttgagctacattctatgtctggttttcgctcaaaaacttcccggaaatgacaacagcacggcaacgctgtgccttgggcaccatgcagtaccaaacggaacgatagtgaaaacaatcacgaatgaccaaattgaagttactaatgctactgagctggtacagagttcctcaacaggtggaatatgcgacagtcctcatcagatccttgatggagaaaactgcacactaatagatgctctattgggagaccctcagtgtgatggcttccaaaataagaaatgggacctttttgttgaacgcagcaaagcctacagcaactgttacccttatgatgtgccggattatgcctcccttaggtcactagttgcctcatccggcacactggagtttaacaatgaaagcttcgattggactggagtcactcagaatggaacaagctctgcttgcaaaaggagatctaataaaagtttctttagtagattgaattggttgacccacttaaaatacaaatacccagcattgaacgtgactatgccaaacaatgaaaaatttgacaaattgtacatttggggggttcaccacccgggtacagacagtgaccaaatcagcctatatgctcaagcatcaggaagaatcacagtctctaccaaaagaagccaacaaactgtaatcccgaatatcggatctagacccagggtaagggatgtctctagccgaataagcatctattggacaatagtaaaaccgggagacatacttttgattaacagcacagggaatctaattgctcctcggggttacttcaaaatacgaagtgggaaaagctcaataatgagatcagatgcacccattggcaaatgcaattccgaatgcatcactccaaatggaagcattcccaatgacaaaccatttcaaaatgtaaacaggatcacatatggggcctgtcccagatatgttaagcaaaacactttgaaattggcaacagggatgcgaaatgtaccagagaaacaaactagaggcatatttggcgcaatcgcgggcttcatagaaaatggttgggagggaatggtggacggttggtacggtttcaggcatcaaaattctgagggcacaggacaagcagcagatctcaaaagcactcaagcagcaatcaaccaaatcaatgggaaactgaataggttaatcgggaaaacaaacgagaaattccatcagattgaaaaagaattctcagaagtagaagggagaattcaggacctcgagaaatatgttgaggacactaaaatagatctctggtcatacaacgcggagcttcttgttgccctggagaaccaacatacaattgatctaactgactcagaaatgaacaaactgtttgaaagaacaaagaagcaactgagggaaaatgctgaggatataggcaatggttgtttcaaaatataccacaaatgtgacaatgcctgcatagggtcaatcagaaatggaacttatgaccatgatgtgtacagagatgaagcattaaacaaccggttccagatcaaaggtgttgagctgaagtcaggatacaaagattggatcctatggatttcctttgccatatcatgttttttgctttgtgttgctttgttggggttcatcatgtgggcctgccaaaaaggcaacattaggtgcaacatttgcatttga

SEQ ID NO: 32306 - RNA, 1701 nt, synthetic construct; identical to SEQ ID NO: 32266
  misc_feature 1..1701: note = hemagglutinin__InfluenzaA__ABU92653
  source 1..1701: mol_type = other RNA

SEQ ID NO: 32307 - RNA, 1701 nt, synthetic construct
  misc_feature 1..1701: note = hemagglutinin__InfluenzaA__ABU92654
  source 1..1701: mol_type = other RNA
atgaagactatcattgctttgagctacattctatgtctggttttcgctcaaaaacttcccggaaatgacaacagcacggcaacactgtgccttgggcaccatgcagtaccaaacggaacgatagtgaaaacaatcacgaatgaccaaattgaagttactaatgctactgagctggttcagagttcctcaacaggtggaatatgcgacagtcctcatcagatccttgatggagaaaactgcacactaatagatgctctattgggagaccctcagtgtgatggcttccaaaataagaaatgggacctttttgttgaacgcagcaaagcctacagcaactgttacccttatgatgtgccggattatgcctcccttaggtcactagttgcctcatccggcacactggagtttaacaatgaaagcttcaattggactggagtcactcaaaatggaacaagctctgcttgcaaaaggagatctaataaaagtttctttagtagattgaattggttgacccacttaaaattcaaatacccagcattgaacgtgactatgccaaacaatgaaaaatttgacaaattgtacatttggggggttcaccacccgggtacggacaatgaccaaatcagcctatatgctcaagcatcaggaaaaatcacagtctctaccaaaagaagccaacaaactgtaatcccgaatatcggatctagacccagggtaagggatgtccccagcagaataagcatctattggacaatagtaaaaccgggagacatacttttgattaacagcacagggaatctaattgctcctcggggttacttcaaaatacgaagtgggaaaagctcaataatgagatcagatgcacccattggcaaatgcaattctgaatgcatcactccaaatggaagcattctcaatgacaaaccatttcaaaatgtaaacaggatcacatatggggcctgtcccagatatgttaagcaaaacactctgaaattggcaacagggatgcgaaatgtaccagagaaacaaactagaggcatatttggcgcaatcgcgggtttcatagaaaatggttgggagggaatggtggacggttggtacggtttcaggcatcaaaatgctgagggaacaggacaagcagcagatctcaaaagcactcaagcagcaatcaaccaaatcaatgggaagctgaataggttgatcgggaaaacaaacgagaaattccatcagattgaaaaagaattctcagaagtagaaggaagaattcaggacctcgagaaatatgttgaggacactaaaatagatctctggtcatacaacgcggagcttcttgttgccctggagaaccaacatacaattgatctaactgactcagaaatgaacaaactgtttgaaagaacaaagaagcaactgagggaaaatgctgaggatatgggcaatggttgtttcaaaatataccacaaatgtgacaatgcctgcatagggtcaatcagaaatggaacttatgaccatgatgtatacagagatgaagcattaaacaaccggttccagatcaaaggtgttgagctgaagtcaggatacaaagattggatcctatggatttcctttgccatatcatgttttttgctttgtgttgctttgttggggttcatcatgtgggcctgccaaaaaggcaacattaggtgcaacatttgcatttga

SEQ ID NO: 32308 - RNA, 1701 nt, synthetic construct
  misc_feature 1..1701: note = hemagglutinin__InfluenzaA__ABU92655
  source 1..1701: mol_type = other RNA
atgaagactatcattgctttgagctacattctatgtctggttttcgctcaaaaacttcccggaaatgacaacagcacggcaacactgtgccttgggcaccatgcagtaccaaacggaacgatagtgaaaacaatcacgaatgaccaaattgaagttactaatgctactgagctggttcagagttcctcaacaggtggaatatgcgacagtcctcatcagatccttgatggagaaaactgcacactaatagatgctctattgggagaccctcagtgtgatggcttccaaaataagaaatgggacctttttgttgaacgcagcaaagcctacagcaactgttacccttatgatgtgccggattatgcctcccttaggtcactagttgcctcatccggcacactggagtttaacaatgaaagcttcaattggactggagtcactcaaaatggaacaagctctgcttgcaaaaggagatctaataaaagtttctttagtagattgaattggttgacccacttaaaattcaaatacccagcattgaacgtgactatgccaaacaatgaaaaatttgacaaattgtacatttggggggttcaccacccgggtacggacaatgaccaaatcagcctatatgctcaagcatcaggaagaatcacagtctctaccaaaagaagccaacaaactgtaatcccgaatatcggatctagacccagggtaagggatgtccccagcagaataagcatctattggacaatagtaaaaccgggagacatacttttgattaacagcacagggaatctaattgctcctcggggttacttcaaaatacgaagtgggaaaagctcaataatgagatcagatgcacccattggcaaatgcaattctgaatgcatcactccaaatggaagcattcccaatgacaaaccatttcaaaatgtaaacaggatcacatatggggcctgtcccagatatgttaagcaaaacactctgaaattggcaacagggatgcgaaatgtaccagagaaacaaactagaggcatatttggcgcaatcgcgggtttcatagaaaatggttgggagggaatggtggacggttggtacggtttcaggcatcaaaatgctgagggaacaggacaagcagcagatctcaaaagcactcaagcagcaatcaaccaaatcaatgggaagctgaataggttgatcgggaaaacaaacgagaaattccatcagattgaaaaagaattctcagaagtagaaggaagaattcaggacctcgagaaatatgttgaggacactaaaatagatctctggtcatacaacgcggagcttcttgttgccctggagaaccaacatacaattgatctaactgactcagaaatgaacaaactgtttgaaagaacaaagaagcaactgagggaaaatgctgaggatatgggcaatggttgtttcaaaatataccacaaatgtgacaatgcctgcatagggtcaatcagaaatggaacttatgaccatgatgtatacagagatgaagcattaaacaaccggttccagatcaaaggtgttgagctgaaatcaggatacaaagattggatcctatggatttcctttgccatatcatgttttttgctttgtgttgctttgttggggttcatcatgtgggcctgccaaaaaggcaacattaggtgcaacatttgcatttga

SEQ ID NO: 32309 - RNA, 1701 nt, synthetic construct
  misc_feature 1..1701: note = hemagglutinin__InfluenzaA__ABU92656
  source 1..1701: mol_type = other RNA
atgaagactatcattgctttgagctacattctatgtctggttttcgctcaaaaacttcccggaaatgacaacagcacggcaacgctgtgccttgggcaccatgcagtaccaaacggaacgatagtgaaaacaatcacgaatgaccaaattgaagttactaatgctactgagctggttcagatttcctcaacaggtgaaatatgcgacagtcctcatcagatccttgatggagaaaactgcacactaatagatgctctattgggagaccctcagtgtgatggcttccaaaataagaaatgggacctttttgttgaacgcagcaaagcctacagcaactgttacccttatgatgtgccggattatgcctcccttaggtcactagttgcctcatccggcacactggagtttaacaatgaaagcttcgattggactggagtcactcagaatggaacaagctctgcttgcaaaaggagatctgataaaagtttctttagtagattgaattggttgacccacttaaaatacaaatacccagcattgaacgtaactatgccaaacaatgaaaaatttgacaaattgtacatttggggggttcaccacccgggtacggacagtgaccaaatcagcctatatgctcaagcatcaggaagaatcacagtctctaccaaaagaagccaacaaactgtaatcccgaatatcggatctagacccagggtaagggatgtctccagccgaataagcatctattggacaatagtaaaaccgggagacatacttttgattaacagcacagggaatctaattgctcctcggggttacttcaaaatacgaagtgggaaaagctcaataatgagatcagatgcacccattggcaaatgcaattctgaatgcatcactccaaatggaagcattcccaatgacaaaccatttcaaaatgtaaacaggatcacatatggggcctgtcccagatatgttaagcaaaacactctgaaattggcaacagggatgcgaaatgtaccagagaaacaaactagaggcatatttggcgcaatcgcgggtttcatagaaaatggttgggagggaatggtggacggttggtacggtttcaggcatcaaaattctgagggcacaggacaagcagcagatctcaaaagcactcaagcagcaatcaaccaaatcaatgggaaactgaataggttaatcgggaaaacaaacgagaaattccatcagattgaaaaagaattctcggaagtagaaggaagaattcaggacctcgagaaatatgttgaggacactaaaatagatctctggtcatacaacgcggagcttcttgttgccctggagaaccaacatacaattgatctaactgactcagaaatgaacaaactgtttgaaagaacaaagaagcaactgagggaaaatgctgaggatatgggcaatggttgtttcaaaatataccacaaatgtgacaatgcctgcatagggtcaatcagaaatggaacttatgaccatgatgtgtacagagatgaagcattaaacaaccggttccagatcaaaggtgttgagttgaagtcaggatacaaagattggatcctatggatttcctttgccatatcatgttttttgctttgtgttgctttgttggggttcatcatgtgggcctgccaaaaaggcaacattaggtgcaacatttgcatttga

SEQ ID NO: 32310 - RNA, 1701 nt, synthetic construct
  misc_feature 1..1701: note = hemagglutinin__InfluenzaA__ABU92657
  source 1..1701: mol_type = other RNA
atgaagactatcattgctttgagctacattctatgtctggttttcgctcaaaaacttcccggaaatgacaacagcacggcaacgctgtgccttgggcaccatgcagtaccaaacggaacgatagtgaaaacaatcacgaatgaccaaattgaagttactaatgctactgagctggttcagagttcctcaacaggtggaatatgcgacagtcctcatcagatccttgatggagaaaactgcacactaatagatgctctattgggagaccctcagtgtgatggcttccaaaataagaaatgggacctttttgttgaacgcagcaaagcctacagcaactgttacccttatgatgtgccggattatgcctcccttaggtcactaattgcctcatccggcacactggagtttaacaatgaaagcttcaattggactggagtcactcaaaatggaacaagctctgcttgcaaaaggagatctaatagcagtttctttagtagattgaattggttgacccacttaaaattcaaatacccagcattgaacgtgactatgccaaacaatgaagaatttgacaaattgtacatttggggggttcaccacccgggtacatacaatgaccaaatcagcctatatgctcaagcatcaggaagaatcacagtctctaccaaaagaagccaacaaactgtaatcccgaatatcgggtctagacccagggtaagggatatccccagcagaataagcatctattggacaatagtaaaaccgggagacatacttttgattaacagcacagggaatctaattgctcctcggggttacttcaaaatacgaagtgggaaaagctcaataatgagatcagatgcacccattggaaaatgcaattctgaatgcatcactccaaatggaagcattcccaatgacaaaccatttcaaaatgtaaacaggatcacatatggggcctgtcccagatatgttaagcaaaacactctgaaattggcaacagggatgcgaaatgtaccagagaaacaaactagaggcatatttggcgcaatcgcgggtttcatagaaaatggttgggagggaatggtggatggttggtacggtttcaggcatcaaaattctgagggaataggacaagcagcagatctcaaaagcactcaagcagcaatcgaccaaatcaatgggaagctgaataggttgatcgggaaaaccaacgagaaattccatcagattgaaaaagaattctcagaagtagaagggagaattcaggacctcgagaaatatgttgaggacactaaaatagatctctggtcatacaacgcggagcttcttgttgccctggagaaccaacatacaattgatctaactgactcagaaatgaacaaactgtttgaaagaacaaagaagcaactgagggaaaatgctgaggatatgggcaatggttgtttcaaaatataccacaaatgtgacaatgcctgcatagggtcaatcagaaatggaacttatgaccatgatgtatacagagatgaagcattaaacaaccggttccagatcaaaggtgttgagctgaagtcaggatacaaagattggatcctatggatttcctttgccatatcatgttttttgctttgtgttgctttgttggggttcatcatgtgggcctgccaaaaaggcaacattaggtgcaacatttgcatttga

SEQ ID NO: 32311 - RNA, 1701 nt, synthetic construct
  misc_feature 1..1701: note = hemagglutinin__InfluenzaA__ABU92658
  source 1..1701: mol_type = other RNA
atgaagactatcattgctttgagctacattctatgtctggttttcgctcaaaaacttcccggaaatgacaacagcacggcaacgctgtgccttgggcaccatgcagtaccaaacggaacgatagtgaaaacaatcacgaatgaccaaattgaagttactaatgctactgagctggttcagatttcctcaacaggtgaaatatgcgacagtccccatcagatccttgatggagaaaactgcacactaatagatgctctattgggagaccctcagtgtgatggcttccaaaataagaaatgggacctttttgttgaacgcagcaaagcctacagcaactgttacccttatgatgtgccggattatgcctcccttaggtcactagttgcctcatccggcacactggagtttaacaatgaaagcttcgattggactggagtcactcagaatggaacaagctctgcttgcaaaaggagatctgataaaagtttctttagtagattgaattggttgacccacttaaaatacaaatacccagcattgaacgtaactatgccaaacaatgaaaaatttgacaaattgtacatttggggggttcaccacccgggtacggacagtgaccaaatcagcctatatgctcaagcatcaggaagaatcacagtctctaccaaaagaagccaacaaactgtaatcccgaatatcggatctagacccagggtaagggatgtctccagccgaataagcatctattggacaatagtaaaaccgggagacatacttttgattaacagcacagggaatctaattgctcctcggggttacttcaaaatacgaagtgggaaaagctcaataatgagatcagatgcacccattggcaaatgcaattctgaatgcatcactccaaatggaagcattcccaatgacaaaccatttcaaaatgtaaacaggatcacatatggggcctgtcccagatatgttaagcaaaacactctgaaattggcaacagggatgcgaaatgtaccagagaaacaaactagaggcatatttggcgcaatcgcgggtttcatagaaaatggttgggagggaatggtggacggttggtacggtttcaggcatcaaaattctgagggcacaggacaagcagcagatctcaaaagcactcaagcagcaatcaaccaaatcaatgggaaactgaataggttaatcgggaaaacaaacgagaaattccatcagattgaaaaagaattctcggaagtagaaggaagaattcaggacctcgagaaatatgttgaggacactaaaatagatctctggtcatacaacgcggagcttcttgttgccctggagaaccaacatacaattgatctaactgactcagaaatgaacaaactgtttgaaagaacaaagaagcaactgagggaaaatgctgaggatatgggcaatggttgtttcaaaatataccacaaatgtgacaatgcctgcatagggtcaatcagaaatggaacttatgaccatgatgtgtacagagatgaagcattaaacaaccggttccaaatcaaaggtgttgagttgaagtcaggatacaaagattggatcctatggatttcctttgccatatcatgttttttgctttgtgttgctttgttggggttcatcatgtgggcctgccaaaaaggcaacattaggtgcaacatttgcatttga

SEQ ID NO: 32312 - RNA, 1701 nt, synthetic construct
  misc_feature 1..1701: note = hemagglutinin__InfluenzaA__ABU92659
  source 1..1701: mol_type = other RNA
atgaagactatcattgctttgagctacattctatgtctggttttcgctcaaaaacttcccggaaatgacaacagcacggcaacgctgtgccttgggcaccatgcagtaccaaacggaacgatagtgaaaacaatcacgaatgaccaaattgaagttactaatgctactgagctggttcagagttcctcaacaggtggaatatgcgacagtcctcatcagatccttgatggagaaaactgcacactaatagatgctctattgggagaccctcagtgtgatggcttccaaaataagaaatgggacctttttgttgaacgcagcaaagcctacagcaactgttacccttatgatgtgccggattatgcctcccttaggtcactaattgcctcatccggcacactggagtttaacaatgaaagcttcaattggactggagtcactcaaaatggaacaagctctgcttgcaaaaggagatctaatagcagtttctttagtagattgaattggttgacccacttaaaattcaaatacccagcattgaacgtgactatgccaaacaatgaagaatttgacaaattatacatttggggggttcaccacccgggtacatacaatgaccaaatcagcctatatgctcaagcatcaggaagaatcacagtctctaccaaaagaagccaacaaactgtaatcccgaatatcgggtctagacccagggtaagggatatccccagcagaataagcatctattggacaatagtaaaaccgggagacatacttttgattaacagcacagggaatctaattgctcctcggggttacttcaaaatacgaagtgggaaaagctcaataatgagatcagatgcacccattggcaaatgcaattctgaatgcatcactccaaatggaagcattcccaatgacaaaccatttcaaaatgtaaacaggatcacatatggggcctgtcccagatatgttaagcaaaacactctgaaattggcaacagggatgcgaaatgtaccagagaaacaaactagaggcatatttggcgcaatcgcgggtttcatagaaaatggttgggagggaatggtggatggttggtatggtttcaggcatcaaaattctgagggaataggacaagcagcagatctcaaaagcactcaagcagcaatcgaccaaatcaatgggaagctgaataggttgatcgggaaaaccaacgagaaattccatcagattgaaaaagaattctcagaagtagaagggagaattcaggacctcgagaaatatgttgaggacactaaaatagatctctggtcatacaacgcggagcttcttgttgccctggagaaccaacatacaattgatctaactgactcagaaatgaacaaactgtttgaaagaacaaagaagcaactgagggaaaatgctgaggatatgggcaatggttgtttcaaaatataccacaaatgtgacaatgcctgcatagggtcaatcagaaatggaacttatgaccatgatgtatacagagatgaagcattaaacaaccggttccagatcaaaggtgttgagctgaagtcaggatacaaagattggatcctatggatttcctttgccatatcatgttttttgctttgtgttgctttgttggggttcatcatgtgggcctgccaaaaaggcaacattaggtgcaacatttgcatttga

SEQ ID NO: 32313 - RNA, 1701 nt, synthetic construct
  misc_feature 1..1701: note = hemagglutinin__InfluenzaA__ABU92660
  source 1..1701: mol_type = other RNA
atgaagactatcattgctttgagctacattctatgtctggttttcgctcaaaaacttcccggaaatgacaacagcacggcaacgctgtgccttgggcaccatgcagtaccaaacggaacgatagtgaaaacaatcacgaatgaccaaattgaagttactaatgctactgagctggttcagatttcctcaacaggtgaaatatgcgacagtccccatcagatccttgatggagaaaactgcacactaatagatgctctattgggagaccctcagtgtgatggcttccaaaataagaaatgggacctttttgttgaacgcagcaaagcctacagcaactgttacccttatgatgtgccggattatgcctcccttaggtcactagttgcctcatccggcacactggagtttaacaatgaaagcttcgattggactggagtcactcagaatggaacaagctctgcttgcaaaaggagatctgataaaagtttctttagtagattgaattggttgacccacttaaaatacaaatacccagcattgaacgtaactatgccaaacaatgaaaaatttgacaaattgtacatttggggggttcaccacccgggtacggacagtgaccaaatcagcctatatgctcaagcatcaggaagaatcacagtctctaccaaaagaagccaacaaactgtaatcccgaatatcggatctagacccagggtaagggatgtctccagccgaataagcatctattggacaatagtaaaaccgggagacatacttttgattaacagcacagggaatctaattgctcctcggggttacttcaaaatacgaagtgggaaaagctcaataatgagatcagatgcacccattggcaaatgcaattctgaatgcatcactccaaatggaagcattcccaatgacaaaccatttcaaaatgtaaacaggatcacatatggggcctgtcccagatatgttaagcaaaacactctgaaattggcaacagggatgcgaaatgtaccagagaaacaaactagaggcatatttggcgcaatcgcgggtttcatagaaaatggttgggagggaatggtggacggttggtacggtttcaggcatcaaaattctgagggcacaggacaagcagcagatctcaaaagcactcaagcagcaatcaaccaaatcaatgggaaactgaataggttaatcgggaaaacaaacgagaaattccatcagattgaaaaagaattctcggaagtagaaggaagaattcaggacctcgagaaatatgttgaggacactaaaatagatctctggtcatacaacgcggagcttcttgttgccctggagaaccaacatacaattgatctaactgactcagaaatgaacaaactgtttgaaagaacaaagaagcaactgagggaaaatgctgaggatatgggcaatggttgtttcaaaatataccacaaatgtgacaatgcctgcatagggtcaatcagaaatggaacttatgatcatgatgtgtacagagatgaagcattaaacaaccggttccagatcaaaggtgttgagctgaagtcaggatacaaagattggatcctatggatttcctttgccatatcatgttttttgctttgtgttgctttgttggggttcatcatgtgggcctgccaaaaaggcaacattaggtgcaacatttgcatttga

SEQ ID NO: 32314 - RNA, 1701 nt, synthetic construct
  misc_feature 1..1701: note = hemagglutinin__InfluenzaA__ABU92661
  source 1..1701: mol_type = other RNA
atgaagactatcattgctttgagctacattctatgtctggttttcgctcaaaaacttcccggaaatgacaacagcacggcaacgctgtgccttgggcaccatgcagtaccaaacggaacgatagtgaaaacaatcacgaatgaccaaattgaagttactaatgctactgagctggttcagatttcctcaacaggtgaaatatgcgacagtccccatcagatccttgatggagaaaactgcacactaatagatgctctattgggagaccctcagtgtgatggcttccaaaataagaaatgggacctttttgttgaacgcagcaaagcctacagcaactgttacccttatgatgtgccggattatgcctcccttaggtcactagttgcctcatccggcacactggagtttaacaatgaaagcttcgattggactggagtcactcagaatggaacaagctctgcttgcaaaaggagatctgataaaagtttctttagtagattgaattggttgacccacttaaaatacaaatacccagcattgaacgtaactatgccaaacaatgaaaaatttgacaaattgtacatttggggggttcaccacccgggtacggacagtgaccaaatcagcctatatgctcaagcatcaggaagaatcacagtctctaccaaaagaagccaacaaactgtaatcccgaatatcggatctagacccagggtaagggatgtctccagccgaataagcatctattggacaatagtaaaaccgggagacatacttttgattaacagcacagggaatctaattgctcctcggggttacttcaaaatacgaagtgggaaaagctcaataatgagatcagatgcacccattggcaaatgcaattctgaatgcatcactccaaatggaagcattcccaatgacaaaccatttcaaaatgtaaacaggatcacatatggggcctgtcccagatatgttaagcaaaacactctgaaattggcaacagggatgcgaaatgtaccagagaaacaaactagaggcatatttggcgcaatcgcgggtttcatagaaaatggttgggagggaatggtggacggttggtacggtttcaggcatcaaaattctgagggcacaggacaagcagcagatctcaaaagcactcaagcagcaatcaaccaaatcaatgggaaactgaataggttaatcgggaaaacaaacgagaaattccatcagattgaaaaagaattctcggaagtagaaggaagaattcaggacctcgagaaatatgttgaggacactaaaatagatctctggtcatacaacgcggagcttcttgttgccctggagaaccaacatacaattgatctaactgactcagaaatgaacaaactgtttgaaagaacaaagaagcaactgagggaaaatgctgaggatatgggcaatggttgtttcaaaatataccacaaatgtgacaatgcctgcatagggtcaatcagaaatggaacttatgaccatgatgtgtacagagatgaagcattaaacaaccggttccagatcaaaggtgttgagttggagtcaggatacaaagattggatcctatggatttcctttgccatatcatgttttttgctttgtgttgctttgttggggttcatcatgtgggcctgccaaaaaggcaacattaggtgcaacatttgcatttga

SEQ ID NO: 32315 - RNA, 1701 nt, synthetic construct
  misc_feature 1..1701: note = hemagglutinin__InfluenzaA__ABU92662
  source 1..1701: mol_type = other RNA
atgaagactatcattgctttgagctacattctatgtctggttttcgctcaaaaacttcccggaaatgacaacagcacggcaacgctgtgccttgggcaccatgcagtaccaaacggaacgatagtgaaaacaatcacgaatgaccaaattgaagttactaatgctactgagctggttcagatttcctcaacaggtggaatatgcgacagtcctcatcagatccttgatggagaaaactgcacactaatagatgctctattgggagaccctcagtgtgatggcttccaaaataagaaatgggacctttttgttgaacgcagcaaagcctacagcaactgttacccttatgatgtgccggattatgcctcccttaggtcactagttgcctcatccggcacactggagtttaacaatgaaagcttcgattggactggagtcactcagaatggaacaagctctgcttgcaaaaggagatctaataaaagtttctttagtagattgaattggttgacccacttaaaatacaaatacccagcattgaacgtgactatgccaaacaatgaaaaatttgacaaattgtacatttggggggttcaccacccgggtacggacagtgaccaaatcagcctatatgctcaagcatcaggaagaatcacagtctctaccaaaagaagccaacaaactgtaatcccgaatatcggatctagacccagggtaagggatgtctccagccgaataagcatctattggacaatagtaaaaccgggagacatacttttgattaacagcacagggaatctaattgctcctcggggttacttcaaaatacgaagtgggaaaagctcaataatgagatcagatgcacccattggcaaatgcaattctgaatgcatcactccaaatggaagcattcccaatgacaaaccatttcaaaatgtaaacaggatcacatatggggcctgtcccagatatgttaagcaaaacactctgaaattggcaacagggatgcgaaatgtaccagagaaacaaactagaggcatatttggcgcaatcgcgggtttcatagaaaatggttgggagggaatggtggacggttggtacggtttcaggcatcaaaattctgagggcacaggacaagcagcagatctcaaaagcactcaagcagcaatcaaccaaatcaatgggaaactgaataggttaatcgggaaaacaaacgagaaattccatcagattgaaaaagaattctcggaagtagaaggaagaattcaggacctcgagaaatatgttgaggacactaaaatagatctctggtcatacaacgcggagcttcttgttgccctggagaaccaacatacaattgatctaactgactcagaaatgaacaaactgtttgaaagaacaaagaagcaactgagggaaaatgctgaggatatgggcaatggttgtttcaaaatataccacaaatgtgacaatgcctgcatagggtcaatcagaaatggaacttatgaccatgatgtgtacagagatgaagcattaaacaaccggttccagatcaaaggtgttgagctgaagtcaggatacaaagattggatcctatggatttcctttgccatatcatgttttttgctttgtgttgctttgttggggttcatcatgtgggcctgccaaaaaggcaacattaggtgcaacatttgcatttga

SEQ ID NO: 32316 - RNA, 1701 nt, synthetic construct; identical to SEQ ID NO: 32266
  misc_feature 1..1701: note = hemagglutinin__InfluenzaA__ABU92663
  source 1..1701: mol_type = other RNA

SEQ ID NO: 32317 - RNA, 1701 nt, synthetic construct
  misc_feature 1..1701: note = hemagglutinin__InfluenzaA__ABU92664
  source 1..1701: mol_type = other RNA
atgaagactatcattgctttgagctacattctatgtctggttttcgctcaaaaacttcccggaaatgacaacagcacggcaacgctgtgccttgggcaccatgcagtaccaaacggaacgatagtgaaaacaatcacgaatgaccaaattgaagttactaatgctactgagctggttcagatttcctcaacaggtgaaatatgcgacagtccccatcagatccttgatggagaaaactgcacactaatagatgctctattgggagaccctcagtgtgatggcttccaaaataagaaatgggacctttttgttgaacgcagcaaagcctacagcaactgttacccttatgatgtgccggattatgcctcccttaggtcactagttgcctcatccggcacactggagtttaacaatgaaagcttcgattggactggagtcactcagaatggaacaagctctgcttgcaaaaggagatctgataaaagtttctttagtagattgaattggttgacccacttaaaatacaaatacccagcattgaacgtaactatgccaaacaatgaaaaatttgacaaattgtacatttggggggttcaccacccgggtacggacagtgaccaaatcagcctatatgctcaagcatcaggaagaatcacagtctctaccaaaagaagccaacaaactgtaatcccgaatatcggatctagacccagggtaagggatgtctccagccgaataagcatctattggacaatagtaaaaccgggagacatacttttgattaacagcacagggaatctaattgctcctcggggttacttcaaaatacgaagtgggaaaagctcaataatgagatcagatgcacccattggcaaatgcaattctgaatgcatcactccaaatggaagcattcccaatgacaaaccatttcaaaatgtaaacaggatcacatatggggcctgtcccagatatgttaagcaaaacactctgaaattggcaacagggatgcgaaatgtaccagagaaacaaactagaggcatatttggcgcaatcgcgggtttcatagaaaatggttgggagggaatggtggacggttggtacggtttcaggcatcaaaattctgagggcacaggacaagcagcagatctcaaaagcactcaagcagcaatcaaccaaatcaatgggaaactgaataggttaatcgggaaaacaaacgagaaattccatcagattgaaaaagaattctcggaagtagaaggaagaattcaggacctcgagaaatatgttgaggacactaaaatagatctctggtcatacaacgcggagcttcttgttgccctggagaaccaacatacaattgatctaactgactcagaaatgaacaaactgtttgaaagaacaaagaagcaactgagggaaaatgctgaggatatgggcaatggttgtttcaaaatataccacaaatgtgacaatgcctgcatagggtcaatcagaaatggaacttatgaccatgatgtgtacagagatgaagcattaaacaaccggttccagatcaaaggtgttgagctgaagtcaggatacaaagattggatcctatggatttcctttgccatatcatgttttttgctttgtgttgctttgttggggttcatcatgtgggcctgccaaaaaggcaatattaggtgcaacatttgcatttga

SEQ ID NO: 32318 - RNA, 1701 nt, synthetic construct
  misc_feature 1..1701: note = hemagglutinin__InfluenzaA__ABU92665
  source 1..1701: mol_type = other RNA
atgaagactatcattgctttgagctacattctatgtctggttttcgctcaaaaacttcccggaaatgacaacagcacggcaacgctgtgccttgggcaccatgcagtaccaaacggaacaatagtgaaaacaatcacgaatgaccaaattgaagttactaatgctactgagctggttcagagttcctcaacaggtggaatatgcgacagtcctcatcagatccttgatggagaaaactgcacactaatagatgctctattgggagaccctcagtgtgatggcttccaaaataagaaatgggacctttttgttgaacgcagcaaagcctacagcaactgttacccttatgatgtgccggattatgcctcccttaggtcactagttgcctcatccggcacactggagtttaacaatgaaagcttcaattggactggagtcactcaaaatggaacaagctctgcttgcaaaaggagatctaataaaagtttctttagtagattgaattggttgacccacttaaaattcaaatacccagcattgaacgtgactatgccaaacaatgaaaaatttgacaaattgtacatttggggggttcaccacccgggtacggacaatgaccaaatcagcctatatgctcaagcatcaggaagaatcacagtctctaccaaaagaagccaacaaactgtaatcccgaatatcggatctagacccagggtaagggatgtccccagcagaataagcatctattggacaatagtaaaaccgggagacatacttttgattaacagcacagggaatctaattgctcctcggggttacttcaaaatacgaagtgggaaaagctcaataatgagatcagatgcacccattggcaaatgcaattctgaatgcatcactccaaatggaagcattcccaatgacaaaccatttcaaaatgtaaacaggatcacatatggggcctgtcccagatatgttacgcaaaacactctgaaattggcaacagggatgcgaaatgtaccagagaaacaaactagaggcatatttggcgcaatcgcgggtttcatagaaaatggttgggagggaatggtggacggttggtacggtttcaggcatcaaaattctgagggaacaggacaagctgcagatctcaaaagcactcaagcagcaatcaaccaaatcaatgggaagctgaataggttgatcggaaaaacaaacgagaaattccatcagattgaaaaagaattctcagaagtagaagggagaattcaggacctcgagaaatatgttgaggacactaaaatagatctctggtcatacaacgcggagcttcttgttgccctggagaaccaacatacaattgatctaactgactcagaaatgaacaaactgtttgaaagaacaaagaagcaactgagggaaaatgctgaggatatgggcaatggttgtttcaaaatataccacaaatgtgacaatgcctgcatagggtcaatcagaaatggaacttatgaccatgatgtatacagagatgaagcattaaacaaccggttccagatcaaaggtgttgagctgaagtcaggatacaaagattggatcctatggatttcctttgccatatcatgttttttgctttgtgttgctttgttggggttcatcatgtgggcctgccaaaaaggcaacattaggtgcaacatttgcatttga

SEQ ID NO: 32319 - RNA, 1701 nt, synthetic construct; identical to SEQ ID NO: 32266
  misc_feature 1..1701: note = hemagglutinin__InfluenzaA__ABU92666
  source 1..1701: mol_type = other RNA

SEQ ID NO: 32320 - RNA, 1701 nt, synthetic construct; identical to SEQ ID NO: 30850
  misc_feature 1..1701: note = hemagglutinin__InfluenzaA__ABU92667
  source 1..1701: mol_type = other RNA

SEQ ID NO: 32321 - RNA, 1701 nt, synthetic construct
  misc_feature 1..1701: note = hemagglutinin__InfluenzaA__ABU92668
  source 1..1701: mol_type = other RNA
atgaagactatcattgctttgagctacattttatgtctggttttcgctcaaaaacttcccgtaaatgacaacagcacggcaacgctatgcctgggacaccatgcagtgccaaacggaacgctagtgaaaacaatcacgaatgaccacattgaagtgactaatgctactgagctggttcagagttcctcaacaggtagaatatgcgacagtcctcaccaaatccttgatggagaaaactgcacactaatagatgctctattgggagaccctcattgtgatggcttccaaaataaggaatgggacctttttgttgaacgcagcacagcctacagcaactgttacccttatgatgtgccggattatgcctcccttaggtcactagttgcctcatccggcacactggagtttaacaatgaaagcttcaattggactggagtcgctcagaatggaacaagctctgcttgcaaaaggagatctattaaaagtttctttagtagattgaattggttgcaccaattaaaatacaaatacccagcactgaacgtgactatgccaaacaatgaaaaatttgacaaattgtacatttggggggttcaccacccgagtacggacagtgaccaaatcagcctatatgctcaagcatcagggagagtcacagtctctaccaaaagaagccaacaaactgtaatcccgaatatcggatctagaccctgggtaaggggtgtctccagcagaataagcatctattggacaatagtaaaaccgggagacatacttttgattaacagcacagggaatctaattgctcctcggggttactttaaaatacgaagtgggaaaagctcaataatgaggtcaaatgcacccattggcaaatgcaattctgaatgcatcactccaaatggaagcattcccaatgacaaaccatttcaaaatgtaaacaggatcacatatggggcctgtcccagatatgttaagcaaaacactctgaaattggcaacagggatgcggaatgtaccagagaaacaaactagaggcatattcggcgcaatcgcgggtttcatagaaaatggttgggagggaatggtggacggttggtacggtttcaggcatcaaaattcggagggcacaggacaagcagcagatcttaaaagcactcaagcagcaatcaaccaaatcaacgggaaactgaataggttaatcgagaaaacaaacgagaaattccatcaaattgaaaaagaattctcagaagtagaagggagaattcaggacctcgagaaatatgttgaggacactaaaatagatctctggtcgtacaacgcggagcttcttgttgccctggagaaccaacatacaattgatctaactgactcagaaatgaacaaactgtttgaaagaacaaggaagcaactgagggaaaatgctgaggatatgggcaatggttgtttcaaaatataccacaaatgtgacaatgcctgcatagggtcaatcagaaatggaacttatgaccatgatgtatacagagacgaagcattaaacaaccggttccagatcaaaggtgttgagctgaagtcaggatacaaagattggatcctatggatttcctttgccatatcatgttttttgctttgtgttgttttgctggggttcatcatgtgggcctgccaaaaaggcaacattaggtgcaacatttgcatttga

SEQ ID NO: 32322 - RNA, 1701 nt, synthetic construct
  misc_feature 1..1701: note = hemagglutinin__InfluenzaA__ABU92669
  source 1..1701: mol_type = other RNA
atgaagactatcattgctttgagctacattttatgtctggttttcgctcaaaaacttcccgtaaatgacaacagcacggcaacgctgtgcctgggacaccatgcagtgccaaacggaacgctagtgaaaacaatcacgaatgaccacattgaagtgactaatgctactgagctggttcagagttcctcaacaggtagaatatgcgacagtcctcaccaaatccttgatggagaaaactgcacactaatagatgctctattgggagaccctcattgtgatggcttccaaaataaggaatgggacctttttgttgaacgcagcacagcctacagcaactgttacccttatgatgtgccggattatgcctcccttaggtcactagttgcctcatccggcacactggagtttaacaatgaaagcttcaattggactggagtcgctcagaatggaacaagctctgcttgcaaaaggagatctattaaaagtttctttagtagattgaattggttgcaccaattaaaatacaaatatccagcactgaacgtgactatgccaaacaatgaaaaatttgacaaattgtacatttggggggttcaccacccgagtacggacagtgaccaaatcagcctatatgctcaagcatcagggagagtaacagtctctaccaaaagaagccaacaaactgtaatcccgaatatcggatctagaccctgggtaaggggtgtctccagcagaataagcatctattggacaatagtaaaaccgggagacatacttttgattaacagcacagggaatctaattgctcctcggggttactttaaaatacgaaatgggaaaagctcaataatgaggtcaaatgcacccattggcaaatgcaattctgaatgcatcactccaaatggaagcattcccaatgacaaaccatttcaaaatgtaaacaggatcacatatggggcctgtcccagatatgttaagcaaaacactctgaaattggcaacagggatgcggaatgtaccagagaaacaaactagaggcatattcggcgcaatcgcgggtttcatagaaaatggttgggagggaatggtggacggttggtacggtttcaggcatcaaaattctgagggcacaggacaagcagcagatcttaaaagcactcaagcagcaatcaaccaaatcaacgggaaactgaataggttaatcgagaaaacaaacgagaaattccatcaaattgaaaaagaattctcagaagtagaagggagaattcaggacctcgagaaatatgttgaggacactaaaatagatctctggtcgtacaacgcggagcttcttgttgccctggagaaccaacatacaattgatctaactgactcagaaatgaacaaactgtttgaaagaacaaggaagcaactgagggaaaatgctgaggatatgggcaatggttgtttcaaaatataccacaaatgtgacaatgcctgcatagggtcaatcagaaatggaacttatgaccatgatgtatacagagacgaagcattaaacaaccggttccagatcaaaggtgttgagctgaagtcaggatacaaagattggatcctatggatttcctttgccatatcatgttttttgctttgtgttgttttgctggggttcatcatgtgggcctgccaaaaaggcaacattaggtgcaacatttgcatttga

SEQ ID NO: 32323 - RNA, 1701 nt, synthetic construct
  misc_feature 1..1701: note = hemagglutinin__InfluenzaA__ABU92670
  source 1..1701: mol_type = other RNA
atgaagactatcattgctttgagctacattttatgtctggttttcgctcaaaaacttcccgtaaatgacaacagcacggcaacgctgtgcctgggacaccatgcagtgccaaacggaacgctagtgaaaacaatcacgaatgaccacattgaagtgactaatgctactgagctggttcagagttcctcaacaggtagaatatgcgacagtcctcaccaaatccttgatggagaaaactgcacactaatagatgctctattgggagaccctcattgtgatggcttccagaataaggaatgggacctttttgttgaacgcagcacagcctacagcaactgttacccttatgatgtaccggattatgcctcccttaggtcactagttgcctcatccggcacactggagtttaacaatgaaagcttcaattggactggagtcgctcagaatggaacaagctctgcttgcaaaaggagatctattaaaagtttctttagtagattgaattggttgcaccaattaaaatacaaatatccagcactgaacgtgactatgccaaacaatgaaaaatttgacaaattgtacatttggggggttcaccacccgagtacggacagtgaccaaatcagcctatatgctcaagcatcagggagagtcacagtctctaccaaaagaagccaacaaactgtaatcccgaatatcggatctagaccctgggtaaggggtgtctccagcagaataagcatctattggacaatagtaaaaccgggagacatacttttgattaacagcacagggaatctaattgctcctcggggttactttaaaatacgaagtgggaaaagctcaataatgaggtcaaatgcacccattggcaaatgcaattctgaatgcatcactccaaatggaagcattcccaatgacaaaccatttcaaaatgtaaacaggatcacatatggggcctgtcccagatatgttaagcaaaacactctgaaattggcaacagggatgcggaatgtaccagagaaacaaactagaggcatattcggcgcaatcgcgggtttcatagaaaatggttgggagggaatggtggacggttggtacggtttcaggcatcaaaattctgagggcacaggacaagcagcagatcttaaaagcactcaagcagcaatcaaccaaatcaacgggaaactgaatagattaatcgagaaaacaaacgagaaattccatcaaattgaaaaagaattctcagaagtagaagggagaattcaggacctcgagaaatatgttgaggacactaaaatagatctctggtcgtacaacgcggagcttcttgttgccctggagaaccaacatacaattgatctaactgactcagaaatgaacaaactgtttgaaagaacaaggaagcaactgagggaaaatgctgaggatatgggcaatggttgtttcaaaatataccacaaatgtgacaatgcctgcatagggtcaatcagaaatggaacttatgaccatgatgtatacagagacgaagcattaaacaaccggttccagatcaaaggtgttgagctgaagtcaggatacaaagattggatcctatggatttcctttgccatatcatgttttttgctttgtgttgttttgctggggttcatcatgtgggcctgccaaaaaggcaacattaggtgcaacatttgcatttga

SEQ ID NO: 32324 - RNA, 1701 nt, synthetic construct
  misc_feature 1..1701: note = hemagglutinin__InfluenzaA__ABU92671
  source 1..1701: mol_type = other RNA
atgaagactatcattgctttgagccacattttatgtctggttttcgctcaaaaacttcccgtaaatgataacagcacggcaacgctatgcctgggacaccatgcagtgccaaacggaacgctagtgaaaacaatcacgaatgaccacattgaagtgactaatgctactgagctggttcagagttcctcaacaggtagaatatgcgacattcctcaccaaatccttgatggagaaaactgcacactaatagatgctctattgggagaccctcattgtgatggcttccaaaataaggaatgggacctttttgttgaacgcagcacagcctacagcaactgttacccttatgatgtgccggattatgcctcccttaggtcactagttgcctcatccggcacactggagtttaacaatgaaagcttcaattggactggagtcgctcagaatggaacaagctctgcttgcaaaaggagatctattaaaagtttctttagtagattgaattggttgcaccaattaaaatacaaatatccagcactgaacgtgactatgccaaacaatgaaaaatttgacaaattgtacatttggggggttcaccacccgagtacggacagtgaccaaatcagcctatatgctcaagcaccagggagagtcacagtctctaccaaaagaagccaacaaactgtaatcccgaatatcggatctagaccctgggtaaggggtgtctccagcagaataagcatctattggacaatagtaaaaccgggagacatacttttgattaacagcacagggaatctaattgctcctcggggttacttcaaaatacgaagtgggaaaagctcaataatgaggtcaaatgcacccattggcaaatgcaattctgaatgcatcactccaaatggaagcattcccaatgacaaaccatttcaaaatgtaaacaggatcacatatggggcctgtcccagatatgttaagcaaaacactctgaaattggcaacagggatgcggaatgtaccagagaaacaaactagaggcatattcggcgcaatcgcgggtttcatagaaaatggttgggagggaatggtggacggttggtacggtttcaggcatcaaaattctgagggcacaggacaagcagcagatcttaaaagcactcaagcagcaatcaaccaaatcaacgggaaactgaataggttaatcgagaaaacaaacgagaaattccatcaaattgaaaaagaattctcagaagcagaagggagaattcaggacctcgagaaatatgttgaggacactaaaatagatctctggtcgtacaacgcggagcttcttgttgccctggagaaccaacatacaattgatctaactgactcagaaatgaacaaactgtttgaaagaacaaggaagcaactgagggaaaatgctgaggatatgggcaatggttgtttcaaaatataccacaaatgtgacaatgcctgcatagggtcaatcagaaatggaacttatgaccatgatgtatacagagacgaagcattaaacaaccggttccagatcaaaggtgttgagctgaagtcaggatacaaagattggatcctatggatttcctttgccatatcatgttttttgctttgtgttgttttgctggggttcatcatgtgggcctgccaaaaaggcaacattaggtgcaacatttgcatttga

SEQ ID NO: 32325 - RNA, 1701 nt, synthetic construct
  misc_feature 1..1701: note = hemagglutinin__InfluenzaA__ABU92672
  source 1..1701: mol_type = other RNA
atgaagactatcattgctttgagctacattttatgtctggttttcgctcaaaaacttcccgtaaatgacaacagcacggcaacgctgtgcctgggacaccatgcagtgccaaacggaacgctagtgaaaacaatcacgaatgaccacattgaagtgactaatgctactgagctggttcagagttcctcaacaggtagaatatgcgacagtcctcaccaaatccttgatggagaaaactgcacactaatagatgctctattgggagaccctcattgtgatggcttccaaaataaggaatgggacctttttgttgaacgcagcacagcctacagcaactgttacccttatgatgtgccggattatgcctcccttaggtcactagttgcctcatccggcacactggagtttaacaatgaaagcttcaattggactggagtcgctcagaatggaacaagctctgcttgcaaaaggagatctattaaaagtttctttagtagattgaattggttgcaccaattaaaatacaaatatccagcactgaacgtgactatgccaaacaatgaaaaatttgacaaattgtacatttggggggttcaccacccgagtacggacagtgaccaaatcagcctatatgctcaagcatcagggagagtcacagtctctaccaaaagaagccaacaaactgtaatcccgaatatcggatctagaccctgggtaaggggtgtctccagcagaataagcatctattggacaatagtaaaaccgggagacatacttttgattaacagcacagggaatctaattgctcctcggggttactttaaaatacgaagtgggaaaagctcaataatgaggtcaaatgcacccattggcaaatgcaattctgaatgcatcactccaaatggaagcattcccaatgacaaaccatttcaaaatgtaaacaggatcacatatggggcctgtcccagatatgttaagcaaaacactctgaaattggcaacagggatgcggaatgtaccagagaaacaaactagaggcatattcggcgcaatcgcgggtttcatagaaaatggttgggagggaatggtggacggttggtacggtttcaggcatcaaaattctgagggcacaggacaagcagcagatcttaaaagcactcaagcagcaatcaaccaaatcaacgggaaactgaataggttaatcgagaaaacaaacgagaaattccatcaaattgaaaaagaattctcagaagtagaagggagaattcaggacctcgagaaatatgttgaagacactaaaatagatctctggtcgtacaacgcggagcttcttgttgccctggagaaccaacatacaattgatctaactgactcagaaatgaacaaactgtttgaaagaacaaggaagcaactgagggaaaatgctgaggatatgggcaatggttgtttcaaaatataccacaaatgtgacaatgcctgcatagggtcaatcagaaatggaacttatgaccatgatgtatacagagacgaagcattaaacaaccggttccagatcaaaggtgttgagctgaagtcaggatacaaagattggatcctatggatttcctttgccatatcatgttttttgctttgtgttgttttgctggggttcatcatgtgggcctgccaaaaaggcaacattaggtgcaacatttgcatttga

SEQ ID NO: 32326 - RNA, 1701 nt, synthetic construct; identical to SEQ ID NO: 30576
  misc_feature 1..1701: note = hemagglutinin__InfluenzaA__ABU92673
  source 1..1701: mol_type = other RNA

SEQ ID NO: 32327 - RNA, 1701 nt, synthetic construct
  misc_feature 1..1701: note = hemagglutinin__InfluenzaA__ABU92674
  source 1..1701: mol_type = other RNA
atgaagactatcattgctttgagctacattttatgtctggttttcgctcaaaaacttcccgtaaatgacaacagcacggcaacgctgtgcctgggacaccatgcagtgccaaacggaacgctagtgaaaacaatcacgaatgaccacattgaagtgactaatgctactgagctggttcagagttcctcaacaggtagaatatgcgacagtcctcaccaaatccttgatggagaaaactgcacactaatagatgctctattgggagaccctcattgtgatggcttccaaaataaggaatgggacctttttgttgaacgcagaacagcctacagcaactgttacccttatgatgtgccggattatgcctcccttaggtcactagttgcctcatccggcacactggagtttaacaatgaaagcttcaattggactggagtcgctcagaatggaacaagctctgcttgcaaaaggagatctattaaaagtttctttagtagattgaattggttgcaccaattaaaatacaaatatccagcactgaacgtgactatgccaaacaatgaaaaatttgacaaattgtacatttggggggttcaccacccgagtacggacagtgaccaaatcagcctatatgctcaagcatcagggagagtcacagtctctaccaaaagaagccaacaaactgtaatcccgaatatcggatctagaccctgggtaaggggtgtctccagcagaataagcatctattggacaatagtaaaaccgggagacatacttttgattaacagcacagggaatctaattgctcctcggggttactttaaaatacgaagtgggaaaagctcaataatgaggtcaaatgcacccattggcaaatgcaattctgaatgcatcactccaaatggaagcattcccaatgacaaaccatttcaaaatgtaaacaggatcacatatggggcctgtcccagatatgttaagcaaaacactctgaaattggcaacagggatgcggaatgtaccagagaaacaaactagaggcatattcggcgcaatcgcgggtttcatagaaaatggttgggagggaatggtggacggttggtacggtttcaggcatcaaaattctgagggcacaggacaagcagcagatcttaaaagcactcaagcagcaatcaaccaaatcaacgggaaactgaataggttaatcgagaaaacaaacgagaaattccatcaaattgaaaaagaattctcagaagtagaagggagaattcaggacctcgagaaatatgttgaggacactaaaatagatctctggtcgtacaacgcggagcttcttgttgccctggagaaccaacatacaattgatctaactgactcagaaatgaacaaactgtttgaaagaacaaggaagcaactgagggaaaatgctgaggatatgggcaatggttgtttcaaaatataccacaaatgtgacaatgcctgcatagggtcaatcagaaatggaacttatgaccatgatgtatacagagacgaagcattaaacaaccggttccagatcaaaggtgttgagctgaagtcaggatacaaagattggatcctatggatttcctttgccatatcatgttttttgctttgtgttgttttgctggggttcatcatgtgggcctgccaaaaaggcaacattaggtgcaacatttgcatttga

SEQ ID NO: 32328 - RNA, 1701 nt, synthetic construct
  misc_feature 1..1701: note = hemagglutinin__InfluenzaA__ABU92675
  source 1..1701: mol_type = other RNA
atgaagactatcattgctttgagctacattctatgtctggttttcgctcaaaaacttcccggaaatgacaacagcacggcaacgctgtgccttgggcaccatgcagtaccaaacggaacgatagtgaaaacaatcacgaatgaccaaattgaagttactaatgctactgagctggttcagagttcctcaacaggtggaatatgcgacagtcctcatcagatccttgatggagaaaactgcacactaatagatgctctattgggagaccctcagtgtgatggcttccaaaataagaaatgggacctttttgttgaacgcagcaaagcctacagcaactgttacccttatgatgtgccggattatgcctcccttaggtcactaattgcctcatccggcacactggagtttaacaatgaaagcttcaattggactggagtcactcaaaatggaacaagctctgcttgcaaaaggagatctaatagcagtttctttagtagattgaattggttgacccacttaaaattcaaatacccagcattgaacgtgactatgccaaacaatgaagaatttgacaaattatacatttggggggttcaccacccgggtacagacaatgaccaaatcagcctatatgctcaagcatcaggaagaatcacagtctctaccaaaagaagccaacaaactgtaatcccgaatatcgggtctagacccagggtaagggatatccccagcagaataagcatctattggacaatagtaaaaccgggagacatacttttgattaacagcacagggaatctaattgctcctcggggttacttcaaaatacgaagtgggaaaagctcaataatgagatcagatgcacccattggcaaatgcaattctgaatgcatcactccaaatggaagcattcccaatgacaaaccatttcaaaatgtaaacaggatcacatatggggcctgtcccagatatgttaagcaaaacactctgaaattggcaacagggatgcgaaatgtaccagagaaacaaactagaggcatatttggcgcaatcgcgggtttcatagaaaatggttgggagggaatggtggatggttggtacggtttcaggcatcaaaattctgagggaataggacaagcagcagatctcaaaagcactcaagcagcaatcgaccaaatcaatgggaagctgaataggttgatcgggaaaaccaacgagaaattccatcagattgaaaaagaattctcagaagtagaagggagaattcaggacctcgagaaatatgttgaggacactaaaatagatctctggtcatacaacgcggagcttcttgttgccctggagaaccaacatacaattgatctaactgactcagaaatgaacaaactgtttgaaagaacaaagaagcaactgagggaaaatgctgaggatatgggcaatggttgtttcaaaatataccacaaatgtgacaatgcctgcatggggtcaatcagaaatggaacttatgaccatgatgtatacagagatgaagcattaaacaaccggttccagatcaaaggtgttgagctgaagtcaggatacaaagattggatcctatggatttcctttgccatatcatgttttttgctttgtgttgctttgttggggttcatcatgtgggcctgccaaaaaggcaacattaggtgcaacatttgcatttga

SEQ ID NO: 32329 - RNA, 1701 nt, synthetic construct; identical to SEQ ID NO: 32310
  misc_feature 1..1701: note = hemagglutinin__InfluenzaA__ABU92676
  source 1..1701: mol_type = other RNA

SEQ ID NO: 32330 - RNA, 1701 nt, synthetic construct; identical to SEQ ID NO: 32258
  misc_feature 1..1701: note = hemagglutinin__InfluenzaA__ABU92677
  source 1..1701: mol_type = other RNA

SEQ ID NO: 32331 - RNA, 1701 nt, synthetic construct
  misc_feature 1..1701: note = hemagglutinin__InfluenzaA__ABU92678
  source 1..1701: mol_type = other RNA
atgaagactatcattgctttgagctacattctatgtctggttttcgctcaaaaacttcccggaaatgacaacagcacggcaacgctgtgccttgggcaccatgcagtaccaaacggaacgatagtgaaaacaatcacgaatgaccaaattgaagttactaatgctactgagctggttcagagttcctcaacaggtggaatatgcgacagtcctcatcagatccttgatggagaaaactgcacactaatagatgctctactgggagaccctcagtgtgatggcctccaaaacaagaaatgggacctttttgttgaacgcagcaaagcctacagcaactgttacccttatgatgtgccggattatgcctcccttaggtcactaattgcctcatccggcacactggagtttaacaatgagagcttcaattggactggagtcactcaaaatggaacaagctctgcttgcaaaaggagatctaataacagtttctttagtagattgaattggttgacccacttaaaattcaaatacccagcattgaacgtgactatgccaaacaatgaagaatttgacaaattgtacatttggggggttcaccacccgggtacggacaatgaccaaatcagcctatatgctcaagcatcaggaagaatcacagtctctaccaaaagaagccaacaaactgtaatcccgaatatcggatctagaccccgggtaagggatatccccagcagaataagcatctattggacaatagtaaaaccgggagacatacttttgattaacagcacagggaatctaattgctcctcggggttacttcaaaatacgaagtgggaaaagctcaataatgagatcagatgcacccattggcaattgcaattctgaatgcatcactccaaatggaagcattcccaatgacaaaccatttcaaaatgtaaacaggatcacatatggggcctgtcccagatatgttaagcaaaacactctgaaattggcaacagggatgcgaaatgtaccagagaaacaaactagaggcatatttggcgcaatcgcgggtttcatagaaaatggttgggagggaatggtggatggttggtacggtttcaggcatcaaaattctgagggaataggacaagcagcagatctcaaaagcactcaagcagcaatcgaccaaatcaatgggaagctgaataggttgatcgggaaaaccaacgagaaattccatcagattgaaaaagaattctcagaagtagaagggagaattcaggacctcgagaaatatgttgaggacactaaaatagatctctggtcatacaacgcggagcttcttgttgccctggagaaccaacatacaattgatctaactgactcagaaatgaacaaactgtttgaaagaacaaagaagcaactgagggaaaatgctgaggatatgggcaatggttgtttcaaaatataccacaaatgtgacaatgcctgcatagggtcaatcagaaatggaacttatgaccatgatgtatacagagatgaagcactaaacaaccggttccagatcaaaggtgttgagctgaagtcaggatacaaagattggatcctatggatttcctttgccatatcatgttttttgctttgtgttgctttgttggggttcatcatgtgggcctgccaaaaaggcaacattaggtgcaacatttgcatttga

SEQ ID NO: 32332 - RNA, 1701 nt, synthetic construct
  misc_feature 1..1701: note = hemagglutinin__InfluenzaA__ABU92680
  source 1..1701: mol_type = other RNA
atgaagactatcattgctttgagctacattctatgtctggttttcgctcaaaaacttcccggaaatgacaacagcacggcaacgctgtgccttgggcaccatgcagtaccaaacggaacgatagtgaaaacaatcacgaatgaccaaattgaagttactaatgctactgagctggttcagagttcctcaacaggtggaatatgcgacagtcctcatcagatccttgatggagaaaactgcacactaatagatgctctattgggagaccctcagtgtgatggcttccaaaataagaaatgggacctttttgttgaacgcagcaaagcctacagcaactgttacccttatgatgtgccggattatgcctcccttaggtcactagttgcctcatccggcacactggagtttaacaatgaaagcttcaattggactggagtcactcaaaacggaacaagctctgcttgcaaaaggagatctaataacagtttctttagtagattgaattggttgacccacttaaaattcaaatacccagcattgaacgtgactatgccaaacaatgaaaaatttgacaaattgtacatttggggggttcaccacccgggtacggacaatgaccaaatcttcctgtatgctcaagcatcaggaagaatcacagtctctaccaaaagaagccaacaaactgtaatcccgaatatcggatctagacccagagtaaggaatatccccagcagaataagcatctattggacaatagtaaaaccgggagacatacttttgattaacagcacagggaatctaattgctcctaggggttacttcaaaatacgaagtgggaaaagctcaataatgagatcagatgcacccattggcaaatgcaattctgaatgcatcactccaaatggaagcattcccaatgacaaaccatttcaaaatgtaaacaggatcacatacggggcctgtcccagatatgttaagcaaaacactctgaaattggcaacagggatgcgaaatgtaccagagaaacaaactagaggcatatttggcgcaatcgcgggtttcatagaaaatggttgggagggaatggtggatggttggtacggtttcaggcatcaaaattctgagggaataggacaagcagcagatctcaaaagcactcaagcagcaatcgatcaaatcaatgggaagctgaataggttgatcgggaaaaccaacgagaaattccatcagattgaaaaagaattctcagaagtagaagggagaattcaggacctcgagaaatatgttgaggacactaaaatagatctctggtcatacaacgcggagcttcttgttgccctggagaaccaacatacaattgatctaactgactcagaaatgaacaaactgtttgaaaaaacaaagaagcaactgagggaaaatgctgaggatatgggcaatggttgtttcaaaatataccacaaatgtgacaatgcctgcataggatcaatcagaaatggaacttatgaccatgatgtatacagagatgaagcattaaacaaccggttccagatcaagggcgttgagctgaagtcaggatacaaagattggatcctatggatttcctttgccatatcatgttttttgctttgtgttgctttgttggggttcatcatgtgggcctgccaaaaaggcaacattaggtgcaacatttgcatttga

SEQ ID NO: 32333 - RNA, 1701 nt, synthetic construct
  misc_feature 1..1701: note = hemagglutinin__InfluenzaA__ABU92681
  source 1..1701: mol_type = other RNA
atgaagactatcattgctttgagctacattctatgtctggttttcgctcaaaaacttcccgaaaatgacaacagcacggcaacgctgtgccttgggcaccatgcagtaccaaacggaacgatagtgaaaacaatcacgaatgaccaaattgaagttactaatgctactgagctggttcagagttcctcaacaggtggaatatgcgacagtcctcatcagatccttgatggagaaaactgcacactaatagatgctctattgggagaccctcagtgtgatggcttccaaaataagaaatgggacctttttgttgaacgcagcaaagcctacagcaactgttacccttatgatgtgccggattatgcctcccttaggtcactagttgcctcatccggcacactggagtttaacaatgaaagcttcaattggactggagtcactcaaaacggaacaagctctgcttgcaaaaggagatctaataacagtttctttagtagattgaattggttgacccacttaaaattcaaatacccagcattgaacgtgactatgccaaacaatgaaaaatttgacaaattgtacatttggggggttcaccacccgggtacggacaatgaccaaatcttcctgtatgctcaagcatcaggaagaatcacagtctctaccaaaagaagccaacaaactgtaatcccgaatatcggatctagacccagagtaaggaatatccccagcagaataagcatctattggacaatagtaaaaccgggagacatacttttgattaacagcacagggaatctaattgctcctaggggttacttcaaaatacgaagtgggaaaagctcaataatgagatcagatgcacccattggcaaatgcaattctgaatgcatcactccaaatggaagcattcccaatgacaaaccatttcaaaatgtaaacaggatcacatatggggcctgtcccagatatgttaagcaaaacactctgaaattggcaacagggatgcgaaatgtaccagagaaacaaactagaggcatatttggcgcaatcgcgggtttcatagaaaatggttgggagggaatggtggatggttggtacggtttcagacatcaaaattctgagggaataggacaagcagcagatctcaaaagcactcaagcagcaatcgatcaaatcaatgggaagctgaataggttgatcgggaaaaccaacgagaaattccatcagattgaaaaagaattctcagaagtagaagggagaattcaggacctcgagaaatatgttgaggacactaaaatagatctctggtcatacaacgcggagcttcttgttgccctggagaaccaacatacaattgatctaactgactcagaaatgaacaaactgtttgaaaaaacaaagaagcaactgagggaaaatgctgaggatatgggcaatggttgtttcaaaatataccacaaatgtgacaatgcctgcataggatcaatcagaaatggaacttatgaccatgatgtatacagagatgaagcattaaacaaccggttccagatcaagggcgttgagctgaagtcaggatacaaagattggatcctatggatttcctttgccatatcatgttttttgctttgtgttgctttgttggggttcatcatgtgggcctgccaaaaaggcaacattaggtgcaacatttgcatttga

SEQ ID NO: 32334 - RNA, 1701 nt, synthetic construct
  misc_feature 1..1701: note = hemagglutinin__InfluenzaA__ABU92682
  source 1..1701: mol_type = other RNA
atgaagactatcattgctttgagctacattctatgtctggttttcgctcaaaaacttcccggaaatgacaacagcacggcaacgctgtgccttgggcaccatgcagtaccaaacggaacgatagtgaaaacaatcacgaatgaccaaattgaagttactaatgctactgagctggttcagatttcctcaacaggtggaatatgcgacagtcctcatcagatccttgatggagaaaactgcacactaatagatgctctattgggagaccctcagtgtgatggcttccaaaataagaaatgggacctttttgttgaacgcagcaaagcctacagcaactgttacccttatgatgtgccggattatgcctcccttaggtcactagttgcctcatccggcacactggagtttaacaatgaaagcttcgattggactggagtcactcagaatggaacaagctctgcttgcaaaaggagatctaataaaagtttctttagtagattgaattggttgacccacttaaaatacaaatacccagcattgaacgtgactatgccaaacaatgaaaaatttgacaaattgtacatttggggggttcaccacccgggtacggacagtgaccaaatcagcctatatgctcaagcatcaggaagaatcacagtctctaccaaaagaagccaacaaactgtaatcccgaatatcggatctagacccagggtaagggatgtctccagccgaataagcatctattggacaatagtaaaaccgggagacatacttttgattaacagcacagggaatctaattgctcctcggggttacttcaaaatacgaagtgggaaaagctcaataatgagatcagatgcacccattggcaaatgcaattctgaatgcatcactccaaatggaagcattcccaatgacaaaccatttcaaaacgtaaacaggatcacatatggggcctgtcccagatatgttaagcaaaacactctgaaattggcaacagggatgcgaaatgtaccagagaaacaaactagaggcatatttggcgcaatcgcgggtttcatagaaaatggttgggagggaatggtggacggttggtacggtttcaggcatcaaaattctgagggcacaggacaagcagcagatctcaaaagcactcaagcagcaatcaaccaaatcaatgggaaactgaataggttaatcgggaaaacaaacgagaaattccatcagattgaaaaagaattctcggaagtagaaggaagaattcaggacctcgagaaatatgttgaggacactaaaatagatctctggtcatacaacgcggagcttcttgttgctctggagaaccaacatacaattgatctaactgactcagaaatgaacaaactgtttgaaagaacaaagaagcaactgagggaaaatgctgaggatatgggcaatggttgtttcaaaatataccacaaatgtgacaatgcctgcatagggtcaatcagaaatggaacttatgaccatgatgtgtacagagatgaagcattaaacaaccggttccagatcaaaggtgttgagctgaagtcaggatacaaagattggatcctatggatttcctttgccatatcatgttttttgctttgtgttgctttgttggggttcatcatgtgggcctgtcagaaaggcaacattaggtgcaacatttgcatttga

SEQ ID NO: 32335 - RNA, 1701 nt, synthetic construct; identical to SEQ ID NO: 32266
  misc_feature 1..1701: note = hemagglutinin__InfluenzaA__ABU92683
  source 1..1701: mol_type = other RNA

SEQ ID NO: 32336 - RNA, 1701 nt, synthetic construct
  misc_feature 1..1701: note = hemagglutinin__InfluenzaA__ABU92684
  source 1..1701: mol_type = other RNA
atgaagactatcattgctttgagctacattctatgtctggttttcgctcaaaaacttcccggaaatgacaacagcacggcaacgctgtgccttgggcaccatgcagtaccaaacggaacgatagtgaaaacaatcacgaatgaccaaattgaagttactaatgctactgagctggttcagatttcctcaacaggtggaatatgcgacagtcctcatcagatccttgatggagaaaactgcacactaatagatgctctattgggagaccctcagtgtgatggcttccaaaataagaaatgggacctttttattgaacgcagcaaagcctacagcaactgttacccttatgatgtgccggattatgcctcccttaggtcactagttgcctcatccggcacactggagtttaacaatgaaagcttcgattggactggagtcactcagaatggaacaagctctgcttgcaaaaggagatctaataaaagtttctttagtagattgaattggttgacccacttaaaatacaaatacccagcattgaacgtgactatgccaaacaatgaaaaatttgacaaattgtacatttggggggttcaccacccgggtacggacagtgaccaaatcagcctatatgctcaagcaccaggaagaatcacagtctctaccaaaagaagccaacaaactgtaatcccgaatatcggatctagacccagggtaagggatgtctccagccgaataagcatctattggacaatagtaaaaccgggagacatacttttgattaacagcacagggaatctgattgctcctcggggttacttcaaaatacgaagtgggaaaagctcaataatgagatcagatgcacccattggcaaatgcaattctgaatgcatcactccaaatggaagcattcccaatgacaaaccatttcaaaatgtaaacaggatcacatatggggcctgtcccagatatgttaagcaaaacactctgaaattggcaacagggatgcgaaatgtaccagagaaacaaactagaggcatatttggcgcaatcgcgggtttcatagaaaatggttgggagggaatggtggacggttggtacggtttcaggcatcaaaattctgagggcacaggacaagcagcagatctcaaaagcactcaagcagcaatcaaccaaatcaatgggaaactgaataggttaatcgggaaaacaaacgagaaattccatcagattgaaaaagaattctcggaagtagaaggaagaattcaggacctcgagaaatatgttgaggacactaaaatagatctctggtcatacaacgcggagcttcttgttgccctggagaaccaacatacaattgatctaactgactcagaaatgaacaaactgtttgaaagaacaaagaagcaactgagggaaaatgctgaggatatgggcaatggttgtttcaaaatataccacaaatgtgacaatgcctgcatagggtcaatcagaaatggaacttatgaccatgatgtgtacagagatgaagcattaaacaaccggtttcagatcaaaggtgttgagctgaagtcaggatacaaagattggatcctatggatttcctttgccatatcatgttttttgctttgtgttgctttgttggggttcatcatgtgggcctgccaaaaaggcaacattaggtgcaacatttgcatttga

SEQ ID NO: 32337 - RNA, 1701 nt, synthetic construct
  misc_feature 1..1701: note = hemagglutinin__InfluenzaA__ABU92685
  source 1..1701: mol_type = other RNA
atgaagactatcattgctttgagctacattctatgtctggttttcgctcaaaaacttcccggaaatgacaacagcacggcaacgctgtgccttgggcaccatgcagtaccaaacggaacgatagtgaaaacaatcacgaatgaccaaatcgaagttactaatgctactgagctggttcagatttcctcaacaggtggaatatgcgacagtcctcatcagatccttgatggagaaaactgcacactaatagatgctctattgggagaccctcagtgtgatggcttccaaaataagaaatgggacctttttgttgaacgcagcaaagcctacagcaactgttacccttatgatgtgccggattatgcctcccttaggtcactagttgcctcatccggcacactggagtttaacaatgaaagcttcgattggactggagtcactcagaatggaacaagctctgcttgcaaaaggagatctaataaaagtttctttagtagattgaattggttgacccacttaaaatacaaatacccagcattgaacgtgactatgccaaacaatgaaaaatttgacaaattgtacatttggggggttcaccacccgggtacggacagtgaccaaatcagcctatatgctcaagcatcaggaagaatcacagtctctaccaaaagaagccaacaaactgtaatcccgaatatcggatctagacccagggtaagggatgtctccagccgaataagcatctattggacaatagtaaaaccgggagacatacttttgattaacagcacagggaatctaattgctcctcggggttacttcaaaatacgaagtgggaaaagctcaataatgaaatcagatgcacccattggcaaatgcaattctgaatgcatcactccaaatggaagcattcccaatgacaaaccatttcaaaatgtaaacaggatcacatatggggcctgtcccagatatgttaagcaaaacactctgaaattggcaacagggatgcgaaatgtaccagagaaacaaactagaggcatatttggcgcaatcgcgggtttcatagaaaatggttgggagggaatggtggacggttggtacggtttcaggcatcaaaattctgagggcacaggacaagcagcagatctcaaaagcactcaagcagcaatcaaccaaatcaatgggaaactgaataggttaatcgggaaaacaaacgagaaattccatcagattgaaaaagaattctcggaagtagaagggagaattcaggacctcgagaaatatgttgaggacactaaaatagatctctggtcatacaacgcggagcttcttgttgccctggagaaccaacatacaattgatctaactgactcagaaatgaacaaactgtttgaaagaacaaagaagcaactgagggaaaatgctgaggatatgggcaatggttgtttcaaaatataccacaaatgtgacaatgcctgcatagggtcaatcagaaatggaacttatgaccatgatgtgtacagagatgaagcattaaacaaccggttccagatcaaaggtgttgagctgaagtcaggatacaaagattggatcctatggatttcctttgccatatcatgttttttgctttgtgttgctttgttggggttcatcatgtgggcctgccaaaaaggcaacattaggtgcaacatttgcatttga

SEQ ID NO: 32338 - RNA, 1701 nt, synthetic construct; identical to SEQ ID NO: 32284
  misc_feature 1..1701: note = hemagglutinin__InfluenzaA__ABU92686
  source 1..1701: mol_type = other RNA

SEQ ID NO: 32339 - RNA, 1701 nt, synthetic construct; identical to SEQ ID NO: 32266
  misc_feature 1..1701: note = hemagglutinin__InfluenzaA__ABU92687
  source 1..1701: mol_type = other RNA

SEQ ID NO: 32340 - RNA, 1701 nt, synthetic construct
  misc_feature 1..1701: note = hemagglutinin__InfluenzaA__ABU92688
  source 1..1701: mol_type = other RNA
atgaagactatcattgctttgagctacattctatgtctggttttcgctcaaaaactccccggaaatgacaacagcacggcaacgctgtgccttgggcaccatgcagtaccaaacggaacgatagtgaaaacaatcacgaatgaccaaattgaagttactaatgctactgagctggttcagagttcctcaacaggtggaatatgcgacagtcctcatcagatccttgatggagaaaactgcacactaatagatgctctattgggagaccctcagtgtgatggcttccaaaataagaaatgggacctttttgttgaacgcagcaaagcctacagcaactgttacccttatgatgtgccggattatgcctcccttaggtcactagttgcctcatccggcacactggagtttaacaatgaaagcttcaattggactggagtcactcaaaatggaacaagctctgcttgcaaaaggagatctaataaaagtttctttagtagattgaattggttgacccacttaaaattcaaatacccagcattgaacgtgactatgccaaacaatgaaaaatttgacaaattgtacatttggggggttcaccacccgggtacggacaatgaccaaatcagcctatatgcccaagcatcaggaagaatcacagtctctaccaaaagaagccaacaaactgtaatcccgaatatcggatctagacctagggtaagggatgtccccagcagaataagcatctattggacaatagtaaaaccgggagacatacttttgattaacagcacagggaatctaattgctcctcggggttacttcaaaatacgaagtgggaaaagctcaataatgagatcagatgcacccattggcaaatgcaattctgaatgcatcactccaaatggaagcattcccaatgacaaaccatttcaaaatgtaaacaggatcacatatggggcctgtcccagatatgttaagcaaaacactctgaaattggcaacagggatgcgaaatgtaccagagaaacaaactagaggcatatttggcgcaatcgcgggtttcatagaaaatggttgggagggaatggtggatggttggtacggtttcaggcatcaaaattctgagggaacaggacaagcagcagatctcaaaagcactcaagcagcaatcaaccaaatcaatgggaagctgaataggttgatcgggaaaaccaacgagaaattccatcagattgaaaaagaattctcagaagtagaagggagaattcaggacctcgagaaatatgttgaggacactaaaatagatctctggtcatacaacgcggagcttcttgttgccctggagaaccaacatacaattgatctaactgactcagaaatgaacaaactgtttgaaagaacaaagaagcaactgagggaaaatgctgaggatatgggcaatggttgtttcaaaatataccacaaatgtgacaatgcctgcatagggtcaatcagaaatggaacttatgaccatgatgtatacagagatgaagcattaaacaaccggttccagatcaaaggtgttgagctgaagtcaggatacaaagattggatcctatggatttcctttgccatatcatgttttttgctttgtgttgctttgttggggttcatcatgtgggcctgccaaaaaggcaacattaggtgcaacatttgcatttga

SEQ ID NO: 32341 - RNA, 1701 nt, synthetic construct; identical to SEQ ID NO: 32266
  misc_feature 1..1701: note = hemagglutinin__InfluenzaA__ABU92689
  source 1..1701: mol_type = other RNA

SEQ ID NO: 32342 - RNA, 1701 nt, synthetic construct
  misc_feature 1..1701: note = hemagglutinin__InfluenzaA__ABU92691
  source 1..1701: mol_type = other RNA
atgaagactatcattgctttgagctacattctatgtctggttttcgctcaaaaacttcccggaaatgacaacagcacggcaacgctgtgccttgggcaccatgcagtaccaaacggaacgatagtgaaaacaatcacgaatgaccaaattgaagttactaatgctactgagctggttcagatttcctcaacaggtggaatatgcgacagtcctcatcagatccttgatggagaaaactgcacactaatagatgctctattgggagaccctcagtgtgatggcttccaaaataagaaatgggacctttttgttgaacgcagcaaagcctacagcaactgttacccttatgatgtgccggattatgcctcccttaggtcactagttgcctcatccggcacactggagtttaacaatgaaagcttcgattggactggagtcactcagaatggaacaagctctgcttgcaaaaggagatctaataaaagtttctttagtagattgaattggttgacccacttaaaatacaaatacccagcattgaacgtgactatgccaaacaatgaaaaatttgacaaattgtacatttggggggttcaccacccgggtacggacagtgaccaaatcagcctatatgctcaagcatcaggaagaatcacagtctctaccaaaagaagccaacaaactgtaatcccgaatatcggatctagacccagggtaagggatgtctccagccgaataagcatctattggacaatagtaaaaccgggagacatacttttgattaacagcacagggaatctaattgctcctcggggttacttcaaaatacgaagtgggaaaagctcagtaatgagatcagatgcacccattggcaaatgcaattctgaatgcatcactccaaatggaagcattcccaatgacaaaccatttcaaaatgtcaacaggatcacatatggggcctgtcccagatatgttaagcaaaacactctgaaattggcaacagggatgcgaaatgtaccagagaaacaaactagaggcatatttggcgcaatcgcgggtttcatagaaaatggttgggagggaatggtggacggttggtacggtttcaggcatcaaaattctgagggcacaggacaagcagcagatctcaaaagcactcaagcagcaatcaaccaaatcaatgggaaactgaataggttaatcgggaaaacaaacgagaaattccatcagattgaaaaagaattctcggaagtagaaggaagaattcaggacctcgagaaatatgttgaggacactaaaatagatctctggtcatacaatgcggagcttcttgttgccctggagaaccaacatacaattgatctaactgactcagaaatgaacaaactgtttgaaagaacaaagaagcaactgagggaaaatgctgaggatataggcaatggttgtttcaaaatataccacaaatgtgacaatgcctgcatagggtcaatcagaaatggaacttatgaccataatgtgtacagagatgaagcattaaacaaccggttccagatcaaaggtgttgagctgaagtcgggatacaaagattggatcctatggatttcctttgccatatcatgttttttgctttgtgttgctttgttggggttcatcatgtgggcctgccaaaaaggcaacattaggtgcaacatttgcatttga

SEQ ID NO: 32343 - RNA, 1701 nt, synthetic construct
  misc_feature 1..1701: note = hemagglutinin__InfluenzaA__ABU92692
  source 1..1701: mol_type = other RNA
atgaagactatcattgctttgagctacattctatgtctggttttcgctcaaaaacttcccggaaatgacaacagcacggcaacgctgtgccttgggcaccatgcagtaccaaacggaacgatagtgaaaacaatcacgaatgaccaaattgaagttactaatgctactgagctggttcagatttcctcaacaggtggaatatgcgacagtccttatcagatccttgatggagaaaactgcacactaatagatgctctattgggagaccctcagtgtgatggcttccaaaataagaaatgggacctttttgttgaacgcagcaaagcctacagcaactgctacccttatgatgtgccggattatgcctcccttaggtcactagttgcctcatccggcacactggagtttaacaatgaaagcttcgattggactggagtcactcagaatggaacaagctctgcttgcaaaaggagatctaataaaagtttctttagtagattgaattggttgacccacttaaaatacaaatacccagcattgaacgtgactatgccaaacaatgaaaaatttgacaaattgtacatttggggggttcaccacccgggtacagacagtgaccaaatcagcctatatgctcaagcatcaggaagaatcacagtctctaccaaaagaagccaacaaactgtaatcccgaatatcggatctagacccagggtaagggatgtctccagccgaataagcatctattggacaatagtaaaaccgggagacatacttttgattaacagcacagggaatctaattgctcctcggggttacttcaaaatacgaagtgggaaaagctcaataatgagatcagatgcacccattggcaaatgcaattctgaatgcatcactccaaatggaagcattcccaatgacaaaccatttcaaaatgtaaacagaatcacatatggggcctgtcccagatatgttaagcaaaacactctgaaattggcaacagggatgcgaaatgtaccagagaaacaaactagaggcatatttggcgcaatcgcgggtttcatagaaaatggttgggagggaatggtggacggttggtacggtttcaggcatcaaaattctgagggcacaggacaagcagcagatctcaaaagcactcaagcagcaatcaaccaaatcaatgggaaactgaataggttaatcgggaaaacaaacgagaaattccatcagattgaaaaagaattctcggaagtagaaggaagaattcaggacctcgagaaatatgttgaggacactaaaatagatctctggtcatacaacgcggagcttcttgttgccctggagaaccaacatacaattgatctaactgactcagaaatgaacaaactgtttgaaagaacaaagaagcaactgagggaaaatgctgaggatatgggcaatggttgtttcaaaatataccacaaatgtgacaatgcctgcatagggtcaatcagaaatggaacttatgaccatgatgtgtacagagatgaagcattgaacaaccggtttcagatcaaaggtgttgagctgaagtcaggatacaaagattggatcctatggatttcctttgccatatcatgttttttgctttgtgttgctttgttggggttcatcatgtgggcctgccaaaaaggcaacattaggtgcaacatttgcatttga

SEQ ID NO: 32344 - RNA, 1701 nt, synthetic construct
  misc_feature 1..1701: note = hemagglutinin__InfluenzaA__ABU92693
  source 1..1701: mol_type = other RNA
atgaaggctatcattgctttgagctacattctatgtctggttttcgctcaaaaacttcccggaaatgacaacagcacggcaacgctgtgccttgggcaccatgcagtaccaaacggaacgatagtgaaaacaatcacgaatgaccaaattgaagttactaatgctactgagctggttcagatttcctcaacaggtgaaatatgcgacagtccccatcagatccttgatggagaaaactgcacactaatagatgctctattgggagaccctcagtgtgatggcttccaaaataagaaatgggacctttttgttgaacgcagcaaagcctacagcaactgttacccttatgatgtgccggattatgcctcccttaggtcactagttgcctcatccggcacactggagtttaacaatgaaagcttcgattggactggagtcactcagaatggaacaagctctgcttgcaaaaggagatctgataaaagtttctttagtagattgaattggttgacccacttaaaatacaaatacccagcattgaacgtaactatgccaaacaatgaaaaatttgacaaattgtacatttggggggttcaccacccgggtacggacagtgaccaaatcagcctatatgctcaagcatcaggaagaatcacagtctctaccaaaagaagccaacaaactgtaatcccgaatatcggatctagacccagggtaagggatgtctccagccgaataagcatctattggacaatagtaaaaccgggagacatacttttgattaacagcacagggaatctaattgctcctcggggttacttcaaaatacgaagtgggaaaagctcaataatgagatcagatgcacccattggcaaatgcaattctgaatgcatcactccaaatggaagcattcccaatgacaaaccatttcaaaatgtaaacaggatcacatatggggcctgtcccagatatgttaagcaaaacactctgaaattggcaacagggatgcgaaatgtaccagagaaacaaactagaggcatatttggcgcaatcgcgggtttcatagaaaatggttgggagggaatggtggacggttggtacggtttcaggcatcaaaattctgagggcacaggacaagcagcagatctcaaaagcactcaagcagcaatcaaccaaatcaatgggaaactgaataggttaatcgggaaaacaaacgagaaattccatcagattgaaaaagaattctcggaagtagaaggaagaattcaggacctcgagaaatatgttgaggacactaaaatagatctctggtcatacaacgcggagcttcttgttgccctggagaaccaacatacaattgatctaactgactcagaaatgaacaaactgtttgaaagaacaaagaagcaactgagggaaaatgctgaggatatgggcaatggttgtttcaaaatataccacaaatgtgacaatgcctgcatagggtcaatcagaaatggaacttatgaccatgatgtgtacagagatgaagcattaaacaaccggttccaaatcaaaggtgttgagttgaagtcaggatacaaagattggatcctatggatttcctttgccatatcatgttttttgctttgtgttgctttgttggggttcatcatgtgggcctgccaaaaaggcaacattaggtgcaacatttgcatttga

SEQ ID NO: 32345 - RNA, 1701 nt, synthetic construct
  misc_feature 1..1701: note = hemagglutinin__InfluenzaA__ABU92694
  source 1..1701: mol_type = other RNA
atgaagactatcattgctttgagctacattctatgtctggttttcgctcaaaaacttcccggaaatgacaacagcacggcaacgctgtgccttgggcaccatgcagtaccaaacggaacgatagtgaaaacaatcacgaatgaccaaattgaagttactaatgctactgagctggttcagagttcctcaacaggtggaatatgcgacagtcctcatcagatccttgatggagaaaactgcacactaatagatgctctattgggagaccctcagtgtgatggcttccaaaataagaaatgggacctttttgttgaacgcagcaaagcctacagcaactgttacccttatgatgtgccggattatgcctcccttaggtcactagttgcctcatccggcacactggagtttaacaatgaaagcttcaattggactggagtcactcaaaatggaacaagctctgcttgcaaaaggagatctaataacagtttctttagtagattgaattggttgacccacttaaaattcaaatacccagcattgaacgtgactatgccaaacaatgaaaaatttgacaaattgtacatttggggggttcaccacccgggtacggacaatgaccaaatcagcctatatgctcaagcttcaggaagaatcacagtctctaccaaaagaagccaacaaactgtaatcccgaatatcggatctagacccagggtaagggatatccccagcagaataagcatctattggacaatagtaaaaccgggagacatacttttgattaacagcacagggaatctaattgctcctcggggttacttcaaaatacgaagtgggaaaagctcaataatgagatcagatgcacccattggcaaatgcaattctgaatgcatcactccaaatggaagcattcccaatgacaaaccatttcaaaatgtaaacaggatcacatatggggcctgtcccagatatgttaagcaaaacactctgaaattggcaacagggatgcgaaatgtaccagagaaacaaactagaggcatatttggcgcaatcgcgggtttcatagaaaatggttgggagggaatggtggatggttggtacggtttcaggcatcaaaattctgagggaataggacaagcagcagatctcaaaagcactcaagcagcaatcaaccaaatcaatgggaagctgaataggttgatcgggaaaaccaacgagaaattccatcagattgaaaaggaattctcagaagtagaagggagaattcaggacctcgagaaatatgttgaggacactaaagtagatctctggtcatacaacgcagagcttcttgttgccctggagaaccaacatacaattgatctaactgactcagaaatgaacaaactgtttgaaagaacaaagaagcaactgagggaaaatgctgaggatatgggcaatggttgtttcaaaatataccacaaatgtgacaatgcctgcatagggtcaatcagaaatggaacttatgaccatgatgtatacagagatgaagcattaaacaaccggttccagatcaaaggtgttgagctgaagtcaggatacaaagattggatcctatggatttcctttgccatatcatgttttttgctttgtgttgctttgttggggttcatcatgtgggcctgccaaaaaggcaacattaggtgcaacatttgcatttga

SEQ ID NO: 32346 - RNA, 1701 nt, synthetic construct
  misc_feature 1..1701: note = hemagglutinin__InfluenzaA__ABU92695
  source 1..1701: mol_type = other RNA
atgaagactatcattgctttgagctacattctatgtctggttttcgctcaaaaacttcccggaaatgacaacagcacggcaacgctgtgccttgggcaccatgcagtaccaaacggaacgatagtgaaaacaatcacgaatgaccaaattgaagttactaatgctactgagctggttcagagttcctcaacaggtggaatatgcgacagtcctcatcagatccttgatggagaaaactgcacactaatagatgctctattgggagaccctcagtgtgatggcttccaaaataagaaatgggacctttttgttgaacgcagcaaagcctacagcaactgttacccttatgatgtgccggattatgcctcccttaggtcactaattgcctcatccggcacactggagtttaacaatgaaagcttcaattggactggagtcactcaaaatggaacaagctctgcttgcaaaaggagatctaatagcagtttctttagtagattgaattggttgacccacttaaaattcaaatacccagcattgaacgtgactatgccaaacaatgaagaatttgacaaattgtacatttggggggttcaccacccgggtacagacaatgaccaaatcagcctatatgctcaagcatcaggaagaatcacagtctctaccaaaagaagccaacaaactgtaatcccgaatatcggatctagaccccgggtaagggatatccccagcagaataagcatctattggacaatagtaaaaccgggagacatacttttgattaacagcacagggaatctaattgctcctcggggttacttcaaaatacgaagtgggaaaagctcaataatgagatcagatgcacccattggcaaatgcaattctgaatgcatcactccaaatggaagcattcccaatgacaaaccatttcaaaatgtaaacaggatcacatatggggcctgtcccagatatgttaagcaaaacactctgaaattggcaacagggatgcgaaatgtaccagagaaacaaactagaggcatatttggcgcaatcgcgggtttcatagaaaatggttgggagggaatggtggatggttggtacggtttcaggcatcaaaattctgagggaataggacaagcagcagatctcaaaagcactcaagcagcaatcgaccaaatcaatgggaagctgaataggttgatcgggaaaaccaacgagaaattccatcagattgaaaaagaattctcagaagtagaagggagaattcaggacctcgagaaatatgttgaggacactaaaatagatctctggtcatacaacgcggagcttcttgttgccctggagaaccaacatacaattgatctaactgactcagaaatgaacaaactgtttgaaagaacaaagaagcaactgagggaaaatgctgaggatatgggcaatggttgtttcaaaatataccacaaatgtgacaatgcctgcatagggtcaatcagaaatggaacttatgaccatgatgtatacagagatgaagcattaaacaaccggttccagatcaaaggtgttgagctgaagtcaggatacaaagattggatcctatggatttcctttgccatatcatgttttttgctttgtgttgctttgttggggttcatcatgtgggcctgccaaaaaggcaacattaggtgcaacatttgcatttga

SEQ ID NO: 32347 - RNA, 1701 nt, synthetic construct
  misc_feature 1..1701: note = hemagglutinin__InfluenzaA__ABU92696
  source 1..1701: mol_type = other RNA
atgaagactatcattgctttgggctacattctatgtctggttttcgctcaaaaacttcccggaaatgacaacagcacggcaacgctgtgccttgggcaccatgcagtaccaaacggaacgatagtgaaaacaatcacgaatgaccaaattgaagttactaatgctactgagctggttcagagttcctcaacaggtggaatatgcgacagtcctcatcagatccttgatggagaaaactgcacactaatagatgctctattgggagaccctcagtgtgatggcttccaaaataagaaatgggacctttttgttgaacgcagcaaagcctacagcaactgttacccttatgatgtgccggattatgcctcccttaggtcactaattgcctcatccggcacactggagtttaacaatgaaagcttcaattggactggagtcactcaaaatggaacaagctctgcttgcaaaaggagatctaatagcagtttctttagtagattgaattggttgacccacttaaaattcaaatacccagcattgaacgtgactatgccaaacaatgaagaatttgacaaattgtacatttggggggttcaccacccgggtacagacaatgaccaaatcagcctatatgctcaagcatcaggaagaatcacagtctctaccaaaagaagccaacaaactgtaatcccgaatatcggatctagacccagggtaagggatatccccagcagaataagcatctattggacaatagtaaaaccgggagacatacttttgattaacagcacagggaatctaattgctcctcggggttacttcaaaatacgaagtgggaaaagctcaataatgagatcagatgcacccattggcaaatgcaattctgaatgcatcactccaaatggaagcattcccaatgacaaaccatttcaaaatgtaaacaggatcacatatggggcctgtcccagatatgttaagcaaaacactctgaaattggcaacagggatgcgaaatgtaccagagaaacaaactagaggcatatttggcgcaatcgcgggtttcatagaaaatggttgggagggaatggtggatggttggtacggtttcaggcatcaaaattctgagggaataggacaagcagcagatctcaaaagcactcaagcagcaatcgaccaaatcaatgggaagctgaataggttgatcgggaaaaccaacgagaaattccatcagattgaaaaagaattctcagaagtagaagggagaattcaggacctcgagaaatatgttgaggacactaaaatagatctctggtcatacaacgcggagcttcttgttgccctggagaaccaacatacaattgatctaactgactcagaaatgaacaaactgtttgaaagaacaaagaagcaactgagggaaaatgctgaggatatgggcaatggttgtttcaaaatataccacaaatgtgacaatgcctgcatagggtcaatcagaaatggaacttatgaccatgatgtatacagagatgaagcattaaacaaccggttccagatcaaaggtgttgagctgaagtcaggatacaaagattggatcctatggatttcctttgccatatcatgttttttgctttgtgttgctttgttggggttcatcatgtgggcctgccaaaaaggcaacattaggtgcaacatttgcatttga

SEQ ID NO: 32348 - RNA, 1701 nt, synthetic construct
  misc_feature 1..1701: note = hemagglutinin__InfluenzaA__ABU92697
  source 1..1701: mol_type = other RNA
atgaagactatcattgctttgagctacattctatgtctggttttcgctcaaaaacttcccggaaatgacaacagcacggcaacgctgtgccttgggcaccatgcagtaccaaacggaacgatagtgaaaacaatcacgaatgaccaaattgaagttactaatgctactgagctggttcagagttcctcaacaggtggaatatgcgacagtcctcatcagatccttgatggagaaaactgcacactaatagatgctctattgggagaccctcagtgtgatggcttccaaaataagaaatgggacctttttgttgaacgcagcaaagcctacagcaactgttacccttatgatgtgccggattatgcctcccttaggtcactaattgcctcatccggcacactggagtttaacaatgaaagcttcaattggactggagtcactcaaaatggaacaagctctgcttgcaaaaggagatctaatagcagtttctttagtagattgaattggttgacccacttaaaattcaaatacccagcattgaacgtgactatgccaaacaatgaagaatttgacaaattgtacatttggggggttcaccacccgggtacatacaatgaccaaatcagcctatatgctcaagcatcaggaagaatcacagtctctaccaaaagaagccaacaaactgtaatcccgaatatcgggtctagacccagggtaagggacatccccagcagaataagcatctattggacaatagtaaaaccgggagacatacttttgattaacagcacagggaatctaattgctcctcggggttacttcaaaatacgaagtgggaaaagctcaataatgagatcagatgcacccattggcaaatgcaattctgaatgcatcactccaaatggaagcattcccaatgacaaaccatttcaaaatgtaaacaggatcacatatggggcctgtcccagatatgttaagcaaaacactctgaaattggcaacagggatgcgaaatgtaccagagaaacaaactagaggcatatttggcgcaatcgcgggtttcatagaaaatggttgggagggaatggtggatggttggtacggtttcaggcatcaaaattctgagggaataggacaagcagcagatctcaaaagcactcaagcagcaatcgaccaaatcaatgggaagctgaataggttgatcgggaaaaccaacgagaaattccatcagattgaaaaagaattctcagaagtagaagggagaattcaggacctcgagaaatatgttgaggacactaaaatagatctctggtcatacaacgcggagcttcttgttgccctggagaaccaacatacaattgatctaactgactcagaaatgaacaaactgtttgaaagaacaaagaagcaactgagggaaaatgctgaggatatgggcaatggttgtttcaaaatataccacaaatgtgacaatgcctgcatagggtcaatcagaaatggaacttatgaccatgatgtatacagagatgaagcattaaacaaccggttccagatcaaaggtgttgagctgaagtcaggatacaaagattggatcctatggatttcctttgccatatcatgttttttgctttgtgttgctttgttggggttcatcatgtgggcctgccaaaaaggcaacattaggtgcaacatttgcatttga

SEQ ID NO: 32349 - RNA, 1701 nt, synthetic construct
  misc_feature 1..1701: note = hemagglutinin__InfluenzaA__ABU92698
  source 1..1701: mol_type = other RNA
atgaagactatcattgctttgagctacattctatgtctggttttcgcccaaaaacttcccggaaatgacaacagcacggcaacgctgtgccttgggcaccatgcagtaccaaacggaacgatagtgaaaacaatcacgaatgaccaaattgaagttactaatgctactgagctggttcagagttcctcaacaggtggaatatgcgacagtcctcatcagatccttgatggagaaaactgcacactaatagatgctctattgggagaccctcagtgtgatggcttccaaaataagaaatgggacctttttgttgaacgcagcaaagcctacagcaactgttacccttatgatgtgccggattatgcctcccttaggtcactagttgcctcatccggcacactggagtttaacaatgaaagcttcaattggactggagtcactcaaaatggaacaagctctgcttgcaaaaggagatctaataacagtttctttagtagattgaattggttgacccacttaaaattcaaatacccagcattgaacgtgactatgccaaacaatgaaaaatttgacaaattgtacatttggggggttcaccacccgggtacggacaatgaccaaatcagcctatatgctcaagcttcaggaagaatcacagtctctaccaaaagaagccaacaaactgtaatcccgaatatcggatctagacccagggtaagggatatccccagcagaataagcatctattggacaatagtaaaaccgggagacatacttttgattaacagcacagggaatctaattgctcctcggggttacttcaaaatacgaagtgggaaaagctcaataatgagatcagatgcacccattggcaaatgcaattctgaatgcatcactccaaatggaagcattcccaatgacaaaccatttcaaaatgtaaacaggatcacatatggggcctgtcccagatatgttaagcaaaacactctgaaattggcaacagggatgcgaaatgtaccagagaaacaaactagaggcatatttggcgcaatcgcgggtttcatagaaaatggttgggagggaatggtggatggttggtacggtttcaggcatcaaaattctgagggaataggacaagcagcagatctcaaaagcactcaagcagcaatcaaccaaatcaatgggaagctgaataggttgatcgggaaaaccaacgagaaattccatcagattgaaaaagaattctcagaagtagaagggagaattcaggacctcgagaaatatgttgaggacactaaaatagatctctggtcatacaacgcggagcttcttgttgccctggagaaccaacatacaattgatctaactgactcagaaatgaacaaactgtttgaaagaacaaagaagcaactgagggaaaatgctgaggatatgggcaatggttgtttcaaaatataccacaaatgtgacaatgcctgcatagggtcaatcagaaatggaacttatgaccatgatgtatacagagatgaagcattaaacaaccggttccagatcaaaggtgttgagctgaagtcaggatacaaagattggatcctatggatttcctttgccatatcatgttttttgctttgtgttgctttgttggggttcatcatgtgggcctgccaaaaaggcaacattaggtgcaacatttgcatttga

SEQ ID NO: 32350 - RNA, 1701 nt, synthetic construct
  misc_feature 1..1701: note = hemagglutinin__InfluenzaA__ABU92699
  source 1..1701: mol_type = other RNA
atgaagactatcattgctttgagctacattctatgtctggttttcgctcaaaaacttcccggaaatgacaacagcacggcaacgctgtgccttgggcaccatgcagtaccaaacggaacgatagtgaaaacaatcacgaatgaccaaattgaagttactaatgctactgagctggttcagagttcctcaacaggtggaatatgcgacagtcctcatcagatccttgatggagaaaactgcacactaatagatgctctattgggagaccctcagtgtgatggcttccaaaataagaaatgggacctttttgttgaacgcagcaaagcctacagcaactgttacccttatgatgtgccggattatgcctcccttaggtcactagttgcctcatccggcacactggagtttaacaatgaaagcttcaattgggctggagtcactcaaaacggaacaagctctgcttgcaaaaggagatctaataacagtttctttagtagattgaattggttgacccacttaaaattcaaatacccagcattgaacgtgactatgccaaacaatgaaaaatttgacaaattgtacatttggggggttcaccacccgggtacggacaatgaccaaatcttcctgtatgctcaagcatcaggaagaatcacagtctctaccaaaagaagccaacaaactgtaatcccgaatatcggatctagacccagagtaaggaatatccccagcagaataagcatctattggacaatagtaaaaccgggagacatacttttgattaacagcacagggaatctaattgctcctaggggttacttcaaaatacgaagtgggaaaagctcaataatgagatcagatgcacccattggcaaatgcaattctgaatgcatcactccaaatggaagcattcccaatgacaaaccatttcaaaatgtaaacaggatcacatacggggcctgtcccagatatgttaagcaaaacactctgaaattggcaacagggatgcgaaatgtaccagagaaacaaactagaggcatatttggcgcaatcgcgggtttcatagaaaatggttgggagggaatggtggatggttggtacggtttcaggcatcaaaattctgagggaataggacaagcagcagatctcaaaagcactcaagcagcaatcgatcaaatcaatgggaagctgaataggttgatcgggaaaaccaacgagaaattccatcagattgaaaaagaattctcagaagtagaagggagaattcaggacctcgagaaatatgttgaggacactaaaatagatctctggtcatacaacgcggagcttcttgttgccctggagaaccaacatacaattgatctaactgactcagaaatgaacaaactgtttgaaaaaacaaagaagcaactgagggaaaatgctgaggatatgggcaatggttgtttcaaaatataccacaaatgtgacaatgcctgcataggatcaatcagaaatggaacttatgaccatgatgtatacagagatgaagcattaaacaaccggttccagatcaagggcgttgagctgaagtcaggatacaaagattggatcctatggatttcctttgccatatcatgttttttgctttgtgttgctttgttggggttcatcatgtgggcctgccaaaaaggcaacattaggtgcaacatttgcatttga

SEQ ID NO: 32351 - RNA, 1701 nt, synthetic construct
  misc_feature 1..1701: note = hemagglutinin__InfluenzaA__ABU92700
  source 1..1701: mol_type = other RNA
atgaagactatcattgctttgagctacattctatgtctggttttcgctcaaaaacttcccgaaaatgacaacagcacggcaacgctgtgccttgggcaccatgcagtaccaaacggaacgatagtgaaaacaatcacgaatgaccaaattgaagttactaatgctactgagctggttcagagttcctcaacaggtggaatatgcgacagtcctcatcagatccttgatggagaaaactgcacactaatagatgctctattgggagaccctcagtgtgatggcttccaaaataagaaatgggacctttttgttgaacgcagcaaagcctacagcaactgttacccttatgatgtgccggattatgcctcccttaggtcactagttgcctcatccggcacactggagtttaacaatgaaagcttcaattggactggagtcactcaaaacggaacaagctctgcttgcaaaaggagatctaataacagtttctttagtagattgaattggttgacccacttaaaattcaaatacccagcattgaacgtgactatgccaaacaatgaaagatttgacaaattgtacatttggggggttcaccacccgggtacggacaatgaccaaatcttcctgtatgctcaagcatcaggaagaatcacagtctctaccaaaagaagccaacaaactgtaatcccgaatatcggatctagacccagagtaaggaatatccccagcagaataagcatctattggacaatagtaaaaccgggagacatacttttgattaacagcacagggaatctaattgctcctaggggttacttcaaaatacgaagtgggaaaagctcaataatgagatcagatgcacccattggcaaatgcaattctgaatgcatcactccaaatggaagcattcccaatgacaaaccatttcaaaatgtaaacaggatcacatatggggcctgtcccagatatgttaagcaaaacactctgaaattggcaacagggatgcgaaatgtaccagagaaacaaactagaggcatatttggcgcaatcgcgggtttcatagaaaatggttgggagggaatggtggatggttggtacggtttcaggcatcaaaattctgagggaataggacaagcagcagatctcaaaagcactcaagcagcaatcgatcaaatcaatgggaagctgaataggttgatcgggaaaaccaacgagaaattccatcagattgaaaaagaattctcagaagtagaagggagaattcaggacctcgagaaatatgttgaggacactaaaatagatctctggtcatacaacgcggagcttcttgttgccctggagaaccaacatacaattgatctaactgactcagaaatgaacaaactgtttgaaaaaacaaagaagcaactgagggaaaatgctgaggatatgggcaatggttgtttcaaaatataccacaaatgtgacaatgcctgcataggatcaatcagaaatggaacttatgaccatgatgtatacagagatgaagcattaaacaaccggttccagatcaagggcgttgagctgaagtcaggatacaaagattggatcctatggatttcctttgccatatcatgttttttgctttgtgttgctttgttggggttcatcatgtgggcctgccaaaaaggcaacattaggtgcaacatttgcatttga

SEQ ID NO: 32352 - RNA, 1701 nt, synthetic construct
  misc_feature 1..1701: note = hemagglutinin__InfluenzaA__ABU92701
  source 1..1701: mol_type = other RNA
atgaagactatcattgctttgagctacattctatgtctggttttcgctcaaaaacttcccgaaaatgacaacagcacggcaacgctgtgccttgggcaccatgcagtaccaaacggaacgatagtgaaaacaatcacgaatgaccaaattgaagttactaatgctactgagctggttcagagttcctcaacaggtggaatatgcgacagtcctcatcagatccttgatggagaaaactgcacactaatagatgctctattgggagaccctcagtgtgatggcttccaaaataagaaatgggacctttttgttgaacgcagcaaagcctacagcaactgttacccttatgatgtgccggattatgcctcccttaggtcactagttgcctcatccggcacactggagtttaacaatgaaagcttcaattggactggagtcactcaaaacggaacaagctctgcttgcaaaaggagatctaataacagtttctttagtagattgaattggttgacccacttaaaattcaaatacccagcattaaacgtgactatgccaaacaatgaaagatttgacaaattgtacatttggggggttcaccacccgggtacggacaatgaccaaatcttcctgtatgctcaagcatcaggaagaatcacagtctctaccaaaagaagccaacaaactgtaatcccgaatatcggatctagacccagagtaaggaatatccccagcagaataagcatctattggacaatagtaaaaccgggagacatacttttgattaacagcacagggaatctaattgctcctaggggttacttcaaaatacgaagtgggaaaagctcaataatgagatcagatgcacccattggcaaatgcaattctgaatgcatcactccaaatggaagcattcccaatgacaaaccatttcaaaatgtaaacaggatcacatatggggcctgtcccagatatgttaagcaaaacactctgaaattggcaacagggatgcgaaatgtaccagagaaacaaactagaggcatatttggcgcaatcgcgggtttcatagaaaatggttgggagggaatggtggatggttggtacggtttcaggcatcaaaattctgagggaataggacaagcagcagatctcaaaagcactcaagcagcaatcgatcaaatcaatgggaagctgaataggttgatcgggaaaaccaacgagaaattccatcagattgaaaaagaattctcagaagtagaagggagaattcaggacctcgagaaatatgttgaggacactaaaatagatctctggtcatacaacgcggagcttcttgttgccctggagaaccaacatacaattgatctaactgactcagaaatgaacaaactgtttgaaaaaacaaagaagcaactgagggaaaatgctgaggatatgggcaatggttgtttcaaaatataccacaaatgtgacaatgcctgcataggatcaatcagaaatggaacttatgaccatgatgtatacagagatgaagcattaaacaaccggctccagatcaagggcgttgagctgaagtcaggatacaaagattggatcctatggatttcctttgccatatcatgttttttgctttgtgttgctttgttggggttcatcatgtgggcctgccaaaaaggcaacattaggtgcaacatttgcatttga

SEQ ID NO: 32353 - RNA, 1701 nt, synthetic construct; identical to SEQ ID NO: 31116
  misc_feature 1..1701: note = hemagglutinin__InfluenzaA__ABU92702
  source 1..1701: mol_type = other RNA

SEQ ID NO: 32354 - RNA, 1701 nt, synthetic construct
  misc_feature 1..1701: note = hemagglutinin__InfluenzaA__ABU92703
  source 1..1701: mol_type = other RNA
atgaagactatcattgctttgagctacattctatgtctggttttcgctcaaaaacttcccggaaatgacaacagcacggcaacgctgtgccttgggcaccatgcagtaccaaacggaacgatagtgaaaacaatcacgaatgaccaaattgaagttactaatgctactgagctggttcagagttcctcaacaggtggaatatgcgacagtcctcatcagatccttgatggagaaaactgcacactaatagatgctctattgggagaccctcagtgtgatggcttccaaaataagaaatgggacctttttgttgaacgcagcaaagcctacagcaactgttacccttatgatgtgccggattatgcctcccttaggtcactagttgcctcatccggcacactggagtttaacaatgaaagcttcaattggactggagtcactcaaaatggaacaagctctgcttgcaaaaggagatctaataacagtttctttagtagattgaattggttgacccacttaaaattcaaatacccagcattgaacgtgactatgccaaacaatgaaaaatttgacaaattgtacatttggggggttcaccacccgggtacggacaatgaccaaatcttcctgtatgctcaagcatcaggaagaatcacagtctctaccaaaagaagccaacaaactgtaatcccgaatatcggatctagacccagagtaaggaatatccccagcagaataagcatctattggacaatagtaaaaccgggagacatacttttgattaacagcacagggaatctaattgctcctaggggttacttcaaaatacgaagtgggaaaagctcaataatgagatcagatgcacccattggcaaatgcaattctgaatgcatcactccaaatggaagcattcccaatgacaaaccatttcaaaatgtaaacaggatcacatacggggcctgtcccagatatgttaagcaaaacactctgaaattggcaacagggatgcgaaatgtaccagagaaacaaactagaggcatatttggcgcaatcgcgggtttcatagaaaatggttgggagggaatggtggatggttggtacggtttcaggcatcaaaattctgagggaataggacaagcagcagatctcaaaagcactcaagcagcaatcgatcaaatcaatgggaagctgaataggttgatcgggaaaaccaacgagaaattccatcagattgaaaaagaattctcagaagtagaagggagaattcaggacctcgagaaatatgttgaggacactaaaatagatctctggtcatacaacgcggagcttcttgttgccctggagaaccaacatacaattgatctaactgactcagaaatgaacaaactgtttgaaaaaacaaagaagcaactgagggaaaatgctgaggatatgggcaatggttgtttcaaaatataccacaaatgtgacaatgcctgcataggatcaatcagaaatggaacttatgaccatgatgtatacagagatgaagcattaaacaaccggttccagatcaagggcgttgagctgaagtcaggatacaaagattggatcctatggatttcctttgccatatcatgttttttgctttgtgttgctttgttggggttcatcatgtgggcctgccaaaaaggcaacattaggtgcaacatttgcatttga

SEQ ID NO: 32355 - RNA, 1701 nt, synthetic construct
  misc_feature 1..1701: note = hemagglutinin__InfluenzaA__ABU92704
  source 1..1701: mol_type = other RNA
atgaagactatcattgctttgagctacattctatgtctggttttcgctcaaaaacttcccggaaatgacaacagcacggcaacgctgtgccttgggcaccatgcagtaccaaacggaacgatagtgaaaacaatcacgaatgaccaaattgaagttactaatgctactgagctggttcagagttcctcaacaggtggaatatgcgacagtcctcatcagatccttgatggagaaaactgcacactaatagatgctctattgggagaccctcagtgtgatggcttccaaaataagaaatgggacctttttgttgaacgcaacaaagcctacagcaactgttacccttatgatgtgccggattatgcctcccttaggtcactagttgcctcatccggcacactggagtttaacaatgaaagcttcaattggactggagtcactcaaaatggaacaagctctgcttgcaaaaggagatctaataacagtttctttagtagattgaattggttgacccacttaaaattcaaatacccagcattgaacgtgactatgccaaacaatgaaaaatttgacaaattgtacatttggggggttcaccacccgggtacggacaatgaccaaatcttcctgtatgctcaagcatcaggaagaatcacagtctctaccaaaagaagccaacaaactgtaatcccgaatatcggatctagacccagagtaaggaatatccccagcagaataagcatctattggacaatagtaaaaccgggagacatacttttgattaacagcacagggaatctaattgctcctaggggttacttcaaaatacgaagtgggaaaagctcaataatgagatcagatgcacccattggcaaatgcaattctgaatgcatcactccaaatggaagcattcccaatgacaaaccatttcaaaatgtaaacaggatcacatacggggcctgtcccagatatgttaagcaaaacactctgaaattggcaacagggatgcgaaatgtaccagagaaacaaactagaggcatatttggcgcaatcgcgggtttcatagaaaatggttgggagggaatggtggatggttggtacggtttcaggcatcaaaattctgagggaataggacaagcagcagatctcaaaagcactcaagcagcaatcgatcaaatcaatgggaagctgaataggttgatcgggaaaaccaacgagaaattccatcagattgaaaaagaattctcagaagtagaagggagaattcaggacctcgagaaatatgttgaggacactaaaatagatctctggtcatacaacgcggagcttcttgttgccctggagaaccaacatacaattgatctaactgactcagaaatgaacaaactgtttgaaaaaacaaagaagcaactgagggaaaatgctgaagatatgggcaatggttgtttcaaaatataccacaaatgtgacaatgcctgcataggatcaatcagaaatggaacttatgaccatgatgtatacagagatgaagcattaaacaaccggttccagatcaagggcgttgagctgaagtcaggatacaaagattggatcctatggatttcctttgccatatcatgttttttgctttgtgttgctttgttggggttcatcatgtgggcctgccaaaaaggcaacattaggtgcaacatttgcatttga

SEQ ID NO: 32356 - RNA, 1701 nt, synthetic construct
  misc_feature 1..1701: note = hemagglutinin__InfluenzaA__ABU92705
  source 1..1701: mol_type = other RNA
atgaagactatcattgctttgagctacattctatgtctggttttcgctcaaaaacttcccggaaatgacaacagcacggcaacgctgtgccttgggcaccatgcagtaccaaacggaacgatagtgaaaacaatcacgaatgaccaaattgaagttactaatgctactgaactggttcaaagttcctcaacaggtggaatatgcgacagtcctcatcagatccttgatggagaaaactgcacactaatagatgctctattgggagaccctcagtgtgatggcttccaaaataagaaatgggacctttttgttgaacgcagcaaagcctacagcaactgttacccttatgatgtgccggattatgcctcccttaggtcactaattgcctcatccggcacactggagtttaacaatgaaagcttcaattggactggagtcactcaaaatggaacaagctctgcttgcaaaaggagatctaataacagtttctttagtagattgaattggttgacccacttaaaattcaaatacccagcattgaacgtgactatgccaaacaatgaagaatttgacaaattgtacatttggggggtccaccacccgggtacggacaatgaccaaatcagcctatatgctcaagcaccaggaagaatcacagtctctaccaaaagaagccaacaaactgtaatcccgaatatcggatctagaccccgagtaagggatattcccagcagaataagcatctattggacaatagtaaaaccgggagacatacttttgattaacagcacagggaatctaattgctcctcggggttacttcaaaatacgaagtgggaaaagctcgataatgagatcagatgcacccattggcaaatgcaaatctgaatgcatcactccaaatggaagcattcccaatgacaaaccatttcaaaatgtaaacaggatcacatatggggcctgtcccagatatgttaagcaaaacactctgaaattggcaacagggatgcgaaatgtaccagagaaacaaactcgaggcatatttggcgcaatcgcggggttcatagaaaatggttgggagggaatggtggatggttggtacggtttcaggcatcaaaattctgagggaataggacaagcagcagatctcaaaagcactcaagcagcaatcgaccaaatcaatgggaagctgaataggttgatcgggaaaaccaacgagaaattccatcagattgaaaaagaattctcagaagtagaagggagaattcaggacctcgagaaatatgttgaggacactaaaatagatctctggtcatacaacgcagagcttcttgttgccctggagaaccaacatacaattgatctaactgactcagaaatgaacaaactgtttgaaagaacaaagaagcaactgagggaaaatgctgaggatatgggcaatggttgtttcaaaatataccacaaatgtgacaatgcctgcatagggtcaatcagaaatggaacttatgaccatgatgtatacagagatgaagcattaaacaaccggttccggatcaaaagtgttgagctgaagtcaggatacaaagattggatcctatggatttcatttgccatatcatgttttttgctttgtgttgctttgttggggttcatcatgtgggcctgccaaaaaggcaacattaggtgcaacatttgcatttga

SEQ ID NO: 32357 - RNA, 1701 nt, synthetic construct
  misc_feature 1..1701: note = hemagglutinin__InfluenzaA__ABU92706
  source 1..1701: mol_type = other RNA
atgaagactatcattgctttgagctacattctatgtctggttttcgctcaaaaacttcccggaaatgacaacagcacggcaacgctgtgccttgggcaccatgcagtaccaaacggaacgatagtgaaaacaatcacgaatgaccaaattgaagttactaatgctactgagctggttcagatttcctcaacaggtggaatatgcgacagtcctcatcagatccttgatggagaaaactgcacactaatagatgctctattgggagaccctcagtgtgatggcttccaaaataagaaatgggacctttttgttgaacgcagcaaagcctacagcaactgttacccttatgatgtgccggattatgcctcccttaggtcactagttgcctcatccggcacactggagtttaacaatgaaagcttcgattggactggagtcactcagaatggaacaagctctgcttgcaaaaggagatctaataaaagtttctttagtagattgaattggttgacccacttaaaatacaaatacccagcattgaacgtgactatgccaaacaatgaaaaatttgacaaattgtacatttggggggttcaccacccgggtacggacagtgaccaaatcagcctatatgctcaagcatcaggaagaatcacagtctctaccaaaagaagccaacaaactgtaatcccgaatatcggatctagacccagggtaagggatgtctccagtcgaataagcatctattggacaatagtaaaaccgggagacatacttttgattaacagcacagggaatctaattgctcctcggggttacttcaaaatacgaagtgggaaaagctcaataatgagatcagatgcacccattggcaaatgcaattctgaatgcatcactccaaatggaagcattcccaatgacaaaccatttcaaaatgtaaacaggatcacatatggggcctgtcccagatatgttaagcaaaacactctgaaattggcaacagggatgcgaaatgtaccagagaaacaaactagaggcatatttggcgcaatcgcgggtttcatagaaaatggttgggagggaatggtggacggttggtacggtttcaggcatcaaaattctgagggcacaggacaagcagcagatctcaaaagcactcaagcagcaatcaaccaaatcaatgggaaactgaataggttaatcgggaaaacaaacgagaaattccatcagattgaaaaagaattctcggaagtagaaggaagaattcaggacctcgagaaatatgttgaggacactaaaatagatctctggtcatacaacgcggagcttcttgttgccctggagaaccaacatacaattgatctaactgactcagaaatgaacaaactgtttgaaagaacaaagaagcaactgagggaaaatgctgaggatatgggcaatggttgtttcaaaatataccacaaatgtgacaatgcctgcatagggtcaatcagaaatggaacttatgaccatgatgtgtacagagatgaagcattaaacaaccggttccagatcaaaggtgttgagctgaagtcaggatacaaagattggatcctatggatttcctttgccatatcatgttttttgctttgtgttgctttgttggggttcatcatgtgggcctgccagaaaggcaacattaggtgcaacatttgcatttga

SEQ ID NO: 32358 - RNA, 1701 nt, synthetic construct; identical to SEQ ID NO: 32266
  misc_feature 1..1701: note = hemagglutinin__InfluenzaA__ABU92707
  source 1..1701: mol_type = other RNA
